United States Patent Application Publication US 2003/0073623 A1 - sequence listing, part 5

SEQ ID NO: 22934 - DNA, 385 bp, Homo sapiens
gcacgagcaggactgcagtgcactgcgggccttggagtgtccagtggggacactggtgtgggaaggggcagcacctggggagtccctgcctctcctccctgggacaatagtgtgcatgccacccggggtcctacaggcaggtgctgggaaaggcctggccagcaggtagcctgtgtgtttgacaaacagcagctggcagcgctgcctcctgcccacattcctgccacccgacatcaaagctggcgtgtgacctttccagccatgcgatattccccttggaagatgcttccccaggctataaatttgttctcacaaagcaacatcaataaatcaaaactgtctctcccaaaaaaaaaaaaaaaaaaactcgggggggggccgggac

SEQ ID NO: 22935 - DNA, 495 bp, Homo sapiens
  misc_feature (1)...(495): n = A,T,C or G
agtgccgggaccngnncctagganccagnnaggcgggaaatnccgccgagcaggcccgctatgaggaggtgagcgtgtccggcttcgaggagttccaccgggccgtggaacagcacaatggcaagaccattttcgcctactttacgggttctaaggacgccggggggaaaagctggtgccccgactgcgtgcaggctgaaccagtcgtacgagaggggctgaagcacattagtgaaggatgtgtgttcatctactgccaagtaggagaaaagccttattggaaagatccaaataatgacttcagaaaaaacttgaaagtaacagcagtgcctacactacttaagtatggaacacctcacaaactggtagaatctgagtgtcttcaggccaacctggtggaaatgttgttctctgaagattaagattttaggatggcaatcatgtcttgatgtcctgatttgctctagtatcaataaactgtatacttgctttgaa

SEQ ID NO: 22936 - DNA, 492 bp, Homo sapiens
  misc_feature (1)...(492): n = A,T,C or G
tgggggnnccccnnaggtaagntnnnnccttgccccgcgctgttagaattcggcacgagggcggcttgtgcagcaatggccaagatcaaggctcgagatcttcgcgggaagaagaaggaggagctgctgaaacagctggacgacctgaaggtggagctgtcccagctgcgcgtcgccaaagtgacaggcggtgcggcctccaagctctctaagatccgagtcgtccggaaatccattgcccgtgttctcacagttattaaccagactcagaaagaaaacctcaggaaattctacaagggcaagaagtacaagcccctggacctgcggcctaagaagacacgtgccatgcgccgccggctcaacaagcacgaggagaacctgaagaccaagaagcagcagcggaaggagcggctgtacccgctgcggaagtacgcggtcaaggcctgaggggcgcattgtcaataaagcacagctggctgagaaaaaaaaaaa

SEQ ID NO: 22937 - DNA, 465 bp, Homo sapiens
  misc_feature (1)...(465): n = A,T,C or G
gaattgatcgcgntgcggaanacgttggagcccttcttataggcgctcggagctcatcacaggaaatagctcgagtttgaggcagcacttctgaatgcagaacagattcatctgtgttaaagctgaaatgtcaaaaggtatcacattttttttatgaaaacgaagagagatgtttaaagtttatttttcagcaggcgaggtggctcacgcctataatcccagcactttgggaggccaaggcgggtgaatcacctgaggtcaggagttcgaaaccagcctttcccaacatggggaaaccccatctctactataaatacaaaaattagccaggcatggtagcgcacacctgtaattccagctactcgggaggctaatgcaggggaatcgcttgaacctgggaggtggaggctacagtgagctgagatcgtgccattgcgctccagcctangtgacagagcaagactc

SEQ ID NO: 22938 - DNA, 475 bp, Homo sapiens
  misc_feature (1)...(475): n = A,T,C or G
catagatccgcccgtagtgaattcggtacgagtttacatccatatttattaaatatcccttgtttttcattcaggagataccagaagggcccaggtcctggtgcacagcaaagcttctcattctggaagcagagaacctggcacccaaacctagggccagaggtctgtctgccagacccacagcccaggcccagaactggaaattcctgactccttccagaagggcaacaagcgaggtttcaaacttgctcaattaaggtgccaaggcttgcattcaaattcagctccactcctcactaggtgtattaacacaggcaggcctcatccctgcacaggttccaaggaacagcctggcagccactgaaggtatcttctctcaggtcaggtcccctctagctccagcatcttgggattgctgctgtagaaacactgacggatggcaggcactcttgtgccatgtgctgggtcagggacn

SEQ ID NO: 22939 - DNA, 408 bp, Homo sapiens
ggaattcggcacgagctgaaattagcagcattagaaagtaataaaatccaagacctggaaaagaaggagggacgtatagatgatttgctcagggctaactgtgatctcagacggcaaatagatgaacaacaaaaattacttgaaaaatacaaagaacgattaaataagtgcatatcaatgagcaagaaacttcttattgaaaagagtacacaagaaaagctgtcaagcagagagaagagtatgcaagatcgattacgcctcgggcactttacaacagttagacatggcgcttcatttactgaacaatggacagatggttttgcatttcagaatcttgtgaagcaacaagaatgggtgaatcagcaaagggaagatattgaaaggcaaaggaaacttctagccaaacgc

SEQ ID NO: 22940 - DNA, 503 bp, Homo sapiens
  misc_feature (1)...(503): n = A,T,C or G
ngagggacnnggnnnaattgannaattgagcggctttaggaattcgccacgagaacatcttcgagcatcggcagctccggaggccggggtaactggcagcaggtaggaaactatgtgaaagaatctcctgatgtcataatttccgggtgtcaccggaacatttgatcatcattcctttggcaattccagccttctgtggaaaggccagtagaaagcattgatttattcacctctacaggaatcagactcagcctcttttggttttcagtgaagtatgccttttcaatttggaacccagccaaggaggtttccagtggaaggaggagattcttcaattgagctggaacctgggctgagctccagtgctgcctgtaatgggaaggagatgtcaccaaccaggcaactccggaggtgccctggaagtcattgcctgacaataactgatgttcccgtcactgtttatgcaacaacgagaaagccacctgcacaaagcagcaaggaaa

SEQ ID NO: 22941 - DNA, 477 bp, Homo sapiens
  misc_feature (1)...(477): n = A,T,C or G
ctttgaccgcccgttgatccgcgctgcaggcttgctaggagaagggaagacgcccgagacgctgcttccccagaagtgctggggcagggaggcccaggagatgagagagaaggtccgagtaggtgatagaagacaagggggagaccgagccggaggctgaggaaaggaagagggcacggagttgccaggagcaaaccaaagtgaagagagagataggaagctgcctcggggccaccccttgcaaagggggtgtgtcccacaaacgctgctatgggtggggtggggggctggggtgctgcgtanccagtgtttgactttcttttcaagtgggggaaagtgggagaggactgagagtgaggcaagttctccccagcccctgtccgtctgtctgtctgtctgtggtgggttctggttcttgtgaggcatggtacgatcataagtcattcccctccccttccaggcctcctgctatatttg

SEQ ID NO: 22942 - DNA, 498 bp, Homo sapiens
  misc_feature (1)...(498): n = A,T,C or G
agaggacgggnccnganccagggancctgcnagctccgggaanncgcacgagcggttggatcacactcgtgcagtcaattatttcagcaaggttaaacagctaccactggtgaaaccgtatttgcgttcagttcagaaccataacaacaaatctgtgaatgaatcattgaacaatctttttattacagaagaagattatcaggctctgcgaacatcaatagatgcttatgacaactttgacaatatctcgcttgctcagcgtttggaaaaacatgaactcattgagttcaggagaattgctgcttatctcttcaaaggcaacaatcgctggaaacagagtgtagagctgtgcaagaaagacagcctttacaaggatgcaatgcagtatgcttctgaatctaaagatactgaattggctgaagaactcctgcagtggtttttgcaggaagaaaaaagagagtgctttggagcttgtctggttacctgttacgatctttt

SEQ ID NO: 22943 - DNA, 469 bp, Homo sapiens
  misc_feature (1)...(469): n = A,T,C or G
cattgcccgcctgcggattcggcacgagctgaaataaaccgactgtagaaaggcattatttttgggaaacccgaggatggactcgctattagatgatattaaggaattgtagttaatctcgtcgcgtgtatctgttaagggctataggctgaagtatttaatgctgaaaccatatgatggtttctttaaaatacccccaaccggccgggcgctgtgactcaaacctgtaatcccagcacttgggaagccgaagcgggaggatcgcttgagcccaggagttcgagaccagcctgagcaacatagtgagacctcgtctgtacaaaaaattttttttaattatttatttaattaaattagcttggcgtggccgctcacacctgtagtcccagctacttgggaagctaacgctggaagatcgctcgaacccaggaggtcgaagctgcagtggggccatgaccctgccactgcn

SEQ ID NO: 22944 - DNA, 472 bp, Homo sapiens
  misc_feature (1)...(472): n = A,T,C or G
ntttgaactttcgctncgcctgcaggaattcggcacgagctgtgctcctccttcaccttctgccatgattgtgaggcctccacagccatgtggaactccatgagtatgactatgtgctgagtcctgtgagtcctcctactgaatcatcaaagccaggggggaagctgtttttccctctttggggtctcagagagattggtggcaaggactcctgggaagagaaaagctgaaggacactctggcaagaggcatcagagtcaaagctctacacaaggacagtggctgtgatggttaaaggaagggctggatgtgaaaatagctgatggaggagtcagagagcctggcaagtgattgttgagatgaaaagaaatgaaaatgccaagatccccagcctgttactggaaggaaagtgactccattaatcccttcagaaggacaggttctgcttagaggattggtgtgaaaataaggt

SEQ ID NO: 22945 - DNA, 479 bp, Homo sapiens
  misc_feature (1)...(479): n = A,T,C or G
agttagaccnccnnttgnnnnnnnaaactgatccgcgctgcaggaattcggcacgaggttaaaagggaaagcgtgccaggctccagcctatgggaccgttgttctgctgccacctggaaatcctcccagagctcaaagcctgctgctctgggcaaagctgacaaggaaggacagattcagcagccaaccaaggagcataccttcatttgatttccttaaggcaaaagcactggctaaacaaagggagactatctgggagaaggtgttttcaccctttcaagctggggtgctttcaccaccgggaagtgccacgctgctttccacgctggaacaaggactcacttcctaaggccttggttccccaggagctgttggccagaagcctccctcggtgccctgcctcatgggcctcttcgttgagcatctcacaacgtggcagcttacttcatcagtgcaagcaagcaagagcaagagagagg

SEQ ID NO: 22946 - DNA, 342 bp, Homo sapiens
caaaacacccgtggagccggaggtggcaattcaccgaattcgaatcaccctaacaagccgcaacgtaaaatccttggaaaaggtgtgtgctgacttgataagaggcgcaaaagaaaagaatctcaaagtgaaaggaccagttcgaatgcctaccagactttgagaatcactacgagaaaaactccttgtggtgaaggttctaagacgtgggatcgtttccagatgagaattcacaagcgactcattgacttgcacagtccttctgagattgttaagcagattacttccatcagtattgagccaggagttgaggtggaagtcaccattgcagatgcttaagtc

SEQ ID NO: 22947 - DNA, 478 bp, Homo sapiens
  misc_feature (1)...(478): n = A,T,C or G
attgcccgcctgcggcnnnnnatatccccgggctgcaggaattcggcacgagggtccagaagccacctcggggtgactgagcggaaggccaggcagggccttcctcctcttcctcctccccttcctcgggaggctccccagaccctggcatgggatgggctgggatcttctctgtgaatccacccctggctacccccaccctggctaccccaacggcatcccaaggccaggtggaccctcagctgagggaaggtacgagctccctgctggagcctgggacccatggcacaggccaggcagcccggaggctgggtggggcctcagtgggggctgctgcctgacccccagcacaataaaaatgaaacgtgaaaaaaaaaaaaaaaaaaaaaaaaaaaaaaaaaaaaaaaaaaaaaatcttggggggggggcgccggcccccattcccctttaaggggggggaaaaaaaaacccgggggcg

SEQ ID NO: 22948 - DNA, 501 bp, Homo sapiens
  misc_feature (1)...(501): n = A,T,C or G
ggggggtnnnnnnaattgatcgacttgaggaacctggcacgaggctgngtccatggctgtgatggcattctccactcagcagttcctagcatcccacacccaggtctcactgaaagaaaggggaacaggccatggcagtcagtgcttacagaggttttctagctttgtttcctacctgccaaaaaggctaatgcaagatgcatccacttatgggctgtatcaggtgaatagaaaataaccatttgccaagatttggaaagacagagagctctctggacacgggttcgatggagcttgcacctctctgagagctgaagtcaagtctcaccctctctccatactccctggcctagtgtgctctgggcagcaggtaggaagggacagggacctctcatctcaagggctgccccaaagggccctcagggaccatgggcctgttaggaccccagcaccccagtgtccatccttgaagtcaaaggtcacgactgtggggggccagct

SEQ ID NO: 22949 - DNA, 455 bp, Homo sapiens
  misc_feature (1)...(455): n = A,T,C or G
natagaccgccttgcaggaactctgcacgagggcattttaagagtcagttgggtaggcagtcatggatcacgtaatgcagtttgttgagccaagtcggcagtttgtaaaggactccattcggctgggtaaaagatgcactaaacctgatagaaaagaattccagaagattgccatggcaacagcaataggatttgctataatgggattcattggcttctttgtgaaattgatccatattcctattaataacatcattggtggtggctgaatacattttggaagagagtttttcatcttagagattggtgaacaagtgtgagggtgtgagaaactcacagaatacaaatttgcctgtatgttttgcgggttcttttttttcctttcaagagagcccctatttctaaattaaagtaatttccctgtttgaaaactataaacacaaaagctgtggcca

SEQ ID NO: 22950 - DNA, 468 bp, Homo sapiens
  misc_feature (1)...(468): n = A,T,C or G
ngggtgttggcgctgatgattcgcacgagccagcttctttgaacaatgtgtgctctgtatggttttttttggtatgacaactaattaagcaactgacattgaactgagaattctacaaactataaaacattaatttttgaaggtaatttagttttgtggctgggcattcactgaagtcttaggacttctttgcagacaactgactgggtatatataggaatgaatctggctttagggttaaatcatttaaggtccttttataggcaggcactagtaactaaaactgaaaactaagtaagtttatttttgaggaatgttgttaaaaatgtctttaggaagtcactaaaacttaattggaagaaaaaatcatgatgcttatacaataaatatgaataaatgttatataaggaaactcacctatttgaaatcatggctatattggttttattttctagattccaaaaatac

SEQ ID NO: 22951 - DNA, 471 bp, Homo sapiens
ggattgcccgcctgcggcaattgttactttattgcaagatggtagaattaattacaaatttaaactataacctgttaatctttagtcaggcagcaagtttttataaaggcaaactgcttattcagaagtgatcacggaacaactcaaaggcagagcaagaaggatgagaaacatctgactggccgatagagatttcgttctctcactatatgaaacaaacttttcatttttaggaagggtaaactataacttcagtagacaccaacacagaaagactttgtcaaatagactagtttccatttagtcagtcaactgtttctagctgtctcaattgggatagatacatttacataactggctgtgcttgagccttctttgccagcagctttaggtccgcaatgcacttggcaattgtctccttttcctgctgtgtggagatgctttgcaccacgtgcttctccacccaattta

SEQ ID NO: 22952 - DNA, 470 bp, Homo sapiens
catgacgcccctattgacccggtttcggaattcgccacgagtttaggagaaacacttttgggaataattttattgaataacaaccaccactcaattacactaagcttcagaaattgttggatttgtttaattttgctgtgtacctatacattgtttagaaagtttcttttggcttaaactgaccatttccccccttctttttgagttttccatgattaaacttgcccaaataaaaacataacaatccatatgcaaagcatatctgccaccacctcccactgcttcctgggccgcaaacagaaaaataaacagtgattaaaaaaaatgccaaagtgaaggtttctctttcttctatcacaacatagttgggtagttcccttaaagtacatcattgctataagttggtatcactgcaaatctcaagtcccaaataatctctttttctggatagaaagttattcaaaagggag

SEQ ID NO: 22953 - DNA, 341 bp, Homo sapiens
  misc_feature (1)...(341): n = A,T,C or G
nattgaccgccttgaagaattcggcacgagagtaactggtttacatcacagctgccccaggctgaggcgtcccccggaccagtgaagctggagccagggtgtaaggcaaggaggtgctgtgtggctccagaggggctggccaggtcccatggaatcagaaggttacacacacacgtgcacactccccgctctggggaaggaactgttctcagaggctccaatttatattcatctgggggttcacggaaaagccagaacctgctgttttcagggtgggtgatgtaaatatagtgtgtacataataaagcaaatatattttaaaaaaaaaaaaaaaaaaaaaa

SEQ ID NO: 22954 - DNA, 476 bp, Homo sapiens
ctagaccgcctgtagatccggctgcaggaattcagcacgaggtcgtaagggctgaggatttttggtccgcacgctcctgctcctgactcaccgctgttcgctctcgccgaggaacaagtcggtcaggaagcccgcgcgcaacagccatggcttttaaggataccggaaaaacacccgtggagccggaggtggcaattcaccgaattcgaatcaccctaacaagccgcaacgtagaatccttggaaaaggtgtgtgctgacttgataagaggcgcacaagaaaagaatctcaaagtgaaaggaccagttcgaatgcctaccaagactttgagaatcactacgagaagaactccttgtggtgaaggttctaagacgtgggatcgtttccagatgagaattcacaagcgactcattgacttagcacagccttctgagattgttaagcagattacttccatcagtattgagccaggagtg

SEQ ID NO: 22955 - DNA, 491 bp, Homo sapiens
  misc_feature (1)...(491): n = A,T,C or G
aggacggcggnnnnggaattganntccntaactgatcgccttcaggaattcggcacgagcaaagtgctgggattcctttctttatttctgtagaatctattttatggttggtattttgggggaagatttcgatgggttccacattcttgctttagttgttgtagagggatttgggtgtttctacccaaggcattggtctagcttttcctacaatgaacctatctttggaggttcaagctccccaccttcccccactgtggtgacctgtggccacttgcagaagggatggtgcctgacccactgccctagccccacgctatgcaccaaacttgttctccccgtcctggtccagggctggggtctttagagactgacagcctctgccccaggcctgagtccttagcaagggttgggtaaggaggttttaagggagaaggtccagtccttagcctttgaaatacaaagctcttctgacactgaatttggatgca

SEQ ID NO: 22956 - DNA, 465 bp, Homo sapiens
  misc_feature (1)...(465): n = A,T,C or G
ggctgaccgcctgcnggaanccactgaagagccttcggagggncacctcaccccacatacaatcactggaagtctcaacatccttttcatggaagactcactagtaatatggtctgcaaacactgtgaacaccagagtcctgttcgatttgatacctttgatagcctttcactaagtattccagccgccacatggggtcacccattgaccctggaccactgccttcaccacttcatctcatcagaatcagtgcgggatgttgtgtgtgacaactgtacaaagattgaagccaagggaacgttgaacggggaaaaggtggaacaccagaggaccacttttgttaaacagttaaaactagggaagctccctcagtgtctctgcatccacctacagcggctgagctggtccagccacggcatgcctctgaagcggcatgagcacgtgcagttcaatgagttcctgatg

SEQ ID NO: 22957 - DNA, 451 bp, Homo sapiens
  misc_feature (1)...(451): n = A,T,C or G
ntagaccgcctgcagatctcgcacgagcccacatggcggcctcagcaaaaaagaagaataagaaggggaagactatctccctaacagactttctggctgaggatgggggtactggtggaggaagcacctatgtttccaaaccagtcagctgggctgatgaaacggatgacctggaaggagatgtttcgaccacttggcacagtaacgatgacgatgtgtatagggcgcctccaattgaccgttccatccttcccactgctccacgggctgctcgggaacccaatatcgaccggagccgtcttcccaaatcgccaccctacactgcttttctaggaaacctaccctatgatgttacagaagagtcaattaaggaattctttcgaggattaaatatcagtgcagtgcgtttaccacgtgaacccagcaatccagagaggttgaaaggttttgg

SEQ ID NO: 22958 - DNA, 442 bp, Homo sapiens
  misc_feature (1)...(442): n = A,T,C or G
cgggcggngnnttnnccctcgacggctgtatagttcggcactagctcaatagtggtttttgtccataagtattaacttataattttggagagtgataggtatggttgctggttgattagcaataagattatgtagccttaaactagctagaagagtttgcatgggtgaggcaacaggctgttaacaaaaagaaactggaaatacagtttcccctgtttgtttctcctgtttgtacaatctgctttaaaaacaagtgaacatgcaccatgtcagtcatggtgaatcggccaacagccagcccttgccagttgacatcacagtctaagatgggaaactggtacagatagacatgaagagagcttagcagtggttgaggtggtgactaaatatacagtcattgaataaataccgtgtagcaaatgtaaaaaaaaaaaaaaaaaaa

SEQ ID NO: 22959 - DNA, 469 bp, Homo sapiens
  misc_feature (1)...(469): n = A,T,C or G
aatcgagcggcctgaatagaacggcactagagaaagnccacccagggcaagttgatgttgggggaaagcagaagtcaagccagccgcgggccccacacgccctgacccgctcgaccgacttgtcccttaaatgtgtcttggatcccgcagtgatgacgtgagccagccaggcccgaaagggtgaggccagtgcagagaagcttcccaggggattcctgggttcccccgaaagacaagcgaggtcattgcagttcacccgatgttgctcctgtcccgtgcgtcccggggaggctgtccttggtccgaggctgctcgttgcagcccctcccctgctggcggatacgatgcgtggggtccccctccccacccagccccggtcacgtcgccgtgttccgcctgtgcctgtgacgtccctgtggacctgtgagccatcccccccccttatttctgctctgattactggatgaag

SEQ ID NO: 22960 - DNA, 455 bp, Homo sapiens
  misc_feature (1)...(455): n = A,T,C or G
natagaccgcctggagaactctgcacgaggtgcttggagcatgaggatgagaaggtgaatatgtactgtgtgaccgatgaccagttaatctgtgccttgtgtaaactggttgggcggcaccgcgatcatcaggtggcagctttgagtgagcgctatgacaaattgaagcaaaacttagagagtaacctcaccaaccttattaagaggaacacagaactggagacccttttggctaaactcatccaaacctgtcaacatgttgaagtcaatgcatcacgtcaagaagccaaattgacagaggagtgtgatcttctcattgagatcattcagcaaagacgacagattattggaaccaagatcaaagaagggaaggtgatgaggcttcgcaaactggctcagcagattgcaaactgcaaacagtgcattgagcggtcagcatcactcatctcccaagn

SEQ ID NO: 22961 - DNA, 494 bp, Homo sapiens
  misc_feature (1)...(494): n = A,T,C or G
tggtgtttaatattggttatgagcgaaaggggnntttgatctcgtacggcattcggacgaggcgagctgtctcggtcccacgtgtgcgagttgctacgatggaagttaaagggaaaaagcaattcacaggaaagagtacaaagacagcacaagaaaaaaacagatttcataaaaatagtgattctggttcttcaaagacatttccaacaaggaaagttgctaaagaaggtggacctaaagtcacatctaggaactttgagaaaagtatcacaaaacttgggaaaaagggtgtaaagcagttcaagaataagcagcaaggggacaaatcaccaaagaacaaattccagccggcaaataaattcaacaagaagagaaaattccagccagatggtagaagcgatgaatcagcagccaagaagcccaaatgggatgacttcaaaaagaagaagaaagaactgaagcaaagcagacaactcagtgataaaaccaactan

SEQ ID NO: 22962 - DNA, 472 bp, Homo sapiens
  misc_feature (1)...(472): n = A,T,C or G
gggagttgccnnnnngttnnnaatattgatnctcttggttagacccgcgctgcaggaattcggcacgaggggaagacgctgctggtgaaacggctgcaggaggtgagctcccgggatgggaaaggcgacctgggggagccgccctcgacacggcccacggtttggggacgacatccctggaatggaaggcctggagaacagacatcacagtcatctgcccttgggaggcctttaaccacctggagctgcacgagctggcccaatatggcatcatctagcacgaggccctgctgaagtccagaccctccccctcctgcccactgtgctctaaaccctgctcaggattcctgttgaggagatgcctccctagcccagatggcacctggacaccaggatgggactgcaacctcaggtctccccctacatattaataccagtcaccaggagcccaccacctccctctaggatgccc

SEQ ID NO: 22963 - DNA, 468 bp, Homo sapiens
  misc_feature (1)...(468): n = A,T,C or G
gggggccccgatcatcgtgangcattcggcacgaggtggactctgcgccccgccccctgcagccgtacttgcgcctcatgcggttggacaagcccattggaacctggcttctgtatttaccatgtacctggagcattggtttggcagctgaaccaggttgttttccagattggtacatgctctccctctttggcactggagctattctgatgcgtggagcaggctgtactattaatgacatgtgggaccaggactatgataaaaaggttacaagaacagccaatcgtccaatagccgctggagacatttcaacttttcagtcctttgtttttcttgggggacagctaaccctggcactgggtgttcttctgtgtctaaattactacagtatagctctgggagcaggatccttacttcttgtcatcacctacccactaatgaaaagaatttcatactggcctcaactan

SEQ ID NO: 22964 - DNA, 475 bp, Homo sapiens
  misc_feature (1)...(475): n = A,T,C or G
cctcgaccccccntttgacccgcgctgcaggaattcggcacgagatgtcccaccagaccggcatccaagattgatccgaaattcgggggagcgaaggaaattggctttcgaggcggcctggttgaagggggcgtgccttccaccgtccccgacagtcgcccaactttcccccttttggtcacgtagggaagagctgggacagtggaggcgactggggcttcagtacgctgtcgagaaccagcaagtgaagatgttaaagagatctttgccagagccagaaatggaaagtacagacttctgaaaatatctattgaaaatgagcaacttgtgattggatcatatagtcagccttcagattcctgggataaggattatgattcctttgttttacccctgttggaggacaaacaaccatgctatatattattcaagttagattctcagaatgcccacggatatgaatggatattcattg

SEQ ID NO: 22965 - DNA, 490 bp, Homo sapiens
  misc_feature (1)...(490): n = A,T,C or G
ggacggcggggcngccttganntccccttatgatcgccttcggaattcggcacgaggaaacatgtattggttattctaacagacatgagttcttatgctgaagcacttcgagaggtttcagcagccagggaagaggtacctggtcgacgaggttttccaggttacatgtatacagatttagccacgatatatgaacgcgctgggcgagtggaagggagaaacggctcgattactcaaatccctattctaaccatgcctaatgatgatatcactcaccccatcccagacttgactggctacattacagaggggcagatctatgtggacagacagctgcacaacagacagatttatccacctatcaatgtgctgccctcactatcacggttaatgaagtctgctattggagaagggatgaccaggaaggatcatgccgatgtatctaaccagctatatgcgtgctatgctattggaaaggatgtgcaagccn

SEQ ID NO: 22966 - DNA, 500 bp, Homo sapiens
  misc_feature (1)...(500): n = A,T,C or G
agggttcnnnntttgtgcgcctgcggaattcggcacgaggaactttgttggctgaatcattctcatttacttaattgaggagtaggagactaaaagaatgttcactctttgaatttcctggataagagttctggagatggcagcttattggacacatggattttcttcagatttgcacttactgctagctctgctttttatgcaggagaaaagcccagagttcactgtgtgtcagaacaactttctaacaaacatttattaatccagcctctgcctttcattaaatgtaaccttttgccttccaaattaaagaactccatgccactcctccaaaaaaaannnnnnnaaaaaaaaaaaaaaaaaaaaaaaaaaaaaaanaanannnnnnnnannnnnnnnnnnnnnnnnnnnggggggggggggccccccccccccctccccttttaggggggtgttaaaacctcgccgggggcgggtttaaaaaacggggctgggggaaa

SEQ ID NO: 22967 - DNA, 484 bp, Homo sapiens
  misc_feature (1)...(484): n = A,T,C or G
tggcgggggttnaaattgacggcttgctgtatcngactagatctctcgcgacaactggcacaagcgccgcanaaccgggggcaagagaaagccctaccacaagaagcggaagtatgagttggggcgcccagctgccaacaccaagattggcccccgccgcatccacacagtccgtgtgcggggaggtaacaagaaataccgtgccctgaggttggacgtggggaatttctcctggggctcagagtgttgtactcgtaaaacaaggatcatcgatgttgtctacaatgcatctaataacgagctggttcgtaccaagaccctggtgaagaattgcatcgtgctcatcgacagcacaccgtaccgacagtggtacgagtcccactatgcgctgcccctgggccgcaagaagggagccaagctgactcctgaggaagaagagattttaaacaaaaaacgatctaaaaaaattcagacgagatatgat

SEQ ID NO: 22968 - DNA, 471 bp, Homo sapiens
  misc_feature (1)...(471): n = A,T,C or G
gcgccccatagacnctgtncccgctgcaggaattcggcacgaggtaacttctacagttctcccttccacttccctaagtctctcttcagctgtgacttatccaccacatagcccagtaagtcttcagttttggctgggcatgatggtgagcgcctgcagtcccagctacttgggaggctaagcccagttcaaggctgcagtgaactatgatggtgccactgcattccagcctgggtgacagaatgaaatcctggcacaaaaaaaaaaaaaagtacccaggcttggggggggaaccctgttgccccacctgtcccgtaggctgaggcacaaaattcacttaaccctggaagggggaggttgctgtaacctaaccccaccccactgcactccaccctgggggacagggaaactttgtctcattaattaaaaaatattttttnaaaaaaaaaaaaaaaaaaaaaaaaaaaaaaa

SEQ ID NO: 22969 - DNA, 514 bp, Homo sapiens
  misc_feature (1)...(514): n = A,T,C or G
acgatgttnnccnngggnnnnnnnnnatttgatcgccttcggatntggcacgagcagccatcaggtaagccaagatgggtgcatacaagtacatccaggagctatggagaaagaagcagtctgatgtcatgcgctttcttctgagggtccgctgctggcagtaccgccagctctctgctctccacagggctccccgccccacccggcctgataaagcgcgccgactgggctacaaggccaagcaaggttacgttatatataggattcgtgttcgccgtggtggccgaaaacgcccagttcctaagggtgcaacttacggcaagcctgtccatcatggtgttaaccagctaaagtttgctcgaagccttcagtccgttgcagaggagcgagctggacgccactgtggggctctgagagtcctgaattcttactgggttggtgaagattccacatacaaattttttgaggttatcctcattgatccattccataaagctatcagaagaaatcctga

SEQ ID NO: 22970 - DNA, 490 bp, Homo sapiens
  misc_feature (1)...(490): n = A,T,C or G
aataaaatatagacgaaaaccgaaaanatttgaaattcgctccgcctgcaggaattcggcacgagcccccatcccctgcttcccttggaggcagagggctcccttgactacctttgttcctcttctttgaacactgacccttggacaacatttatcataatttgtcataaccactgctgagtggccttgaggacgaaccccgcagggagcaagcagtacagtggcattcccagggggaccagcagctacccaaggagaaccatgcatgaacagtatcagtcgtctgggctcatgctgggatgtcgcagtgctcctgttgcaactcctcccagccagccaggtttgctgggggccaggctgggtgtcctcacaggagtgagggctacacccaattccaaaagcctgagaagagagaagtggagggggaggcgagtgtgtgaataaaggctcccatcnggaanaaaaaaaaaaaaaaaaaaaaaaaaaaaaa

SEQ ID NO: 22971 - DNA, 404 bp, Homo sapiens
tgagagagagagagagagagagagagagagagagagagagagagagagagagagagagagagagagagagagagagagagagagagagagagagagagagagagagagagaggggcgccccccctctctctttcctctctgtgtgtctctcacacaaatatcccctaagagtgtgtgtgtggcacacctatagacgcgtggatattttgtggagggtttctcggggagacacactgccccagcccgtgctaggcgctctgtgaatatcatacagtatatatatatgtgtgctccccccccccctctctctatatgtgggacacacacaatagaggccggtggactcacacacacgtgtgtgtcacatatctttctgtgccccacacgcgagagatctcacagcg

SEQ ID NO: 22972 - DNA, 407 bp, Homo sapiens
gaattccgcacgagccacagtgaggaggcgacccagggcgaagagatgaatcggagccaggaggtgacccgggacgaggagtcgacccgcagcgaggaggtgaccagggaggaaatggcggcagctgggctcaccgtgactgtcacccacagcaatgagaagcacgaccttcatgttacctcccagcagggcagcagtgaaccagttgtccaagacctggcccaggttgttgaagaggtcataggggttccacagtcttttcagaaactcatatttaagggaaaatctctgaaggaaatggaaacaccgttgtcagcacttggaatacaagatggttgccgggtcatgttaattgggaaaaagaacagtccacaggaagaggttgaactaaagaagttgaaacattt

SEQ ID NO: 22973 - DNA, 497 bp, Homo sapiens
  misc_feature (1)...(497): n = A,T,C or G
cgcccgtgaccgcctgcggaaactgactnccgttgaagaatncggcacgaggcagtacgagctggagatgtaaagcagctttcagaaatagtggtacgtggagccagcattaatgaacttgatgttctgcataagtttacccctttacattgggcagcacattctggaagtttggagtgtcttcattggctgctctggcatggagctgatatcacacacgtaacaacgagaggttggacagcatctcacatagctgcaatcaggggtcaggatgcttgtgtacaggctcttataatgaatggagcaaatctgacagcccaggatgaccggggatgcactcctttacatcttgctgcaactcatggacattctttcactttacaaataatgctccgaagtggagtggatcccagtgtgactgataagagagaatggagacctgtgcattatgcagcttttcatgggcggcttggctgcttgcaacttctttgtaaatg

SEQ ID NO: 22974 - DNA, 479 bp, Homo sapiens
  misc_feature (1)...(479): n = A,T,C or G
tataaataaacggaaaggganaatttgacctcctgcggcgtgtgcaccttttacagcagtgtctcattcacatctcacaatggcctaggaggttggtgctattccctgcccatttctgggatgaggaacctggcaccaaggtcacatatgtgcagtggggaagctgagatttgaacccaggctggctgactccaaagcctgtgctttgagactgttctggaggtggctgataagagtagagtttcaaaatctctttaaaccttcctaaagcaatgattgttttatgtttaaagctatttctagtatgaggaaaaaaagtgatttggcaatagacgtcaagagtctttaaaatgttccttctccctgattctgtcatctgcttctgaaatcttgtcctaaggacataatttaaagtttaggaaactactttctgcacaaaaaatgtcctcagtgctatttagtaatagtgaaaacctggn

SEQ ID NO: 22975 - DNA, 501 bp, Homo sapiens
  misc_feature (1)...(501): n = A,T,C or G
agcgccttnnnnnanttaaggaccgtcgtgccgaattcgccacgaggttccaggagcttaaagtagcaacagcagaagcaatgaccaagctacaggaccctctggttttatttgaatccgagtctctgagaatggttttacaggagtggctttcacatttagaaaaaacatttgccatgaaggacttttcaggtgtttcagatactgacaactcatccatgaaattgaaccaggatgtgctattagttaatgaatcaaaaaagggaatattagatgaagataatgaaaaagaaaaaagggactctttaggcaatgaagaatctgttgataaaacagcatgtgaatgtgtaaggagtccaagggagtctttggatgacctgtttcaaatatgttctccatgcgccattgcaagtggtcttcggaacgacctggctgaattgacaacattatgtttggagttgaatgtattgaattctaagatcaaaagcaccagtggacatg

SEQ ID NO: 22976 - DNA, 483 bp, Homo sapiens
  misc_feature (1)...(483): n = A,T,C or G
aaagaaaatttgatcgcctgttganccgcctgcagaataccgcacgatgggtaccgctctgctgacccagctccctttaatcacgctggcttggctctggtaccaaatagttgggattaccgaagagtccccttccttgcgtgtctgcacggatgctgtgactgccacctgcgtcctcgtcaagtgcccgagctcgccgccgtgtgtgctgcgctgagtgagttatgaggtgcctttcccggaaccctcctctcgcctggacccaagagaggcgacagctgtggctggggctcttggtttacacatggtctggactggatcgggtgctttaaaatagatatttagttcaatggtgcttatgggggagatgggactagaactcacgtgtgagacttgtgtggatgggataagtaaacatatggctcttcaagccttttgcttcttttgctctgttaccactcgtcactgtctccatcgttaaag

SEQ ID NO: 22977 - DNA, 494 bp, Homo sapiens
cattgacccgcctgcaggaattcggcacgagggggtgctctcagaaggaacctgtgaaagcctttatcagtcatttattggctgtgagaagttctctgggagtgtgggtacatttgaaggcaagtgacttcagttgagggcaagtctctggaaaagaggctgtaggcatctggcagctaccatgcatggtagtgtgttgggggtgggggtcctgggcactggctgtgtgaagggatctggcagggcaccacagcgccccctactgaaccatcaggatgtcagtggcatataaagccatgcagctggaggggccactgagattgcttctgagtattactgagaagcatcagaatagagccatggatggagcccttgagctctctgggaaacgggaaatcagccataggactgagaaggagctaccttacagtcagagaaaaccaatagagtgtggcggcctggaatctgagctttcttatataaacctcattctc

SEQ ID NO: 22978 - DNA, 467 bp, Homo sapiens
  misc_feature (1)...(467): n = A,T,C or G
ngtggatnnnnaccttgacctcgtgcgcgttaccacacacttgactacggatgtgatcaacactaacaaggaaacaaattcaaggacaacctgtctttgagccagggcaggcctcagacaccctgcctgtggccccgcctccacttcatcctgcccggaatgccagtgctccgagctcagacagaggaagccctgcagaaagttccatcaggctgtttcctaaaggatgtgtgaacgggagatgatgcactgtgttttgaaagttgtcattttaaagcattttagcacagttcatagtccacagttgatgcagcatcctgagattttaaatcctgaagtgtgggtggcgcacacaccaagtagggagctagtcaggcagtttgcttaaggaacttttgttctctgtctcttttccttaaaattgggggtaaggagggaaggaagagggaaagagatgactaactaaa

SEQ ID NO: 22979 - DNA, 487 bp, Homo sapiens
  misc_feature (1)...(487): n = A,T,C or G
agctgggnnnccttgacctcgatcgctntgcggaatncgccacgagaacaatggacaacaccaagcatatattaaactatctgatgcccatcattgaccaggtgaatccagagctccatgacttcatgcagagtgctgaggtagggaccatctttgccctcagctggctcatcacctggtttgggcatgtcctgtctgacttcaggcacgtcgtgcgggtatatgacttcttcctggcctgccacccactgatgccgatttactttgcagccgtgattgtgttgtatcgcgagcaggaagtcctggactgtgactgtgacatggcctcggtccaccacctgttgtcccagatccctcaggacttgccctatgagacactgatcagcagagcaggagacctttttgttcagtttcccccatccgaacttgctcgggaggccgctgcccaacagcaagctgagaggacggcagcctctactttcatagn

SEQ ID NO: 22980 - DNA, 486 bp, Homo sapiens
  misc_feature (1)...(486): n = A,T,C or G
agcgggtnnaattgacattcgtgtagcaattcggcacgagctgatcccttggagtagttctgaggcatgatgagtcatccgtgtgtgtctcttttgggccatattaattcagccagaactgaacacctgacccaagggcagcaagcaatcatcagagcatagagctgacagaacatgatggaccacggacaccaccaggccttccagatctgaaatgcaaacaaggaaacagaagcttctaggcatcagaaggtgtggggagcagcacagtactcaaaggagtgaggagcgtggcccctgctgggaggaaggcctggccatggtatgttcttggatttctggcagcagccctcattggtccacgtgcgtccccactacagactccttgacttgagccnagctgagtgggtctctactcttttctattgtgttttgccacttggctgcttcctggccaagtcgcacctgactgcatgaacacctgtt

SEQ ID NO: 22981 - DNA, 506 bp, Homo sapiens
  misc_feature (1)...(506): n = A,T,C or G
tgtggatttttatgacgtctcgtggacttcgcacgagcggaaacttangggccacgtgagccgcggccacggccgcataggcaagcaccggaagcaccccggcggccgcggtaatgctggtggtctgcatcaccaccggatcaacttcgacaaataccacccaggctactttgggaaagttggtatgaagcattaccacttaaagaggaaccagagcttctgcccaactgtcaaccttgacaaattgtggactttggtcagtgaacagacacgggtgaatgctgctaaaaacaagactggggctgctcccatcattgatgtggtgcgatcgggctactacaaagttctgggaaagggaaagctcccaaagcagcctgtcatcgtgaaggccaaattcttcagcagaagagctgaggagaagattaagagtgttgggggggcctgtgtcctggtggcttgaagccacatggagggagtttcattaaatgctaactactttnntcaaa

SEQ ID NO: 22982 - DNA, 458 bp, Homo sapiens
  misc_feature (1)...(458): n = A,T,C or G
agagttccggnagtaaaaaaatgatagcctgcgatgaacacatcaattcctagcctggatcccaaaaaggtacaggcagcagttgcacatagggttggaaaatttcttttgggaaggggaagccatcccagcctttaccacccaatgtgtctcccatgctgggcatcctaggccactttgcttagagggcattaaaggtgccatgaaaggtagactctgaaccactttgatccctctgaagtaggtgactgatgcctccttatgcccaggctctggcaacagtcttactgaagaacattcccagtgcccctggctaggggcagagggcactgccaggctgtgttcagttagcacagctcacctcattaggagctcagcctctctcctcactctgcctctttgtgtctctttttctcctctctgagcctttgtctattgtgttcctgtcacccaccctt

SEQ ID NO: 22983 - DNA, 473 bp, Homo sapiens
  misc_feature (1)...(473): n = A,T,C or G
cgatgggggnnnnnaattgaaatcgatccgcgctgcacgattcggcacgagccagcgccaccgatgaggccagagatgagctgacggaaatcttcaagaagatccggaggaaaagggagtttcgggctgatgctcgggccgtcatttccctgatggagatggggttcgacgagaaagaggtgatagatgccctcagagtgaacaacaaccagcagaatgccgcgtgcgagtggctgctgggggaccggaagccctctccggaggagctggacaagggcatcgaccccgacagtcctctctttcaggccatcctggataacccggtggtgcagctgggcctgaccaacccgaaaacattgctagcatttgaagacatgctggagaacccactgaacagcacccagtggatgaatgatccagaaacggggcctgtcatgctgcagatctctagaatcttccagacactaaatcgc

SEQ ID NO: 22984 - DNA, 486 bp, Homo sapiens
  misc_feature (1)...(486): n = A,T,C or G
aaaaaatgaaagggaaaaggaaaaatttgatnctcgatccgcctgcaggatcctgtctacctgcgggagcgcacccctgcccgtgactacaacaactcctactacggcctgatgctttttggacaccccctcctggtatcagtgccccgggaccgcttcacctgggagggcctgtataacgttctgatgtaccggctctcacgctacgtgaccaaacccaactcatatgatgaggacgatggggatgagaaagaagatgacgaggaggataaagatgacgttcctgggccctcaactgggggcagcctccgagaccctgagccagagcaggctgggcccatctctggagtcacgaacaggtgcccgttcctcctggacaattgccttggcacatctcactggcccccaaggcgacgacacaagcagctgttcaccctgcagacggcgaactccaatgggaccagcgaccgcacaacctaccctgaa

SEQ ID NO: 22985 - DNA, 474 bp, Homo sapiens
  misc_feature (1)...(474): n = A,T,C or G
agcgccccatagannnttgacgncgctgcaggaattcggcacgaggaaactgatgcaattgacaaacgtgtccagggctaaagcagaagatgcactgtctgaaatgaagtctcagtattcaaaagtgttgaatgagttgacccagctcaaacaactggtggatgcacaaaaagagaactctgtctctatcacagaacatttgcaagtgataaccacgctgcggactgcagcaaaagagatggaagaaaaaataagcaatcttaaggaacaccttgcaagcaaggaagtggaagtagcacagctggagaaacaactcttagaacagaaagctgctatgactgatgcaatggtacctcggtcttcctatgaaaaactccagtcatccttagagagtgaagtgagtgtgttggcatcgaaattaaaggaatctgtgaaagagaaagagaaggtccattcagaggttgtccagattag

SEQ ID NO: 22986 - DNA, 482 bp, Homo sapiens
  misc_feature (1)...(482): n = A,T,C or G
gaatggcnnnntttcgcccgcctgtggaattccgctcgagcagaccctacctacaggaggcctagacttagagccttttgagagcttccgtcttgtttaatctaggtgcaatctagaggtcctgaaacaaggagcacagttccagcttcccccaatcacttctaaacagtgactgcagccttgtttagaatcactatgaaaacctgcaccccggctgactactgggatccataagggggccgtgtcaaagggactaactagtggactccatcagtaggccctggaattcaggattgttcacatcctcttggtgccaaggacctggctgaagaccagctcttctgatccagaggttttcagcaaacagcatttgaaacaaaagcacagctgctctgtttgacaccanactgtggctccagattccagtagaagccaaatgcttttcttttacagctaggtgcctgtatcccaagtacttggga

SEQ ID NO: 22987 - DNA, 517 bp, Homo sapiens
  misc_feature (1)...(517): n = A,T,C or G
tagtttgttgtcccccgcnnnnnagcccaaattgatcgccttagngattggcacgcgccgccgatcaggcgccaatatgcagctctttgtccgcgcccaggagctacacaccttcgaggtgaccggccaggaaacggtcgcccagatcaaggctcatgcatcctcactggagggcattgccccggaagatcaagtcgtgctcctggcaggcgcgcccctggaggatgaggccactctgggccagtgcggggtggaggccctgactaccctggaagtagcaggccgcatgcttggaggtaaagtccatggttccctggcccgtgctggaaaagtgagaggtcagactcctaaggtggccaaacaggagaagaagaagaagaagactggtcggcctaaacggcggatgcagtacaaccggcgctttgtcaacgttgtgcccacctttggcaacaagaagggccccaatgccaactcttaagtcttttgtaattctggctttctctaataaaaaagccac

SEQ ID NO: 22988 - DNA, 536 bp, Homo sapiens
  misc_feature (1)...(536): n = A,T,C or G
nggagatcgatcgccggctgcaggaattcggcacgagaggaatttgatcatagtaactgcaagacagagggctgggctgaccagatcgttctgcagtgggagcgtgtgactgcggaagctgtgaagccacgggagacctcggagcctagagcagcagctcagcgcttctatgggaagcggtctcgagcagaagccccactgaagtgtcccctggcagacacccacatgaactcttccgagaaactccagttctataaagagaaagccccagattgccatgggccagtgttgaaacacgaagctatctcaagccaggagtcaaagaagagcaagaagagaccttttgaggagtcagagacagaacagaataactcttcacaaccttcaaagcagaaatatgtatgtcttgctgtggaagactgggacttgttaaattcctattgattagtagatacaagttgacctttctctggcccccagctctagtgtttgagtaaggagactgaggatgnattacttttggntgatttacctag

SEQ ID NO: 22989 - DNA, 526 bp, Homo sapiens
  misc_feature (1)...(526): n = A,T,C or G
aggtttgtagnnncaaggggnnnnagnnnanattgatcgnncttnngaanatcgacngcgctgcaggaattcggcacgagccgcgtgcgggaagtctttggctcgggcaccgcttgccaggtctgcccagtgcaccgaatcctgtacaaagacaggaacctccacattcccaccatggaaaatgggcctgagctgatcctccgcttccagaaggagctgaaggagatccagtacggaatcagagcccacgagtggatgttcccggtgtgaagctgcaggctgtgctccagatccaccgacccgtagcatctcgtcacgccagcactcgcctccctaccaatgactcacctgaagtgcaatacgaaataaaaggccagcgggcggcgtctgggtctctggcgcccccatgtgggtgcgacactcccaaagccgtaagggccgacccaggcatcttggcccccagcccctcgtcgcgggttcaggtccgcccattactccttgtcgtgcggtcaaggatacaccttgg

SEQ ID NO: 22990 - DNA, 540 bp, Homo sapiens
  misc_feature (1)...(540): n = A,T,C or G
aggcgattcgttggctgaggaattcggcacgaggngatctgcagtagtcacagctttttctattttatcctaattatcccagattttgagtatagttctttatgagaacatagtggcacaatacctcttcattctttttattacttctctaatgtcatgcattccccaaatctgggctctgctcttgttcctccctccactaccaccccaaaaccaaaagtaagttctgtgctaatgaggatggggattatttctaggtcacagcccatgagctgggaaaggaggcagtgctcttgggaggaacagcagtggccccaggcttcaagtggaagccagcagagccccaaccaatgggtgtgttccagaaagaatattggaatacataccgggtactacaagaacagctgggctggaacactcacaaagaaacccagcctgtatatgaaagagctgtgcatgatcaacagatgttagccctttctgagcagaaaagaatcanacactggaagatggcatctaaactcatncctgctgagtccn

SEQ ID NO: 22991 - DNA, 378 bp, Homo sapiens
  misc_feature (1)...(378): n = A,T,C or G
nataganccgcattgaagttctattcgagagtgaggctcanatgtgaagcgactggctgaggttaaacttgatagtctgtttttacttattttctggccctcttcttgttgccatataattaggatgagtagggtaagcttgaactttttcgagtttttttctttttttccttcctggaaaatactgatttgactggctctggaccatgaaagtagctgggcctaaaaccaaaccagacatcaaaacgtggtaaggaccattcactaagacagccatggtagcatgctcagtgccagccctgtctccaggcccattcttaagatctcgggaaaagtcaccagatgcttgggctctaagtacaaaaaataaaaaaaaat

SEQ ID NO: 22992 - DNA, 502 bp, Homo sapiens
  misc_feature (1)...(502): n = A,T,C or G
cttcgaccccccttcnnnnnatagacccgcgctgcaggaattcggcacgaggaggaagccagccaggctctcatcgaggcttatgtagacatgaggaagattggcagtagccggggaatggtttctgcataccctcgacagctagagtcattaatccgcttagcagaagcccatgctaaagtaagattgtctaacaaagttgaagccattgatgtggaagaggccaaacgcctccatcgggaagctctgaagcagtctgcaactgatccccggactggcatcgtggacatatctattcttactacggggatgagtgccacctctcgtaaacggaaagaagaattagctgaagcattgaaaaagcttattttatctaagggcaaaacaccagctctaaaataccagcaactttttgaagatattcggggacaatctgacatagcaattactaaagatatgtttgaagaagcactgcgtgccctggcagatgatgatttcctgg

SEQ ID NO: 22993 - DNA, 508 bp, Homo sapiens
  misc_feature (1)...(508): n = A,T,C or G
agcgggcgnnnnnntttcgctcggctgccgtgcccccggagcccaagaccaccaagctgggccagcggcgggagagcagccggcctgtgaaacctccaaagaaggacgtgcccgactctcagcagcacccagcaccagagaagagcagcaaggtctcggagcagctcaagtgctgcagcggcatcctcaaggagatgtttgccaagaagcacgccgcctacgcctggcccttctacaagcctgtggacgtggaggcactgggcctacacgactactgtgacatcatcaagcaccccatggacatgagcacaatcaagtctaaactggaggcccgtgagtaccgtgatgctcaggagtttggtgctgacgtccgattgatgttctccaactgctataagtacaaccctcctgaccatgaggtggtggccatggcccgcaagctccaggatgtgttcgaaatgcgctttgccaagatgccggacgagcctgaggagccagtggtggccgn

SEQ ID NO: 22994 - DNA, 473 bp, Homo sapiens
  misc_feature (1)...(473): n = A,T,C or G
ggaggttcccnnnngggnnnnnattactgagnncctttggtttgaccccggctgcaggaattcggcacgagaagcaagggagcccagccggagccatggccagtacagtggtagcagttggactgaccattgctgctgcaggatttgcaggccgttacgttttgcaagccatgaagcatatggagcctcaagtaaaacaagtttttcaaagcctaccaaaatctgccttcagtggtggctattatagaggtgggtttgaacccaaaatgacaaaacgggaagcagcattaatactaggtgtaagccctactgccaataaagggaaaataagagatgctcatcgacgaattatgcttttaaatcatcctgacaaaggaggatctccttatatagcagccaaaatcaatgaagctaaagatttactagaaggtcaagctaaaaaatgaagtaaatgtatgatgaattttaagttn

SEQ ID NO: 22995 - DNA, 480 bp, Homo sapiens
  misc_feature (1)...(480): n = A,T,C or G
cctcgcccgcgntgaggaattttgccccgcgctgcaggaattcggcacgagggaggacgaggtggtggtagaggaggccgaggaggatttggtggcagaggccggggaggctttggagggcgaggaggcttccgaggaggcagaggaggaggaggtgaccacaagccacaaggaaagaagacgaagtttgaatagcttctgtccctctgctttcccttttccatttgaaagaaaggactctggggtttttactgttacctgatcaatgacagagccttctgaggacattccaagacagtatacagtcctgtggtctccttggaaatccgtctaagtaacatttcaagggcaataccgtggtgggtttgactggatattcatataaactttttaaagaagtgagtgatagagctaacccttatctgtaagtttggatttatattggttcatcccatggtacaaaccaattttttctacaaa

SEQ ID NO: 22996 - DNA, 482 bp, Homo sapiens
  misc_feature (1)...(482): n = A,T,C or G
catagcccgcctgcaggaattctgcacgagcttccatgaccaaagaagattctaaacttatagctctcatatggcccagtgagtggcaaatgatacaaaagctctttgttgtggatcatgtaattaaaatcacgagaattgaagtgggagatgtaaacccttcagaaacacagtatatttctgagcccaaactctgtccagaatgcagagaaggcttattgtgtcagcagcagagggacctgcgtgaatacactcaagccaccatctatgtccataaagttgtggataataaaaaggtgatgaaggattcggctccggaactgaatgtgagtagttctgaaacagaggaggacaaggaagaagctaaaccagatggagaaaaagatccagattttaatcaaagcaatggtggaacaaagcggcaaaagatatcccatcaaaattatatagcctatcanaagcaagttattcgccgaagtatg

SEQ ID NO: 22997 - DNA, 487 bp, Homo sapiens
gaagaaaaaattagaccgcctgttgcaccgcctgcaagtctgaagtcatgcttggacaatgctaatgttgtgtccgtagacactgccagaacactattcaaccaagtgatggaaaaggagtttgaagacggcatcattaactggggaagaattgtaaccatatttgcatttgaaggtattctcatcaagaaacttctacgacagcaaattgccccggatgtggatacctataaggagatttcatattttgttgcggagttcataatgaataacacaggagaatggataaggcaaaacggaggctgggaaaatggctctgtaaagaagtttgaacctaaatctggctggatgacttttctagaagttacaggaaagatctgtgaaatgctatctctcctgaagcaatactgttgaccagaaaggacactccatattgcgaaaccggcctcatttttctgactgatatggaaacgattgccaacacata

SEQ ID NO: 22998 - DNA, 404 bp, Homo sapiens
gtgactactggaataccagtggtgaagcctcggcagctgattgcaacagatgatgcagtaccactgggccctgggaagggtgtggcacagggtttgactcggagttctggggtcagaaggtcatttcgcaaatcgccagagcaccctgtggatgacattgacaagatgaaagagcgagctgccatgaacaactccttcatctacataaagattccacaggttccactgtgtgtcagctacaagggtaatcaaagagaagctaaggctgaagtctgcaacaggctctgaggtccggggaaagctagaaactaaatcggacctgaacatgcaacagcaggaagaggaggagaaagcccggctcctcattggtttaagtgtgggcgacaagaaccctggcaagaagt

SEQ ID NO: 22999 - DNA, 472 bp, Homo sapiens
  misc_feature (1)...(472): n = A,T,C or G
ntatgaccgtctgaggaattcggcacgagagcgcctcaacctagaggagtggatcctggagcagctcacgcgcctctacgactgccaggaagaggagatcccagaactggagattgacgtggatgagctcctggacatggagagtgacgatgcccgggctgccagggtcaaggagctgctggttgactgttacaaacccacagaggccttcatttctggcctgctggacaagatccggggcatgcagaagctgagcacaccccagaagaagtgagggtccccgacccaggagaacggtggctcccacaggacaatcgctgccccccaacctcgtagcaacagcaataccgggggaccctgcggccaggcctggtgccatgagcagggctcctcgtgcccctggcccaggggtctcttcccctgccccctcagttttccactttttgggttttttattggtattaaactgatg

SEQ ID NO: 23000 - DNA, 501 bp, Homo sapiens
  misc_feature (1)...(501): n = A,T,C or G
tgggganncnnnnnaattgccatggctgcacgaattcggcacgagccagtgtctgtccgtgtgggccaggcagtggatgtggtgggccacgctggcaagccgaagactatcacagggttccagacgcatacaaccccagtgttgttggcccacggggaacgggcagaattggccactgaggagtttcttcctgttacccccattctggaaggttttgttatccttcggaagaaccccaattatgatctctaagtgaccaccaggggctctgaactgcagctgatgttatcagcaggccatgcatcctgctgccaagggtggacacggctgcagacttctgggggaattgtcgcctcctgctcttttgttactgagtgagataaggttgttcaataaagacttttatccccccnnnaaaaaaaaaaaaaaaaaaaaaaaaaaaaaaaanaaaannnnnnnnnnnnnannnnnnnnnnnnnnaaannnaaaaaaatttttnna

SEQ ID NO: 23001 - DNA, 410 bp, Homo sapiens
  misc_feature (1)...(410): n = A,T,C or G
cttggacccccccngtataccccgcgctgcaggaatacggcacgagcccttggtgctctgtccgcatgcacctcctttcagctgctcctgctacttatctctgtccagggccagccagagtgctgctgggaatggaagggaatggagagaacggataagcaggcagggtctgagcctccggagcttccccctccccctttgcctatcccctcccctctgcttgagccttgagccttgactgggagctgaaaggagttgcagctgttggcatgagacctccttctccccgtcttggggaggtggggaccagcagataaatcccacccttccttgagctgtcgctgtactctgaagttcagccagatcagattttataaaaattaattaaaatctcaaaaaaaaaaaaaaaa

SEQ ID NO: 23002 - DNA, 488 bp, Homo sapiens
  misc_feature (1)...(488): n = A,T,C or G
ctttgccccgcgctgcaggaattctgcacgagcagcccccttccccgggccacggggccttgggtccctgccctcccacccaggtttggttcctcccggggcccccactgtggagataagaaggggatggaatgggggaagaagaggagcaggaggccctcatccttctgctgccctggggttggggcctcacccctctggagggccggaggcaggaggtggaaaccccaggggctggcttttttaaaactggttttattttaatttttattatattttcagtttttccataaaggagccaattccaactctgtggggnccaaaaaaaaaaaaaaaaccctcgggggggggcccgggccccaattccccctaaagggaggcgaataaaaaatcacgggccgcggttttacaacgcggggagggagggagaaaaannnnnnnnnnnnnnccncnnnnnnntnttttntgngggnnntncngagcccggc

SEQ ID NO: 23003 - DNA, 445 bp, Homo sapiens
attagacccgctctgcaggactcggcacgagtacgttccgggctcggtctctgcagcctttgttacttgccccaacgagaaggtcgccaaggagatcgccagggccgcggtggagaagcgcctagcagcctgcgtcaacctcatccctcagattacatccatctatgagtggaaagggaagatcgaggaagacagcgaggtgctgatgatgattaaaacccaaagctccttggtcccagctttgacagattttgttcgttctgtgcacccttaccaagtggccgaggtaattgcattgcctgtggaacaggggaactttccgtacctgcagtgggtgcgccaggccacagaggcagtgtctgactctatcacagtcctgccatgatgagccctgttcctgctcatcatgaagatccccgcgatacttcaacgccttctgacttgc

SEQ ID NO: 23004 - DNA, 485 bp, Homo sapiens
  misc_feature (1)...(485): n = A,T,C or G
cgcccccctttagccncgcgctgcaggaattcggcacgcgattctgatggaacaattgcaaaaggagaaacagctggtcactggtatggatggtggccctgaggaatgcaaaaataaagatgatcagggatttgaatcatgtgaaaaggtatcaaattctgacaagcctttgatacaagatagtgacttgaaaacatctgatgccttacagttagaaaattctcaggaaattgaaacttctaataaaaatgatatgactatagatatattacatgctgatggtgaaagacctaatgttctagaaaacctagacaactcaaaggaaaagactgttggatcagaagcagcaaaaactgaagatacagttctctgcagcagtgatacagatgaggagtgtttaatcattgatacagaatgtaaaaataatagtgatggaaagacagctgttgtgggttctaacttaagttccagaccagctagtccaa

SEQ ID NO: 23005 - DNA, 490 bp, Homo sapiens
  misc_feature (1)...(490): n = A,T,C or G
cgccccccatcgcccgcgctgcangaattagaccccgcgctgcaggcggcagcttcccgggggccggttcgggtctccgtcccctggcggctaccctggctcctactccaggtcccccgcggggtcccagcagcaattcggctactccccagggcagcagcagacccacccccagggttctccaaggacatctacaccatttggatcagggcgtgttagagaaaaaagaacgtctaacgagtcggaaaattatttcaagccttcaatgcttgaagatccttgggctggcctagaaccagtatctgtagtggatataagccaacaatacagcaatactcaaacattcacaggcaaaaaaggaagatacttttgttaacatttctgaaattcaactggaagcttcatgtgtcaggaacatcttggacaaaactttaagttgtggtgatataaatttacccanagatgatgactttgattggataattagtaa

SEQ ID NO: 23006 - DNA, 539 bp, Homo sapiens
  misc_feature (1)...(539): n = A,T,C or G
aggacgatcgttggctgaggaattcggcacgagccacacctggccttgaacattntttatttgttaatttcatgcgtgacgaaacccaaggatcacccatgtcaaccacaaagttggcattccctttagtagaacctcactaaacggaaaggctgtacaacgcaccgtctagccacaggagaactaatcttctatcagttgccctttcttctttggagtttttatgtaacttacccttgtgagacaagttttctacttgagaaactcctagtacaatgtcttatactagaagcctggataaatactattaactactgtttcttatattcacttcagaaaatcagtggctccacattgtttgagccattagtgataacaaatttggatctacttactcaagtcttatgaattctgtgcctttcatcacattcctagcccactctcatcattactggcagaagggtgttgtgatgaaccagtttatactggggtttgatatgtctagcaataacttaaaagaaaaanaaccttggaaatct

SEQ ID NO: 23007 - DNA, 478 bp, Homo sapiens
  misc_feature (1)...(478): n = A,T,C or G
atcgacccccctccnaatagacagcctgcagggagagcctgctgagcccggctcaaccgaaacccgagggctgagtggggaggttgacctggggaaggaagggtggttgcagaaggaatgataaggaccgatccccagaagtgagtgctttctctttgccgggaaactaaaggaaatccactaagtcaggatcacaggtgaaggtagggctctgagactggtggattaggtcggggccaggctatctgaaaagggcggtgcggggatcaggaaaaggggaaggaggaggagaagggcgtggggagctgggtcagacgcgcatacacacacacaccccttgcacaacgccagggtaagcagtgaacacaacacacgtggagatgcaatgtagaatctggccgctggccggatcttctctacttccatcctcccgccccagcccaagccacccacttctccaggtgcttccctggggtgc

SEQ ID NO: 23008 - DNA, 305 bp, Homo sapiens
cattggccccgccttgtacgccgcgctgcacgaattcggcacgagcagcagcacagtgagtggattttatttttcgttattgttggtggtttaaaaaattccccccatgtaattattgtgaacaccttgctttgtggtcactgtaacatttggggggtgggacagggaggaaaagtaacaatagtccacatgtccctggcatctgttcagagcagtgtgcagaatgtaatgctcttttgtaagaaacgttttatgatttttaaaataaatttagtgaacctaaaaaaaaaaaaaaaaaaaaaaaa

SEQ ID NO: 23009 - DNA, 489 bp, Homo sapiens
  misc_feature (1)...(489): n = A,T,C or G
gggaattgtcggctgcggaattcggcacgacgtgcctccctcagggcctgggttctaccaccccactcctagggatctcttgaaccttaggggtgacctgggcccaagtctctcatcagcccccaatcccctgggtaccaggcttctgccacccccggctcagatctttgcaaatcagtacgacagcctcagagcagagcaagggttgtttgggagaatcatacctggttctaaggagtcccacgctttttgccaagcctggtactgagttcatgataccatggtggacacagctgagaaaatccctgccctcatggtgctcattctacttgagtagacgatgaactagtaaacaaataaacaagaacactggcganaaaaaaaaaaaaaaaaaaaaaaatccttgggggggggcgccggccccaattcccccttaagggggggggaataaaaatcccgggcccgggttttaaaaacgccgggccgggg

SEQ ID NO: 23010 - DNA, 507 bp, Homo sapiens
  misc_feature (1)...(507): n = A,T,C or G
aggggtnnncnaggggtnnnnnnaaagaccggcataggaatcggtacgagcaggcctttcccgcaagtctggagttttcttatccagttgaggccgccttcgctgtactcactctctgcctcccaccccatcttctgccacccgacctccatctttgatggttagcgccttcagccctcaacagcttcgcacaaccaacccctagaagccgtggagtcagaccggccagggtgggacctaggttttaactcgggttctggctacacacgctgcgcctccatacagtttgtcccaggtttggcagcaggccggctaccttcaggaattctttgctttggcttctgtctgttcctgtctgttgggcaagtttctagctaccccactgagagaaccatagaacaaggaccctggcatggcatacagacaaggaatgtttgctgaattaatggagctggtgccttgcagcttcccttttgttccttgaagttgcccttgctctcctccaca

SEQ ID NO: 23011 - DNA, 467 bp, Homo sapiens
  misc_feature (1)...(467): n = A,T,C or G
ntttgaaccgcgctgcaggatttcggcacgagcaacctttacaaatggcattttcttaattgaaaatccgggaagcaggtgcgattacttttttgctcgtagatattgtcctaagttggaattctcccactgccctaaaactttccctagtagtcctttaaactcccccctccctttttggtagctgttttctccgtcctctctccacctgccctcttatctaggagctggttgtaagcacgatttttttaacaggttatattgtacaggatcaatattttgctttttaacaaggatatttatgtaataagaaactctgccttaggcaggtgttggccagaaaagtccagattcctctgggatcccaccctggcctctcctggaactctgaacctgctgtggaaggaattggccatgaccttcacctctggagagtagggtctatggcgagggaaaagggtgttcan

SEQ ID NO: 23012 - DNA, 497 bp, Homo sapiens
  misc_feature (1)...(497): n = A,T,C or G
agggaattgacgccntnggaaattgtatcgcgttcgcgaattcgccacgaggggatggtggcggagctggctgtagcagagctaccaagcagtcaaagagaagtcctctgaagccttggagtttatgaagcgggacctgacggagtttacccaggtggtgcagcatgacacggcctgtaccatcgcagccacggccagcgtggtcaaggagaagctggctacggaaggctcctcaggagcaacagagaagatgaagaaagggttatctgacttcctaggggtgatctcagacacctttgccccttcgccagacaaaaccatcgactgcgatgtcatcaccctgatgggcacaccgtctggcacagctgagccctatgatggcaccaaggctcgcctctatagcctgcagtcggacccagcaacctactgtaatgaaccagatgggcccccggaattgtttgacgcctggctttcccagttctgcttggaggagaagn

SEQ ID NO: 23013 - DNA, 464 bp, Homo sapiens
  misc_feature (1)...(464): n = A,T,C or G
nattgatnnccatgatgcgcgctgcagagaattcgcacgagcgagatggcggacgtgctagatcttcacgaggctgggggcgaagatttcgccatggatgaggatggggacgagagcattcacaaactgaaagaaaaagcgaagaaacggaagggtcgcggctttggctccgaagaggggtcccgagcgcggatgcgtgaggattatgacagcgtggagcaggatggcgatgaacccggaccacaacgctctgttgaaggctggattctctttgtaactggagtccatgaggaagccaccgaagaagacatacacgacaaattcgcagaatatggggaaattaaaaacattgatctgaacctcgacaggcgaacaggatatctgaaggggtatactctagttgaatatgaaacatacaaggaagcccaggctgctatggagggactcaatggccaggatttgat

SEQ ID NO: 23014 - DNA, 485 bp, Homo sapiens
  misc_feature (1)...(485): n = A,T,C or G
gggggggccttganctcgcccggctgcaggaattcggcacgagggttctcaaagattgcaaaatgctgctgcaggtcaagaaggttattttgggtgcctgtgggggaggtgaaacaaggtcccatgactgttttgcagaaccttgtctgtggagggtagaggttgcggcaggggcctgtgggccttacttggtgagaaggtaggtctagctggctccattcagtatttgagacatttggaatttgtctgcatttaaaaccaagagatcacacacacctgtctggatttggagtttctcttgaaaactcgccagtccggccgtctgagcctgcactgacgcctggtgaagctgtgcaggggccgcccctctccctttcgccacagtcctctccactccctttcgcctctccctggcctgctgcactcactgataggaaattctgaccccagactcggagcagccttcccgtgggtcggtttttgct

SEQ ID NO: 23015 - DNA, 477 bp, Homo sapiens
cttagacccgcgctgcaggaattcggcacgagccgccctccctggttctgggggcccctcaaggccaagctcacccctcaagtgctctcacactcgggacctaattcaagtaaaaaccctttctccttcctggggcctcggctcctggagggctggagggtctcgtctgaggacgggaggaggctctcgctggacgtctggcctgtgcgctggtggacggatgcctacgcggttttggaggacccgatgaccaggcgtcctgcgagtccgcccgctggcctgcagcacccacctcggacttggctgtggacggttggtgcaagtgcatcctgcagggctggctgtgcgcagctgtgggctgacctttgcagagttttgtggaatagtttgcaatgtcataaaagtgcaataaaggtacagcagatgtgaaaaaaaaaaaaaaaaaaaaaactcgagggggggcccgggccccaattc

SEQ ID NO: 23016 - DNA, 480 bp, Homo sapiens
  misc_feature (1)...(480): n = A,T,C or G
cttcgacccccctcccnattgcacccgcctgcaggaattcggcacgaggtttctgcgacttgtgttgggactgctgataggaagatgtcttcaggaaatgctaaaattgggcaccctgcccccaacttcaaagccacagctgttatgccagatggtcagtttaaagatatcagcctgtctgactacaaaggaaaatatgttgtgttcttcttttaccctcttgacttcacctttgtgtgccccacggagatcattgctttcagtgatagggcagaagaatttaagaaactcaactgccaagtgattggtgcttctgtggattctcacttctgtcatctagcatgggtcaatacacctaagaaacaaggaggactgggacccatgaacattcctttggtatcagacccgaagcgcaccattgctcaggattatggggtcttaaaggctgatgaaggcatctcgttcaggggcctttntatn

SEQ ID NO: 23017 - DNA, 484 bp, Homo sapiens
  misc_feature (1)...(484): n = A,T,C or G
aggtgggtctactgacgtctgcaggaattctgcacgagccgcagagccctgtgagcgtctacagacagctcaccatttttgtcctgtatctgtaaacactttttgttcttagtctttttcttgcaaaattgatggtctttaaaatcgccaatgtataacagggcttatgtttcattttgtttcccgttctgctttaaacagaacataaaaggagcgtaagctccttttctcatttcaaaggagctaccagcgtatgccgtacttagaacaaagaagaaacattctgtacaacattttattgcctagttgacaacattgcttgaatgctggtggttactatccctttgacactacacaattttctaatatgtggtnaaggatgtgacaaaacgccctgattcctagtgccaaaggttcaacttaatgtatatacctgaaaacccatgcatttgtgctcttttttttttttatggcgcttgacgaa

SEQ ID NO: 23018 - DNA, 502 bp, Homo sapiens
  misc_feature (1)...(502): n = A,T,C or G
ggatgtgccnaggtnnnnnnaactgacgtnctggaaacgtccgaggacccgcggaccccgctcttgctggtgctgaaattttctgcatcagaaatcattctggaatcctttttacctggcactgactaaagagatatgggtgttccttcccagaagtctgttcaggagtgagccactggagagcagaagattttggagaggtctcaaaagaaatttctataacaatttcttgatttctgtatgaaacacataaatatattagtagagtatgattccatctagtgaaaatttaaactcataatacatacactgaataatataaataacatagtatgcattctcatcactgattggcagcaagctctatgtatgccacatcctcagtgggtaagactcctctcagttttcctacctaattgccagcctgtgggtccttttacctctcccatgctaactgctagcaaaggcttaatggcaactaacagtggttgactaccccgtt

SEQ ID NO: 23019 - DNA, 489 bp, Homo sapiens
  misc_feature (1)...(489): n = A,T,C or G
aggtggggnattgancctcgcatcggctgcangaattcggcacgagggagaaccgaagcccaggcaaatcagatctctctgccacgcctggtcgatctggactggagagtggatatcaaaacctcctcagacagcatcagccgcatggccgtccccacctgcctgctccagatgaagatccaagaagatcccagcctatgcggagacaaaccctccatctcagctgtcaccgtggagctgagcaaagaaacactggacaccatgttagatggcctgggccgcatccgagaccaactctctgccgtggccagtaaatgatccagccagctgccagggccactgccatgacccagctgctcatgagtgataaatgtctccccatatgcaggctgcccttgcagctgcagctgacaacaggcaggatggtggggacagcagggggctactgccatccagaagttacagttggattgggaagaagcagccaga

SEQ ID NO: 23020 - DNA, 513 bp, Homo sapiens
  misc_feature (1)...(513): n = A,T,C or G
cgggggnnnannaggnngnnnnnnnattggcaccgcgcatctccaccgcgctgcaggaattcggcacgaggtgcactgngcaagggcagggcggcaggtgtcaggccggcttggacaatgaaaccctgaccttgctgcattccttttgcttccaccaccactagcttctttggaatcttggggtgggggtcatctttggggattatggctgccacccgggatttgagtgtagggagtgtgggagcagccttggcagatggggcacccgtgccctgcaggtgttgacaagatccgccatctgaaatgtccttggcacaataaaaccaaatgtcagtttcnnaaaaaaaaaaaaaaaaaaaaaaaaaaaaaaaaccttggggggggggcccggccccccatccccccttagggggggggttaaaaaattccggggccgggttttaaaaaggggggggggggggaaggggnnnnnnnnnnnnnnnnnnntttttttttttttttttttgttgtttg

SEQ ID NO: 23021 - DNA, 471 bp, Homo sapiens
  misc_feature (1)...(471): n = A,T,C or G
cgggccccatcgcccgcctgcaggaattcggcacgagctcagccaagcacagtggtggcagggcctagctgctacaaagaagacatgttttagacaaatactcatgtgtatgggcaaaaaactcgaggactgtatttgtgactaattgtataacaggttattttagtttctgttctgtggaaagtgtaaagcattccaacaaagggttttaatgtagatttttttttttgcaccccatgctgttgattgctaaatgtaacagtctgatcgtgacgctgaataaatgtcttttttttaaaaaaaaaaaaaaaaaaaaaaaaaaaccttggggggggggccgggcccccatttccccttaagggggggggtttaaaattcctgggcccggggtttaaaaacgggggggatatgaaaaaannccncncnnnnccnnccccccnnnnncccccnnnnnccccccccnnncccccc

SEQ ID NO: 23022 - DNA, 487 bp, Homo sapiens
  misc_feature (1)...(487): n = A,T,C or G
cgtggcgaannacccaattgcaccgcctgcattagctcggcacgagggacaacggcgtgtcaggggagtgaggggtggaggtaggggccagaggggcttacacgatatcccatacctttaatgcctttggccttccattctgatttctctgatgagaatattgctggccctgctttccctggtaggtatttgccaggcccaatgctttaaccttaagctgatactttgctttagatgtcagtctcgttaccagcagccttttgacccaactacggcgctctatattttagtagaggattttcacccatgtgcatggaaaagatgttcatggtacattgtaaaaaaataaaattaaaattaaaaaaagtttgcagaaccgcacaaaaaaaaaaaaaaaacttgggggggggcccggcacccaattccccttatagggagtcgaattacaatccacgtgcccgcgtttaacaacgccttgacaggctag

SEQ ID NO: 23023 - DNA, 471 bp, Homo sapiens
  misc_feature (1)...(471): n = A,T,C or G
nattgaccgtctgaggaattcggcacgagctggagttcaaaaagataaactgtgttctccactctctgagccaggtgacccttctaaatgtagttccctggagttggggccattacagctagaaatatcgaatgcatccaccacagaggtggcaattctgcaagtagatgatgacagtggcgaccctctgaatttggttaaagctccagtgtcaaggtcccctccaagggagcaggtaattgaagacaatatggtccctcagggaatgcctgaacaggaaactacagttggtgccatccaggaccacacagaatccagtgttcacaactaagaataaatacctagagctacttgtgagtgaatcattggcttctagaaatcagatgcccagatgatccaagactagtttgttatctcatctggaacctacaccaagagatgcagtcagcatcttaaagtaaatgttcatgg

SEQ ID NO: 23024 - DNA, 454 bp, Homo sapiens
  misc_feature (1)...(454): n = A,T,C or G
nattgaccaactgaggncgactgcggaantcggnacgagatttgtattcttaatttaatattgaaggaaggggttggttcccatagtacctggccagagggttatataccatcctgtctctggcccactgtggtaattccacatccaggtaccaccgccattcagaattgtctcaccccttctcgtgccttttctctccttgagctttataaacagatttgtacctgagccccagtgctacactcatccttgctttccagccctaagccatctcagcctgatgtcacaacccaataaatggggcactttcttcttttgtaaactattatcattttggtttctgtgacattaacttaattatatatgatcgtattaactcatgtagttctcaaaataggcagctgcttctgaagccagtaaaataaaattcagttagttattaaaaactaaattn

SEQ ID NO: 23025 - DNA, 450 bp, Homo sapiens
  misc_feature (1)...(450): n = A,T,C or G
ncttgaccgccgtgaggcaattcgcacgagaagctataattatggcttatatttagaaatgactgcatttgatattttaggatatttttctaggttttttcctttcattttattctcttctagttttgacattttatgatagatttgctctctagaaggaaacgtctttatttaggagggcaaaaattttggtcatagcattcacttttgctattccaatctacaactggaagatacataaaagtgctttgcattgaatttgggataacttcaaaaatcccatggttgttgttagggatagtactaagcatttcagttccaggagaataaaagaaattcctatttgaaatgaattcctcatttggaggaaaaaaagcatgcattctagcacaacaagatgaaattatggaatacaaaagtggctccttcccatgtgcagtccctgtcccn

SEQ ID NO: 23026 - DNA, 494 bp, Homo sapiens
  misc_feature (1)...(494): n = A,T,C or G
ntttggccccgcgctgcaggaattcggcacgagattgaccgaatggacttactaatcaaaaggattaagcccaaaccccagcaaggagatgacatcacagtggtagacgtagagaagcagattgaggccttccgcagccgcctgatccagatgctgggggagcctcttgtcccccaactccaagacaaagtgcacttgttgaagctcctgctcttctatgctgcggacttgaaccctgatgcagagccctttcaaaagggctggagcggctcctgagggcctgccaagcactgaatgccaagaatacctcctgaactctctctccaactgctcagaagctctaaaagcatgaaaagtggttaaaatcttacaggaccaaacctgcattatttaatcagtaggttgtaatttctaactctagtaaatatctttttttaaataatcctatcctagcctgttctcanatatggcttagatatacaaggtatatatat

SEQ ID NO: 23027 - DNA, 495 bp, Homo sapiens
  misc_feature (1)...(495): n = A,T,C or G
attgngaccgccntgattagcaccgcctgcaggaattcggcacgagctccctgtaccaggatctctgcacaggaaggatggggcatgtcaggctgctgatacaggcccagctgtgagatacagtaagttcaagatgtcagaggccaggccgcccccgctgctcgggcagcacacaacgcacatcctgaaggaggtcctgagatacgatgacagggccatcggggagctgctcagcgctggagtggtggaccaacatgaaactcactgacaaaggaaaagggctcttcctcataacctcgatccgaatacactggcaaaggcaacactttgcttggacccttctccccagttctgataccactaaaaagaagatttagagtaactccagatttcttacatggcatctccagaatggctctggtattaatgaatctagtgccttttaaatgtatcccacgttttgttccctaccatcttttttttcagatgatgatn

SEQ ID NO: 23028 - DNA, 449 bp, Homo sapiens
  misc_feature (1)...(449): n = A,T,C or G
atagaccttcgtccccgctgcaggaattcggcacgagctttactgttggggcagtccatttctaatcctgacttggtgacagtatcatgtgtatttataaaacaaggctagccatatttaggacaactgaagaaaagctggaaaaaaaaacaagcaaacttgaacactgaagcaacctcaagcatctctttattttgatgatatatttttgtaaggaaaatattcagatgatcaggaatgtatataactgaaatcaagaaaaagaacagtatgcatttaaaaagacagaattatgaaattatatgagtgcttagaatggggctaagggaagtgctgaaatagagcaaaggatggaagataatatagactaccacccactgtaaatgtttgcaagtggctgtgttttaaatgggattattacagttgatctctatgaatgtcagagcccn

SEQ ID NO: 23029 - DNA, 442 bp, Homo sapiens
atagcccgcctgcaagctttccagcaccatagcagaaactctgtaaggaaaagaaatacattttcctgaggactcaatggctaacttacaaaagttatgaggcattttattcagagtgctaacaaagttatgtaatttaacttacttgtggcatttatagacataaacatgttaatttgactttttttcattagagacctctttagattaatacaaggccagagtggccaataaaacttaataaatctttcagtagacattttaatcagctagacacatttcgattgaactataacaatggcaggctgaagcctagatatttaaattagaagggtctagtctgataattattcatgtttctagattcatgcccatcatataagggaaatgctgaaaatatttaaagttgtatatcattatgtaaacaatcttctgtacattt

SEQ ID NO: 23030 - DNA, 447 bp, Homo sapiens
atgtgaccctcgctgcacgaattcggcacgagaattggcaagcccaggccctattggccctacaagaggcagcagaagcatttctagttcatctctttgaggacgcctatctcctcaccttacatgcaggccgagttactctcttcccaaaggatgtgcaactggcccggaggatccggggccttgaggagggactcggctgagctcctgcacccagtgtttctgtcagtctttcctgctcagccaggggggatgataccggggactctccagagccatgactagatccaatggattctgcgatgctgtctggactttgctgtctctgaacagtatgtgtgtgttgctttaaatatttttcttttttttgagaaggagaagactgcatgactttcctctgtaacagaggtaatatatgagacaatcaacaccgttccaaaggcctga

SEQ ID NO: 23031 - DNA, 406 bp, Homo sapiens
  misc_feature (1)...(406): n = A,T,C or G
nattgaccattgtgagcaattcggnacgaggtacactcacccataattcaaacaattacaccatggtataaagtgggcatttaatatgtaaagattcaaagtttgtctttattactatatgtaaattagacattaatccactaaactggtcttcttcaagagagctaagtatacactatctggtgaaacttggattctttcctataaaagtgggaccaagcaatgatgatcttctgtggtgcttaaggaaacttactagagctccactaacagtctcataaggaggcagccatcataaccattgaatagcatgcaagggtaagaatgagtttttaactgctttgtaagaaaatggaaaaggtcaataaagatatatttctttagaaaaaaaaaaaaaaaaaaaaaa

SEQ ID NO: 23032 - DNA, 480 bp, Homo sapiens
  misc_feature (1)...(480): n = A,T,C or G
ggggggnaggnagggccggnnatagannncaactgacctggcagcgtagaatccgcacgagcttgagcatgtgggagtcagccttacagatgatttgatgaataagttactaaaagggaaagcaagaggacatttccagggcaaaactgagtcagagcctgggcagcagcccatggagttggagaataaggcagctgtacctctggggggcttcctttgcaatgtagcagataaatcaggggccatggagatggctggcctgtgccccgcagcctgcatgcagaccccaagaatgaagctggctgttcagttcacaaacaggaaccagtattgctatggctccagggatctccttggactgcacaatatgaagaggcggcagctggctcggcttggctaccgtgtggtagagttatcctactgggaatggctcccactactgaaacgaactcgcttagaaaagttggcgtttcttcatga

SEQ ID NO: 23033 - DNA, 486 bp, Homo sapiens
  misc_feature (1)...(486): n = A,T,C or G
agggcgtcgcnnccncccttgaatccanngctaaaggngccagcatnnngcacctaaannanaatccttggagctggatctgaaaaaaatacggttgaaagtcgtgcaggtgattacaatgtgtaggcaaaccagaaaaccatggctttaacgagcagcttttgttagaaatgatttctccaatgaatgtagaaacgtttgctgctgaattgtgacctttccattttacctgcttttcctgcaaagtatattttgcagacccaggcagtgctgctcgctctgttcctggttcacccagtgccgtgtgtgctcagtgcatcctgtgcacgggtcactgtgtgccctggcctgggtgagcatcattcttcggggagaaccttgatgaaaacaaagctgcattccaaaaagttaaaaccgtgctacttactgtactgaggtaaaaattaaaagacctaggggactcttccaaaagttaaaacgtaaata

SEQ ID NO: 23034 - DNA, 485 bp, Homo sapiens
  misc_feature (1)...(485): n = A,T,C or G
ntgtgggaattgactttctgtggacttcggcacgagccaatctgaaacctcgtgcctggctcgtctgccacctacatttctctttccagctgctgttttgtaaaaagaaaaagaaaaaagaagcccaaactagtgagagtaatatctaattatctcattttttgtaggtctgtgataaagaacttagtcatcccttccacctcctactgtgaagaacagaccctgggtcccacactgaaatcccctctagtcacccattcccaccccccagggagctgcctcccaggcagggggtgcagaaaatgattgatgggctggggaaccctggagagcctcgactccggaagtctcaaggtgcctcctcctctccttatctggcccgttggttttctgagcagggggctgaactgtgaacaagtcagacaaataaagcaagggtctgcnccntcnnnnnaaaaannnaaaccaaaaagtggaagcttgaa

SEQ ID NO: 23035 - DNA, 423 bp, Homo sapiens
aatttgccctgcgctgcaggaattcggcacgaggcgccgtccgccttgctgcgtcccctttcccggctgctggcccccgccaggctcccgagcggcccttcagtgcgatcaaagttctacgtgcgagagccgccgaatgccaaacctgactggctgaaagttgggttcaccttgggcaccactgtcttcttgtggatctatctcatcaaacaacacaatgaagatattttagagtacaaaagaagaaatgggctggaataaacttttgaaacactaatgtagtatgctccgtatagtgattgtagctgttcctctggattcaccatctgttgagttgtaaatgtgagagaaaaagttatatgtgaatatatatcaagccagcatttgtattttgcatcattaaataaaaaaaaaaaaaaaaaa

SEQ ID NO: 23036 - DNA, 450 bp, Homo sapiens
ataggcattcgaccccgcgctgcaggaattcggcacgagtgtcactcctggcaggtggtgagttcaggtgggggctccctgctgcccccaggcctgggagcttgaagccctcccggcatctggcatccgagcctcccgccctccagggtgcgcttccctctcttgccgcagcatacacgagggcaggcagtggccttgtcactgtatcttgcatcagagacaaaggaggacccgctttagccctgctgcgggaaatgggggagggcccagggccagcgcattgtgcactggtttactttaaaatgtacagattcttctcgttaaattcttgatagattttttattattattaaaagtcagtttataatacaaaaaaaaaaaaaaaaaactcgagggggggccgggcccccaattccccctatagggaggcgaataacaatccacgggccg

SEQ ID NO: 23037 - DNA, 488 bp, Homo sapiens
  misc_feature (1)...(488): n = A,T,C or G
acgggggnattgacctcgatcgcctgtcangaattcggcacgagaagctgcctcccctctatgtgtttagcatatgttattagaacatgtccgacacccctaccgctgccatttgggccctttaataaagccaagtagagaaatctggcaataaaaggcaaatgtaagcatgctttctttaagacgcatcataaatggttttctttaagtgaatggaagagtttgacagagatacacctttgtaagaaaacattaagaatgctggctggctgtggtggctcacacctgtattcccagcactttgggaggcctaggcaggaggattgcttgagcctgggacttcgagaccagactgggaaacatggcaaaatcccatctctacaacaaaaatacaaaaattagccaagtgcggtggtgtgcctgtagtcctagttacttgggaggctgaggtgggagaatcacctgagcccangaggtggaggctgcag

SEQ ID NO: 23038 - DNA, 481 bp, Homo sapiens
  misc_feature (1)...(481): n = A,T,C or G
tgcnnaggagggncgggccnnnnnnnnttttgannaattgagcngcgctgcaggaattcggcacgagaaagatcccaagaatctcgagaatggagctcttcagccatcggacttggacagaaataagatgaaagacatcccaaagaggcctttctctcagtgtttatctacaattatttctcctctgtttgcagagttgaaggagaagagccaggcgtgcggagggaacttggggtccattgaagagctgcgaggggccatctacctagcggaggaggcgtgccctggcatctccgacaccatggtggcccagctcgtgcagcggctccagagatactctctaagtggtggaggaacttcatcccactgaaattcctttggcatttggggttttgtttttccttttttccttcttcatcctcctccttttttaaaagtcaacgagagccttcgctgactccaccgaagaggtgcgccactg

SEQ ID NO: 23039 - DNA, 485 bp, Homo sapiens
  misc_feature (1)...(485): n = A,T,C or G
cgcgggggnttttnncctcgattggctgtancagtgattacaggcatgcgccactatgcccagataatttttttgtatttttagtagagacagggtttcaccatgttggccaggctggtctggaactcctaacctcaggttatccacccaccttggcctcccaaagtgctgggattataggcatgaaccaccgtgcctggccaaagatgtaatttaaaatagttagaagggacttggcatgggccagctacgtgcatggcattttcacccccagagctttctaatactgttttcacacaggaagtttctaggtctttctagaacagctagaaatagtagctgacttccgaccaaggcccaaccttcaaaccctgagctctttaggctgcatcctctggtgagctatagaggagaacgtggctcctaaactctagccatactgtgggaggaaatagaactctttgggctgtggcttgcagaacaan

SEQ ID NO: 23040 - DNA, 464 bp, Homo sapiens
  misc_feature (1)...(464): n = A,T,C or G
gggacgcgaacacnccnaattgaccccccattgacccngcgctgcaggaattcggcacgagctctctctgagtcataggcccaagccaaagccttatccataacaagtagaggccaagtgataaccaggagatcccctgttactggagacaagaagcgcaataaaccatcctcagtggcacatagaatctgagtccagttatggccgcagcagacccgctgcacttgctggggagcagaaccacagacattgaagaggctataaaagtagggcaggtgatgcaatgaaaaactgtaggtggtctggcagaaaaaagtggtattatcaataaactgcagtctctgaagatcctcgtcaatattcagctgccgcagcaagttcccataagtgagattccattccctcactatgccttcactgcctgctgttagtaaggtgtggatctctggccggctatggatacn

SEQ ID NO: 23041 - DNA, 465 bp, Homo sapiens
  misc_feature (1)...(465): n = A,T,C or G
ntttgcaccgtcctgcagaattcggcacgagcctgactctggaatcttcaacctcaagtgattcgaggttggggagagctagggatgaggaagggcttttggaaatgcataaaggtaaagtgacaccggagacagacctccacaaggagacccatcttgggaaagtgagccttgaaggtgaaggtttggggacagatgatggtctgcactccagggcattacaagagtggttatcagcagatgttttccatgaatgtgactcacagcaaccagggaaagacgccttgattcatgcagggacaaacccctacaaatgcaagcagtgagggataggttttaacaggaagtggtatctcgctcgacatcagagggttcacactggaatgaaaccctatgaatgcaatgcatgtgggaaagcctttagccagagctgaactctcattacgcacttagcttaatccaccg

SEQ ID NO: 23042 - DNA, 451 bp, Homo sapiens
  misc_feature (1)...(451): n = A,T,C or G
nattgaccctcgtgangcaattcggnacgagcgccgccgaagaagcatcgttaaagtctctcttcaccctgccgtcatgtctaagtcagagtctcctaaagagcccgaacagctgaggaagctcttcattggagggttgagctttgaaacaactgatgagagcctgaggagccattttgagcaatggggaacgctcacggactgtgtggtaatgagagatccaaacaccaagcgctccaggggctttgggtttgtcacatatgccactgtggaggaggtggatgcagctatgaatgcaaggccacacaaggtggatggaagagttgtggaaccaaagagagctgtctccagagaagattctcaaagaccaggtgcccacttaactgtgaaaaagatatttgttggtggcattaaagaagacactgaagaacatcacctaagagattatttt

SEQ ID NO: 23043 - DNA, 463 bp, Homo sapiens
  misc_feature (1)...(463): n = A,T,C or G
gggagtccngagganaaaatganccctntacttcgcctgggaatccccgacacgcggcccgagaggacaggataagtttgtctaagtgtcctccgttgctccttggaccatgggactcctctttgttttgctcctcctcctgatcatccttaccgagtctgaccttgacattgcctttttccgtgatatccgccagacccccgagtttgaacaattccactatcaatacttttgtcccctcaggcgatggtttgcctgcaaaatccgctcatggtgagcctgctcattgacacctgagaaggcatgactcctcccaaaaactaccaggtggaccaaggaacccggctacccattcccagcaatgggacccatcgcggaaccatcggcacatataccaagtcctctctcatgactaaagccactgcagcctagagggtgttcccaaaaagaagggaaggctatc

SEQ ID NO: 23044 - DNA, 498 bp, Homo sapiens
  misc_feature (1)...(498): n = A,T,C or G
nttttgancggctgtatgaattcggcacgagaaagcatcgtgtgagatccgcgtgcttatgctcctgtactcttcagagaagaaaatcttcattggcctcatcccccatgaccagggcaactttgtcaacggcatccggcgtgtcattgccaaccagcagcaggtcctgcagcggaacctggagcaggagcaacagcaacgagggatgggggggagtggttaccccgggctgggcccctccaggagtcacagatgaggcccccgcagagactggtgacacgcttctgagcaggggcccctggggacttcaactgcccagcaacatggaggatggtgtcctgaggcctccaaggacggtccccacccctctacgtttccccaataaagccttttaaaaacccccnnangnnaanaaaaaaaaaaaaaaaattcctgggggggggcccgggccccaattcccccttatggggggggataaaaattcccggggcggggtta

SEQ ID NO: 23045 - DNA, 480 bp, Homo sapiens
  misc_feature (1)...(480): n = A,T,C or G
atttgcccggcgctgcaggaattcggtacgagagaaagcctccgagctgaagcagctcatccaccagcagctgagcaagatggatgtccatggtagaataagagaaatccttgctgagactatacgggaagaattggcacctgatcaacagcatttatcaacagaagatttgatcaaagcccttagacgtcgaggaatcattgacgatgtgatgaaagaacttaattttgttactgacagtgttgagcaagaactcccttcctctccaaaacaacctatttgttttgatagacaatcgacattaaaaaaaagttttgggtggaaaagctttcttggaacannnnncagaacctgagcctttacctggacaagtttgttcaacgtttactttatgtttacattatcgaaaccaacgttttcgttctaaacctgttccatgtgcctgtgaaccagattttcatgatggctttttacttgaan

SEQ ID NO: 23046 - DNA, 555 bp, Homo sapiens
  misc_feature (1)...(555): n = A,T,C or G
aggagatactataattcctacacgagaaacgcgcgatgagagacaatgattctaaaacatggagtggacgggacaaannntttgaccccgctgcatgaatcgcctcgagcccacgtctgcgntgctgccccgcctgggccaggccccaaaggcaaggacaaagcagctgtcagggaacctccgccggagtcgaatttacgtgcagctgccggcaaccacaggttccaagatgggttgcgggggcttcacgtgttccaagaactgcctgtgcgccctcaacctgctttacaccttggttagtctgctgctaattggaattgctgcgtggggcattggcttcgggctgatttccagtctccgagtggtcggcgtggtcattgcagtgggcatcttcttgttcctgattgctttagagggnnnaagtggagctggaaaacatcatcaggtgttgctatttttttatatgattattctgttacttgtatttaatggtcagttttctgtatcttgcccttggttagccctgaaccaagaacaacagggtcagcttttggt

SEQ ID NO: 23047 - DNA, 528 bp, Homo sapiens
  misc_feature (1)...(528): n = A,T,C or G
agggtttnnnnagggacgcccccccaattagaccggccatagcaccgcctgcacgaattcggcacgagcctgaatggcattccaatcttttctgtacctccactcagcacagttcatgttcagtagatgctgaacattcttagaaatactgtgtgtgaacttagaaaagtgcaagaagacaggcatgtctttgaccccaggaatgatcatttgctgaagatggtgtcaagtgaacctagattaacagccctccactccagatggatatccagtgattcctagaatgggatatagccagagaacaattctatgcaccctacactgacagactcccttaagcaacaccagatgctctactggtacttgaagtacatgactttgaagtcttgaccctccatgaatacctgaattatcagcaagcgggttttgaagctggtgcctcattgaggccatattagagcaacttgtacatttgacctcttgttatcagccatggtactctacttcgtgtgcaagagataactatga

SEQ ID NO: 23048 - DNA, 482 bp, Homo sapiens
  misc_feature (1)...(482): n = A,T,C or G
tgagggccnnnagnagtnnncctgaccccgctgtggaattcgctcgagaagaaatattcaccttcccgcctcatgcccactttgaggcacttcttgaggcggcagtattggcactggttgcggtggtgctggtcgatgggacagttcctgttggcacggcatgtcaggtagatgaaactcaagagaaaaggtgtggataaatgaaactagcccatgatgaacctgttttctccgtgaccacaatattaaccaggatgaatggcggtggcagtgggcctgcatcacaggttgcagcagatgttctcaatatttctattaaaatttccttatttccatatgcaagaggagccccagagctgcatacttatggtagctaccatgccgtgatgtaagctgccattcactggggagctttggcaatagaattggctagatcaggaagcctatgtcaactatggaacaacaacttgcagctcatctct

SEQ ID NO: 23049 - DNA, 452 bp, Homo sapiens
  misc_feature (1)...(452): n = A,T,C or G
nattganaactgaggccgctgcgngaattcggcacgagtgtgaccggcgagcgcgggccaccccaccctgttcatttccataaacgtgctttgagaggcggggtccgcatgtacgtactgcctgcccggggcttangagggtggcaccggtgctgggacagacgggactgtgtcctcgccaccccccgccctgccccctgccagccagtgcagcttggatctcgggggtgtggggccctgtgccttcctgaagtgctggcagcccagtggcacctccttcaggcctttggggtattcccctagtgtgcccaagtcagcctcatattctgggcggacagcttgtctggacttcggagttgggggtggtcagacaccacaggagctgtcacctcctgcggatgggcaaataaattggtggaggacgaaaaaaaaaaaaaaaaaaaaaaaaaccc

SEQ ID NO: 23050 - DNA, 488 bp, Homo sapiens
  misc_feature (1)...(488): n = A,T,C or G
gggatttncccagggtgcccccaactgatagctcgttagatnngcctcgagcagaacggngannccaggaggagttagccaaacaacaacaaaaacaaaaaatgtgctggtcttgttttcagctttaagatatctttggataatgttatttctattttttatttttttcattagaagttaccaaattaagatggtaagacctctgagaccaaaattttgtcccatctctaccccctcacaactgcttacagaatggatcatgtcccccttatgttgaggtgaccacttaattgctttcctgcctccttgaaagaaagaaagaaagaagactgtgtttttgccactgatttagccatgtgaaactcatctcattacccttttctgggtttgaagctgctgtctctagaagtgccatatcaattgtgctttgtatcagtcagtgctggagaaatcttgaatagcttatgtacaaaactttntaaatttta

SEQ ID NO: 23051 - DNA, 491 bp, Homo sapiens
  misc_feature (1)...(491): n = A,T,C or G
gtggcngnnnnnnnnnangttagatcgctttgcggaattcactgaagagcgctgctgacacatactttcagtataatgcatgggttaacaaaattaaatagaaatatagaaatagaattaagtggtcataaaaatacatattgatcgtggaggctcgacctaaagcagtgattactagggaatttatataggcttaaagaagaatactaataataactaagctttgcattaaaaatcttaaggaacagactaaactgaaagaagacagggagaaatagagataaagacaataattaatgaaaattttaaaatggttacaatagaatagctctgcaatatttaaaagctagaaaacaaacaaacaaaaaacaccaaatcaggctttgtcaggatttcacaagaagagaagagagaaagcaccaaaaagccaacattaggggactttttttatccaaccattcagtggacaatatgtccacactgtatgtctn

SEQ ID NO: 23052 - DNA, 484 bp, Homo sapiens
  misc_feature (1)...(484): n = A,T,C or G
nggtggcttaaattgatgcctattgatcgccntcggaattcggcacgagcaccactccagggggattttggggcattttcagctttttactttgtgatgaagtttttaaacttgacatcagagaaagtctctcaggaaaaggtgactgagatgatgaaaaagttctgtgctcagccttgggaggagataaaaacatcttacgctggagtaaaggagaagtacctgagtgaatactgcttttctggtacctacattctctccctccttctgcaaggctatcatttcacagctgattcctgggagcacatccatttcattggcaagatccagggcagcgacgccggctggactttgggctacatgctgaacctgaccaacatgatcccagctgagcaaccattgtccacacctctctcccactccacctatgtcttcctcatggntctattctccctggtccttttcacagtggccatcataggct

SEQ ID NO: 23053 - DNA, 453 bp, Homo sapiens
  misc_feature (1)...(453): n = A,T,C or G
gggagcgannnnnnaattgaccgctctgaggaatccggcacgagcccaaacaaatgtgatctgaggtttagatcctcagtgaaaattgtggtttcaagtcttcatggtcagcctcaaggcagttctagatgtgatcagcagtagtcacaaattcttgttttgtctccacacccagaaggcaagttttgtcagagctggggaataatttcagatatttgacatcttgattataaagggcttctgaacatctgtgtttactgcctttggaatacaaacaggtgcaactgagggactagctacactaccaccatttatctgtccaaggcaagagtatcaccaaggcctttgctccagccttacttggcatctttgcgcaagatagtcagagcaaacaatagtaatggacacttctcacacctggccaaggctgttggtacccacgaaatgacagca

SEQ ID NO: 23054 - DNA, 344 bp, Homo sapiens
  misc_feature (1)...(344): n = A,T,C or G
cggcgggccccnccaattgacncccatttgaccccgctgcangaattcggcacgaggaagaatgaacagatgagtaagtggaggtgttatgtaaaggcatattgtactcgaaatctgaagacctgcagcagatttaaattacaactcttgttataactttttaaaagattgtgaaaatatcaaaatataaatgaatcaagttttaatatactgtatgatgggtggatgaggctgtccattgtaccatttgtttgaattctcaggcatggtttggcagtgcaagaattctgtaacattaacaaattcaataaaaagtaaatatatggaaaaaaaaaaaaaaaaaa

SEQ ID NO: 23055 - DNA, 454 bp, Homo sapiens
  misc_feature (1)...(454): n = A,T,C or G
cggcgggtccncccaattgancccgatggggaatctctcacgagcagaggcaggaaaagtgctaataatacaccagaaaatagtcccaacttccctaacttcagagtcattgccacaaagtcaagtgaacagtcaagatctgtaaatattgcttcaaaactttctctccaagagagtgaatccaaaagaagatgcagaaaaagacaatctccagagccatcgcctgtgacactgggtcgaaggagttctggccgacagggaggagttcatgaattgtctgcttttgaacaacttgttgtagaattggtacgacatgatgacagctggccttttttgaaacttgtttctaaaatccaggtcccagactactatgacatcatcaaaaagcccattgccttaaatataattcgtgaaaaagtgaataagtgtgaatataaattagcatctgagttta

SEQ ID NO: 23056 - DNA, 465 bp, Homo sapiens
  misc_feature (1)...(465): n = A,T,C or G
ntttgccctcctgccgattcggcacgaggaaaacctggagctcatcctgacgcagtcggtggagaatgttggagtccggggtgacctggtctcagtgaagaaatctttaggccggaatcgactccttcctcagggactggctgtatatgcatcccctgaaaacaagaagctgtttgaagaggagaaattgctgagacaagaaggaaaattagagaagatcctgacctggcctgcaacttcagcctttctcaaaatcggggcacggtcatcgtggagcgctggtggaaggtaccgctggccggggagggccggaagccgcgcctgcaccggcgacatcgcgtctataagctggtggaggacacgaagcatcggcccaaagaaaacctggagctcatncctgaccagtcggtggagtttattgggacaaacaggagagccagccattgtctccagtacttgcctcat

SEQ ID NO: 23057 - DNA, 499 bp, Homo sapiens
  misc_feature (1)...(499): n = A,T,C or G
catcgacccccctnnnnnnatttgatccgcgctgcaggaattcggcacgagatctgctagtccctgaagcctttaaccaaacgggagtgggcacagaaagccttctcctggcaacaggacaagggctgcccgcgtgtccagccctgttgctctcctggcgctgagaggtgggtccaagcagagttgatcagtccctgcctgccctgcctaggtctagccaggggaggttgtgtgtgtgggagaagaccccgggatctgctggggtgggatggaggttattaaagatctaagtgaggaggggctggggtttggatgcggggtgaggcccgagcgctcacacttcgtgtagggcgggcaggggcctgacctcttgcagggcagtggccttggtgccctacccctgccctgcgcagtatttattgctaaattattgtccaggaggggcagcactgggcctggccccccgggtatttattgctggacatnagggatggttgtg

SEQ ID NO: 23058 - DNA, 468 bp, Homo sapiens
  misc_feature (1)...(468): n = A,T,C or G
nttggcccttcgcgccgcgctgcaggaattcggcacgagctaagggcaaggggcttcctgcggacactggagcaatgtcgctatagggtcaaaaacctcctacggaattaccggaaagccaagagcagccacccaccaggtacctgccccttctatgaggagctggaggccctggtcagggctcggacagccatcagagccacagatggcccaggagaggccgtggcacttcccaggctcggggatagtgacgcagagatggatgagcaggaggaagggggctgggatcctgaagaaatggcagaagactgtaacggtgctggcctggtcaatgttgagtctacccaggggcccaggattgcaggggccccagctctgttccagagtcgtattggtaagaacatggggtttagtcagattcagatttccaaccctcctaccagctagactgctattccctgaggtcag

SEQ ID NO: 23059 - DNA, 471 bp, Homo sapiens
  misc_feature (1)...(471): n = A,T,C or G
ntttgccctttcctccgcgctgcaggaattcggcacgaggtgatgggaagatggacaaggaagagaccaaagactggatcctttcctcagactatgatcatgcagaggcagaagccaggcacctggtctatgaatcagaccaaaacaaggatggcaagcttaccaaggaggagatcgttgacaagtatgacttatttgttggcagccaggccacagattttggggaggccttagtacggcatgatgagttctgagctacggaggaaccctcatttcctcaaaagccgtataactggagagacctgctgctcgttatataattatctgataccaaacacaagcgattctgaatgtacacacacgtttatctatagagcataaggtaaaacaattttgtttaacattttggtattgtttacaaatgttattaaaacatgcaaattcaaaaaaaaaaaaaaaaggggggggccg

SEQ ID NO: 23060 - DNA, 483 bp, Homo sapiens
agggcacctgtcgctgagtagcgcacagctccatgctggtctttttgtagaaactcagtagagaaagtctagctaagcagtgttgaaaagcctgcaagatttcagtttacatatcgacagcatatccactgatttctaaatgggctggtcccatcatctgaagattctgtatagaattattaaaaaaaaaatccatctttctttattttcttcacatgcgacaatttcttaagcactttgacattttggtagttccacactattgagagaataatatatttattttgtgacattgcagatgccaaatactgtaaccttctcatgataacaatacttaggttcaagatcactgttcaaaccctgtcatgctttaaaactgatgcgagatgattttgttttttgcataatcaatacttaagggtgcaatcaactgttagtaattgtgcagtaaagtaaagccctgtgggtatcaactactagtta

SEQ ID NO: 23061 - DNA, 464 bp, Homo sapiens
  misc_feature (1)...(464): n = A,T,C or G
ntttgccccgcgctgcaggaattcggcacgagcacatttaagcaccttgatggacgtcagattgtggtgaaatacccccctggcaaagtaattgaaccagggtgtgttcgtgtagttcgaggtgaagggatgccgcagtatcgtaatccctttgaaaaaggtgatctttacataaagtttgatgtgcagtttcctgaaaacaactggatcaacccagacaagctttctgaactagaagatcttctgccatctagaccggaagttcctaacataattggagaaacagaggaggtagagcttcaggaatttgatagcactcgaggctcangaggtggtcagaggcgtgaagcctataatgatagctctgatgaagaaagcagcagccatcatggacctggagtgcagtgtgcccatcagtaaactctgcanacaaattgcacaggtggattttcttttcacatttg

SEQ ID NO: 23062 - DNA, 483 bp, Homo sapiens
  misc_feature (1)...(483): n = A,T,C or G
cgggggcaannattganngcattgacccgcgctgcaggaattcggcacgagagcatgtgctcgggatggaggctgacgccggccacctgtgggcacagaccaaggggcagagatgcagaaagctgcacatctatccaccaccatggcttagggccacctgctcacggagatttcagagacagcctccactttagccttcacacaagacatctccttctggctcaactgcagccaggctctttgaaggccaacttgggaaagaactacaaacgtcatttttcagaagagaattcttgcctgctcactggggaagttattttcagttgtcttttgttgtctgttttcaaaaggaaaataaaaaaaagaaaaggcagtataatctttcacactggaaccagcctgcaagcagccagaggccactgggaaagggcctcttagtgatgcacactggatgcatccatcacctggaatttcacagatcac

SEQ ID NO: 23063 - DNA, 516 bp, Homo sapiens
  misc_feature (1)...(516): n = A,T,C or G
aggtnnnnnnnnnnnaagggagnnccccnnagggagnnccnnaattgatnngccttactgatccgcgtgcaggaattccgcacgagcggactcctcccttggcgccgcggccatggcggccagcgcgaagcggaagcaggaggagaagcacctgaagatgctgcgggacatgaccggcctcccgcacaaccgaaagtgcttcgactgcgaccagcgcggccccacctacgttaacatgacggtcggctccttcgtgtgtacctcctgctccggcagcctgcgaggattaaatccaccacacagggtgaaatctatctccatgacaacattcacacaacaggaaattgaattcttacaaaaacatggaaatgaagtctgtaaacagatttggctaggattatttgatgatagatcttcagcaattccagacttcagggatccacaaaaagtgaaagagtttctacaagaaaagtatgaaaagaaaagatggtatgtcccgccagaacaagccaaagt

SEQ ID NO: 23064 - DNA, 479 bp, Homo sapiens
  misc_feature (1)...(479): n = A,T,C or G
ggtggggaattgccgtctgtggttcgaggcgccttaagccgcttgccttgctctcagaatcgctgccgccatggctagtcagtctcaggggattcagcagctgctgcaggccgagaagcgggcagccgagaaggtgtccgaggcccgcaaaagaaagaaccggaggctgaagcaggccaaagaagaagctcaggctgaaattgaacagtaccgcctgcagagggagaaagaattcaaggccaaggaagctgcggcattgggatcccgtggcagttgcagcactgaagtggagaaggagacccaggagaagatgaccatcctccagacatacttccggcagaacagggatgaagtcttggacaacctcttggcttttgtctgtgacattcggccagaaatccatgaaaactaccgcataaatggatagaagagagaagcacctgtgctgtggaggggcatntagatgccctcacgaatat

SEQ ID NO: 23065 - DNA, 469 bp, Homo sapiens
  misc_feature (1)...(469): n = A,T,C or G
nctcgtcgcgtgcggaattcgcggcgagtccctaagctggcgagggcttgtgggtcatcttgcacctttacaaacaaggaattcccctctgtgccctgataaatcagcacctcagtggacttgccaggaagtttcctgatgtcaaatttatcaaagccatttcaacaacctgcatacccaattatcctgataggaatctgcccacgatatttgtttacctggaaggagatatcaaggctcagtttattggtcctctggtgtttggcggcatgaacctgacaagagatgagttggaatggaaactgtctgaatctggagcaattatgacagacctggaggaaaaccctaagaagccgattgaagacgtgttgctgtcctcagtgcggcgctctgtcctcatgaagagggacagcgattccgagggtgactgaggctacagcttctatcacatgccgaactttcttgtgac

SEQ ID NO: 23066 - DNA, 502 bp, Homo sapiens
  misc_feature (1)...(502): n = A,T,C or G
agaggagggtcctgcccactganccactgaaacctaccggaatttcgcacgagctgaggcgaacaatggcggagctgggcgaagccgatgaagcggagttgcagcgcctggtggccgccgagcagcagaaggcgcagtttactgcacaggtgcatcacttcatggagttatgttgggataaatgtgtggagaagccagggaatcgcctagactctcgcactgaaaattgtctctccagctgtgtagaccgcttcattgacaccactcttgccatcaccagtcggtttgcccagattgtacagaaaggagggcagtaggccatcccccaggagaatgacagaagcaaaggacttgttactaagcagatttaagggtcagtgggggaaggctatcaacccattgtcagatcagcatcaggctgttatcaagtctgttggtgctaaaaagtaaaagatgaaatgttaaaaaaaaaaaaaaaaaaactcgagggggggcccggtcc

SEQ ID NO: 23067 - DNA, 465 bp, Homo sapiens
  misc_feature (1)...(465): n = A,T,C or G
acctgatcgcctgggaanccgtggaggaccttttagntntctttttttcttgctgcagcaacgcgagggggagcaccaggatctcgggctcggaacgagactgcacggattgttttaagaaaatggcagacaaaccagacatgggggaaatcgccagcttcgataaggccaagctgaaaaaaacggaaacgcaggaaaaaaacaccctgccgaccaaagagaccattgagcaggaaaagcggagggaaatttcctaaaatcctggaggatttcctacccccgtccttttcgaaaccccagtcgtgatgtggaggaagagccacctgcaaaatggacacgagccacaagctgcactgtgaacctgggcactccgcgccgatgccaccggcctgtgggtctctgaagggacccccccccaatcggactgccaaattttccggtttgccccgggatattataaaaaan

SEQ ID NO: 23068 - DNA, 499 bp, Homo sapiens
  misc_feature (1)...(499): n = A,T,C or G
gtnnnnnnnnnaaggagngcccnaggggcccccttcgatcgcctgtggaattccgtcgagcggacgcctgcctctctgtggaggcccagaccttcatggactcttgttcaacgtcagagcaccggctgggcaaggactccccctccaacaagctgctctatgccaaggacatccccagctacaagagctgggtggagagatactacgcagacatcgccaagctcccagccatcagtgaccaggacatgaatgcctacctcgccgagcagtcccgcctgcacgccgtggagttcaacatgctgagtgccctcaatgagatctactcctatgtcagcaagtatagtgaggaggtgagacagggccccagcagggacagaaaccaacaggcaaggagcaggaagcctgactcagtccttaaatagatggcaatttagaaaacacattcagggagtcagaagcccatgagctcgaaaattatcattcctttatgaggcaactc

SEQ ID NO: 23069 - DNA, 388 bp, Homo sapiens
  misc_feature (1)...(388): n = A,T,C or G
agagcacggggccaggnnaacctgagacacctcganaccctaccggaatttcgcacgagcccactcctgccatatcagggctggtctctgtggactcagcccagggctgcctcctctttgtcaccccaaagtggggcagccagggacagccagggtgtgttcagaatgggttcttcctgcagggcaggaagggcagattgttaaaggggctgcggcccagaccaccctggtccctcctccggcagtgactcagacccacactgtgccgtgcagctgtgtgccctgcacacccgcttgacggcgcactgctcacttctggggggccctttcagaggcacttttaaagcaaataaaacatttattgttcagaaaaaaaaaaaaaaaaaaa

SEQ ID NO: 23070 - DNA, 489 bp, Homo sapiens
  misc_feature (1)...(489): n = A,T,C or G
agggcggnnnnnnnnnngtatgaccgcctgcggaattcgttgcgagtctcagtttattttgggctcttctagcctcaagtctgtgttcagctaaagatatatggctgcataggcaaagggacctgttaggtgagcctgaaggtgattcttgcataattctcagaaactcaatcaaggtcttcctgtatctcccgcttcctcccctttctcctgcctccaacctgcacatgtcagtgcatccacatgcacacacattcaagcaggacataaggcggccggccggtccacttcagatcataaccaaaagtcttggcccctcaccactcacctgtcagcctcaggcagccagggacccagcatgggaggcacacctcatgagaactaccccaatgctcaagtgcccgcaaatgcccacaaacccttaaatgtgtctaggaacctttcaccaactgaagcctgactgcaagatgaaggaaggacctttggaat

SEQ ID NO: 23071 - DNA, 482 bp, Homo sapiens
  misc_feature (1)...(482): n = A,T,C or G
cgaggtccccccattcancggctgcatagttcgcacgagcaaggagccactcggcttcataaggtcctcgagtggattgcttctatctttgcttttgccacctgtggaggttttaagggccaaacagaaattcaagtgaattgtcctcctgcagttactgagaataaaactgttacagctacttttggttatccattcaggttgaatgaggcatcatttcagccacctccaggtgtaaacatatgtgatgtaaattggaaagattacgtcctcataggcgattactcttcttctgcacaattctatgttacctttgcagtctttgtgttcctgtactgcattgctgcccttctgctttatgttggctacacgagtctgtatctggatagtcgtaaacttcctatgatagactttgttgttacacttgttgccacttttttgtggttggtgagcacttcagcctgggctaaagctctgacagn

SEQ ID NO: 23072 - DNA, 523 bp, Homo sapiens
  misc_feature (1)...(523): n = A,T,C or G
aggggntgtgnncnnggnnnnnnnaggggaattgaccgncnttnganattgcaccgcctgcaggaattcggcacgaggaagaggttgtttatgagtcgcaccaaccggccgcctctgtccctttcccggatgatccggaagatgaagcttcctggccgggaaaacaagacggccgtggttgtggggaccataactgatgatgtgcgggttcaggaggtacccaaactgaaggtatgtgcactgcgcgtgaccagccgggcccgcagccgcatcctcagggcagggggcaagatcctcactttcgaccagctggccctggactcccctaagggctgtggcactgtcctgctctccggtcctcgcaagggccgagaggtgtaccggcatttcggcaaggccccaggaaccccgcacagccacaccaaaccctacgtccgctccaagggccggaagttcgagcgtgccagaggccgacgggccagccgaggctacaaaaactaaccctggatcctactctcttatt

SEQ ID NO: 23073 - DNA, 465 bp, Homo sapiens
  misc_feature (1)...(465): n = A,T,C or G
ntttgcaccgcgctgcaggaattcggcacgaggcaaggcgggtgctgactccctgctgcggaatgtggaggatgagacgccccaggacctgactgaggaatcccttgtccttttgccctttgatgacctgaagatctcagggaaactgctgctgtgtaccgactgaagccaggcagggtctgggatcctcagggctccacctctccatctggaagccggagccataactgctgcagtttgggcccaggctatgtgctcttctggtgccctagggactgctgtggccagagcctggggccagccagtacagtcctgagccgaggaggagggactgcaagtggaagagagccagtctggaaggaagagctttccaggtggacagggcttcttggaagacccccaaagccccaggtatcctgggtgaagcctgtttgcctctcttgaaaatgggaggtgctcttgttt

SEQ ID NO: 23074 - DNA, 466 bp, Homo sapiens
  misc_feature (1)...(466): n = A,T,C or G
nattgacncngcgctgcaggctcgcggtcccaagaagcatctgaagcgggtggcagctccaaagcattggatgctggataaattgaccggtgtgtttgctcctcgtccatccaccggtccccacaagttgagagagtgtctccccctcatcattttcctgaggaacagacttaagtatgccctgacaggagatgaagtaaagaagatttgcatgcagcggttcattaaaatcgatggcaaggtccgaactgatataacctaccctgctggattcatggatgtcatcagcattgacaagacgggagagaatttccgtctgatctatgacaccaagggtcgctttgctgtacatcgtattacacctgaggaggccaagtacaagttgtgcaaagtgagaaagatctttgtgggcacaaaaggaatccctcatctggtgactcatgatgcccgcaccatccgctacccn

SEQ ID NO: 23075 - DNA, 500 bp, Homo sapiens
  misc_feature (1)...(500): n = A,T,C or G
cccccatcgcccgccgtcggaatttgccncgcctgcaggaattcggcacgagaagaagttgagaaccagagaaaccgacctaggggtattctcccatttggcccgtcctcccctaaagtcaccacctgctgcttttctggagcgcttaccagagaaggagggctgtctgagattcgagggaaacaagctctcaggacttccggtcgccatgatggctgtgggcggtaaacgcggttagtgcaagcatctgggccatcttcaatggtaaaaaagatacagtaaagacataaataccacatttgacaaatggaaaaaaaggagtgtccagaaaagagtagcagcagtgaggaagagctgccgagacgggacagtggatccagtacgaacatagatgcatccaaactcattagactacaaggatcacggaaactggtggttgacaatagcatacgggaactgcaatacacaaaaactggaattttttttcaggctgaggcctg

SEQ ID NO: 23076 - DNA, 491 bp, Homo sapiens
  misc_feature (1)...(491): n = A,T,C or G
ggggaattgtncgctgcggaattcggcacgcgcagagagtgcccaaatctgggcgttccagctccttagacggagagcaccacgatggataccacagagatgaaccttttgggggccctccaggcagtggcaccccttctcgagggggccggagtggcagtaactggggtagagggagtaacatgaactctggcccgccgaggcgaggagcttcacggggtggtggaaggggtcggtagaagctggaactgagtaccctgaggcctctctggacagtatgtaagaacttcttgtggactcaccaagagaaacaaaaggaagcctgcaccattgtagccctgaactcttttctgggcacctgaatcccaggaaccctcaatgaggtcttcaagatgaagagactgctgccagctaccagcctggctggccctgtcctgtccaccctcattgccccaactcccatgttgttttgtgaagataaaagctgggat

SEQ ID NO: 23077 - DNA, 498 bp, Homo sapiens
  misc_feature (1)...(498): n = A,T,C or G
agtgaggagccnnnccatgaaacacctannacctaccggannnncttttatagangataaacattttattacactaaaaaagtcatctgttaactgctgaactgcagggggaccacatgtgaggctacttcagaaaaatggcatcagataacatatatagatttctggcattataaaatggctagattctcccctaccttccctcattaaatattaatcagtggcttaggtcagttctagtgggaacacttaattgctgacttcacataaaaccaggattagcctaatgtgccaatggtatgagtccattcctggccatcttcccaacagccagaccgctgtggcttggacaccggaggcaacatctggggggcctcagttccactcctctgtggtgagcttgctcttcctaataactggctctggagtcacatcaacaatggtggcattgccatctggggcccacatgagccctctggggcgtgctgcatccctact

SEQ ID NO: 23078 - DNA, 452 bp, Homo sapiens
attaggaccttcgcccccgcgctgcaggaattcggcacgagcggagatcgcaccattgcactccagcctgggcgacagagcgagactccgtctcaaaaaaataaataaataaataaaaaataatgtgtattttatcaattcagtgataaagcagacctttgtaaactgtctagcttgtggtgactgattgagggtatcatgaagctccgcgcccccccactccccgacatactcgttcatcctcctctgtcctaaagcgtacttctttggaaaagtagagcagtttatgttagtgtacactagagatggtaaactatgccttgtgggtcaaatcgggcctgctgcctgtgtttgtatggcctgtgagcaaagaaaggtttttacatatttaaatggttggaaaaaatatttaaagaatgctatttttggacacaaaaaattgtatgaaatta

SEQ ID NO: 23079 - DNA, 470 bp, Homo sapiens
  misc_feature (1)...(470): n = A,T,C or G
atttgcnccgcgctgcatgaactnccggctgcaggaattcggcacgaggtccatacggcgttgttctggattcccgtcgtaacttaaagggaaactttcacaatgtccggagcccttgatgtcctgcaaatgaaggaggaggatgtccttaagttccttgcagcaggaacccacttaggtggcaccaatcttgacttccagatggaacagtacatctataaaaggaaaagtgatggcatctatatcataaatctcaagaggacctgggagaagcttctgctggcagctcgtgcaattgttgccattgaaaaccctgctgatgtcagtgttatatcctccaggaatactggccagagggctgtgctgaagtttgctgctgccactggagccactccaattgctggccgcttcactcctggaaccttcactaaccagatccaggcagccttccgggagccacggcttcttgt

SEQ ID NO: 23080 - DNA, 460 bp, Homo sapiens
  misc_feature (1)...(460): n = A,T,C or G
ngggtgggaggggnnnnnnnnnnattgaagtatgaccgcctgtacgaattcggcacgagtgggcatcttcctggccatcatcctcttcccctttgggttcatttgctgttttgccttgaggaagcgacgatgccccaactgtggagccaccttcgcttaaagggaacaccaggcccggctttcctacacccagctctctttttctaatgtaaatgttgtgtacaatagttttatttgattaagcttcaggactgttttgtaaagcgaggtgggaccgatgtggcacacgccagctgcggtttcccggagcgtggagaggcagtgctgctgctcccgcccgaggctcatgacaactcaataaagcactgcttttattttttgcagtcttcaatttgagaaaggtgagaaataatgttttcaataaatgagattcataccattaaaaaaaaaaaaaaaaaaa

SEQ ID NO: 23081 - DNA, 471 bp, Homo sapiens
  misc_feature (1)...(471): n = A,T,C or G
nttgacgttgagactcgccgatttaacctcctagaagatttggatgtgcagccagctggggtctaaatattagtcctcttttcttccgaagctgcaaagaccagtcgtctattgtggtcatggtaggaaaataaagttcatggatttagccaatggttcagtatcagagctattcgggaaactagacattttcttgttttcccttacagtggtgttgagagttaaaacagccagacttgctattgattttctccctagagtgactttgggtctgtcacaggacttgctgctttcccaagtataaaagaacaactgtattttagaaggggctggttaaaacaccaagaaagtactggttaaatataatctttgtactttagactgtgttcttatcacatatcagcctgataagagggcacagtttcaaaaaagtatttcacctttgaaaaaaaaaaaaaaaaaactcgaggg

SEQ ID NO: 23082 - DNA, 482 bp, Homo sapiens
  misc_feature (1)...(482): n = A,T,C or G
ntttgaccgctttaggaccttgcgagagttgtagaggccgtggacagcgcacctgcgtcgacgcgacctgcacgccccgtcgcgcatgttctattcaacgtgtgctcagacaaatctggtatggcagaaagcagagtgtctatttgatgaatgtgaggaaatctggaactttgggccacccaggctctctagatgagaccacctatgaaagactatcagaggaaacgctggactctttagcacagatttttgaagaccttgcagactagccatacacgtttgaggactatgatgtctcctttgggagtggtgtcttaactgtcaaactgggtggagatctatgaacctatgtgatcaacaagcagacgccaaacaagcaaatctggctatcttctccatccagtggacctaagcgttatgactggactgggaaaaactgggtgtactcccacgacggcgtgtcctccatgagctgctggccg

SEQ ID NO: 23083 - DNA, 504 bp, Homo sapiens
  misc_feature (1)...(504): n = A,T,C or G
ggggnaattgaccggcnttaggatttcgctccgcgctgcaggaattcggcacgagccgccgccgccatgccggacagctgggacaaggatgtgtaccctgagcccccgcgccgcacgccggtgcagcccaatcccatcgtctacatgatgaaagcgttcgacctcatcgtggaccgacccgtgaccctcgtgagagaatttatagagcggcagcacgcaaagaacaggtattactactaccaccggcagtaccgccgcgtgccagacatcactgagtgcaaggaggaggacatcatgtgcatgtatgaagccgaaatgcagtggaagagggactacaaagtcgaccaagaaattatcaacattatgcaggatcggctcaaagcctgtcagcagagggaaggacagaactaccagcagaactgtatcaaggaangtgggcagttcacccaggtggccaaggcctaccaggaccgctatcaggacctgggggcctacagttctgcc

SEQ ID NO: 23084 - DNA, 454 bp, Homo sapiens
atttgacatctgcccgcgctgcaggaattcggcacgagaaaacgtgaatgccgagttgggcagtatgtggtcgacctgacttcttttgagcagttggcactacccgtcttgaggaatgccgactgcagcagtggcccagggcaaagagtgtgcgtcatcgatgagattgggaagatggagctcttcagtcagcttttcattcaagctgttcgtcagacgctgtctaccccagggactataatccttggcacaatcccagttcctaaaggaaagccactggctcttgtagaagaaatcagaaacagaaaggatgtgaaggtgtttaatgtcaccaaggaaaacagaaaccaccttctgccagatatcgtgacgtgcgtgcagagcagcaggaagtgaagacacgtgcattcctgccttccgtgaaggagtgcccagttcaagaggagcctgatgg

SEQ ID NO: 23085 - DNA, 449 bp, Homo sapiens
  misc_feature (1)...(449): n = A,T,C or G
attgacctcctgcggcgggcgcggnggctcacgtctgtaatcccagcactttgggaggctgaggcgggcggatcacctgaggttgggagttcaagaccagcctggccaacatggggaaaccccgtctctactaaaaatacaaaaaattagccgggtgtggtggcgcgtgcctataatcccagctactcgggaggctgaggcaggagaatcgcttgaacccgggaggtggaggttgcggtgagccaagatcgcaccattgcactccagcctgggcaacaagagcgaaactctgtctcaaaataaataaaaaataaaagacagaaagcaaggggtgcctaaatctagacttggggtccacaccgggcagcggggttgcaacccagcacctggtaggctccatttcttcccaagcccgagcagagggtcatgcgggccccacaggagaagcg

SEQ ID NO: 23086 - DNA, 405 bp, Homo sapiens
  misc_feature (1)...(405): n = A,T,C or G
acgagttctttcactaaagatgatgaaagtgaagtccaaattccaatgatgtatcagcaaggagaattttattatggggaatttagtgatggctccaatgaagctggtggtatctaccaagtcctagaaataccatatgaaggagatgaaataagcatgatgctggtgctgtccagacaggaagttcctcttgctactctggagccattagtcaaagcacagctggttgaagaatgggcaaactctgtgaagaagcaaaaagtagaagtatacctgcccaggttcacagtggaacaggaaattgatttaaaagatgttttgaaggctcttggaataactgaaattttcatcaaagatgcaaatttgacaggcctctctgataataaggagatttttctttccaan

SEQ ID NO: 23087 - DNA, 469 bp, Homo sapiens
catcgcaccgcctgcagatagacccgcctgcacgagattcgcacgagccggtaggagaggctaaaaaggaaaggcctaaaatgaggaacagagttaccacaacaagcagtacctacttccagttcttgggcccaagagtttgtggttgttgctgctttcatcttcctcagccaacacaaaaggaaagtgccaaggggcgattcctacgaccttcagtgcagtctccaccttgcggacttggctcatttgtgtccactcctttctccagccttttacacttgatgctcttggatgaatacaaaggagcacaattaatggaaaacacaagcttgggagtcaagggattcgggttctattcttcgcctcccttggtgacgacatcattaccttgggttattcaagctttcagtgccagagttcctatatcaataaaagattattacattgaaaaaaaaaaaaaaaaaactga

SEQ ID NO: 23088 - DNA, 502 bp, Homo sapiens
  misc_feature (1)...(502): n = A,T,C or G
tcggagtatatantggaggggaaataaaaggagagaaagggttgaccgcctgtggaattccgctcgaggaacactgnggatgaaatattgtcaagattaaacaaaatgcgaaacacccaccattaaaaggagacagtgaaaagtgcatataattaaaataggccatgttcaatggccttcatccacaaataaagatgtgctgtccaccaattcctctacacagaatcttgagggacagagattttcatcgcatagtccaaatttcttctttcataggtaaaataattagcctctcagtttttaagtttgtatccaggtgtagtgcacggagttctgttgcagaaagtatagtccactcgtcctctaataattttgtttttctgtctgaagttgaaatattggccggttgaagtttattgcaaggcatacggttgtataatttagttggctagtgtatattatagtggaaagaagcagagttaagtttaaatttccattctca

SEQ ID NO: 23089 - DNA, 470 bp, Homo sapiens
  misc_feature (1)...(470): n = A,T,C or G
cttagaccgcccatagacccgcgctgcaggaattcggcacgagaagctcagagaggtgtcaccagcaggtgttcattcccatgccagccttgccccccggcttttcccaagcaggctcctgcgtgcccactggctccagcctggtcctctgtctcttggctgcttcactcctgctctttgtcccgactctggccctgcttacaggggccactacctgctggtgcctccataacaagcgtctggcgttgagacccctggcatggcaggggctttggggtctggtttccacaaggcttagccatggcagaacctcgttttattttaactctttgcccctacaaacaaacagcagtacttgccagaaccattcttgggattcaggagctcgggcgactgccttggcctctggccgcacccangagggtggggttggatctgtgtagttgccaggcccacacctgccagcaggn

SEQ ID NO: 23090 - DNA, 459 bp, Homo sapiens
aggaggggacattgacctgcgctgcacgaattcggcacgagagagtgtccgttgcttcccgtccgtgtcgcggccctgcggttggcggcctcctcgtggagcggagcaaggccaggcggcccctgctcgagtcccgcgtcgccatggccgcggttcccgagttgctgcagcagcaggaggaggaccgcagcaagctgagatctgtatctgtggacctgaatgttgatccctcgcttcagattgacatacctgatgcgctcagtgagagagacaaagtcaaatttacagtgcacacaaagaccacactgcccacgtttcagagcccagagttttctgttacaaggcaacatgaagactttgtgtggctacatgacactcttattgaaacaacagactatgctgggcttattattccacctgctcctacgaagcccgactttgatggtcctcgaggggggg

SEQ ID NO: 23091 - DNA, 492 bp, Homo sapiens
  misc_feature (1)...(492): n = A,T,C or G
attgcccgcctgcggatttcggcacgaggccacgcctgcgcaatcggctccagtgcgcctgcggaggcggncctatgacgtgaataaccctataccttccaatttgaaatcagaagcaaaaaaggctgccaaaatattaagagaattcacagaaataacttccagaaatggacctgataagatcattcctgctcacgtaattgcgaaggctaaaggccttgcaattctgtctgtgatcaaagccgggttcctggtgactgccagaggaggcagcgggattgtagtggcgcgccttccagatggaaaatggtctgcaccctcagccattgggatagctggccttggtggaggatttgaaataggaattgaggtatcagacttggtgataattctgaattatgaccgtgctgtagaagcttttgcaaaaggcggaaatctgaccctcggagggaacttgactgtggcggttgggcccttgggaaggaacttgan

SEQ ID NO: 23092 - DNA, 454 bp, Homo sapiens
  misc_feature (1)...(454): n = A,T,C or G
atttgaaattcgatgcgcgctgcaggattcggcacgagcttcaatggaaaagtaacatttaaaaatattaaagcatgttatttgacctaattttttagcatttgagttgttccattaaatggagcatcttgtaaatttcaagtattttatacttgcaattgttaagagttaacaggtagttggatttgtcgcagacaatgagttaaggaatcctttcacgtttttcccaactttaaaattaaggattctcaggtccctgtgtagagcagtgaaaataagatgtgcgtatgtgtgtgtatgcctggagaattggtgtttcacttcagtgagaggattggctgtgagcttcagaccaggaaatgtgtcatcttgccaggcacctggctgagtgtgctggagtgaggatcttgaacagaaacttccttttctggtattattcactacgaagctaana

SEQ ID NO: 23093 - DNA, 484 bp, Homo sapiens
  misc_feature (1)...(484): n = A,T,C or G
tggtggtcccntttgcccgcctgatgaattcggcacgagataatggccacttacctgactggggaactgacggccaccagtgaagactataagctcctggaaaatatgaataaactcaccagcttgaagtatcttgaaatgaaagatattgctataaacattagtaggaacttaaaggacttaaaccagaaatggtgctctttcttggtatgggagtacccaagaaacagaatcagtaatggaaagattgctcaaggagcaagaaattaaaaagaatggaaaattagtagatgagagacactaagtctgggccacagtcgtgcctgatcaactagctactgtcttctaaagcatctgccctgctagtgctcagaatcatgtcacgccacctaatctgtcttagcatagctggagagacactagcattattacttttccactcttttcctatattctttgttaataaagccatataaacatgana

SEQ ID NO: 23094 - DNA, 482 bp, Homo sapiens
  misc_feature (1)...(482): n = A,T,C or G
ggtgcttaaatgatgccgtttgacggcntcgngaantttcagnttaaggtcatttttgtccccgctgatgaaagttagagctgcttcctccaggcagccctgggagtaggggcacagacttgtgcctcgcttcccagcagctgcccagtgcctctgtccacacccacctccctggtgtacttgccccctacagcagcagcccagatcctcccctggattaaaattgcaactggtgccctaacccaaaacttgagaaaaaattctctatcacatccactcttctggcatttgtagaatctctggccctgggtgtgtcttttcctgtagctgttacagatttcttaagcagatttcttaagcagatggacatgtccagattcatgcctaaatatccagttgataactggaaaatgctggttcacgggtctttagtaaagattaataagggatccccatgtgctggggagtgtgcttccatttga

SEQ ID NO: 23095 - DNA, 461 bp, Homo sapiens
  misc_feature (1)...(461): n = A,T,C or G
aattgancgcttgaggactctgcacgagcagaaacacaaaactttgacttgacttgcgaagtgaagcagggttttcatttttactctccttggtttaggtctagaaagaagaatactgacctgagaggaggcccagtgagattctgaaacctaattcttcgaaggcgtactggcccttagttcagttattttagttgtataagttgatattttttttctggaatgtagccatttgctgttatctgggaaacaagattctaacaggaaaccagcctaagacacttcaggttgagcgctgcctcggagtctgtgcccgtcgcgtcccctgcttgagttttgcacttggaagaaccctgcaccggctggcgtgtgcgacggcccagtcccatccagagcatggagcccgaccccagccagcgccttccactccatcatttcatttcacacccccgaagggaggg

SEQ ID NO: 23096 - DNA, 454 bp, Homo sapiens
  misc_feature (1)...(454): n = A,T,C or G
nttagaccgccttgaggaactctgcacgagaggaatttgctttgtttactgctagtatattagaaatcctagatctcagaatcacaatagtaataaacaacaggggtcattttttcctaacttactctgtgttcaggtgtggaatttctgtctcccaagaggaaatgtgacttcactttggtgccaatggacagaaaattctacctgtgctacataggagaagtttggaatgcacttaatagctggtttttacaccttgatttcgaggtggaaagaaattgatcatgaatctctaataaatttaaatctcttaaaccagtaggtgcttaatattttttgatttgattaatgcccatttaaatctcatgggttctattaaaaatatatatatatagggccccaatccattgccatcaaattgcccttggacttttccaaggtatattatggagtt

SEQ ID NO: 23097 - DNA, 463 bp, Homo sapiens
  misc_feature (1)...(463): n = A,T,C or G
ntttagaccngccctagacccgcgctgcaggaattcggcacgagcagccttcctcaaaaagtccgggaagctgaaagtccccgaatgggtggataccgtcaagctggccaagcacaaagagcttgctccctacgatgagaactggttctacacgcgagctgcttccacagcgcggcacctgtacctccggggtggcgctggggttggctccatgaccaagatctatgggggacgtcagagaaacggcgtcatgcccagccacttcagccgaggctccaagagtgtggcccgccgggtcctccaagccctggaggggctgaaaatggtggaaaaggaccaagatggcggccgcaaactgacacctcagggacaaagagatctggacagaatcgccggacaggtggcagctgccaacaagaagcattagaacaaaccatgctgggttaataaattgcctcattcn

SEQ ID NO: 23098 - DNA, 455 bp, Homo sapiens
agcggggtttgcactgatcgcctgcagaattcggcacgagggaaacgggagtgaacggagagcgtagtgaccatcatgagcctcctcaacaagcccaagagtgagatgaccccagaggagctgcagaagcgagaggaggaggaatttaacaccggtccactctctgtgctcacacagtcagtcaagaacaatacccaagtgctcatcaactgccgcaacaataagaaactcctgggccgcgtgaaggccttcgataggcactgcaacatggtgctggagaacgtgaaggagatgtggactgaggtacccaagagtggcaagggcaagaagaagtccaagccagtcaacaaagaccgctacatctccaagatgttcctgcgcggggactcagtcatcgtggtcctgcggaacccgctcatcgccggcaagtaggggccgcctgtctgttgacagaa

SEQ ID NO: 23099 - DNA, 458 bp, Homo sapiens
agatgggacattgacctgcgctgcacgaattcggcacgaggaaggccaaagactcaagatttatctatccttgaattattcagtgatgctgattacaacaggcctccgttatacgaagggaaaacatcccagaccccccagtgaatgcctgaaactggattctactgaaccctgagatggtactaagtgactaacgggtgaatagcgtgtacagcatggatacactagacaaagggaggattcgcatcccgggctggtcagcaagaggtttcatcaccccactcaaaatggcaggaccgtatgaacctgaatccagagaaacggctcatcagtctccaatcctctgattttctaaaccaggactacattatattaaaaccagaaaaagcaatacctcttttcacagaatggactttctggtggaaatgggaggaaccaaaagaaggctgacttcttca

SEQ ID NO: 23100 - DNA, 498 bp, Homo sapiens
  misc_feature (1)...(498): n = A,T,C or G
cgggccgnnnattganaatcgaccgcctgcgcgaattcggcacgagtcccactcaagtattcttcagtatacggacatgatcatacttatggtgaatattttccaaaacaaaactcaagacataactggacagttacggtaatgccgggttagactgttaaagtcaggagagttcctcgactcctgtatgtggggttgcagttgctcactgggtgcaagtctgcctctttccatcataaatgatctgaaggctgtgactatttttacctcatctttacatcctccacagtaagtggtaaacgaatacatgacttatccataccaatagcatgaactgctttcttcctgaactgaaggcaagcccatatggttgccactgagctccaagagctccaccgatgtggtcttgagaagaggaggaaataaagccaaatcctcacaaaaaaaaaaaaaaaaaaaaaaaaaaatttgggggggggcccgggccccaatttcccc

SEQ ID NO: 23101 - DNA, 484 bp, Homo sapiens
  misc_feature (1)...(484): n = A,T,C or G
nnnncccaaggggggnnnntttgancttgcatggctgtangaattcggcacgagctccagttggggggctggggcgggcagcctggatgagataacgtgagccttttttccctctttgtttttttaacaagattttctaatcgacttgcagagtagttgaagtgggtaagcagcagggtaccttgtataatgcacgacagttgcagtatgggaagaatggaccgggcccctgggataaaatcagagtggtcctcacacctagaggacggggacaaccagctttcagagtagcctcatcagtgcccttgcagtctgactgtgtacacttggttcagctaatgtctgagagtcctgcactgggttactttatactagtgaggacgttaaccagccatattggctcaataaatagcttcggtaaggagttaatttccttctagaaatcagtgcctatttttcctggaaactcaattttaaatagtcc

SEQ ID NO: 23102 - DNA, 458 bp, Homo sapiens
  misc_feature (1)...(458): n = A,T,C or G
ggcggccnattggcatcgactcgcgctgcaggaattcggcacgagccgccttggagaccctggacgagctgctggcggcgggcgaggccggcaccttcgacgtggccgtggtggatgcggacaaggagaactgctccgcctactacgagcgctgcctgcagctgctgcgacccggaggcatcctcgccgtcctcagagtcctgtggcgcgggaaggtgctgcaacctccgaaaggggacgtggcggccgagtgtgtgcgaaacctaaacgaacgcatccggcgggacgtcagggtctacatcagcctcctgcccctgggcgatggactcaccttggccttcaagatctagggctggcccctagtgagtgggctcgagggagggttgcctgggaaccccaggaattgaccctgagttttaaattcgaaaataaagtggggctgggacacaaaaaaaaaa

SEQ ID NO: 23103 - DNA, 474 bp, Homo sapiens
  misc_feature (1)...(474): n = A,T,C or G
aatggaaacccactgagaagcgtcgcgggntnccaagttcaaaagagtcccacgaactggctgggtatacagaaatgtccagaggccggagagcgtttcagatcacatgtaccggatggcagttatggctatggtgatcaaagatgaccgtcttaacaaagaccggaagctatgaagcagataacccagctcctaccagaggacctcagaaaggagctctatgaactttgggaagagtacgagacccaatctagtgcagaagccaaatttgtgaagcagctagaccaatgtgaaatgattcttcaagcatctgaatatgaagaccttgaacacaaacctgggagactgcaagacttctatgattccacagcaggaaaattcaatcaccctgagatagtccagcttgtttctgaacttgaggcagaaagaagcactaacatagctgcagctgccaatgtgagtctgtttgttttn

SEQ ID NO: 23104 - DNA, 494 bp, Homo sapiens
  misc_feature (1)...(494): n = A,T,C or G
natcgcccgcctgaggctccgacgcagacccctctctgcacgccagcccgcccgcacccaccatggccacagttcagcagctggaaggaagatggcgcctggtggacagcaaaggctttgatgaatacatgaaggagctaggagtgggaatagctttgcgaaaaatgggcgcaatggccaagccagattgtatcatcacttgtgatggtaaaaacctcaccataaaaactgagagcactttgaaaacaacacagttttcttgtaccctgggagagaagtttgaagaaaccacagctgatggcagaaaaactcagactgtctgcaactttacagatggtgcattggttcagcatcaggagtgggatgggaaggaaagcacaataacaagaaaattgaaagatgggaaattagtggtggagtgtgtcatgaacaatgtcacctgtactcggatctatgaaaaagtagaataaaaattccatcatcactttggacag

SEQ ID NO: 23105 - DNA, 405 bp, Homo sapiens
gcgcccccccccccgccccccttgacccgcccgcagaattcacccggctgcaggaattcggcacgagcatttctgctccaggatggcaggctgcgtcttcttcatgggtgcatgaccagcctggcgtgggtgtgcccggggaaagtaggtgtacactgggagccgtgccatgtttcaggccctgtcctggctctgtctcgggtgcgggaccttggtgctccacactggctgggtggggctggatgggttgagattcacatgtgctccttacgaccacgggtccctgggtgcccgcagcagggactccacccttcgctgtgcgcatattagcgtgcttatgagggtggctttgattgaataaaggattctgctgctagagagataagcacaaaaaaaaagagctcg

SEQ ID NO: 23106 - DNA, 480 bp, Homo sapiens
  misc_feature (1)...(480): n = A,T,C or G
tggggnngaagggggnnnaattgactgccttcggcgcttctggaggaacgccgcgatggctgcgcagggagagccccaggtccagttcaaacttgtattggttggtgatggtggtactggaaaaacgaccttcgtgaaacgtcatttgactggtgaatttgagaagaagtatgtagccaccttgggtgttgaggttcatcccctagtgttccacaccaacagaggacctattaagttcaatgtatgggacacagccggccaggagaaattcggtggactgagagatggctattatatccaagcccagtgtgccatcataatgtttgatgtaacatcgagagttacttacaagaatgtgcctaactggcatagagatctggtacgagtgtgtgaaaacatccccattgtgttgtgtggcaacaaagtggatattaaggacaggaaagtgaaggcgaaatccattgtcttccaccgaaagaa

SEQ ID NO: 23107 - DNA, 492 bp, Homo sapiens
attcgacgccttcggattcgcccgcctgcaggaattcggcacgaggacacatgtgctgatagaattctaaacctctggaatttccctgctggcgacttctatggccgttgactgtacagggtaacctgatgccagatgctatgggcgtgatgagaactagagcattgcagcatggaggaaactgtgaggcaccagatcctgtgcttctgcaggccattttctgaaaacccctgttaggaaggttggatttggcgtgacttgcttgagcaagagtcctggggagagattttgaggtttaatttaacggtatatccagagctaacagtgactcaactcgtctagttctgcaagtcagatgtacacttagagtctctctgtgaagggtttgggtctgagctgtatagtatgtcaaactgccagtaagccagcccctcaccctctgatagatattcctttaatgcaccagacttcatgtttgataaatgattaatg

SEQ ID NO: 23108 - DNA, 450 bp, Homo sapiens
  misc_feature (1)...(450): n = A,T,C or G
nattgacctcgctgcgcattcggcacgagggcctgccagtgtgtaaaggtgttcaaataaagggctgtttctacaggtaacattaaatgtgaactcaacacttccagagtctttaaagggtttctatgtgtatcagtgtaatagtgttttaccaccaactgcctttctttgttcctagttactgtaacaaatatttgatgatagaggtttattaattttgtttatccagaccattaattttatttgtttttgttctatgtaatcaaataaaatttgagtaacatgtaatggtaaggattaatgcatggttatttggaccagaaaaaagtgccatagaagaccaataactgtttagttgaggctagtctggaacctttcattagagcaatatttggttattgcacttcatttttatttactaagaaatgcaatttgggaatttttaatctg

SEQ ID NO: 23109 - DNA, 535 bp, Homo sapiens
  misc_feature (1)...(535): n = A,T,C or G
agggagattcggcggctgaggaattcggcacgagccgagaacgaggcagggaaagggatcgcagggacaccaagcgccacagcagaagccggagtcggagcacacctgtgcgggaccggggtgggcgccgctagctgggaaaacactagagctgcaggtaccagccactcggccccagggggttatggccacagagggataggcacagtctccaccaccctggagccaagggtctttcacatcacctatccctacatacataccaaatggaaaagtggccatccttttccccccaaacacacccccttaacctatctcttgggacttagcccgaccctccctctcatttcccattaagtctgagaggcaagagctaggttaggcaaggaggtggttggccagagatggggaacagccaggtgccccagtcctctgattnttcctccatcctgcttaccacctccctgggtacttacagccttctcttgggaacagccgggccaggaactggcacctatgagctgatcagcatctc

SEQ ID NO: 23110 - DNA, 488 bp, Homo sapiens
atttgtcggctgcggaattcagcaccagctcctgtttgttatgtttgccgtggtttttatcaccacacgactgggtatatttcctctctgggtgttaaataccacattatttgaaagctgggagatcgttggaccttacccttcctggtgggtttttaacctactgctattgctagtacaagggttgaactgcttctggtcttacttgattgtgaaaatagcttgcaaagctgtttcaagaggcaaggtgtccaaggatgatcgaagtgatattgagtctagctcagatgaggaggactcagaacctccgggaaagaatccccacactgcgacaaccaccaatgggaccagtggtaccaacgggtatctcctgactggctcctgctccatggatgattaattactcaaaactacaagtcccaagcaaagtgaactatttgttccttgaagtatttaataagttgcaaatgcagttcctttcataatat

SEQ ID NO: 23111 - DNA, 457 bp, Homo sapiens
atttgaatttcgtgcgcgctgcaggaatacggcacgagcccaaaactaagaaggataagcgcccaccaatcctagaatgtcttgaaaagttagagaagtccaaaaagacttttcttgataaggacgcacaaagattgagtccaataccagaagaaaccactgcctcagaaaatacagagataacctctgaaaggcagaaagagggcatcaaattaacaatcaggatatcaagtcggaaaaagaagcccgattctccccccaaagttctagaaccagaaaacaagcaagagaagacagaaaaggaagaggagaaaacaaatgtgggtcgtactttaagaagatctccaagaatatctagacccactgcaaaagtggctgagactcttgcactcctgaaagcacaaattgatcctgtactattgaaaaactctagccaacaagacaactcttctcgggg

SEQ ID NO: 23112 - DNA, 485 bp, Homo sapiens
  misc_feature (1)...(485): n = A,T,C or G
ggggnggaacggnnnnnnntttgaccttcaccggctgcacgaattcggcacgagcaaagaaggaaagtagttcagataaaaaagtcttgtctgcaatcatcaacaaaacaattattccccgacttacagactttgtagaattcctttgggatcctttgtcaacctcacagacaacaagtttaataacacattgcagagtgattcttgaagaacattccgcttgtgaaaatgaagttagtaaaagcagacaggatttacttaaatccattgtttcaagaatgaaaaaggcagtagaagatgatgtttttattcctctgtatccaaagagtgctgtagaaaacaaaacatcacctcattcaaagttccaagaaagacagttctggtcaggcctaaagctcttccgcaatattcttctttggaatggactccttacagatgacaccttgcaagaactaggactagggaagctgctaaatcgttacctt

SEQ ID NO: 23113 - DNA, 504 bp, Homo sapiens
  misc_feature (1)...(504): n = A,T,C or G
cgcccccccatcganccgcgctgcaggatttccccgcgctctccgatgctaccagaagcttaacaaacactgatccattaattttaatacattcgccggaccttctagaccggagcagtatacaaaatctgtggggcttacagcctcgcccacctgcttcacttctgcagcccacagcatcatattctcgaaaagataaagaccaaaggaagcaacaggcaatgtggcgagtgccctctgatttaaagatgctaaaaagactcaaaactcaaatggccgaagttcgatgtatgaaaactgatgtaaagaatacactttcagaaataaaaagcagcagtgctgcttctggagacatgcagacaagccttttttctgctgaccaggcagctctggctgcatgtggaactgaaaactctggcagactgaggatttgggaatggaactcctggcaaagtcatcagttgccaattgttacatacgaaactccacanataagaagagtaa

SEQ ID NO: 23114 - DNA, 458 bp, Homo sapiens
  misc_feature (1)...(458): n = A,T,C or G
cgctggggccctganctgcactgcacgaattcggcacgaggcgcagaccagacttcgctcgtactcgtgcgcctcgcttcgcttttcctccgcaaccatgtctgacaaacccgatatggctgagatcgagaaattcgataagtcgaaactgaagaagacagagacgcaagagaaaaatccactgccttccaaagaaacgattgaacaggagaagcaagcaggcgaatcgtaatgaggcgtgcgccgccaatatgcactgtacattccacaagcattgccttcttattttacttcttttagctgtttaactttgtaagatgcaaagaggttggatcaagtgtaaatgactgtgctgcccctttcacatcaaagaactactgacaacgaaggccgcgcctgcctttcccatctgtctatctatctggctggcagggaaggaaagaacttgcatgttggtg

SEQ ID NO: 23115 - DNA, 317 bp, Homo sapiens
  misc_feature (1)...(317): n = A,T,C or G
gggnacccgctcctcccttggggtctagaggagacccccggagatggtccctgatgagcagcgtgatggtggaaagctggactggtctcccgaaaggcgaagccgaggcttcttcctctgaacttttgggccagctgaggggcccacggacttagggcacccacaataggcgtgtgtctgctgtgtgtttgtgttcggccgtcctgcttctctgtttccacacgtacacatgcccctgtgttactttggttcatcttctgtactctgtcagttgtctgctggtcagaacatctgtgactgtgacagagctgtccagn

SEQ ID NO: 23116 - DNA, 470 bp, Homo sapiens
agtgccccaattgcccgtcctgcacgaattcggcacgagtcaagaccagcctgggcaacataccaagacccccgtctctttaaaaatatatatattttaaatatacttaaatatatatttctaatatctttaaatatatatatatattttaaagaccaatttatgggagaattgcacacagatgtgaaatgaatgtaatctaatagaagcctaatcagcccaccatgttctccactgaaaaatcctctttctttggggtttttctttctttcttttttgattttgcactggacggtgacgtcagccatgtacaggatccacaggggtggtgtcaaatgctattgaaattgtgttgaattgtatgctttttcacttttgataaataaacatgtaaaaatgtttcaaaaaaataataaaataaataaatacgaaaaaaaaaaaaaaaaaaaactcgagggggggcccggccc

SEQ ID NO: 23117 - DNA, 444 bp, Homo sapiens
  misc_feature (1)...(444): n = A,T,C or G
aatagcaccgtctgcaggacttcggcacgagtcaaggtgaaaaggagaaccccatgcgggaacttcgcatccgcaaactctgtctcaacatctgtgttggggagagtggagacagactgacgcgagcagccaaggtgttggagcagctcacagggcagacccctgtgttttccaaagctagatacactgtcagatcctttggcatccggagaaatgaaaagattgctgtccactgcacagatcgaggggccaaggcagaagaaatcttggagaagggtctaaaggtgcgggagtatgagttaagaaaaaacaacttctcagatactggaaactttggttttgggatccaggaacacatcgatctgggtatcaaatatgacccaagcattggtatctacggcctggacttctatgtggtgctgggtaggccaggtttcagcatcn

SEQ ID NO: 23118 - DNA, 443 bp, Homo sapiens
aatagacagcttggcggacttcggcacgagcgtgaagcccattttcagtcgggacatgaacgaggccaagcggagggtgcgcgagctctaccgcgcctggtatcgggaggtgccgaacactgtgcaccaattccagctggacatcactgtgaaaatgggacgggataaagtccgagaaatgtttatgaagaatgcccatgtcacagaccccagggtggttgatcttctggtcattaagggaaagatcgaactggaagaaacaattaaagtatggaagcagcggacacatgttatgcggttcttccatgaaacagaagcgccaaggccaaaggatttcctatcccagttctatgttggccacgatccatgaagtcattcagtggaaagatgcacgttgatactattttatagcacaaataaactcactatacaatgggcaaaag

SEQ ID NO: 23119 - DNA, 488 bp, Homo sapiens
  misc_feature (1)...(488): n = A,T,C or G
tggcggagnnncnaattgaatccctaactgatggtcgtgcgaaancggcacgaggttgaacagacatcangggccgatgaaaccaaaggactaggagtcaggagaacaagtcagggattaggagacagcggtttggtttattgttatccagctggaggactcctaggggcagcagcaggaggaataccagggccacggaggggccaggagtctcacagtggagggcagactctaacagatgccagctgaacgctcgctggccctggatgtcatacgagttggggaccagaaatctgggctcagagaacccgtccagggagatttgaagccatgggttatcttctagagttgatactgataatatattttaatttttattgatgtttaataccttctgaaacaggagggtaagatcagatgggaagcccctctgttgaaggatcttgngaaccttggtggttttttttttggttttttttttttggaca

SEQ ID NO: 23120 - DNA, 493 bp, Homo sapiens
  misc_feature (1)...(493): n = A,T,C or G
nttagaccacgctgcaggaatttcgcacgcgtgctcacttccccatcaacgttgttatccaggagaatgggtctcttgttgaaatccgaaatttcttgggtgaaaaatatatccgcagggttcggatgagaccaggtgttgcttgttcagtatctcaagcccagaaagatgaattaatccttgaaggaaatgacattgagcttgtttcaaattcagcggctttgattcagcaagccacaacagttaaaaacaaggatatcaggaaatttttggatggtatctatgtctctgaaaaaggaactgttcagcaggctgatgaataagatctaagagttacctggctacagaaagaagatgccagatgacacttaagacctacttgtgatatttaaatgatgcaataaaagacctattgatttggaaaaaaaaaaaaaaaaaaaaaggtctttcacaccggaacccagggaccgggaccaattggttgggaattcgg

SEQ ID NO: 23121 - DNA, 474 bp, Homo sapiens
  misc_feature (1)...(474): n = A,T,C or G
gaggcnnttttaatactgtctgagtagctattggcacgagtaggcatagagagttgcacataaaaaataccgaagaaaacccaaaattcaatcaacaattctgtcttattgaagagttgctaggattcagagtaaaactcaaaggattcagtttgagcctagaatgatggttagacttgtagtcactgggcttttgttttgctttatggaaatcattgaaggtctggatccctttctctgaatggagagattgagagggatgtcgggcagttcccattagatttagtggccttcatgttattcagaattgttttggtgatacctcacccctgtaatcccagcactttgggtgggtgaggcaggcggatcacttgaagccaggacttcaagaccagcttggccaacatggtgaaacctcatctctactaaaaatacaaaaattagccaagtgtgatggcacatacctgtaatccc

SEQ ID NO: 23122 - DNA, 470 bp, Homo sapiens
  misc_feature (1)...(470): n = A,T,C or G
nttagaatcgcgctgccggaattccgcacgagtgataacctctctcctaaaacaggtaactggtctcatccagcaaaagctatcttacatctgtgatgtgtcaggtgcaacccaatatcacaccttctgatcttagccataccacaccagtatctgtgccaagagaggaaactccctccacccccagaaggttacagaaaactgcctcttcaagtgtttgccttattcagcttttcacttgtgccattaagcaagcactgtagcaaaagccacttccacatggtcctggcagggagcactgctgctccatgctccattctcactgtacttgggattgtattttttataaataagatttttatgtggagcttacaatttgatttacagggaccttgctgcagtaaataccatctcaattttgtgccactggttcagctgttagcacagtacaaaaatcatttgtatcatag

SEQ ID NO: 23123 - DNA, 393 bp, Homo sapiens
attgaccgcctgcagattctggcgagccgtgtcctctccgggagaaatagttcagggcagattgtgccagatttgcattcctctctgcagcccttccagggcttttgaaccacggctgggctctgggtagactcagctggggacagacggtggacactcggcacctttcttgggcctcacaacgtttgcccaaggtcctttaggtttgccttagcagatgtgatcctgccgatgacagggtattcttatctacacttgcagatgtgtgtgtattaaaataacacgcccttggattgaacagagcacactcagctgtgccactgagttcacgtaaggtttgcagtaggacaaaggatggcaaagagttcgatttgcaaaaaaaaaaaaaaaaaa

SEQ ID NO: 23124 - DNA, 452 bp, Homo sapiens
aattgaccttcgctgacgaattcggcacgaggttgccgcgtcttcccggaggcgactgctggaagctgcagggaacagctgcggtgctctgccatattgtgtcttccccggccggtccctcgcctcccggccgagctgacgttggttgaagccatggataacagaacccacagatgcagagggctgactgtacaagtctgtcaaaaaaaccaaactgctggttggctaataattggtcactgtatgacttatagtacaggtgatattacttctgattctagatgaactgtaagagtaaatgggtccagtaattggaatgactccagataagagagctgaaaccccaggagctgaaaagattgcaggattaagccagatttacaaaatgggaagcttgcctgaagctgttgatgctgccaggccgaaggccactctagtggacagtgagtcag

SEQ ID NO: 23125 - DNA, 468 bp, Homo sapiens
cttagcctcgcgctgcaggtttttatgtcaaaagaagccaaaacttgcaatactatttttagcagacaaaaaaaagaactaagtataaaatgtataaatatttttgacttgaacatttggatggcactgggtgcaagtagagcatccatccttcggatggaatgtttggaaaaaagagacttttaaaaaggagacggttgttttaaagagtctgtttaggggttaaagtactgtaactcacgactgttaaaaaataaattttcctgtgctgtaaaggaagggttcacagtaccactgagttagatttcagccacagatgcttagcttttttttttggccttttttttaaggaggaagcctttgtttggttttcctgagccctcactctgtttttgggctgttacctcggagaggcaaaactgttactttttacccatggctgacattgtatcaataactaaaactgaa

SEQ ID NO: 23126 - DNA, 499 bp, Homo sapiens
  misc_feature (1)...(499): n = A,T,C or G
gggggtggccggggtnnnnnnnaattgatcgccntgaggaattcggcacgaggcaagatggaggcgactacggctggtgtgggccggctagaggaagaggcgttgcggcgaaaggaacggctgaaggccctacgggagaaaaccgggcgcaaggacaaggaagatggggagccaaagaccaagcatctcatagaagaggaggaagaaggcgagaagcacagggaacttatgctgcggaactatgtcccggaggatgaggacctgaagaagaggagggtgccccaggccaaaccggttgcagtggaggagaaggtgaaggagcagctggaggccgccaagcccgagcccgtcatcgaggaggtggacctggccaacctcgctcctcggaagcctgactgggacctcaagagagatgtggccaagaagctggagaaactaaaaaagcggactcagagggccattgccgagctgatccgtgaaaggctgaaaggccaggaaa

SEQ ID NO: 23127 - DNA, 537 bp, Homo sapiens
  misc_feature (1)...(537): n = A,T,C or G
gggcgattcgacggctgaggatttcggcacgagaagaagagagagagaaccagccccgcctacttcctctttccctcggagcgggcggcggcgttggcggcttgtgcagcaatggccaagatcaaggctcgagatcttcgcgggaagaagaaggaggagctgctgaaacagctggacgacctgaaggtggagctgtcccagctgcgcgtcgccaaagtgacaggcggtgcggcctccaagctctctaagatccgagtcgtccggaaatccattgcccgtgttctcacagttattaaccagactcagaaagaaaacctcaggaaattctacaagggcaagaagtacaagcccctggacctgcggcctaagaagacacgtgccatgcgccgccggctcaacaagcacgaggagaacctgaagaccaagaagcagcagcggaaggagcggctgtacccgctggcgaagtacgcggtcaaggcctgaggggcgcattgtaataaagcacagctggctgagaaaaaaaaaaaaaaaaaactn

SEQ ID NO: 23128 - DNA, 470 bp, Homo sapiens
cttggatctgcaccgcgctgcaggctgcaataatcacattgcacttttttataggcctataatatctgcataacaactttttatagagaaaatattttacgtttgctatcttgctttatttagcctcacaaaatccctgtgaaactgggggaggaatagctgcagtatctacagcagttctcaagatgggtcctacagaattattgagattgttatcataggcagatcagtaaggttcctcattttaacaagaagtcctcctccttgaaacagtaggaaaccaaagagttttatagggagtaaaatttctatgttcttcaagctgagtcacatttgactgaacttttcaggtttctgtgaaagccaagtcagaattaaaactttttatttatgcttcggttatatttggcaggtgaataaggagatacaggcctgtgctaggaaattctctatctcagaccttagcacct

SEQ ID NO: 23129 - DNA, 485 bp, Homo sapiens
  misc_feature (1)...(485): n = A,T,C or G
tggcgtgggtcncctgatgtctgcactgagtggcntccgganggccggctaccagatgaattttgagactgcaaaatcccgagtgacccagagcaactttgcagttggctacaagactgatgaattccagcttcacactaatgtgaatgacgggacagagtttggcggctccatttaccagaaagtgaacaagaagttggagaccgctgtcaatcttgcctggacagcaggaaacagtaacacgcgcttcggaatagcagccaagtatcagattgaccctgacgcctgcttctcggctaaagtgaacaactccagcctgataggtttaggatacactcagactctaaagccaggtattaaactgacactgtcagctcttctggatggcaagaacgtcaatgctggtggccacaagcttggtctaggactggaatttcaagcataaatgaatactgtacaattgtttaattttaaactattttgcg

SEQ ID NO: 23130 - DNA, 474 bp, Homo sapiens
  misc_feature (1)...(474): n = A,T,C or G
nattgatcgctttagacnttncgaganggcacgagggagaaacgtcaggtatatgtattagatatcttccaccaaagtacagtttgccttttaattttattagattttctattgcatgttgaaaaggcggtgatatttttgtgtcttatctaagaaatacttcctgctctaagtcccgaagatgttcttttaagtttggctgttcatgtttagcaatttgaagtgccaaaattttgtaattatatcatgaagaagggaactaattttactttttccttctaaagaactggccagtttagtactattgaatagtttcattttttccccactgatctgattaaaagaaaatttcccggtatcttttatgtatctagttctacgttttgaggctctctacagttttgcagcaaatctggctatctggtaatgtgtatttgcatcatgccttcttccaaatttcttgctggtggcctt

SEQ ID NO: 23131 - DNA, 482 bp, Homo sapiens
  misc_feature (1)...(482): n = A,T,C or G
gcggggggaattganccattgacccgcgctgcaggaattcggcacgagaggagcccaaactgatgggtgctatctccttcttcatcttcttcttcaccctccttgtcctggctcgccagaatgagtactactgccgcctggacttcctgtggaagaagaagctgaggcaggagagggaggagacagagacgatggagaacctgactcggctgctcttggagaacgtgctccctgcacacgtggccccccagttcattggccagaaccggcgcaacgaggatctctaccaccagtcctatgaatgcgtttgtgtcctcttcgcctcagtcccagacttcaaggagttctactctgaatccaacatcaatcatgagggcctagagtgtctgaggctgctcaatgagataattgctgattttgatgagctgctctccaagcccaagttcagtggggtggagaagatcaagaccatcggcagcacc

SEQ ID NO: 23132 - DNA, 476 bp, Homo sapiens
  misc_feature (1)...(476): n = A,T,C or G
nttgcccgcctgcggatttcggcacgaggccaggtggagctctgcacgcatcacggcgccttgcgcagcatcttctcccaaatggcgcagtgggacctcaggctgactgccgtccacctcgtggattctcactactgcacagaccctgccaagttcatttcagtactgtgtacctccctggccaccatgctgcacgtggaactgccccacatcaacctcctttccaagatggacctcattgagcattatgggaagctggccttcaacctggactactacacagaggttctggacctctcctacctgcttgaccacctggcttctgaccctttcttccgccactaccgccagctcaatgagaagctagtgcagctcatcgaagactatagccttgtctcctttatccctctcaacatccaggacaaggagagcatccagcgagtcctgcaggctgtggataaagccaatggatactg

SEQ ID NO: 23133 - DNA, 497 bp, Homo sapiens
  misc_feature (1)...(497): n = A,T,C or G
tgaggnnnnnnagggcgncttagaccnccttnnatagaccgcctgcggcggctctgcaggcacgcccctgcagcactccttcctgaccgaggtgactgatgtctatgagatggaggggggactcctgaacctgctcaatgatttccactctggccggctgcaggccttcgggaaggaatgctcctttgagcagctggagcacgttcgggagatgcaggagaagctagcccggctgcacttcagcctggatgtgtgtggggaggaggaggacgatgaagaggaagaggatggggtcactgaggggctgccagaggagcagaagaagacaatggctgaccgtaacctggaccagctgcttagcaatctggaagacctcagtaattctatccagaagctgcacctggccgagaacgccgagcctgaggagcagtccgctgcgtaggcgtcccacgcaggcccacactgcccctctcattctcttcaaactgtgacttttt

SEQ ID NO: 23134 - DNA, 474 bp, Homo sapiens
cggggccccattgcccatctcgcccgcgctgcaggaattcggcacgaggatttttggtccgcacgctcctgctcctgactcaccgctgttcgctctcgccgaggaacaagtcggtcaggaagcccgcgcgcaacagccatggcttttaaggataccggaaaaacacccgtggagccggaggtggcaattcaccgaattcgaatcaccctaacaagccgcaacgtaaaatccttggaaaaggtgtgtgctgacttgataagaggcgcaaaagaaaagaatctcaaagtgaaaggaccagttcgaatgcctaccaagactttgagaatcactacaagaaaaactccttgtggtgaaggttctaagacgtgggatcgtttccagatgagaattcacaagcgactcattgacttgcacagtccttctgagattgttaagcagattacttccatcagtattgagccaggagttgaggtg

SEQ ID NO: 23135 - DNA, 448 bp, Homo sapiens
  misc_feature (1)...(448): n = A,T,C or G
gggggnnnnnnnnaagggtgnccccnagggggnncccctactgctccgcgctgcttgaattccgcacgagaggcgttcagctgcttcaagatgaagctgaacatctccttcccagccactggctgccagaaactcattgaagtggacgatgaacgcaaacttcgtactttctatgagaagcgtatggccacagaagttgctgctgacgctctgggtgaagaatggaagggttatgtggtccgaatcagtggtgggaacgacaaacaaggtttccccatgaagcaaggtgtcttgacccatggccgtgtccgcctgctactgagtaaggggcattcctgttacagaccaaggagaactggagaaagaaagagaaatcagttcgtggttgcattgtggatagcaaatctagcgttctcaacttggttattgtaaaaaaaaaaaaaaaaaa

SEQ ID NO: 23136 - DNA, 494 bp, Homo sapiens
  misc_feature (1)...(494): n = A,T,C or G
catttgacccgcgctgcaggaattcggcacgagtgggattccaggcactgtaatggcgttgactggcgtcagaagctggactctcagcgaggggctgtcattgccacggagctgaagaacaacagctacaagttggcccggtggacctgctgtgctttgctggctggatctgagtacctcaagcttggttatgtgtctcggtaccacgtgaaagactcctcacgccacgtcatcctaggcacccagcagttcaagcctaatgagtttgccagccagatcaacctgagcgtggagaatgcctggggcattttacgctgcgtcattgacatctgcatgaagctggaggagggcaaatacctcatcctcaaggaccccaacaagcaggtcattcgtgtctacagcctccctgatggcaccttcagctctgatgaagatgagngagaagaaggaggaggagaacaggagaagaagaggaagaaacttanaccagtgaa

SEQ ID NO: 23137 - DNA, 465 bp, Homo sapiens
  misc_feature (1)...(465): n = A,T,C or G
cctagcaccgcctgcagtaattcggcacgagcacagattanagctcatcatgatagaaatagtcactgaatctgccaacgtggtgttggaggctccaccttgaaaagggccacagtcagggcaactttccccatacaggaaaacttgaaaattacatcaacagtctacgtcacagccaaattatatttcctttataccaaacaaaactatggagaactaaaagtacatcacacaaaacgtttatagtgttttgcatgtgacctatttcagtatttatataactagattagtgctttctagcaaacggttctgttaattagcgagtcactgttgattctgctgtggtggtaagttgataccgtgtaactaatcccgtggatgcctcctcgttatttttgtccaaacgaagcagccgtggtagtagctgtctatgattcttgctcagcaaagtaaaataaatgttaa

SEQ ID NO: 23138 - DNA, 488 bp, Homo sapiens
cattagacccgcgctgcaggaatttcgcacgaccatttttatacatgctaccatgaagctatatatgttagtattgaagaagctaacgggtatactatcatttttgatgtgtgggctgattataatttcctgtatttcctgtacattgggatgaaactactttagcaaagtccacagatcagaaaccagacggtagtttttgaagttgaaaccagcaaaataagaaaaaataaaaaatcgattttaatattttctgcctctttcccaaattacccttcccacttgctcgacaaatctatgtaaagcagtttgttttttcatgttttaactttaccttgccctgtgttatggtactggctgacatgtctaagactggatgtgtatatttattatggtgtctaaaaatcatgaagttcatcacttttcaggagtatagataaaatcaaattggtagtacatcagagttacttttcagtgcaccatgacat

SEQ ID NO: 23139 - DNA, 473 bp, Homo sapiens
  misc_feature (1)...(473): n = A,T,C or G
cttcgttctgcnccgcgctgcaggaattcggcacgagagttcgtggacttgtacaaggagtttgagccaagcctggtcaacagcaccgtctacatcatggccatggccatgcagatggccaccttcgccatcaattacaaaggcccgcccttcatggagagcctgcccgagaacaagcccctggtgtggagtctggcagtttcactcctggccatcattggcctgctcctcggctcctcgcccgacttcaacagccagtttggcctcgtggacatccctgtggagttcaagctggtcattgcccatgtcctgctcctggacttctgcctggcgctcctggccgaccgcgtcctgcagttcttcctggggaccccgaagctgaaagtgccttcctgagatggcagtgctggtacccactgcccaccctggctgccgctgggcgggaaccccaacagggccccgggagggaacct

SEQ ID NO: 23140 - DNA, 476 bp, Homo sapiens
  misc_feature (1)...(476): n = A,T,C or G
nattgacccgcgcttaggaattcggcacgaggcaagatgcttggttgtgttgaggtttttaaatatatattttgtactttgtggagagaatgtgtgtgtgtggcagggggccccgccagggctggggacagagggtgtcaaacattcgtgagctggggactcagggaccggtgctgcaggagtgtcctgcccatgccccagtcggccccatctctcatccttttggataagtttctattctgtcagtgttaaagattttgttttgttggacatttttttcgaatcttaatttattattttttttatatttattggtagaaaatgacttatttctgctctggaataaagttgcagatgattcanannnnnnnnnnnnnnnnaaaaanannaaaaaaaaaaaacccccggggggggggcccggcccccactccccccttagggggggggaaaaaaaatccggggcggggtttaaaaaa

SEQ ID NO: 23141 - DNA, 482 bp, Homo sapiens
agcgccgttttttatgacggctatgagaatccggcacgagcggcgacatggccaaacgtaccaagaaagtcgggatcgtcggtaaatacgggacccgctatggggcctccctccggaaaatggtgaagaaaattgaaatcagccagcacgccaagtacacttgctctttctgtggcaaaaccaagatgaagagacgagctgtggggatctggcactgtggttcctgcatgaagacagtggctggcggtgcctggacgtacaagtaacctaagcaaacccaaatggaccaaatgcaacgctgatggaatctaagtgctcagaccaaggaacggggactgaaataacagtggacaccacatggcatgatccaatcagattgagccctggaaagatcatcccatggcaagatccagttagattacacttcctggcatcacctcattgcaagatccaagatcatgcctcattaccttctggctgta

SEQ ID NO: 23142 - DNA, 445 bp, Homo sapiens
atcgcctcctggcgattcgacgagcccggggtcctgacaacaccagaggatttcatggccatgagaggagcagggcctgtgtataaataccttctatttttaatacaagctccactgaaaaccaccttcgttttcaaggttctgacaaacacctggcatgacagaatggaattcgttcccctttgagagattttttattcatgtagacctcttaatttatctatctgtaatatacataaatcggtacgccatggtttgaagaccaccttctagttcaggactcctgttcttcccagcatggccactattttgatgatggctgatgtgtgtgagtgtgatggccctgaagggctgtaggacggaggttccctgggggaagtctgttctttggtatggaatttttctctcttctttggtatggaatttttcccttcagtgactgagc

SEQ ID NO: 23143 - DNA, 477 bp, Homo sapiens
  misc_feature (1)...(477): n = A,T,C or G
natagaacgcctgtagatttcagcaccagcacaagtcctgccagattaatcttccttagatatcagttaggatacatcactaaaacatttccactaactccactgtttctataataaatcataaatctttagcctggcattcaaggctaacttgctaatcacacttcccattaaaccttgcttatgatataggcaccaaccaaacctcttgctctgctatatctccactctgcctcagactgaaaagctagtcctaacgtctttgccttaattctgttcattttttcaagtccttgaaggaccattcttccctgattctcaggctagaagtgtcacttttcttatctgtacttccaaagcactttcgtatatttttattatggcgcttatatatagttcatttatatttaaattttaattccatgaacaatcaagtaccaagtataatggagaaggtgctcatcctctgccttcctt

SEQ ID NO: 23144 - DNA, 489 bp, Homo sapiens
  misc_feature (1)...(489): n = A,T,C or G
cgcgggggttttnnccttgaattgctgctgcaattcggcacgagcccatccaggcggtctgaaaacagagtggttgtctctggactgcctccaagtggaagttggcaggatttaaaggatcacatgcgtgaagcaggtgatgtatgttatgctgatgtttaccgagatggcactggtgtcgtggagtttgtacggaaagaagatatgacctatgcagttcgaaaactggataacactaagtttagatctcatgagggagaaactgcctacatccgggttaaagttgatgggcccagaagtccaagttatggaagatctcgatctcgaagccgtagtcgtagcagaagccgtagcagaagcaacagcaggagtcgcagttactccccaaggagaagcagaggatcaccacgctattctccccgtcatagcagatctcgctctcgtacataagatgantggtgacacttttttgtagaaccccatgtgtat

SEQ ID NO: 23145 - DNA, 507 bp, Homo sapiens
  misc_feature (1)...(507): n = A,T,C or G
aggcccccnnnnnaaggggnnnaatagattccccctccntttcganccgccctgcaggcttgtttgatataaaatatgttgtcttttgtttaagcatttattttcaaacactaaggagctttttgacatctgttaaacgtctttttgtttttttgttaagtcttttacattttaatagtttttgaagacaatctaggttaagcaagagcaaagtgccattgtttgcctttaattggggggtgggaagggaaagagggtacttgccacatagtttcctttttaactgcactttctttatataatcgtttgcattttgttacttgctaccctgagtactttcaggaagactgacttaaatattcggggtgagtaagtagttgggtataagatctgaacttttcatctgcagaggcaagaaaaatatttgacattgtgacttgactgtggaagatgatggttgcatgtttctagtttgtatatgtttccatctttgtgataagatgattt

SEQ ID NO: 23146 - DNA, 502 bp, Homo sapiens
  misc_feature (1)...(502): n = A,T,C or G
aggtctcnnnnnnnngnnnnnnnaatagatcggcatgcacgatttgggcacgagaaacagtgagagctgtgtggtgcagaaatccagaaatgaggtgtagggaattttgcctgccttcctgcagacctgagctggctttggaatgaggttaaagtgtcagggacgttgcctgagcccaaatgtgtagtgtggtctgggcaggcagacctttaagttttgctgcttagtcctgaggaagtggccactcttgtggcaggtgtagtatctggggcgagtgttgggggtaaaagcccaccctacagaaagtggaacagcccggagcctgatgtgaaaggaccacgggtgttgtaagctgggacacggaagccaaactggaatcaaacgccgactgtaaattgtatcttataacttattaaataaaacatttgctccgtaaaaaaaagggtttttcaaaaaaaaaaaaaaaaaaaaccttgggggggggccgggcccccttttccct

SEQ ID NO: 23147 - DNA, 471 bp, Homo sapiens
  misc_feature (1)...(471): n = A,T,C or G
cctagcctcgcctgcggctgaaagccattgtcttgagtgaatgattgtagagaaggcttactcctcatctcaaaatgccatctcataggagcaatgggagaaagtggtcctgccagtctgaaagttaagagacttggtttctcataattgttctgccattaagttgttacgtgatcttagtcaaatcatgttacctccccgggcctccgtttcttcatctgcaaaataaagttctttgcagtgtttctcaagtccctgcccaaatcagtgtttgtttaactgaggatgaacagtgacaccttgtggttctccttgagccatgtctttgttttttctagcccaagtttaagggagccaagggtatctttgcctgttcccctgcctggcccacctaccctagcagcttcacttagcatggctctaacctggtctccccctagattcagaaaagtgcatccaccctttgttcan

SEQ ID NO: 23148 - DNA, 490 bp, Homo sapiens
  misc_feature (1)...(490): n = A,T,C or G
cggcgggnnnnnaaattgaaggcctaactgatgcctttcagaatcggcacgagcttaggtgttgctgattctaaaaagatcgtagtttttgaattatgttaaaatacttgaattattttgtgttttcaagtacttatgcatataagagcatccaaatctgttctttaaaaataaaatattgggacaggcgcggtggctcatgcctgtaatcccagcactctgggaggcagtggagggtggatcggtaggtagttcgagaccaacctggccatcgtggcgaaacccgtctctactaaaaatacaaaaattagctgggcatagtggcacgtgcctgtaatcccagctactctggaagctgaggcaggagaatcgcctcaacccgggaagtggagtttgcagtgagccgagattgcaccactgcacttcagcatgggcaacacagtgaaactccgtctcanaataaatagtgaaataaaatcttaggagaatg

SEQ ID NO: 23149 - DNA, 520 bp, Homo sapiens
  misc_feature (1)...(520): n = A,T,C or G
agggngaggggnncctcgacggctgcangatctgcggcaccanggagggataaatatatatatataaatctatttttaggctggaaagactttgtttaaatgaaaggtgcgctatcccttttgattctgttttaaaattatctcgttaaagatctcctaatttgttccgatgacaagtgaaatttatatgtgagattgaactgaacaaaccctcatctcatgaaggacggggtgtgtgtgtggcgttgatctttagcctgtctcacaccagttcagaaaacactagacccatgattgataaagcaaaccacagcacaaccatgcttttgtcattaattagtctcaaagtgtgaaggttttgggggagggggaaatacacggatggtccatgttctcaagagtaagggaatgatgtttaaactctgaaataaaccattttccccctcccgatgcactatttatgtatggaggcttgttnttaaccctttctttgtgggggccgaaatcgcagatgcctgag

SEQ ID NO: 23150 - DNA, 446 bp, Homo sapiens
  misc_feature (1)...(446): n = A,T,C or G
ggggnnnnnngnnntnnnnnttatgacgccttggaattggcacgagcgccgatgaacctgaccgaggccgaaagaatgagggtcgtgatcaactcagtatgccactggaggctatatgagtaaacagcaaaccgtttctcatgaaagcaggatgttggcaaactgacaaactgcgtctgccacccagaaggaatgctgaaggcagtcacgacccaggcacaagtgtttcttgtgattaggcataattgaagcctgttaacaataatgtgaacttgtgatcaattaagcagctgaccagtcgttacctcctcctccctttcatcctacccaataaatgtggagggctgtggaagctcangggctgcctttgctcactagaagcagggagctctcttcttccccagttcgccttctttaaaacaacaaaaaaaaaaaaaaaaaacctg

SEQ ID NO: 23151 - DNA, 505 bp, Homo sapiens
  misc_feature (1)...(505): n = A,T,C or G
agggccnnnnnnngggngnnnaatagatcggcctgaggatagagccgccatgcaggaatcgcgccgagccgacccgaccctcgcttattctatgatggcgagcggcggcagcgggtgggtgtcagtacctgcgctgtggagtgaagtgaaccggtatggccagaacggggacttcacgcgcgctctcaagaccgtcaataagatactacagatcaacaaagatgacgtaactgccctgcattgtaaagtggtatgccttatccagaatggaagtttcaaggaagctttgaatgtcatcaatactcacaccaaagtgttagccaataactctctctcctttgaaaaggcatattgcgagtacaggctgaacagaattgagaatgccttgaagacaatagaaagtgccaaccagcagacagacaaactgaaggagctttatggacaagtgttataccgtttggaacgctatgatgaatgcttagcagtgtatagagatctcgtccga

SEQ ID NO: 23152 - DNA, 496 bp, Homo sapiens
  misc_feature (1)...(496): n = A,T,C or G
aggtcccnnnnnnggggnnnntttgatcgcctgtggatagaagcccagcctggctcctgctatgagaagataaccagcctcattttctcagtgccccagaggtctaggataggatttctaaactggaatcatccttaatcaccttgaagatcccttaagaggcatttgactggtgctgccgtctgtgtcctcaaagcaatgctggtggcagcgtcctgtgtacacatgcagagctaatacccaaactaaaaactgggtaactggccctgaagtgcttcccaatcagtaagccacagggaaatgtttgatttttatgttctgttggattttggtttgcttggcatatctaaaggtgcctttacttttctttttttttttttcctttcggcttggnttggaagaactggttttaacatggaaaacaagtccaaaaaactttcctttgacggttacttttgccccaagcccccccaaacttttatgctcatgtttaatt

SEQ ID NO: 23153 - DNA, 507 bp, Homo sapiens
  misc_feature (1)...(507): n = A,T,C or G
gaggggnnntttcccggcgcngattgcccggctgcggttttttttaactgggaacctcctgattcttacggaaaattatccttctataagaagataccagagagatttattcaaggtaatttgataacctaaaatcaattctccattttttatcatatgtgggatttgttgctaagtcgtgttcaacaatagcttttatgttcctaacatatctgaaagcttatttatgaatggatatactggattattgatatactgattttttttttaatggggacatttgccattttcttcccagaaatatgtaatcccctggctgactaggactgttaaacatagtgtggactggatgatgccttcgacaaaccagagaagccaagttggggggagctggtgcctggagtgggccctgtgcacctcacctggcggaggctggggggggctctgtcagcaggaccctacaggaactctcattcgattttaaagaagcacaacgggtcattttcc

SEQ ID NO: 23154 - DNA, 474 bp, Homo sapiens
  misc_feature (1)...(474): n = A,T,C or G
cgtgggntnnnnnnnaattgacccgcgctgcagcaattcggcacgaggagagacttgccaagcagaagattgaggaccacttgttgagctctggaaagttcatgtatctagaaggtaatgcagactctgccatgtcctaagtgtgattctcttcaggaagtcagaccttccctggtttaccttttttctggaaaaagcccaactggactccagtcagtaggaaagtgccacaattgtcacatgaccggtactggaagaaactctcccatccaacatcacccagtggatggaacatcctgtaacttttcactgcacttggcattatttttataagctgaatgtgataataaggacactatggaaatgtctggatcattccgtttgtgcgtactttgagatttggtttgggatgtcattgttttcacagcacttttttatcctaatgtaaatgctttatttatttatttgggctag

SEQ ID NO: 23155 - DNA, 486 bp, Homo sapiens
  misc_feature (1)...(486): n = A,T,C or G
gcccccccccccttgaccccttgcccgcctgcagtttccgcatcttggttgggttaaaagtggcttgggcagtggacccaaatgctgccattaaagaattataggggtttaaaaactctcattcattttaaatgacttacctttatttccagttacattttttttctaaatataataaaaacttacctggcatcagcctcatacctaanaaaaaaaaaaaaaaaaaaaaaaaaaaaccctggggggggggccgggcccccaattccccttatgggggggggaataaaaattcctgggccggggtttaaaaacggggggaggggaaaaaaannnnnnnnnnnnnnnnnnnnnnnnnnnttnnnnnntttnnnnnnnnnnnnnnnnnnnntnnngnnnnnnnnncnntnnntttcccccnnnnnntttttccccccttnccccccccctttnnncccncccttttttntttnnnctncnccnnncccc

SEQ ID NO: 23156 - DNA, 490 bp, Homo sapiens
  misc_feature (1)...(490): n = A,T,C or G
ntttgacccgcctgcacgaattcggcacgagttcaattcctgtgttttggtgtcttcccttatctgctaccctgaatcacctgtcctggtcttgctgtgtgatgggaacatgcttgtaaactgcgtaacaaatctactttgtgtatgtgtctgtttatgggggtggtttattatttttgctggtccctagaccactttgtatgaccgtttgcagtctgagcaggccaggggctgacagctaatgtcaggaccctcagcggtggagcctgctggggggacccagctgctcttggacaagtggctgagctcctatctggcctcctctttttttttttttcaagaaattggggggaatttctacctgatggtttggaaaaaatccctagtttttcagaaaaaaggcctgtggtgaagaaaacctccgtgaacttctatctgtctttttttgaggctcagggaaaacctaccatttttttttttccaacctact

SEQ ID NO: 23157 - DNA, 509 bp, Homo sapiens
  misc_feature (1)...(509): n = A,T,C or G
cgcnngtgncnnnnnatttgaacccttttgccccgcgctgcaggaattcggcacgagatcattgtcaagatctttgtggagttttccatagcctctgagactcataaggccatccaggccctcaatggccgctggtttgctggccgcaaggtggtggctgaagtgtacgaccaggagcgttttgataacagtgacctctctgcgtgacagtggtccctctccccggacttgcacttgttccttgtttcctctgggttttatagtgatacagtggtgtccccggggccaggcgcgctctgcccagcccagcctacagtgcggataaaggtgcggatgctgctggccctgnnnnanannnnnnanaaaaaaaaaaaaaaaaaaaaaaaaaaannnnnnnnnaannnnnnnnnnnnnnnnnnnnnnnnnnnnnnnnnnnnnnnnngggggggggccggggcccctccgccccatggggggggggaaacaaaaaaggggggcggggaaaaaac

SEQ ID NO: 23158 - DNA, 437 bp, Homo sapiens
  misc_feature (1)...(437): n = A,T,C or G
agaggccgggntgctgnaaactgaaagccttggtancntcngcgagatcgaccctgccgccctgcactgctgccagaggctgaaggaagagcagtgggaggtggaggacttgatgagggaattctactctctcaaacggagcaggtcgaaatttcagaaaaacactgttagttcggggccatgggaacctccagcaaggccaggaacactcttctcaccagaaaaccatgaccaggcaagggagaggaagcctgccaaacagaaggtcccacttctcagctgccccagtcagcccttcacctccaagttggcattactgggacaggttttcctagactcctcataaccactggataatttttttatttttatttttttgaggctaaactataataaattgcttttggctatcataaaaaaaaaaaaaaaaaaaaaaa

SEQ ID NO: 23159 - DNA, 536 bp, Homo sapiens
  misc_feature (1)...(536): n = A,T,C or G
agggnnnnnnnnaggggnncncnnnaggggncccnntttgatcggctgatgaacgggctcgagaacaaaagctctgcgtaatgagactcaccttttctcgctgaaagcactaagaggtgggaggaggtctgcacaggctggaagagggtttgggcagagcgaatacccggccaggaccttggtgagatggagtgccgcccacctcctgcggatactcttggagagttgatcccccagggggctctgccccacctggagaaggaagctgcctggtgtggagtgactcaaatcaggatacctatctgctgcaccttcactctccagggtacatgctttaaaaccgacccgcaacaagtattggaaaaatgtatccagtctgaagatgtttgtgtatctgtttacatccagagttctgtgacacatgccccccagattgctgaaagatcccaaggcattgattgcacttgattaagcttttagctgtaggtgaaagaacaagtttaggtcgaggactggcccctaagctgctgctgtga

SEQ ID NO: 23160 - DNA, 488 bp, Homo sapiens
  misc_feature (1)...(488): n = A,T,C or G
cgggcacccaattgaccccctcnatagatccgcctgcaggaattcggcacgagcatcttcatagacgagattgatgccatcgccaccaagagattcgatgctcagacaggggccgacagggaggttcagaggatcctgctggagctgctgaatcagatggatggatttgatcagaatgtcaatgtcaaggtaatcatggccacaaacagagcagacaccctggatccggccctgctacggccaggacggctggaccgtaaaattgaatttccacttcctgaccgccgccagaagagattgattttctccactatcactagcaagatgaacctctctgaggaggttgacttggaagactatgtggcccggccagataagatttcaggagctgatattaactccatctgtcaggagagtggaatgttggctgtccgtgaaaaccgctacattgtcctggccaaggacttcgagaaagcatacaagactgt

SEQ ID NO: 23161 - DNA, 388 bp, Homo sapiens
  misc_feature (1)...(388): n = A,T,C or G
nattgatnnccnntnnnnnnnnnnnnnnattgactcgcgctgcaggaattcggcacgagagcacctgggcaagccccctgaggtgacaaaccgatacctgtcccagctgaaggatgcccacaggtcccatcccttcatcaaggagtaccaggccaaggagaacgactttgacaggctggtgctacagtacgctcccagcgcctgaggctggcccagagctgtcaggaccatgaagccaggacagaggccaggagccagccctgcagccctccccacccggcatccacctgcatcccctctgggggcaggagcccacccccagcacccccatctgttaataaatatctcaactccagggtgttccacctgaaaaaaaaaaaaaaaaaaa

SEQ ID NO: 23162 - DNA, 507 bp, Homo sapiens
  misc_feature (1)...(507): n = A,T,C or G
tggtttcccnagggtgnnnnnnaattgatcgccataggtgaccctaggcttnacatatttccttttagaagtcctgttcccagcaggcctccatggcatccaagatggcgggaagtgcaaatgttatatcttgacaatggtgatggatacatggctatatacattcgttgaaagtcagctgtccactaatgtgactgcattttatagtatgtaaattatacctcagtatagttgcttttaaagaagatgaagccagaggacaggaaattggtaaacatagtgctgtcggccatgtcccttcagccacagcactgccaacactgactggtgttgagaggagagctgaagcggagatgagtggactagggtgggctgttggaactgactggacagcttacaagccccgtagattaggtgatacatcactggtgagcaagcgagcactgagtggagccacctttgacatggctgactcctggatgcattnttttttttttggacgccccc

SEQ ID NO: 23163 - DNA, 506 bp, Homo sapiens
  misc_feature (1)...(506): n = A,T,C or G
acggtnccctcggatcgangncgtcgcttctcccgtgccgaatcagatcacgaatcggagagaggatctgataatgagggttctggccaaggctctggaaatgaatcggaaccagagggatccaacaatgaggcctcagatagaggctcagaacatgggtcagatgatagtgactaggttttatttcatcaataagcttcatctctggaggaaacttttttaatatatgaaagctgtgataaaaatgtttcagatgtttagtcaattgtgaaatttttcttaaggcaattttcttttctatcagtttgtatattactaagccccaagagacatttcctgtgctagagtccaatatttgagtctctcgtgcaaatgagactattctttgtggtacaattccacctatcatatgtgaaaactgcagtaaaaataaacccagatgctaaatcattcctacaaaggtttgactgaaactgtggcagatgtctcatcttctttatatgtta

SEQ ID NO: 23164 - DNA, 474 bp, Homo sapiens
catttgccccgcgctgcaggattcggcacgagccaaggtgcaacttccttcggtcgtcccgaatccgggttcatccgacaccagccgcctccaccatgccgccgaagttcgaccccaacgagatcaaagtcgtatacctgaggtgcaccggaggtgaagtcggtgccacttctgccctggcccccaagatcggccccctgggtctgtctccaaaaaaagttggtgatgacattgccaaggcaacgggtgactggaagggcctgaggattacagtgaaactgaccattcagaacagacaggcccagattgaggtggtgccttctgcctctgccctgatcatcaaagccctcaaggaaccaccaagagacagaaagaaacagaaaaacattaaacacagtgggaatatcacttttgatgagattgtcaacattgctcgacagatgcggcaccgatccttagccagagaactctctg

SEQ ID NO: 23165 - DNA, 491 bp, Homo sapiens
  misc_feature (1)...(491): n = A,T,C or G
nattgcccgcctgcacgaattcggcacgaggtgtattataacttattaatcttgctgttgagctgtatacatggtttaaaaaataatactgtttaatgctaagtaaggcagcagtcatttgtgtattcaggctttttaaataaaattagagctgtaaggaaaatgaaaagccacaaatgcaagactgttcttaaatggaaggcatagtcagcgagggtaaatcctataccactttaggaagtattaaaaatatttttaagatttgaaatatatttcatagaagtcctctattcaaaatcatattccacagatgttccccttcaaagggaaaacatttggggttctaaacagttatgaaagtaagtgatttttacatgattccagaataacacttgtattgaccaatttagacagataccagaccaattttgcatttaagaaattgttctgattatttacgtcaactcattagaattcagtgaanagtaaca

SEQ ID NO: 23166 - DNA, 518 bp, Homo sapiens
  misc_feature (1)...(518): n = A,T,C or G
agggtnncccnaggatggnnnnnnttttgaaaacccatcgatcggcctgctgaattcgccacgagggaaaactgatgcgaaggaaataattctttgaaatggcaaagaattaaataccatcattcattatcagaagagttcaacgtttgaagtgctgggagataattctaattcattcttggatagtgaagcaaaactgagtgaaaataccatgataagacagaaaaagtgactggaaagaggagcttttcttccaggcatgttccagtttcaccctaagactgaccttcaaataatcaggttgtactgaaataaaggacttgttgaaaattaatattcaaaaaaaaaacccctatttcttcttgggtggggcccggggcccaatgccccttatagagagtcgttttacagttcacgggccgccgttaaacaacgacttgtaaatggaacganccttngccctttaggtcctaccatatggaaaccccttgattttataagagatataataatgtttt

SEQ ID NO: 23167 - DNA, 509 bp, Homo sapiens
  misc_feature (1)...(509): n = A,T,C or G
aggttnnnnnagggttnnnnnnaactgatcgcctctggaantcggtacgagaacaaacacatttatgtaaatttacattctagaataccagggtaaacaaggagacgttattcaaagatgaatgagaaagttctattctttttcatcatttgtgtgatcaggttgcaaaggacatgcttttctctttgcttttcctaagccactgcttcctgcctcttcaggaatctgattctctttttcagaatctttaggggacaacctaaagaattctccaattcctttttgccacttgggagttgggcgcacgcaaacggggttccctcctgcatatttattttcagctttcctcgatgaaactgatgtcgaattagtggcagaggtggaagaaccaagcacctttctgggggctcgagcagccaccacttttctgtaagtgcctggaacactgtctgctttagtccgcaccatgttcaaacaagaagagaggagaggagagaacgaactgactt

SEQ ID NO: 23168 - DNA, 485 bp, Homo sapiens
attgatcgccctccgttgaccggcctgccgaattcgccacgagaatttgagtgtctctgttgaaaacctctgcacagtaatatggacatggtatccacccgagggagccagctcaaattgtagtctatgggattttagtcattttggcgacaaacaagataagaaaatagctccggaaactcgtcgttcaatagaagtacccctgaatgagaggatttgtctgcaagtggggtcccagtgtagcaccaatgagagtgagaagcctagcattttggttgaaaaatgcatctcacccccagaaggtgatcctgagtctgctgtgactgagcttcaatgcatttggcacaacctgagctacatgaagtgttcttggctccctggaaggaataccagtcccgacactaactatactctctactattggcacagaagcctggaaaaaattcatcaatgtgaaaacatctttagagaaggccaatactttg

SEQ ID NO: 23169 - DNA, 512 bp, Homo sapiens
  misc_feature (1)...(512): n = A,T,C or G
acgtgtgtttgaaatcgatnggccgtgtgatacggcacgagtgaacatatccagaagcttggaagctgtattacagatccaggtaatcgagagacctcaggaaataccatgcacacagtgtttcaccgtgacaagaccaaagatacacatcctgaaagctgttgcagctctgaaaagggtgggcagccattgccttggtttgagcataggaaaaatgtaccacagtttgcagaacctacagaaacgttgtttggtcccgattccggaaaaggtgccaagagcttagttgaactccttgatgagtctgaatgtacttcagatgaggaaatctttatctcacaagatgaaatacagtcatttatggctaataaccagtctttctacagcaatagagaacaataccgacagcatctgaaggagaaatttaataaatactgccggttaaatgatcacaagaggcccatttgtagtgggtggttgacaacggctggagcaaattanataaataaaat

SEQ ID NO: 23170 - DNA, 551 bp, Homo sapiens
  misc_feature (1)...(551): n = A,T,C or G
agggtnnnnnnnnnaggggnnnnccnnnnaggggnncccnnttttgaaaaccctaattgcaccggctgtangaattcggcacgagacaagaagaggaagagataatccatgaagataatgaatggggtattgagctggtatctgaggtttcagaagaggaactgaaaaatttttcaggtccagttccagacttacctgaaggaattacagtggcatacacaattccaaaaaagcaagaagattctgtcactgagttaacagtggaagattctggtgaaagcttggaagacctcatggccaaaatgaagaatatgtagataatggactgggatatattgtatttctcatgttaaagcctcttcccttgaaattaaaaaaaaattttaactgataaaacttanggcaacattaattaatgtatattcttacctgaattgttatactttttgaaaatcctgtgacttgcctgtttctccccgctccaacgaaatcattaactctcctaanatgtgtttcattctagtaagaaaacctcaaaggatattgtatga

SEQ ID NO: 23171 - DNA, 326 bp, Homo sapiens
ggcgactttaaactgatcctattgaccggcttcggtctggtcacccgctcctacctcctgggcaactccagcccccgaacccagagcccccagaactgcagcatcatgtaatctgggacctgccaggcaggggtgggggtggaggcttcctgcgtcctcctcacctcatgcccaccccctgccctgcacgtcatgggagggggcttgaagccaaagaaaaataaccctttggtttttttcttctgtatttttttttctaagagaagttattttctacagtggttttatactgaaggaaaaacacaagcaaaaaaaaaaaaaaaaaa

SEQ ID NO: 23172 - DNA, 466 bp, Homo sapiens
ttgacgcctcagaatctttacccactctgatttttaatgctcagcgcagtacattctttctctctggacagtctgccgtctaagcttaagtcgcggattcggcctgacctctcgggacacacccagccctgtggacccagacaccgtggaggtgttgatgacctttgaacccgacccagctgatcttgccctatcaagcattcctggccacgagacctttgaccctcgaagacatcgcttctcagaagaggaacttaagccccagccaatcatgaagaaggcaagaaaaatccaggtgccggaggagcagaaggatgagaaatactggagccggcggtacaagaacaacgaggcagccaagcggtcccgtgacgcccggcggctcaaggagaaccagatatcggtgcgggcggccttcctggagaaggagaacgccctgctgcggcaggaagttgtggccgtgcgt

SEQ ID NO: 23173 - DNA, 511 bp, Homo sapiens
  misc_feature (1)...(511): n = A,T,C or G
cgtgtngcattganaactgacgccctcggcacaagcncaagnntgntttttggctgaccccactacacatgatagcttggcagtgttttgttaagcttactatagttcattttgaccagaggaagataacacaaaggtttaaaagaaaatgcagcggagaaacggttcatctttccaagaaaccctagtgttctgagtcacatcatgagtaaatggtggacggaaggcaggtttagctgggcagtcatcaaaaatcatgaagggcaagcaagccaggtaccacaccctcaggcactccccaaactcgttgcccatcggataaagttagtccaagtgccaactcctgccacaacaatgccttataaggactcttaaatcctgtctgacctttgaacaggttcagagtgtgctgtgttcaaatgggaaggaatataaagtaattctagaagatatccaaccgcgtgataaattgtagaccctacagggggaaaaagaacatcttttgtctgga

SEQ ID NO: 23174 - DNA, 472 bp, Homo sapiens
ccttgtaccgccctttggaattcggtacgagccacatcactgatcaaattggcatgttcagcttcactgggttgaaccccaagcaggttgagtatctggtcaatgaaaagcacatctacctgctgccaagtggtcgaatcaacgtgagtggcttaaccaccaaaaatctagattacgtggccacctccatccatgaagcagtcaccaaaatccagtgaagaaacaccacccgtccagtaccaccaaagtagttctctgtcatgtgtgttccctgcctgcacaaacctacatgtacataccatggattagagacacttgcaggactgaaaggctgctctggtgaggcagcctctgtttaaaccggccccacatgaagagaacatcccttgagacgaatttggagactgggattagagcctttggaggtcaaagcaaattaagatttttatttaagaataaaagagtactttga

SEQ ID NO: 23175 - DNA, 464 bp, Homo sapiens
atgtgctccgggctgcaggaattcggcacgagcctacctgagcctgcagtaccgccgtgacgtggtcttctgccagacgctgaccgccctcatctgcggcttcatcattaagctgaggaactgcctgcatgacgacggcttcctgcgccagctctacaccatcgggctgctggcccagttcgagagcctgctgagcacctacggggaggagctggcaatgctggaggacatgagccttgggatcatggacttgaggaacgtgaccttcaaagtcactcaggccacttccagcgcctccgcagacatgctgcccgtcatcacaggaaatcgcgacgggtttaacgtgcgggtccctctgccgggcccgctgtttgacgccttgccccgggagatccagagtggcatgctgctgcgagtgcagcccgtcctcttcaacgtgggcatcaatgagcagcagacactgg

SEQ ID NO: 23176 - DNA, 476 bp, Homo sapiens
cgcccccgccccatttgccccgccctgcaatagaccccgcgctgcaggaattcggcacgaggtgacatcgtctttaaaccctgcgtggcaatccctgacgcaccgccgtgatgcccagggaagacagggcgacctggaagtccaactacttccttaagatcatccaactattggatgattatccgaaatgtttcattgtgggagcagacaatgtgggctccaagcagatgcagcagatccgcatgtcccttcgcgggaaggctgtggtgctgatgggcaagaacaccatgatgcgcaaggccatccgagggcacctggaaaacaacccagctctggagaaactgctgcctcatatccgggggaatgtgggctttgtgttcaccaaggaggacctcactgagatcagggacatgttgctggccaataaggtgcctagctgctcccgtgctggtgccattgccccatgtgaagtcact

SEQ ID NO: 23177 - DNA, 458 bp, Homo sapiens
cattgacccgcgctgcaataattcggcacgaggaaagccctaccacaagaagcggaagtatgagttggggcgcccagctgccaacaccaagattggcccccgccgcatccacacagtccgtgtgcggggaggtaacaagaaataccgtgccctgaggttggacgtggggaatttctcctggggctcagagtgttgtactcgtaaaacaaggatcatcgatgttgtctacaatgcatctaataacgagctggttcgtaccaagaccctggtgaagaattgcatcgtgctcatcgacagcacaccgtaccgacagtggtacgagtcccactatgcgctgcccctgggccgcaagaagggagccaagctgactcctgaggaagaagagattttaaacaaaaaaacgatctaaaaaaattcagaagaaatatgatgaaaggaaaaagaatgccaaaatcagc

SEQ ID NO: 23178 - DNA, 547 bp, Homo sapiens
  misc_feature (1)...(547): n = A,T,C or G
gatgggnnnnnnnaggnnnccccnnnccgnggncccnntttagacnncttaatagagcgccatcaagaancngcacgagggcagacgcagctcgattccagataggaaaaaggaaatatgactttgattcttcggaggtgcttcagggactggacttttttggaaacaagaagtctgtcccaggtgtgtgtggagcatcacaaacacatcagaagccccaaaatggagagaaaaaagaagagagcctaactgaaaggaagagggagcagagcaagaaaaaaaggaagacgatgacttcagaaattgcttcccaagaagaaggtgctactatacagtggatgtcatctgtagaagcaaagattgaagacaaaaaagttcagagagaaagtaaactaacttccggaaagttggagaatctcagaaaagaaaagataaacttcttgcggaataaacacaaaattcacgtccaaggaaccgatcttcctgacccaattgctacatttcagcaacttgaccaggaatataaaatcaattctcgactacttca

SEQ ID NO: 23179 - DNA, 477 bp, Homo sapiens
  misc_feature (1)...(477): n = A,T,C or G
cctcgaccgccngttgcatcgcgtgcaggaattcggcacgaggccctacagaagagcattctgactgttaaaagaaaaacaaacagaaagcaacaagagcatcaacaaaaaagtccccacaagaacgccactcaaaggtcaggagcctcaaagatcaaagctagataaactcagaaagatgagaaagaatcaacaacaacaacaaaaaatgctgaaaactcaaaaggccagagtgcctattcttctccaagtgattgcaatacctctctagcaagggcacagaactaggaggaggctgaaatggatgaattgacagaagtaggcttcagaagacgtgtaataatgaactttgttaagctaaaggggcatatcctaacccaatgcagagaagctgagaaccatgataaaacattacagaagctgttaaccagcataaccagtttagagtggaatataaatgacctgatggagctgaaa

SEQ ID NO: 23180 - DNA, 484 bp, Homo sapiens
  misc_feature (1)...(484): n = A,T,C or G
agggnngnnnnnnggaaatgaccgcctgcggaattcgtagaagaccatctctctagtgttcagtatggattcacaattcctctgcgcctccagtaacaccgagacggtacacatcttcaagctggaacaggtcaccaacagtcgaccagaagagccttcgacctggagtggctacatgggaaagatgtttatggctgctaccaactacctccctacccaggtgtcagacatgatgcatcaggacagggcttttgccactgcacgcttgaacttctccggacagaggaacatctgtaccctctcaacgatccagaagttgccacggctgctagttgcgtcatccagtggacacctttatatgtacaatttggatcctcaggatggaggagagtgtgtcttaatcaaaacccacagcttgcttggctcaggaacaacagaagagaataaagaaaatgacctcagaccttccttacctcagtcttan

SEQ ID NO: 23181 - DNA, 511 bp, Homo sapiens
  misc_feature (1)...(511): n = A,T,C or G
cgtgtnaaattgaaattgatcggctgtggaatnggcacgagagaaggagagaccgaatacaaatttgaatggcagaaaggagccccacgagaaaaatatgccaaagatgacatgaacatcagagatcagccctttggtattcaggttcgaaatgtgaggtgcattaaatgtcacaaatggggtcatgtcaacacagatcgagaatgtcctttgtttggtctttctggaatcaatgcaagttcggttcccactgatggctcagggccatcgatgcacccctcggagctaatagcggagatgagaaacagtgggtttgcactgaaacgaaatgtactggggagaaacttgaccgcaaatgatccatcacaggagtatgttgcaagtgagggtgaagaagatccagaagttgaatttttaaagtcactaacaaccaaacaaaaacagaaacttctcaggaaattagatcgactggggangannnnnnnnnnnnnnnnnnnnnnnnnnnnnnnnn

SEQ ID NO: 23182 - DNA, 484 bp, Homo sapiens
  misc_feature (1)...(484): n = A,T,C or G
cggggaacgggtttggaaaccttttgatcngcgctgcaggaattcggcacgagaagccagggcccctggatctcctcccttaccctcctctgctgggaacctagcacacctgaatcagctggacatactgctggagtccagtgctttctttccgtcaccctggggatagtccttcctggcatcgtggtgggggaggagcctctggcttccctaaactgcagcctctctggctggtcttcactttcctcagttgatataaaactctgggtcttggccatgatgtccttggactccatcgctaaagggaccatctgctgcagttaccacagcaactgacctgagcggcaccctggtctgtggagatggactcaggatccagtgacatgattctgaacttttgtggagtttgacaccttagagaagctacccctcaaactgcacatctacacacaaacaaacaatgcataggattccaaggctttan

SEQ ID NO: 23183 - DNA, 509 bp, Homo sapiens
  misc_feature (1)...(509): n = A,T,C or G
ggacttggggnaagggnnganannnnttttgaannccctntttcgacccgcctgcaggaattcggcacgagggaacctgagtaggtagtgtggccaagagatcagcacaacctttgcaggctgacttgctaagtctgacagtgacaaacttgtgagcttactgcagtcagtcacagaggctgttctttttcacacaccccttcatgcccggctttccccatatccacatgcagagggcgagctcataaaactacagggaagcgtgaaatgatggctttggtagctgtttactgggtaaccccactgtgacactgtccttttcatgtgatgtggaaacctacttctgtcctccaaaccatgaaatgtgtcatctagactgcagagtacttgagtgctttgcctcccgatatgccagagcttgtggtccaaagcccattcctgtgtgtccgtcctgccatttagccacagaaggctgcggagtgaggcggcagctagcctggccagtggct

SEQ ID NO: 23184 - DNA, 273 bp, Homo sapiens
  misc_feature (1)...(273): n = A,T,C or G
gatggtgccnccattgaccgcctgcagtaattccgcacgaggtgctttggaaagccgcggagctggtggtggctacagttggtgttgggggcttaggcgagggacgttaccgggaagttgcaggcgggaggactcttccccatccagtcacctgacaggtcacaaacatgtcagacaaaagtgaattaaaggctgagttggaacgtaagaagcagcgactggcccaaatcagagaggaaaagaagagaaaagaagagaaaaaaaaaaaaaaaa

SEQ ID NO: 23185 - DNA, 460 bp, Homo sapiens
  misc_feature (1)...(460): n = A,T,C or G
ggagggccattganncccctgaaactgagttgctanggaagaattcggcacgagtggcagtggagatggctataatggatttggaactgatggaagcaattttggaggtggtggaagctacaatgattatgggaattacaacactcaggcttcaaattttggacccatgaagggaggaaattttggaggcagaagctctggcccctatggcggtggaggccaatactttgcagaaccacgaaaccaaggaggctatggcggttaccgcaacagcaatagctatggcagtggcagaagattttaattaggaaacaaagcttaccttgagaggagagccagagaagtgacagggaagctacaggttacaacagatttgtgaactcagccaagcacagtggtggcagggcctagctgctacaaagaagacatgttttagacaaatactcatgtgtatgggcaa

SEQ ID NO: 23186 - DNA, 458 bp, Homo sapiens
cattgacccgcgctgcagtaattcggcacgagcagagagcgtgcagggttccacttccaaacatgagttccaggccgagacaaagaagcttttggacattgttgcccggtccctgtactcagaaaaagaggtgtttatacgggagctgatctccaatgccagcgatgccttggaaaaactgcgtcacaaactggtgtctgacggccaagcactgccagaaatggagattcacttgcagaccaatgccgagaaaggcaccatcaccatccaggatactggtatcgggatgacacaggaagagctggtgtccaacctggggacgattgccagatcggggtcaaaggccttcctggatgctctgcagaaccaggctgaggccagcagcaagatcatcggccagtttggagtgggtttctactcagctttcatggtggctgacagagtggaggtctattcct

SEQ ID NO: 23187 - DNA, 464 bp, Homo sapiens
  misc_feature (1)...(464): n = A,T,C or G
attgcccccgccctgcaatagattcngcgctgcaggaattcggtacgagtcaatttacggtgatcctttgcatgtcagagccctactggatatcagaagcgaggggagcagtgcgtatacatagatgaatgtaccatccctccatattgccaccaaagatgcgtgaatacaccaggctcattttattgccagtgcagtcctgggtttcaattggcagcaaacaactatacctgcgtagatataaatgaatgtgatgccagcaatcaatgtgctcagcagtgctacaacattcttggttcattcatctgtcagtgcaatcaaggatatgagctaagcagtgacaggctcaactgtgaagacattgatgaatgcagaacctcaagctacctgtgtcaatatcaatgtgtcaatgaacctgggaaattctcatgtatgtgcccccagggataccaagtggtgagaag

SEQ ID NO: 23188 - DNA, 492 bp, Homo sapiens
  misc_feature (1)...(492): n = A,T,C or G
nggtnattaaaaattgcatcgcctgtcggaattccgctcgagccaccctcctgctgacaagctgtatgtgggcagtcgggtggtcgccaaatacaaagatgggaatcaggtctggctctatgctggcattgtagctgagacaccaaacgtcaaaaacaagctcaggtttctcattttctttgatgatggctatgcttcctatgtcacacagtcggaactgtatcccatttgccggccactgaaaaagacttgggaggacatagaagacatctcctgccgtgacttcatagaggagtatgtcactgcctaccccaaccgccccatggtactgctcaagagtggccagcttatcaagactgagtgggaaggcacgtggtggaagtcccgagttgaggaggtggatggcagcctagtcaggatcctcttcctggtactgttcttctctacaattttggaggcagaggttggtggggggggaacttaagaagcagn

SEQ ID NO: 23189 - DNA, 467 bp, Homo sapiens
  misc_feature (1)...(467): n = A,T,C or G
nttcgccctctgccccgcgctgcaggaattcggcacgagcctaagcgatggaagttcctaatacgttgctcgggtaactgagaaactcttcgtattggtaaggcctcgactcactgatcatgccaggacagggactggactgccaacacgcactcgtctgccagcgaggcccaaaggggaagcctatcggagctcagcgtggcagctgctggcctctgggccgctacttgtcaataccatgctttgctgtaatatttgtggtgaaacagtaacctagaaccagacatgaaagctcacctattgttcacatggaaagtgaaattatatgtccattttgcaagttgtcaggtgtgaattatgatgaaatgtgttttcatatcgaaacagctcattttgagcagaatacacttgaaagaaactttgagaggataaatacagtacaatatggaacttcagataacaagaaa

SEQ ID NO: 23190 - DNA, 574 bp, Homo sapiens
  misc_feature (1)...(574): n = A,T,C or G
caccgcatgggcgccaatcagacatgtatgcgtttgaccgcgctgcacctctcctctttactacacggcccgcgcngccaggcnanaannnnattgaccgccttcggttagatccccttcacngaacccacnngaaagcatgaagctgggcaggttgacatgaattggaaagtacctgcaatcctttattatgtcaaacggaatctcaattccagagacaacctgaacatcaagaaccctattgaggcaagtgtcttgctggctgaagcctcgctggcacggaagcagcggaaaacacatactacctttattccactgatgctgaatgagatgccacagattggggacctggtgggtctggatgctgagtttgtcacccttaatgaggaggaagcagagttacgcagtgatggtaccaagtctaccattaaaccaagccagatgtcagtagccaggattacctgtgttcggggccagggacccaatgagggtatccccttcattgatgactacatctctacccacgagcaggtggtggattacttgactcaatactcgggtataaagcctggcg

SEQ ID NO: 23191 - DNA, 447 bp, Homo sapiens
  misc_feature (1)...(447): n = A,T,C or G
ngcggccatgacccgctgtaagatcgcatgagacaggccctagggctcctgttaggggagggagaaatgttgaatcaagagggaaaacaactactatgatttataaacatattttaatgtaaaaatttgcatttaaaaggagtggccctgttttctgtgttaaaaccccatttggtgctattgagtttgttctttattcttttatcccagtgaaaattgttgatcttgctgtagggaaaaattaaactctttgaatctccaaacaaggaagtttcagcattcccttatggatcagaggaaccttagaggcctgaaattgttgcttccagtttagctgcccctcaaattcaagtgaatattttcccttctccctttacccttctccagaaataaagcaggtgacagggttttcagaatcttaataaaaaaaaaaaaaaaaaactcgag

SEQ ID NO: 23192 - DNA, 455 bp, Homo sapiens
  misc_feature (1)...(455): n = A,T,C or G
ggaggccattgaacctntaaactgatgccctacggagaatcggcacgagcggagctgcttgttctcagaacacaaacaaaacctgtgaagagtgcctgaagaacgtctcctgtctttggtgcaacactaacaaggcttgtctggactacccagttacaagcgtcttgccaccggcttccctttgtaaattgagctctgcacgctggggagtttgttgggtgaactttgaggcgctgatcatcaccatgtcggtagtcgggggaaccctcctcctgggcattgccatctgctgctgctgctgctgcaggaggaagaggagccggaagccggacaggagtgaggagaaggccatgcgtgagcgggaggagaggcggatacggcaggaggaacggagagcagagatgaagacaagacatgatgaaatcagaaaaaaatatgatagctgtttgcttatn

SEQ ID NO: 23193 - DNA, 462 bp, Homo sapiens
cggcggaaaaaaaaaatttgattgcctgcgctgcagcattcaggctatgcacatagccaccagcacacatgcctacgccacatacctgtggacaggtgaggccgcatgacatactgcctttgcacaggtcattgctgatcgtcacaaaattctgtttgaccggaattcacccatcaatagcagcattgaccctgaggcgaaggactatgctgctattgtggaacagaacttgcagcattttaaaccagtgtttcagctgctggagaagcagatactgtcccgagtccggaacacagctagctttatgaagactgctgaacgcctgctgagattttcagataagagacagactgaggaggccattgacaggatttttgccatatcacagcaacagcagcagcaaagcaagtcaaagaaaaaccgaagggcaggcaaacgctataaatttgtggatgctgtccc

SEQ ID NO: 23194 - DNA, 358 bp, Homo sapiens
  misc_feature (1)...(358): n = A,T,C or G
attagccccgcgctgcaggnnnncanatatcccccgcgctgcaggttcaggtagtgttttggtttattatcttagtgttgtcacagtgatagaaacccccagagtgggaagaagagctcctgcgaggacctacattttgccattcccctctgccctggggctcagagccttgaagcctttgcttggcccttgcatgttaggatatggccaagaatcagaaactgatgcgtttttccagcactacctgtgtgctgcactcatggaaggtgggaagctatacacaggtatccaacttggttataagacaccagttcccacagggctggatttctcagctgtctggtaaaccagtgcggca

SEQ ID NO: 23195 - DNA, 490 bp, Homo sapiens
  misc_feature (1)...(490): n = A,T,C or G
agtggacnnngaatcgacgccnattgaattgcgctgaggcgtggcgaccacctggaccggagggttgtcctctgacaggcctggcacggaggagggcccaccgagtggtcccatgaaacactaagggtcgtcacgccctcccgaggagctcaaggacctgcctgtcaggaccagggctgggcctgccaacccagggcagtgttggggccggaggctgctgtgtctgcccaagctcctctcagagtccagtccccaggcctccagcgctgtcagctgcaccctggcattctcacagagctggctgcccacccagtggggggctatagcctcagagaccactcatcctctggaatcaacctctttctaataccctcttggaaaaagagcttgcccctcctccagcacactagagctctggccttgtgtgtatatgtatacatacgtgaacacatgcctgtgtgtgtgtggtgtgtgtacttgtatgcacgtn

SEQ ID NO: 23196 - DNA, 470 bp, Homo sapiens
  misc_feature (1)...(470): n = A,T,C or G
attgcccggctgcggcttgaactcctgaccctgtgatccgaccaccttggcctcccaaagtgctgggattacaggtgtgagtcaccacacctggctgcatagtgttttaaatgtttgtgtgaagaatgagtttgtggaacaatttgatttgctgtggcctctatgcctaatgagctagtgtttctggcagctctctctacccaactttgcacttgtagttttgagtctttgtctctctggaatatgaacaggtttataaaacattccatggtgaacaattctgtcggctgcattatagccatgagtgaatagacagcattggctggtccaagctctgttattgagtatacaaggaactgatttttcttatgttagcactaagggcaaaaaccaatatttataatgtaagcactatccaggtaaaacactggcccaagatttggtaaagagatttcattgcaatgtaatan

SEQ ID NO: 23197 - DNA, 488 bp, Homo sapiens
  misc_feature (1)...(488): n = A,T,C or G
gcgcgtaannnaaattgatcgccttcggaattcgctcgagaagcctgtgaggagcttcggtctcgtattgtgtctggaatcatcacacctatccatgagcagtgggaaaaggctaatgtaagcagtccccaccgggagttcccccctgctaccgccagagaggtggacccactccggattcctccacaccacccacacaccagtcggcagcctccctggtgtgatcccctgggcccgtttgttgtcgggggagaagacttagacccttttgggcctcggagaggtggcatgattgtggatcccctgagatctggcttcccaagagcacttattgacccttcctcaggcctcccgaaccgacttcctccaggcgctgtgcccccaggagctcgctttgacccctttggacccattgggaccagcccacccggcccgaggcctgacagacgcgggcagtgatgagccctgttctggagtggaaagagcan

SEQ ID NO: 23198 - DNA, 544 bp, Homo sapiens
  misc_feature (1)...(544): n = A,T,C or G
aggtgatcgatggcgttgaattcggcacgagccaggttccaggtgaaggaattcagctcctcgctcagccaaccttcctcccccagctcgctgcttgtgtgtgtgcgtgtgtgtgagcatgtgtcccagttggatatagtttcctccaccacctagctgtgtaaaatctctaaaatgaggcccagagagggcaggagggagcagagggagtccgcactttctgctgtgatgctctaaggatctggtgcgtgggggaaagaggaaagatatgtacatggattttggatcagaccaagtttcctgaaacgggctttgggtgggtggcatttaggggacccaaagagaggacggagggtgctctaggaaagggattgcgttgaataaaagtctggtttatgggaagaggaggaggaagactcatgtggccagcactttaaagtttacaaagggttggttgtggacatccacctctttggtgctctcaacagccctgccagagagatgcgttagacccagtctacagaaggggactctgaggcccaan

SEQ ID NO: 23199 - DNA, 501 bp, Homo sapiens
  misc_feature (1)...(501): n = A,T,C or G
agggtgntnnnccactgtccgccctcatgaattcggcacgagcacgttctacctgagcaacgtcgcgccccatgagccccacctcaaccagaatgcctggaacaacctgtagaaatataaccgcagcttgacccgcagctaccaaaacgtgtatgtctgcacagggccactctttctgcccaggacagaggctgatgggaaatcctacgtaaagtaccaggtcatcggccagaaccacgtggcagtgcccacacacttcttcaaggcgctgatcctggaggcagcaggtgggcaaattgagctccgcacctacgtgatgcccaacgcacctgaggatgaggccatcccactggagcgcttgctggagcccatcgagagcattgagcgggcttctgggctgctctttgtgccaaacatcctggcgcgggcaggcagcctcaaggccatcacggcgggcagtgagtgagggtggagcccantgagactgtgggtgtgtgcagg

SEQ ID NO: 23200 - DNA, 503 bp, Homo sapiens
  misc_feature (1)...(503): n = A,T,C or G
gcgcggtannnngnnaactcgagngccctcaggaannncgtttggaacngcgctgcggaattccgcacgagagatgttaaggtacaactgtgtttttctcgattatctaaaaaccatagtacttaaattgaacagttgcaaagatgtcttaattgtgtaaagaattggtgtagtcatgactttagctgatactcttatgtacgagatctgtctctgctgtttaacttcattggattaatcagctggtttcaactctactgcgaaacaaaaatagctccttaaaagtactgttctccttcagtggcatgtagttatctaatcaagacacctcattcaaacaaaacctgccttaggaaaatttaatatattttaaattattttaaaagaaatacaacatcttattctttagctttcttaatcggtgctttatggaggccagtgtaacgttacatgactcgttgagaaagttgaggaatttcctctaccacctttgttgcttgaag

SEQ ID NO: 23201 - DNA, 495 bp, Homo sapiens
  misc_feature (1)...(495): n = A,T,C or G
ngatggtccngggcttgannccccctcgatcgccttcggaattcggcacgagctccattgcactccagtccgggagacagcgagactctctctcaaaaaaaaaatgatgaactgtgtaattatagttgcctactgaacaactatcctgtgcatttggtaaagatcatttactagtgttttgggaaacattactttgatggaagaagtgcgatagcgttactaaaaatcgttctaaaacatggttgattctggagtaggcattcagtaaatatttaaactacatagaatctggtgtggtttggataggtcaaaggtccagttctgtaattctataacattctataatgagccttttttttgtgagaatcaagtagagatttaaagcattttgaaataaatcatctgctttttttttttcagtgggactaaaggctcttccttcaaaggattatccggggcatctactcattgaaaaaccatgataattctttgtat

SEQ ID NO: 23202 - DNA, 502 bp, Homo sapiens
  misc_feature (1)...(502): n = A,T,C or G
atggnnntnnnnaattaccgtacgtctttaggattcggcacgaggatcctgtacgggggctgcgagggcaacgccaacaatttctacacctgggaggcttgcgacgatgcttgctggaggatagaaaaagttcccaaagtttgccggctgcaagtgagtgtggacgaccagtgtgaggggtccacagaaaagtatttctttaatctaagttccatgacatgtgaaaaattcttttccggtgggtgtcaccggaaccggattgagaacaggcttccagatgaagctacttgtatgggcttatgcgcaccatagaaaatttcatcattttgctacagtccaaaagatgagggactgtgctctgccaatgtgactcgctattattttaatccaagatacagaacctgtgatgctttcacctatactggctgtggagggaatgacaataactatgttagcagggaggattgcaaacgtgcatgtgcattaagctttgaaaaagaaa

SEQ ID NO: 23203 - DNA, 456 bp, Homo sapiens
atatcctccgggctgcagtaattcggcacgagctaacatggcagcgcagaaggaccagcagaaagatgccgaggcggaagggctgagcggcacgaccctgctgccgaagctgattccctccggtgcaggccgggagtggctggagcggcgccgcgcgaccatccggccctggagcaccttcgtggaccagcagcgcttctcacggccccgcaacctgggagagctgtgccagcgcctcgtacgcaacgtggagtactaccagagcaactatgtgttcgtgttcctgggcctcatcctgtactgtgtggtgacgtcccctatgttgctggtggctctggctgtctttttcggcgcctgttacattctctatctgcgcaccttggagtccaagcttgtgctctttggccgagaggtgagcccagcgcatcagtatgctctggctggaggcatctcctt

SEQ ID NO: 23204 - DNA, 491 bp, Homo sapiens
  misc_feature (1)...(491): n = A,T,C or G
ngtggtttaaggcttgncggctgttgaattcggctcgagacagacaggaactggctaccgttcggactatttgtagtcatgtacagaacatgatcaagggtgttacactgggcttccgttacaagatgaggtctgtgtatgctcacttccccatcaacgttgttatccaggagaatgggtctcttgttgaaatccgaaatttcttgggtgaaaaatacatccgcagggttcggatgagaccaggtgttgcttgttcagtatctcaagcccagaaagatgaattaatccttgaaggaaatgacattgagcttgtttcaaattcagcggctttgattcagcaagccacaacagttaagaacaaggatatcatgaaatttttggatggtatctatgtctctgaaaaaggaactgttcagcaggctgatgaataagatctaagagttacctggctacaganagaagatgccagatgacacttaagacctacttgt

SEQ ID NO: 23205 - DNA, 477 bp, Homo sapiens
  misc_feature (1)...(477): n = A,T,C or G
attgatcgcctgaggantctttgagaccgcttccagctcagctcccacctccacccaacagatagatggggtttgctttttcatttcacatggggctcctccgctcctgccttctcggatgggccaacagtcgtaagaaagccctctctgcccgttctgttcacctctccacagcgcaccccgcccgccgctgctcctcattctttccaaacctcgaaaccaaccaaaacgtgagaagtatttttgtaccctgtgtaacaaaatatttatgcatcataaaggatttttcatgtgcgtaccattaattattaaagcgacctcgttcgccctgtcagataagtttaatgtttagtttgaggcatgaagaagaaaagggtttccattcttcagcagtacgcctttgtgtctggcatttgtttaagaaaatgaaatgaaggaaacactgcgcaatgttttttgttttgagcatatcagagg

SEQ ID NO: 23206 - DNA, 469 bp, Homo sapiens
  misc_feature (1)...(469): n = A,T,C or G
cctagacccgcctgtaggaattcggtacgagggctagcggaggactacccttgctcactgacttcctgttgaacacactttccttacggagcctggctgtttcacagtatttcatgaatttacccacacaggtgtgatcctccttgagcattgaggaggcacatggagaactaaatcttttgtagtagctgagatctgcaatatataacgggacagtcaaagggcaatgtttttctgtaacatattggaaaaagaaaatgcaggtatattccttttttatttgttcctttagtttgttttggttcagcagtcagcagttaagtatataacatggcccgcaaggacaatgaatccactcacattgcagacaattccgaaaatggcaaactactactactactgttcagttttttaaaagttttgaaatgctgcacttacatttaaaaaaacaacaacaacattttttcan

SEQ ID NO: 23207 - DNA, 483 bp, Homo sapiens
  misc_feature (1)...(483): n = A,T,C or G
gggggggaaggggngnnnnnnnattgatccgactgaagacctcggacgagcagacaccaccattaaagcattttcatggtgaatgctggactggaggcccctggagccaaatggcaagatggtgacagcttcctttcctgtgaggactctgtccagggggctttagaaaaaatggatgcccagaggactcccaaccctggcttggggtcaagaaacagccaacaagagttaggggccttaaggcactgggctgttgttccattgaagccgactctggccctggcccttacttgcttctctagctctctaggcctctccagtttgcacctgtccccaccctccactcagctgtcctgcagcaaacactccaccctccaccttccattttcccccactactgcagcacctccaggcctgttgctatagagcctacctgtatgtcaataaacaacagctgaagcaccaaaaaaaaaaaaaaaaaaa

SEQ ID NO: 23208 - DNA, 346 bp, Homo sapiens
  misc_feature (1)...(346): n = A,T,C or G
ntgggctttaatcgcgccgcttgattgccatgaggtgaagctgagactgttggtgaaattgcaagagctgaattataatttgaaagtcaaagtcttatttgataaagatgtgaatgagagaaatacagtaaaaggatttaggaagttcaacattttgggcacgcacacaaaagtgatgaacatggaggagtccaccaatggcagtctggcggctgaatttcggcacctgcaattgaaagaacagaaaaatgctggcaccagaacgaatgagggtcctctcatcgttactgaagagcttcactcccttagttttgaaacccaattgtgccagcctggtttggtaatt

SEQ ID NO: 23209 - DNA, 474 bp, Homo sapiens
  misc_feature (1)...(474): n = A,T,C or G
ncgggccataganctcgtccgccctgcacgaattcggcacgagcctgggcaacatagtgataccctatctcttaaaaaagaagaagtttttaaatttgaaataataataggtactggatttatgcaaatgtcttttctgcgtcttttgagatgagtatcaggtttttttttttccttttatcatctgatgatgaacttaatgtttccatttgtattaatggaatactaagtccctctgtgatttctgaaccaagctattcctaggcctgagttttattttgttgacccagaaataaattaaaaggccaagcgtgggggcatgtgcctgtagtcctagttgctgaggtaagaggattgcttgagcccaggagttcaaggctgcagcaagctttgattgcgccactgcactccagccttggcgacagactaagacgctgtctcaaaaaaaaccaaaaccgacaaaaaaaaaccaaa

SEQ ID NO: 23210 - DNA, 488 bp, Homo sapiens
  misc_feature (1)...(488): n = A,T,C or G
nagcgttgtnnnaattgactttctgagcaattcggcacgagactgcccatcccctatagccaacagagatttgtagatttaaagggatcacatttgaagacgatagtgtttaagaaagcaagcaagacccttatcagtcatgtcataacaaggcacatttatgaccgaaccctctcaaggcataggaggagtttggagggtttcatacaccctgcagattcctgttggctctaaccctcaattacctaatcttatgctttaacacataactgcattggatgtgagagtaacgtaccgtatggccattgttctatatattaacattgaacactgctgcgatcgctcaaggacattttatgttacggctttaaagcacaggcatgattatcagaaactatgtaagctttcttctttgaaaaacaagctacttttacagaatataaacaacacgagtgcctgtggtttagcccaccaatcttgatgactaa

SEQ ID NO: 23211 - DNA, 499 bp, Homo sapiens
  misc_feature (1)...(499): n = A,T,C or G
acggttgntnnnnttactgtccgccctgcatgaattcggcacgagaatctgtaggggtagccctgtccaggtaaagttgttttcagcctcatgtctactgttaggtgagggagtcacagccagacagagagtattgctggagggtgagagaattgtggagaccaactaccacatagcaagagcccagctcttgggagcattgagatgtaagctcagggttacacagttccaaatcttgggaaggggcttttcagacagactgtttgctttctgctgagataaggaatgcatcactctgccagagtatgactttttacagattattaaataaagctgcatatgtctcattgttnanaaaaaaaaaaaaaaaaaaaaaaaaaaaaaaaaaaaaaaaaaaanttttgggggggggggcccggccccccattcccctttaggggggggaaaaaaaattccgggggccggttttaacacggggggggggaaaaaaaaannnnna

SEQ ID NO: 23212 - DNA, 474 bp, Homo sapiens
  misc_feature (1)...(474): n = A,T,C or G
ngatagaccgcctggngannncactgaccgcctgcagttttgcaccagngcagcaaatcatgaagtttaaatctttagatgacgtgatcaaaagagcaaacaatactttctatggcttatcagcaggagtgtttaccaaagacattgataaagccataacaatctcctctgctctgcaggcaggaacagtgtgggtgaattgctatggcgtggtaagtgcccagtgcccctttggtggattcaagatgtctggaaatggaagagaactgggagagtacggtttccatgaatatacagaggtcaaaacagtcacagtgaaaatctctcagaagaactcataaagaaaatacaagagtggagagaagctcttcaatagctaagcatctccttacagtcactaatatagtagattttaaagacaaaatttttcttttcttgatttttttaaacataagctaaatcatattagtatta

SEQ ID NO: 23213 - DNA, 468 bp, Homo sapiens
  misc_feature (1)...(468): n = A,T,C or G
nattgaccgcctgcggaattcggtgcgaggacaaggaatcgtatcgtatgtccgctatccagaacctccactctttcgacccctttgctgatgcaagtaagggtgatgacctgcttcctgctggcactgaggattatatccatataagaattcaacagagaaacggcaggaagacccttactactgtccaagggatcgctgatgattacgataaaaagaaactagtgaaggcgtttaagaaaaagtttgcctgcaatggtactgtaattgagcatccggaatatggagaagtaattcagctacagggtgaccaacgcaagaacatatgccagttcctcgtagagattggactggctaaggacgatcagctgaaggttcatgggttttaagtgcttgtggctcactgaagcttaagtgaggatttccttgcaatgagtagaatttcccttctctcccttgtcacaggtt

SEQ ID NO: 23214 - DNA, 502 bp, Homo sapiens
  misc_feature (1)...(502): n = A,T,C or G
ggagggacgggnnnnnnnnnnaatagatcgcttcgtatgaactcggcacgaggagcggccanaatgaagtttaatccctttgtgacttccgaccgaagcaagaatcgcacaaggcatttcaatgcaccttcccacattcgaaggaagattatgtcttcccctctttccaaagagctgagacagaagtacaacgtgcgatccatgcccatccgaaaggatgatgaagttcaggttgtacgtggacactataaaggtcagcaaattggcaaagtagtccagggttacaggaagaaatatgttatctacattgaacgggtgcagcgggaaaaggctaatggcacaactgtccacgtaggcattcaccccatcaaggtggttatcactaggctaaaactggacaaagaccgcacaaagatgctcgtacggaaagccaaatctcgcccagtaggaaaggaaaagggcaaatacaaggaagaaaccattgagaagatgcaggaataaa

SEQ ID NO: 23215 - DNA, 478 bp, Homo sapiens
  misc_feature (1)...(478): n = A,T,C or G
naattgaaagccttgtcgcgcctgcacgattcggcacgaggatgttcatgcggccagggaagctgttcgactatttcccaaaaccataccccaacagtgaggctgctcgagctgccaacaacggagcattgccccctgacctcagctacatcgtgcgagctaggcatggtggtgaggactacgtcttctccctgctcacgggctactgcgagccacccaccggggtgtcactgcgggaaggtctctacttcaacccctactttcctggccaggccattgccatggcccctcccatctacacagatgtcttagagtttgacgatggcaccccagctaccatgtcccagatagccaaggatgtgtgcaccttcctgcgctgggcatctgagccagagcacgaccatcgaaaacgcatggggctcaagatgttgatgatgatggctctgctggtgcccctggtctacaccataaagcggca

SEQ ID NO: 23216 - DNA, 467 bp, Homo sapiens
catagaccgcccttagattttcgtccgcacgctcctgctcctgactcaccgctgttcgctctcgccgaggaacaagtcggtcaggaagcccgcgcgcaacagccatggcttttaaggataccggaaaaacacccgtggagccggaggtggcaattcaccgaattcgaatcaccctaacaagccgcaacgtaaaatccttggaaaaggtgtgtgctgacttgataagaggcgcaaaagaaaagaatctcaaagtgaaaggaccagttcgaatgcctaccaagactttgagaatcactacaagaaaaactccttgtggtgaaggttctaagacgtgggatcgtttccagatgagaattcacaagcgactcattgacttgcacagtccttctgagattgttaagcagattacttccatcagtattgagccaggagttgaggtggaagtcaccattgcagatgcttaagtc

SEQ ID NO: 23217 - DNA, 499 bp, Homo sapiens
  misc_feature (1)...(499): n = A,T,C or G
agcgnnttnnnaatttactgaccgcctgcagctntgcacgctattatacgaagggatttgcactactgaattttgtagtaaaatactcccctgaacgacagcgttctcttcgtcctcatcatgatgcttctacatttaccataaacattgcacttaataacgtgggagaagactttcagggaggtggttgcaaatttctaaggtacaattgctctattgagtcaccacgaaaaggctggagcttcatgcatcctgggagactcacacatttgcatgaaggacttcctgttaaaaatggaacaagatacattgcagtgtcatttatagatccctaagttatttacttttcattgaattgaaatttattttggatgaatgactggcatgaacacgtctttgaagttgtggctgagaagatgagaggaatatttaaataacatcaacagaacaacttcactttgggccaaacatttgaaaaactttttataaaaaattggtt

SEQ ID NO: 23218 - DNA, 477 bp, Homo sapiens
  misc_feature (1)...(477): n = A,T,C or G
nattgaccgcctgcaggatagattttctcttttttgagatggagttttgcttattgcccaggctagagtgcagtggcacaatcttggctcactgcaacctctgccttccagtttcaagcaattctcctgcctcagtctcccaagtagctgggattacaggtgcctgccaccaggcccagctaatttttttgtatttttagtacagacagggtttcaccatgttgttcaggctggtctcaactgctgacctcatgatccacccatctcggcctcccaaagtgctgggattacaggtgtgagacaccgcacccagcccttaactgtcgtaattttcaaagtagtttcatctactttccatctcattccaactctaaaaggtagtaaggactggaattaacaactccagattacagatgaagaatctgagactcagaaagataaaggagcagctttagtgtcaaaaggtcagaagtttgt

SEQ ID NO: 23219 - DNA, 495 bp, Homo sapiens
  misc_feature (1)...(495): n = A,T,C or G
gggatgntnnccatgtccgccttcggaattcggcacgagtgcgtctgcagctggcgcggaagagggaagtgcggctccttcgaagacaaacaaaaacatctttggaagtttctttgctagaaaaatatccgtgctccaagtttataattgctataggaaataatgcagtagcatttctgtcatcatttgttatgaattcaggagtctgggaggaagttggttgtgccaaactctggaatgaatggtgtagaacaacagacactacacatctgtcctccacagaggctttttgtgtgttttatcatctaaaatccaatccctcggtttttctctgtcagtgcagttgctatgttgcagaagatcaacagtatcagtggctggaaaaggtttttggctcttgtccaaggaagaacatgcagataactattctcacatgtcgacatgttaccgattataaaacctcagaatccaccggcagccttccttctcctttcc

SEQ ID NO: 23220 - DNA, 473 bp, Homo sapiens
  misc_feature (1)...(473): n = A,T,C or G
gtgggggttaaattgacggctgctggaacgcatcgagcctaaccgttgctcctgtagcttccgagtcctggtggtgtcggccaagttcgaggggaaaccgctgcttcagagacacaggctggtgaacgcgtgcctagcagaagagctcccgcacatccatgcctttgaacagaaaaccctgaccccagaccagtgggcacgtgagcgacagaaatgagggactgggatctgcacagccattaaattataaatctggaccagcanaaaaaaaaaaaaaaaaaaaaaaaatccctggggggggggccgggccccaattcccccttatgggggggggtttaaaattccgggggcggggttttaaaacggggggggggggaaaaaacnnnnnnnnnnnnnnnnnnnnnnnnnnnnnnnnntnnnntnnnnnnntnttncnattatnttnttnnttnttttntttntttttttttttt

SEQ ID NO: 23221 - DNA, 504 bp, Homo sapiens
  misc_feature (1)...(504): n = A,T,C or G
gatgcgtnnnnnaaattgatcgactgaggacttccgccgaggncccctcacaacccagtgacacctttctgctttcctctagactggaacattgattagggagtgcctcagacatgacattcttgtgctgtccttggaattaatctggcagcaggagggagcagactatgtaaacagagataaaaattaattttcaatattgaaggaaaaaagaaataagagagagagaaagaaagcatcacacaaagattttcttaaaagaaacaattttgcttgaaatctctttagatggggcttatttctcacggtggcacttggcctccactgggcagcaggaccagctccaagcgctagtgttctgttctctttttgtaatcttggaatcttttgttgctctaaatacaattaaaaatggcagaaacttgtttgttggactacatgtgtgactntgggtctgtctctgcctctgctttcagaaatgtcatccattgtgtaaaatattgg

SEQ ID NO: 23222 - DNA, 464 bp, Homo sapiens
  misc_feature (1)...(464): n = A,T,C or G
ggggggnnnnngnnncccattgcccgcctgcggaattcggcacgagccggaaggagaggttaaaaaggaaaggcctaaaatgaggaagagagttaccacaacaagcagtacctagttccagttcttggtcccaggagtttgtggttgttgctgctttcatcttcctcagccaacacaaaaggaaagtgccaaggggcgattcctaggaccttcagtgcagtctccaccttgcggacttggctcatttgtgtccactcctttctccagccttttacacttgatgctcttggatgaatagaaaggagcacaattaatggaaaacacaagcttgggagtcaagggatttgggttctattcttgtcctcccttggtgacgacatcattaccttgggttattcaagctttcagtgccagagttcctatatcaataaaagattattacattgaaaaaaaaaaaaaaaaaa

SEQ ID NO: 23223 - DNA, 467 bp, Homo sapiens
  misc_feature (1)...(467): n = A,T,C or G
attgaccgcctganggctttgagtccgtctctgctgtgaaaccctgttcttaaagctaacttggcgctctactggcaaccccgattgctgttttaaaagcagaagatcagcataaaaaaagagaaggaaatcatgaactaggtgaaaaaacacatttttcttcatattctcaaaatgagagggaagcagaagtctgtggctaagggtggagaccctgcgtctgtgaacagaggccactgcccaccactgcccccaagcaggtggagggaggcacagttctgaatgcctttggcccctcacaaggaaggtggcacacacaccggaccccctctggccttctgttaacctgcaccaagtcctgactgtccgcggagctgccacgcccaccttgatggctgctgcgttacaccagaggcaggaccaggacctgactcctccaggctccactgcccatcagtgcctgctgg

SEQ ID NO: 23224 - DNA, 387 bp, Homo sapiens
aattgatttgcgctgcaggaattcggcacgagtgcagacctgtcctcctggtgggtccaggggcccctccagcttgtggagccccacactggggtgccgcctgcccgtctctctcccatggagccccagccccctttgggcccagggacaccagccaggctctgtgctgaccctcctgttgcacccagccctggtctcagcagcgaccacccctgcctccaccctctgagctttgcatgttccactaaccccgggcgggtggcaggtggaggtgtcaggctgctggcgcctctgcaagggcagaacactaacctgaccgtgggcggggccttgcggtatccgcccccaataaaagcaattccaaccttaaaaaaaaaaaaaaaaaaa

SEQ ID NO: 23225 - DNA, 513 bp, Homo sapiens
  misc_feature (1)...(513): n = A,T,C or G
gggtgtgcccnnattggacncccatcgaccgcctgcagagctcatgctcgttcgtgtaaagggcgggagagaggaaaggaaggagggcattgggagctgaggccccacctttcatttcagaaaagtgcacaggcagagcgggctgagtcacaggcacaggtgaggaactcaactcaaactcctctctctgggaaaacgcggtgcttgctcctcccggagtggccttggcagggtgttggagccctcggtctgccccgtccggtctctggggccaaggctgggtttccctcatgtatggcaagagctctactcgtgcggtgcttcttctccttggcatacagctcacagctctttggcctatagcagctgtggaaatttatacctcccgggtgctggaggctgttaatgggacagatgctcggttaaaatgcactttctccagctttgcccctgggggtgatgctctaacagtgacctggaattntcgtcctctagacgggggaccttagcagt

SEQ ID NO: 23226 - DNA, 501 bp, Homo sapiens
  misc_feature (1)...(501): n = A,T,C or G
ggaggcagggngnnngnnnaattgatngattgttccgcctgtangaattcggcacgaggacaccccttgcctgccacaagccagggcactgcaagcaaatgccctttcctggcagcacagatgaatcagagaggcagcagtgtcttctgcaaagccagtcttgagcttcaggaggatgtgcaggaaatgaatgccgtgaggaaagaggttgctgaaacctcagcaggccccagtgtggttagtgtgaaaaccgatggaggggatcccagtggactgctgaagaacttccaggacattatgcaaaagcaaagaccagaaagagtgtctcatcttcttcaagataacttgccaaaatctgtttccacttttcagtatgatcgtttctttgagaaaaaaattgatgagaaaaagaatgaccacacctatcgagtttttaaaactgtgaaccggcgagcacacatcttccccatggcagatgactattcagactccctcatcacc

SEQ ID NO: 23227 - DNA, 481 bp, Homo sapiens
  misc_feature (1)...(481): n = A,T,C or G
agatagacncgccctnnggannnnnacttgatccgcgctgcaggaattcggcacgagcaatgccattaacaagtgccccctgctgaagccctgggccctgaccttctcctacggccgagccctgcaggcctctgccctgaaggcctggggcgggaagaaggagaacctgaaggctgcgcaggaggagtatgtcaagcgagccctggccaacagccttgcctgtcaaggaaagtacactccgagcggtcaggctggggctgctgccagcgagtccctcttcgtctctaaccacgcctattaagcggaggtgttcccaggctgcccccaacactccaggccctgccccctcccactcttgaagaggaggccgcctcctcggggctccaggctggcttgcccgcgctctttcttccctcgtgacagtggtgtgtggtgtcgtctgtgaatgctaagtgcatcaccctttccggcacactgccan

SEQ ID NO: 23228 - DNA, 346 bp, Homo sapiens
  misc_feature (1)...(346): n = A,T,C or G
caactttcataccccanataaaagctaaaaccacctaatgctcttatggcacanctgtgtatagatttagttctctttatacttcatttctagcccagttgggttttgatttatataactagtttagaccttctcttcataatcttgctctgagatggggaacagaacacacaactatgaagtttctttcatgtgtaaataatgagaaataaatgcctcataaatgatactacaatgtaactatcaaagttttataattcattatgagttcaccattttaatgtttcccattaaacctcctagtgcccagnggaagaaacaccctntcatcttagagtccactgtt

SEQ ID NO: 23229 - DNA, 468 bp, Homo sapiens
  misc_feature (1)...(468): n = A,T,C or G
nggttgaccgcgtgaggagaccctttgactgaccaccagcctctcacggaggcatcttatgttaacctacctaccattgcgctgtgtaacacagattctcctctgcgctatgtggacattgccatcccatgcaacaacaagggagctcactcagtgggtttaatgtggtggatgctggctcgggaagttctgcgcatgcgtggcaccatttcccgtgaacacccatgggaggtcatgcctgatctgtacttctacagagatcctgaagagattgaaaaagaagagcaggctgctgctgagaaggcagtgaccaaggaggaatttcagggtgaatggactgctcccgctcctgagttcactgctactcagcctgaggttgcagactggtctgaaggtgtacaggtgccctctgtgcctattcagcaattccctactgaagactggagcgctcagcctgccacggaagac

SEQ ID NO: 23230 - DNA, 504 bp, Homo sapiens
ctttgcaccgcgctgcaggattttccgccgcgctacacgatgaagatgatgaataaccagtaccagttccagttcaagtgtttaaaacttttgacaagtggtagtcctactgtttacactcacagttaatgttcatacctagttttataagctgttctgtaacatagtgtagcaaaaaaaaagttcaagtcatgttatacaggtgtgtcaaaaggtatcttggtcattaagtattgtgcagtgcattatttattatccctaggagagatgaaatttgagaggtgatcatgtctttttaaggaaacttacataatgctctgctttttttttttctctgtggaccattggtattataataaagagcaatttgtaactgagtggcactaatggaagaaagtgctgctcaaaggaagtatgaagttatatatttaattttttaattttaatttttaatttttttgctgggaaaggcaagctgaaatttaccatacatatcatacttgg

SEQ ID NO: 23231 - DNA, 473 bp, Homo sapiens
  misc_feature (1)...(473): n = A,T,C or G
nattgagcgcctgaggaacntggcacgagggaaagccatagcataactgaatcaaaatcgttgattccagtagcttggacatccctgacacagatgcttttggaagcacctggtattttcttattgggtcaaagaaaaagattctcaaccatgccagaaacagaaacacatgagagagagactgaattgttttcaccaccttctgatgtccgaggcatgacaaaacttgatagaacagcttttaaaaagacagtcaacattccagtgcttaaagtgaggaaagaaatagtcagtaaattgatgcgatccctaaaaagggcagcattgcagcgcccaggcataagacgtgtgattgaagatccggaagataaagaaagtagactaatcatgttggatccctataaaatatttactcatgattcctttgagaaagcagaactcagtgttttagagcagcttaatgtcagtccacn

SEQ ID NO: 23232 - DNA, 504 bp, Homo sapiens
  misc_feature (1)...(504): n = A,T,C or G
ggagcgtnnnnaatactgtcgactgaggaatttccacgagcacgaatcaagcacagacgacaagaaaccaggggaaagaaaaattaagaggcatgctaaaaataattgaggttttcatgattcagcacctgcttttgtttctgtgagatgagctaaattgctttcataccccagataagagctaaaaccacctaatgctcttatggcacagctgtgtatagatttagttctctttatacttcatttctagcccagttgggttttgatttatataagtagtttagaccttctcttcataatcttgctctgagatggggaacagaacacacaagtatgaagtttctttcaggtgtaaataatgaaaaataaatgcctcataaatgatagtacaatgtaactatcaaagttttataattcattatgagttaaccattttaatgtttccaattaaacctcatagtgcaaaaaanaaaanaaaaaaaaaaaaaaaaaaaaaaaaancca

SEQ ID NO: 23233 - DNA, 496 bp, Homo sapiens
  misc_feature (1)...(496): n = A,T,C or G
atttgccggctgcagattcggcacgaggagatgacgaacggaacgtcatcgtttggaaagcgtcgcaataagacgcacacgttgtgccgccgctgtggctctaaggcctaccaccttcagaagtcgacctgtggcaaatgtggctaccctgccaagcgcaagagaaagtataactggagtgccaaggctaaaagacgaaataccaccggaactggtcgaatgaggcacctaaaaattgtataccgcagattcaggcatggattccgtgaaggaacaacacctaaacccaagagggcagctgttgcagcatccagttcatcttaagaatgtcaacgattagtcatgcaataaatgttctggttttaaaaaatannanaaaaaaaaaaaaaaaaaaaaaaaaaaaaaaaaaaaaaaaaaaaaaaananaaannaaanannnnnnccccggggggggggcgccgccccccatccccctttagggggggggaaaaaaaac

SEQ ID NO: 23234 - DNA, 485 bp, Homo sapiens
  misc_feature (1)...(485): n = A,T,C or G
catcgccncgcctgattgagccgtctgcaggattcggcacgagccaccccctgcctcttttggttgttgttcttaatctcctctccatgtagttcccagtgggcaagagcctttgaaaatgcaggattctaaacactcgtgcttgcgtttgaagcctcgcgtcactcagtcgcgtgggatgatgagtccgttgttgtctgccttggccgaaagatgaaaaaaagcctgaaccccaacccccagctggttgagagcaccctgcattctgcctcatggtgcagttagcgatcacaggccttcagaagtacaacatcagctcagcaggaacgccggctccccgaggacccaggcttgacgattcaccggggatctcctgggctgggctctccttggaagtgaggccttttattaaaaataaaagggttttgcagtttgaaaaaaaaaaaaaaaaaaaaaaaaatttggggggggggccgggccccatg

SEQ ID NO: 23235 - DNA, 479 bp, Homo sapiens
aatgatcgcctgcacgaattaagcgcgaggcgtacatcactgcgtccagttctcagttcttaattcctacctttgtgtttgcaatttaagatatgctggctgtacagtgtttccatgttgtagcctcttgaataaggaaaaatctcagccaccaggtctgaccaaaaaggtcaattctaagttgtaatgttcatttcatgtccgcaactcccaagagttatttggagttcccactgggaaccacatgcattctgatcaggcattttattttctgaaccttacaagagccttactatttgatttcccactcctcactcctctcttcccacaaaaagtaactgtcaatcctaacttgacctggcttagaaaaatcaagtgtattagactgaatcatatgcagttgttgattttgacagtttttgatgtacaaaactagcagtttctcatagctcaacctagtagctttcttctgaatgatt

SEQ ID NO: 23236 - DNA, 472 bp, Homo sapiens
  misc_feature (1)...(472): n = A,T,C or G
ntttgacccatgatcgccttcggctggagacgacgtgcagaaatggcacctcgaaaggggaaggaaaagaaggaagaacaggtcatcagcctcggacctcatgtggctgaaggagagaatgtatttggtgtctgccatatctttgcatccttcaatgacacttttgtccatgtcactgatctttctggcaaggaaaccatctgccgtgtgactggtgggatgaaggtaaaggcagaccgagatgaatcctcaccatatgctgctatgttggctgcccaggatgtggcccagaggtgcaaggagctgggtatcaccgccctacacatcaaactccgggccacaggaggaaataggaccaagacccctggacctggggcccagtcggccctcagagcccttgcccgctcgggtatgaagatcgggcggattgaggatgtcacccccatcccctctgacagcactcgcaggaagg

SEQ ID NO: 23237 - DNA, 493 bp, Homo sapiens
  misc_feature (1)...(493): n = A,T,C or G
ggatgcaggggnnnnnnnnnttatgatggctgtagaatccgccgagcaatacctgcctcacagtgcatggcggtatgccgccaaacgcttccgcaaagctcagtgtcccattgtggagcgcctcactaactccatgatgatgcacggccgcaacaacggcaagaagctcatgactgtgcgcatcgtcaagcatgccttcgagatcatacacctgctcacaggcgagaaccctctgcaggtcctggtgaacgccatcatcaacagtggtccccgggaggactccacacgcattgggcgcgccgggactgtgagacgacaggctgtggatgtgtcccccctgcgccgtgtgaaccacgccatctggctgctgtgcacaggctgtcgtgaggctgccttccggaacattaagaccattgctgagagcctggcagatgagctcatcaatgctgccaagggctcctcgaactcctatgccattaagaagaaggacgag

SEQ ID NO: 23238 - DNA, 467 bp, Homo sapiens
attgaccgcctgcggaattttgacgacagagccttagacccagcactccttggattggctctgcagagtgtcttggttgagagaataacgttgcagttcccacagggcatgtgactttgaaagagactagaggccacactcagttaataatggggcacagatgtgttcccacccaacaaatgtgataagtgatcgtgcagccagagccagccttccttcagtcaaggtttccaggcagagcaaataccctagagattctctgtaatattggtaatttggatgaaggaagctagaagaattacagggatgtttttaatcccactatggactcagtctcctggaaaaggatctgtccactcctggtcattggtggatgttaaacccatattcctttcaactgctgcctgctagggaaaactgctcctcattatcatcactattattgctcaccactgtatcccctctac

SEQ ID NO: 23239 - DNA, 495 bp, Homo sapiens
  misc_feature (1)...(495): n = A,T,C or G
gacgggccgnnnnaanttannaaattcgacggctctaagaactctgcacgagcaggcttgagggctgccccagcaggctctgggtatgacctgcctctggccctggtcctgggcggggcctgtgggtggagtagtacccccaggccctgccctgggtgacagactgggaggaaaccaggctggacctgggcaggcgggatgtgttggccacagggagaggcggaccggcacccggtgggacctcctaggactgggccttcttccagggggcccctggcagcagctggggtgtcgggcagaatgtgacttgtggccttaccatggacttgaatgggacttggctggcctcaggatcttgtgcctggaaatagcctgaggtggctcaggaagcggagaaagggtgccagaccattctctggcggggaccagggcccaaggccccagggctggaaggagaccaaggggcagccgccctggagggacatcagtgcttcc

SEQ ID NO: 23240 - DNA, 321 bp, Homo sapiens
attgcccgcctgattaattccgcacgagaggagctgaaggagctgatccagaaggagctcaccattggctcgaagctgcaggatgctgaaattgcaaggctgatggaagacttggaccggaacaaggaccaagaggtgaacttccaggagtatgtcaccttcctgggggccttggctttgatctacaatgaagccctcaagggctgaaaataaatagggaagatggagacaccctctgggggtcctctctgagtcaaatccagtggtgggtaattgtacaataaattttttttggtcaaatttaaaaaaaaaaaaaaaaaa

SEQ ID NO: 23241 - DNA, 467 bp, Homo sapiens
  misc_feature (1)...(467): n = A,T,C or G
gtgcgcaannanaattgacagtgagagcatgcggaanacggacgagcaaataattggttaaatgcataaagttgaggactttgaatctgggacagaactgcattacctcactcccagagaaaggtggtcagctctcccatctcactcagctggagctgaaggggaactgcttggaccgcctgccagcccagctgggccagtgtctgatgctcaagaaaagcgggcttgttgaggaagatcacctttttgataccctgccactcgaagtcaaagaggcattgaatcaagacataaatatttcctttgcaaatgggatttaaactaagataatatatgcacagtgatgtgcaggaacaacttcctagattgcatgtgctcacgtacaagttattacaagataatgcattttaggagtagatacatcttttaaaataaaacagagaggatgcatacaaggctgatagaag

SEQ ID NO: 23242 - DNA, 500 bp, Homo sapiens
  misc_feature (1)...(500): n = A,T,C or G
aggaggcaggggggnnngnnnaatagatcgtttagagcgcctgtagaattcggcacgagccagctcctagacgaagtacttcataccatgccgattgcagacccacaacctttagactgaggtcttttaccgttggggcccttaaccttatcaggatggtggactacaaaatacaatcctgtttataatctgaagatatatttcacttttgttctgctttatcttttcataaagggttgaaaatgtgtttgctgccttgctcctagcagacagaaactggattaaaacaattttttttttcctcttcagaacttgtcaggcatggctcagagcttgaagattaggagaaacacattcttattaattcttcacctgttatgtatgaaggaatcattccagcgctagaaaatttagccctttaaaacgtcttagagccttttatctgcagaacatcgatatgtatatcattctacagaataatccagtattgctgattttaa

SEQ ID NO: 23243 - DNA, 457 bp, Homo sapiens
  misc_feature (1)...(457): n = A,T,C or G
tgagggaacactgacttgcgctgcacgattcggcacgaggaaaccctgggagagtctgggagtttacttccaaataaattgaataagttgatacagaggtttcctaacaaaccttacctcagctgaaaatggacaagtattttcaatgactgaaatatagcttctgacaactatgcagaggcattttagagacattggcattgccatgccctctttggagggtagaagaggcaaaacacttttttcaccctttggaatcatagtatgggtagaagttatgatttatcttgaaataaaatcctctgaacagaggagataaagacacaaaaaacctcgggggggggcccggaccccacttccccctattaggagggggtttaaatatagtggccgagattttacaacgtcaagaccgggaaaaatcncgctcacacagcgaggcctcaagacagtgttt

SEQ ID NO: 23244 - DNA, 499 bp, Homo sapiens
  misc_feature (1)...(499): n = A,T,C or G
aggcgtgnntnnnaattgtctgacctcagtaattcggcacgaggagagagagagagagagagagagagagagagagagagcattccatcagagaaaaaatattctctcccagggataagaaaggtattctggtaatacattatcatcaatccttaaacagtcacagtcttggcacttatcacaaaaccgacccattttttataaccagaaagaatatcttagactgcccttcacattatactatacctactgccttgaaagaataagaggcgctcagtgtgtatacttgctgccctccatattctccattgcaccatgggtgtataacgttcagagtttcattgaatattattttaagtattacaaaaggcagcgtgcttcttaatatatgcatctttggggtttgtgaagaaatataattctttgatgtaaaaaggaacgtgtaaaaaagttggaagctctgcacctgtgtatatatatattttagcaataaagcagc

SEQ ID NO: 23245 - DNA, 508 bp, Homo sapiens
  misc_feature (1)...(508): n = A,T,C or G
cttggccccgcgctgcaggattttccgccgcgctgcacgaattcggcacgagtattgctgtcatcattcagagcacagcctgaagagaccagtgagctcactgtgacccatccttactctacttggccaggccacagtaaaacaagtgaccttcagagcagctgccacaactggccatgccctgccattgaaacagtgattaagtttgatcaagccatggtgacacaaaaatgcattgatcatgaataggagcccatgctagaagtacattctctcagatttgaaccagtgaaatatgatgtatttctgagctaaaactcaactatagaagacattaaaagaaatcgtattcttgccaagtaaccaccacttctgccttagataatatgattataaggaaatcanataaatgttgccttaacttcaaaaaaaaaaaaaaaaaaaaattcaaggggggccccggaccccantccgccttatggggagcgaataacaatcaacggcccgc

SEQ ID NO: 23246 - DNA, 492 bp, Homo sapiens
  misc_feature (1)...(492): n = A,T,C or G
agagcagggggnnnnnttctgatcgctcgtggaactcggcacgagcacgccatcccagagggctcaggatgccccaggaaggaaagaagggcaacagactacacgattggacgtgtgtggttgactgggatgaagttggagggaggggcagggccttgcaggggattggtactgatcccagggaggaagtgttggggcttcatgaactaggatgaaaggaggcccctgagccatgacaaggggcacatccaggatttccgccaccctgaatttagtagagctagtaggccctggtcgtcactctgggcagggatgccgtcagccttgagggtcgccacccacctgtgtgttgccctctgtcctggcggggaaacatacaccccttgtctcaccaccaaccttgcttgtgtagtcagcagggctggccctgccccaaggactcactgcatgtacccggacccctatgcctggcctttgcagcatagttgggag

SEQ ID NO: 23247 - DNA, 497 bp, Homo sapiens
  misc_feature (1)...(497): n = A,T,C or G
aggggnttnnnntttctcgaccgcttgcggaattcggcacgaggaccgatggaggagtggactattcctttgaatgtattggtaatgtgaaggtcatgagagcagcacttgaggcatgtcacaagggctggggcgtcagcgtcgcggttggagtaactgcttcaggtgaagaaattgccactcgtccattccagctggtaacaggtcgcacatggaaaggcactgcctttggaggatggaagagtgtacaaagtgtcccaaagttggtgtctgaatatatgtccaaaaagataaaagttgatgaatttgtgactcacaatctgtcttttgatgaaatcaacacagcctttgaactgatgcattctggaaagagcattcgaactgttgtacagatttaattcaaaagagaaaaataatgtccatcctgtcgcgatgtgataggagcagcttaacaggcagggagaagcgcctgcaacctcacagtctcgtagagcttt

SEQ ID NO: 23248 - DNA, 478 bp, Homo sapiens
  misc_feature (1)...(478): n = A,T,C or G
atcgcccgcctgatgaattccgcacgagagaaagtaagcttttagaaatacagactgaaaagaacaaacagaagattgatttggacagtatggaaaactcagagaggataaagatcatacgacaaaacctacagatggagataaaaattactactgttattcaacatgtgttccagaaccttattttggggagtaaagtcaattgggcagaggatcctgcccttaaggaaattgttctgcagcttgagaagaatgttgacatgatgtaataagaattcatttctgacatattttacatttctggcaatctcaactcttatttggaatacttctgtgcatttgtctgtccaccgtaattttagaaaagcatatccataacgtttacagttgtagtacagttgtggttagttatttgtagtgggattgaaagnaatttttttctttttatatttctatatttagnttggttttttgttgn

SEQ ID NO: 23249 - DNA, 477 bp, Homo sapiens
  misc_feature (1)...(477): n = A,T,C or G
gagtggnttttnaactgaatgtctagctgtagacttcggcacgaggccttgggaggctctgaggcgggtagatcacctgaggtcaggagtttgagaccagcctggccaacatggcgaaaccccgtctccactaaaaatacaaaaattagccaggtgcagtggcacacacctgtaatcccagctactccgaaggctgaggcaggaggatcacctgagcccaggaagttgagactgcagtgagctgagattgcaccactgcactccagcctcagtgacagcgagactgtctcaaaaaaagaaaaaagtgactgaggaggaagaggccaggtggcaaatggaacagaatcaccaaagggtgaacaggactaaggcaatgtagtgtatggctcagctacgtcagagtggaaaaggtgttattagagcagaaactatggtccctgcgtcacagggaagcaacctacagagaagcagcagctc

SEQ ID NO: 23250 - DNA, 445 bp, Homo sapiens
  misc_feature (1)...(445): n = A,T,C or G
ntttgcccgcctgcagaattcggcacgagcaaaaaccaacactggcatctcttagcagagacccgccctgggactttatgtcccaaccctctccccacccccaggttgcagaagatcattcaccgcaatgacggggcagagaattcctgcacagaacgggatgggtggtgcctccccaagaccagcgacgagctcagggacaccatgtccctcatgatccggcagaccatccgctccaagaggcctgctctcttttccagctcagccaaggctgatggcggaaaagagcagctgacgtacgagtctggggaagacgaggaggatgaggaggaggaggaagaggaggagaggacttcaagccatccgacggcagtgaaaacgaaatggagacagagattctggactacgtgtgacagggcccaaggctgggcctccctgacccggn

SEQ ID NO: 23251 - DNA, 471 bp, Homo sapiens
  misc_feature (1)...(471): n = A,T,C or G
aactgccngcatgcaggaaaccgcacgaggacaaaaggaagaaatcaagaagtaaagccataggctcagatacttctgacattgtgcacatttggtgtccagaaggaatgaaaaccagtgacatcaaggagttgaatattgttttgcctgaatttgagaaaacccacctagagcatcaacaaagaatagaatctaaagtttgtaaggcagccatcgccacattttatgttaatgttaaagaacaattcatcaaaatgcttaaagaaagccagatgttgacaaatctgaaaaggaagaatgctaagatgatttcagatatcgaaaagaaaaggcagcgtatgattgaagtccaggatgaactgcttcggttagagccacagctgaaacaactacaaacaaaatatgatgaacttaaagagagaaagtcttcccttaggaatgcagcatatttcttatctaatttaaaacagg

SEQ ID NO: 23252 - DNA, 470 bp, Homo sapiens
  misc_feature (1)...(470): n = A,T,C or G
nttgcctgcgctgcacgaattcggacgagcccctgtggacagcgacggggagagtgataattcagaccgtgttcctgtgcccagttttcaaaattccttcagccaagctattgaagcagccttcatgaaactggacacaccagctacttcagatcccctctctgaagagaaaggaggaaagaaaagaaaaaaacagaaacagaagctcctgttcagcacctcagtcgtccacaccaagtgacactactggcccaggctaccttctccatctggtttttgtttttggttttttttcccccatgcttttgtttggctgctgtaatttttaagtatttgagtttgaacagattagctctgggggggaggggtttccacaatgtgagggggaaccaagaanattttaaatacagtgtattttccagcttcctgtctttacaccaaaataaagtattgacacaagagaanaaaaa

SEQ ID NO: 23253 - DNA, 487 bp, Homo sapiens
  misc_feature (1)...(487): n = A,T,C or G
aggangnngnnnagggtagaannanttttgacccgcctgtaggaattcggcacgagcttcagaccccgctgggaccgaagccgtaaccgaagccaggcccgcagccgctactcactcggaagctccagctaactgtaggatcttccacactctaaggcttcagcttgagaagcacttcgaagccagagcagaaccaaaactcacttccatggggtcaccgggggtgcctgggcggcctttcgtgggcatgcacgcaaggaattggggtggcacacgggacacccgagagctccaggagccccgtgaacccagaccacccagtgccatggccacttatggctgggaacccgaacctggtgactttgaaaggatagagcttcattccataccaaagacttatcacaccatgtgcctatacacccagcagcccaaggtggagggtgcgtggaaatgagaaagctttttacccaaaaaaaaaaaaaaaaaa

SEQ ID NO: 23254 - DNA, 479 bp, Homo sapiens
  misc_feature (1)...(479): n = A,T,C or G
tgggnnnnaattgccctgctgcagcgattcggcacgaggacagaatctcctgtgatctgtgctagctgtgaggcagctctggaacgtgaagagctgtttggtttgaaccgtgaacaaaactgtgttttgagtttacctgacattaaagaaaaaagttcatcacgtgactgttaatgtaaacctggttattaaaataactatgaaattaccctccaaaaaaaaaaaaaaaaagcccccttggggggggcccggtcccccattccccattttggggtttggtataaaaaaaaagggcccctgttttcccacgctggaacatgggaaaagnnccnctnnaaaaaagaaaaaaaaaaactcgtggggggcgccggtccccaattcgcccttataggggaggaataaacacttctggggcgggattctaaactgggggagggggggaaccccctgggccngactggttgaccctattttggttg

SEQ ID NO: 23255 - DNA, 486 bp, Homo sapiens
  misc_feature (1)...(486): n = A,T,C or G
cgtgggacnnccacaattgcccgcatgcatagacccgcctgcaggaattcggcacgagccgccgcctctccagttcttgtggcccccgcggtgcggagtatggggcgctgatggccatggagggctactggcgcttcctggcgctgctggggtcggcactgctcgtcggcttcctgtcggtgatcttcgccctcgtctgggtcctccactaccgagaggggcttggctgggatgggagcgcactagagtttaactggcacccagtgctcatggtcaccggcttcgtcttcatccagggcatcgccatcatcgtctacagactgccgtggacctggaaatgcagcaagctcctgatgaaatccatccatgcagggttaaatgcagttgctgccattcttgcaattatctctgtggtggccgtgtttgagaaccacaatgttaacaatatagccaatatgtacagtctgcacagctgggttggactgg

SEQ ID NO: 23256 - DNA, 478 bp, Homo sapiens
  misc_feature (1)...(478): n = A,T,C or G
gcgcgcccattgaaatcgaccgcctgcangaattcggcacgagccaccgtccagcggctgcagcacacactccaacaggtgcttgaccaaagagaggaagtgcgtcagtccaagcagctcctgcagctgtacctccaggctttggagaaagagggcagcctcttgtcaaagcaggaagagtccaaagctgcctttggtgaggaggtggatgcagtagacacgggtatcagcagagagacctcctcggacgttgcgctggcgagccacatccttactgcactgagggagaagcaggctccagagctgagcttatctagtcaggatttggaggtgggcggaaaccagggtcactgagctacagaggaggacatgccctgggatgtagtagtatcatgcagaggtgtgtgggcccttttgtcacctctgcagactgtgaatcctagctgccagttgcctattatatgccaaggcatttgca

SEQ ID NO: 23257 - DNA, 480 bp, Homo sapiens
  misc_feature (1)...(480): n = A,T,C or G
agctgccgttttaaccgaaaaactgcagggcctccgaattggcacgagtctgaatccaattcggattttcaatcgtttcattgacattcgggcttacgtaactcactacctagacaagactttctacaatctaacagctgtagcccttcatgactgggccacttatagtgagatgagaaacttatctactcaccgttatggactggttatgacagaggcacatcttcccagtcagactttggaacagggccttgatgttttagaaattatgagaaacattcatatatttgtgtcccgatacctctataatctcaacaatcagatttttattgaacgaacaagctataacaagcatttgaatactattaatattcggcatattgctaattcaattctaacacatggcacgggaattatgaatacaactgctaatttcacctaccagtttttgaagaagaagttctatatatttagccagtn

SEQ ID NO: 23258 - DNA, 465 bp, Homo sapiens
  misc_feature (1)...(465): n = A,T,C or G
caagcccggctgatgaattccgctcgagccgtagngtctcattgcagataatttttagcttatggcctggtggctaggtcggttctctcctttccagtcggagacctctgccgcaaacatgctccgccagatcatcggtcaggccaagaagcatccgagcttgatccccctctttgtatttattggaactggagctactggagcaacactgtatctcttgcgtctggcattgttcaatccagatgtttgttgggacagaaataacccagagccctggaacaaactgggtcccaatgatcaatacaagttctactcagtgaatgtggattacagcaagctgaagaaggaacgtccagatttctaaatgaaatgtttcactataacgctgctttagaatgaaggtcttccagaagccacatccgcacaattttccacttaaccaggaaatatttctcctctaaatgc

SEQ ID NO: 23259 - DNA, 469 bp, Homo sapiens
  misc_feature (1)...(469): n = A,T,C or G
tttggacccgcgnttgcaggaananngtttcccccggctgcaggaattcggcacgaggtgatttgtcagcagcgctggcatgcaggctttgcctggctgctatctctagaggcaagtctgccacgagagggcactgcaggcgaagcagttgtgcttgctcattgcctcagcccaagtgtactcaaagaaaagaggcagccagctgtgcgtgctgtacggaaagcctcccgccctccctgcagctccccgccctcagtggcccagggctttgttgaagtggaactccccacttccaacctggtatggctccttctgcgaagggaagctgatcccagcctcctgagctgaatccttcaaaggcacagcaggcagaatgagggccacaggcaggagtggtgtgggcacactgcttaggagtcaacatcttcatcattgggctttctttaaaacgtgcactttgtaatttgaa

SEQ ID NO: 23260 - DNA, 447 bp, Homo sapiens
  misc_feature (1)...(447): n = A,T,C or G
attgatttcactgcgctgcaggaattcggcacgagcggcgacggaggaggaggatggaggcggtggtgttcgtcttctctctcctcgattgttgcgcgctcatcttcctctcggtctacttcataattacattgtctgatttagaatgtgattacattaatgctagatcatgttgctcaaaattaaacaagtgggtaattccagaattgattggccataccattgtcactgtattactgctcatgtcattgcactggttcatcttccttctcaacttacctgttgccacttggaatatatatcgatacattatggtgccgagtggtaacatgggagtgtttgatccaacagaaatacacaatcgagggcagctgaagtcacacatgaaagaagccatgatcaagcttggtttccacttgctctgcttcttcatgtatctttatagtn

SEQ ID NO: 23261 - DNA, 499 bp, Homo sapiens
  misc_feature (1)...(499): n = A,T,C or G
ggggnnnnnnnaaggaggcccnnagganggcnttatganngccttatgatcggtgcggaattcgcacgagattactctccacatgacttccgtctatatccctccagctgccctttggtatgtgggatagggattgttaaccttacttcccagagagataatgaggcctggagaacataggtgagttgctcaagacccagcacaagcatccatgattcctgtaataaggcttccctctgctgttttcactgcagccttaccaagtatggttgggtgtgcaaagtttacattttaaggacctctgctgctgccactgtcattgtggttaatgatggctttaaggtttattcttattcccgtatctttgagagaggaagagagtgggattgctacccacattttaatgaaggtggagctgagccgtagaactctctgnggagccatccaacctgctgtggctcataacaaggtattgatcacttcctttggcctgagtgag

SEQ ID NO: 23262 - DNA, 486 bp, Homo sapiens
  misc_feature (1)...(486): n = A,T,C or G
catcgctncgcctgcaggaatttcgcacgacagattttttactgtctcctgaagaatttaacacaaacatggatatcagaccaaatcatacaatttatatcaacaatatgaatgacaaaattaaaaaggaagaattgaagagatccctatatgccctgttttctcagtttggtcatgtggtggacattgtggctttaaagaccatgaagatgagggggcaggcctttgtcatatttaaggaactgggctcatccacaaatgccttgagacagctacaaggatttccattttatggtaaaccaatgcgaatacagtatgcaaaaacagattcggatatnaatatcaaaatgcgtggacttttgcttggcaagannagaaaaaaaaaaaaaaaaaccttgggggggggcccggcacccaaatccccctatggggagcggaataacattcctttgcccggcgtttaacacggcgggactgggaaaacac

SEQ ID NO: 23263 - DNA, 347 bp, Homo sapiens
  misc_feature (1)...(347): n = A,T,C or G
cccatgtacaccggacagaccggagaacaggctctaagctctgtgtctagtgtagaacatggggaaggagcatcttaagaactgctgaagtaacttcttactgctctcacaattctaaggaagcgggagaacggcctcctaccaacagcgcccaccccagagctgcctgggaaagggcagttttactgaaaggtgctttactgttcacctgcatctttcagcagctcccctcctgccctcacctggncttttccctctttatcccaagcctttatgcttgagtcccttccccaggggctggccacccgacagttccaggcattccctacctgagcttcttgtgtgct

SEQ ID NO: 23264 - DNA, 414 bp, Homo sapiens
gaattcggcacgagggggttgtggacagcgaggccatgtggaagcctgcgtatgacttcttactcacctggagccatcagatcggggacagctaccgggatgtcatccaggagctgcacctgggcctggacaagatgaaaaaccccatcaccaagcgctggaagcacctcactgggactctgatcttggtgaactccctggacgttctgagagcagccgccttcagccctgcggaccaggacgacttcgtgatttgaatgggtcccctcccctcctgctgctctggagtgcaagccctcttctgccctgtgtgccctgctgtcaccgcggagctgaagagggaggaaggggcggctgctcagacagatttagggcccgccagctaggctacacccatcatgcgccgccctcctc

SEQ ID NO: 23265 - DNA, 288 bp, Homo sapiens
attgatttcacctcgcgctgcaggaattcggcacgagtggaagtgggccgcatcatcgagtgcacacactgtggctgtcgtggctgctctggctgaggctggcgcgctccaccctggactctggacttcgcaggttcctgcctgtcacgccacccccttcctgggagcagcgagcagtgccccaggcccgagttggagcacggtctctatggggaaggcttcgctgtctatcagctgtgatttgtaaaaataaaatctttaaatctctcgaaaaaaaaaaaaaaaaaa

SEQ ID NO: 23266 - DNA, 444 bp, Homo sapiens
  misc_feature (1)...(444): n = A,T,C or G
atttgctccgctgcgganaattttggcatatggcattttctaacttaggaagccacaatgttcttggcccatcatgacattgggtagcattaactgtaagttttgtgcttccaaatcactttttggtttttaagaatttcttgatactcttatagcctgccttcaattttgatcctttattctttctatttgtcaggtgcacaagattaccttcctgttttagccttctgtcttgtcaccaaccattcttacttggtggccatgtacttggaaaaaggccgcatgatctttctggctccactcagtgtctaaggcaccctgcttcctttgcttgcatcccacagactatttccctcatcctatttactgcagcaaatctctccttagttgatgagactgtgtttatctccctttaaaaccctacctatcctgaatggtctgtcn

SEQ ID NO: 23267 - DNA, 519 bp, Homo sapiens
  misc_feature (1)...(519): n = A,T,C or G
ggggnnccncaggnagannnnnaattgaccccgcttaggaattcggcacgagctgcacctggaagcgcactatgaggcactgcggcacttcctgctgatggaggacggcgagttcgcccagtccctcagcgacctgctctttgagaagcttggagctgggcaaacgcccggagagctgctcaacccgctggtgctgaactctgtgctgagcaaggccctgcagtgcagcctgcatggggacaccccgcacgcctgcaacctctccctcgctctcaagtacctgcccgaggtgtttgcccccaacgccccggatgtgctgagctgcctggagctcangtggactggcctctcaacattgcatcaccgagggctgcctgagcaagtacagcggcgtcttctccttcctgctgcagctgaagctcatgatgtgggcgctcaaggacgtctgcttncacctcaagcgcacagccctgctgagccacatggncggctctgtngcagtccgtcagctgcagctgt

SEQ ID NO: 23268 - DNA, 489 bp, Homo sapiens
ccccattgcccgcctgcagaattggcacgcgttgaacgtttgggttttcctagctacatctggtaccttggctggcattatgggaatgaggttctaccactctggaaaattcatgcctgcaggtttaattgcaggtgccagtttgctgatggtcgccaaagttggagttagtatgttcaacagaccccattagcagaagtcatgttccagcttagactgatgaagaattaaaaatctgcatcttccactattttcaatatattaagagaaataagtgcagcatttttgcatctgacattttacctaaaaaaaaagacaccaaacttggcagagaggtggaaaatcagtcatgattacaaacctacagaggtggcgagtatgtaacacaagagcttaataagaccctcatagagcttgattcttgtatattgatgttagcttttctttctgtatctgtagcgaaatctcaagggtaaaatgttaggtgtc

SEQ ID NO: 23269 - DNA, 486 bp, Homo sapiens
  misc_feature (1)...(486): n = A,T,C or G
ggtggngttttccttgccttgctcggctgtcggaattcggcacgagctaccctgaaggtgcacctgcaatcctcgccgataagaggcagcagttcggaagccggttcctgagcgatccggcgcgcgtcttccaccacaatgcctgggacaatgtggagtggtcggaagagcaagccgcggcggcggagagaaaagtccaggagaacagtatccagcgggtgtgccaggagaaacaagttgattatgagatcaatgcccacaaatactggaatgacttctacaaaatccacgaaaatgggtttttcaaggatagacattggctttttaccgaattccctgagctggcacctagccaaaatcaaaatcatttgaaggattggttcttggagaacaagagtgaagtatgtgaatgtagaaacaatgaggatggaccttgtttaataatggaagaacagcacaagtgttttcgaagaagcttgaacatan

SEQ ID NO: 23270 - DNA, 332 bp, Homo sapiens
  misc_feature (1)...(332): n = A,T,C or G
ggtccccaatagatcgcttgaggacntccgacgagctctgtcttccctctctactcctcgctacacctgagccaggctcttgccaactctgttccagcctatggctttaggctagctgttaaatatgtgacccagcattagctcagcatctgtcagagcaagagaccaggtaatttctaagaacagggttctagcgatgggactgcccatttcctcagctgcagaggaggaaagggaaagggtaggcctgtagactaacgctgtttacacccttgttctgtcaaagcaattaaagatcacttgtgttgagaaaaaaaaaaaaaaaaaaaaaa

SEQ ID NO: 23271 - DNA, 297 bp, Homo sapiens
  misc_feature (1)...(297): n = A,T,C or G
tgatggcccaatgaccgcctcggaannattgaccgcctgcagaattcggcacgagcacgcctacatcgtgctctgcattgagaacagcttcatgactgcctccaagtagccaccgcctggatgcagatggccggagaggaccggcggctcggaggaagcccccaccgtgggcagggagcagccggccagcccctggccccaggacctggctgccatactttcctgtatagttcacgtttcatgtaatcctcaagaaataaaaggaagccccagagaaaaaaaaaaaaaaaaaaactg

SEQ ID NO: 23272 - DNA, 501 bp, Homo sapiens
  misc_feature (1)...(501): n = A,T,C or G
agggtnnnnnnnnagnnnnnnnnnaattgatcgtcgtgcggacttcggcacgagagaaaccttacgactgcagcgaatgtgggaaagccttcagtcagctctcttgccttattgtccaccagagaattcacagtggagatcttccttacgtgtgtaatgaatgtgggaaggccttcacatgtagctcatacctacttattcatcagagaattcataatggagaaaaaccttacacatgtaatgagtgtgggaaggccttcagacagaggtcgagcctcaccgtgcaccagagaacccacactggggagaagccctatgaatgtgagaagtgtggtgcagctttcatttccaactcacacctcatgcgacaccatagaacccatcttgttgaataacaagtaaggaagaggaagacctccagcattggtcataaccttctgcctccctaatgagacacctctttgctgttttcttcctcctctataaaagngagggctgtgt

SEQ ID NO: 23273 - DNA, 504 bp, Homo sapiens
  misc_feature (1)...(504): n = A,T,C or G
agcgggccggnnnaattgagngaccgcagcgccatgcgcgaattcgccacgagctcttctccccaaccctgcctgttaggagtcttatgttctgtataaatattgagctggagatagtttctaaagaggtgtttggacctttaattaacattgacagcctgtctgcttaggattttgctctgctgtctccatggaaaagtcaggtctctctgctccctggtgtgtaagtggacatattcagcaaagaaaggctgggacgacagtttctggaaaatgattggtttggaagactttgttgcagataattacagcaaaataggaaaccaagtgctacctcctggagcttctcttggaaatgggctcacaccagaggcagcaagagaccttggccttctccctgggattgcggtcgcagcttcactcattgatgcccatgcaggaggactaggagtgattggggcacatgtgagagggcacggcctcatctgtgaggggcagccaatg

SEQ ID NO: 23274 - DNA, 413 bp, Homo sapiens
cgagaggcaactgaggggtgaaaaagaaaacaaacaaaccacaacaacaaaccctgaagagtactgaagatttataagggactggaaaggacttgttgcgcaatggaagaatctgactctgagaaaacgacggagaaagaaaatctggggccgagaatggatccaccactatgggaaccggaaggatcgcttgggtgggtgctaccaaatacagccatgaagaaaaaggtaagacgtgttagatacgtcaaaaccatgaaggtaaaggtgctgttgatgggtaaaagtgggtctggtaagaccagcatgaggtctattatctttgcaaattatattgccagagacacacgtcgccttggcgcaacaattgatgtagaacattctcatgttcgatttctgggaaacctggtatt

SEQ ID NO: 23275 - DNA, 487 bp, Homo sapiens
agaaaaaaatttgacgcctgagtagaaggcatgttggattaccaaatttaatatagttacagaattactgcataagggcttcccttcttggagactcttacccagcatgggaacagtgatctgcccacatgacagggtggtatgccaggcatagttaactgcttttggttgtgaggtactcatcttcctttagttacccttagttatgtggcacacatgtccttattgcctagttcgtcatccacactttggatcttgtgaaaatgctgttagtatccaaccttaaaatatattagtatatgggtttttattaaaagaattactttgaattttctatttaattcatatgtaaataaaggaacatttcatttcacttaaaaaaattatatcagttattaggctgggtgcagtggctcatgcctgtaatcccagcactttgggaggccaaggcgggtggattaccagagttcgggagtttgagaccagc

SEQ ID NO: 23276 - DNA, 405 bp, Homo sapiens
  misc_feature (1)...(405): n = A,T,C or G
aggaccnttnnnntttganccgcctgcaggaattcggcacgagatgagatcccccctctcgagggcgatgaggatgcgtctcgcatggaagaagtcgattaggttaggagttcatagttggaaaacttgtgcccttgtatagtgtccccatgggctcccactgcagcctcgagtgcccctgtcccacctggctccccctgctggtgtctagtgtttttttccctctcctgtccttgtgttgaaggcagtaaactaagggtgtcaagccccattccctctctactcttgacagcaggattggatgttgtgtattgtggtttattttattttcttcattttgttctgaaattaaagtatgcaaaataaagaatatgccgtttttatacaaaaaaaaaaaaaaaaaaa

SEQ ID NO: 23277 - DNA, 415 bp, Homo sapiens
  misc_feature (1)...(415): n = A,T,C or G
gaattcggcacgagggatcctgatcgaggagctgagggaccgatttccctacctgagtgaaagctacttaatcaccaccgatgccgccggctccatcgccacagctacaccggatggtggagttgtgctcatatctggaacaggctccaactgcaggctcatcaaccctgatggctccnagagtggctgcggcggctggggccatatgatgggtgatgagggttcagcctactggatcgcacaccaagcagtgaaaatagtgtttgactccattgacaacctagaggcggctcctcatgatatcggctacgtcaaacaggccatgttccactatttccaggtgccagatcggctagggatactcactcacctgtatagggactttgataaatgcaggtttgctgggttttgccgn

SEQ ID NO: 23278 - DNA, 408 bp, Homo sapiens
agcccacttcagaggtggctcagaaattccaggtgtgcgactgctgcgacaagaccccatcgaatgccttttctcttttatctgttcctccaacaacaacatcgcccgcatcactggcatggtggagcggctgtgccaagcttttggacctcggctcatccagcttgatgatgtcacctaccatggcttccccagcctgcaggccctggctggaaactttttccggagcctgtggggaccttatgctggctgggcccaagcggtgctgttcagtgccgacctgcgccaatcccgccatgctcaggagccaccagcaaagcgcagaaagggttccaaagggccggaaggctagatggggcaccctggacaaagaaattccccaagcaccttcccctccattccccactt

SEQ ID NO: 23279 - DNA, 458 bp, Homo sapiens
  misc_feature (1)...(458): n = A,T,C or G
atagacacccctggacgcctgcggaattcgccacgagcacatgtggccaggagagaggaattttaaaatatttatatactctaaattagtttgttgcaaaataccattctaattaatgcttttatgtcattctcatgaaactaatctgaaagagtaaacttagttttctatttttagatattgtttcaacataccaaataccaaaataaaattaaataattttaaagaacataacacaacttatacatccaaatgcctattgttttcttaaaagtagtcacccccgtcagtgactttttagcataaggttaggagacagattcttatcttttcagcatgcatttgatttttacaaattttcaaaggctgcttgataccttaatcaggccaatatattagctaattaaattaagtcatactgttaaaacatgatatttataaaattaaaagttaaaaan

SEQ ID NO: 23280 - DNA, 497 bp, Homo sapiens
  misc_feature (1)...(497): n = A,T,C or G
agggntgnnaattctcgactgctgctgcggaaggngacatgcttcgggcattccatgcagccttgcggaactctcccgtcaacaccaagaatcaagctgtgaaggagcgagcccagggcgtggtgctgaaagtgctcacaaacttcaagagcagtgagattgagcaggctgtgcagtcactggacagaaacggcgttgacttgttaatgaagtacatttataaaggctttgagaagcccacagaaaatagcagcgcagtgttactccagtggcacgaaaaggccttagcagtaggaggactaggctccattataagagttcttacagcaagaaagactgtttaaaaaaaataaaaagactcatgttaccttgagaagaattctggatgcccaggctggtgaagaagggattgacaatggaccatcttcctaggaactcccaagtaaactatttcaggacatgtatctgctgaaatgtattttattttcaaggtggag

SEQ ID NO: 23281 - DNA, 496 bp, Homo sapiens
  misc_feature (1)...(496): n = A,T,C or G
cccccccccccaattgancgccttangaannnattgcaccgcgtgcaagaattcgccacgagccgggctgagaggagcgtggctgtctcctctctccgccatggcgtgtgctcgcccactgatatcggtgtactccgaaaagggggagtcatctggcaaaaatgtcactttgcctgctgtattcaaggctcctattcgaccagatattgtgaactttgttcacaccaacttgcgcaaaaacaacagacagccctatgctgtcagtgaattagcaggtcatcagactagtgctgagtcttggggtactggcagagctgtggctcgaattcccagagttcgaggtggtgggactcaccgctctggccagggtgcttttggaaacatgtgtcgtggaggccgaatgtttgcaccaaccaaaacctggcgccgttggcatcgtagagtgaacacaacccaaaaacgatacgccatctgttctgccctggctgcctcagcn

SEQ ID NO: 23282 - DNA, 534 bp, Homo sapiens
ggagattcacggctcgaggaacctgccttgaaatggactcactatagcaaatattactgggtgatacagaatgaattctacacttactttttttctcctgtgtttgcattcctgggatttatcctcaagtgcatttctgaccataagtaattttaattcatttcaaatgttttggttattcatgatcacttgggcagtataagaaaatgtagcttctgaatattggccacctctatgctgcatatacttcttgggatatagtatctaagacctttgtaaactgccattttgttaggtatggagtttggtatctagggagtaggccttatttagcaattcaaattttatggagatgaatgatcaaagtgaaacaatgtttggatgcaacgcagaataaaagaatataagaaatagctttttgttgcattaatggatgatattttgaaggacagagcctttgctttttgtattcttttagaaaagcacaacccataagtattttaaaaaaaaaaaaaaaaaaaaaaactcgagggg

SEQ ID NO: 23283 - DNA, 225 bp, Homo sapiens
aattgaccgccttcggaattcggcccgagaggagggtgagttctccgaggcccgtgaggatatggctgccctggagaaggattatgaggaggtgggcatcgactcctatgaggacgaggatgagggagaagaataaagcagctgcctggagcctattcactatgtttattgcaaaatcctttcgaaataaacagtttccttgcaaaaaaaaaaaaaaaaactggg

SEQ ID NO: 23284 - DNA, 471 bp, Homo sapiens
  misc_feature (1)...(471): n = A,T,C or G
caggcgtgtnnnatagaatacatggcatcggcgcctgcaggacgagctgtgcagttttagcgggtacaagatctaccccggacacgggaggcgctacgccaggaccgacgggaaggttttccagtttcttaatgcgaaatgcgagtcggctttcctttccaagaggaatcctcggcagataaactggactgtcctctacagaaggaagcacaaaaagggacagtcggaagaaattcaaaagaaaagaacccgccgagcagtcaaattccagagggccattactggtgcatctcttgctgatataatggccaagaggaatcagaaacctgaagttagaaaggctcaacgagaacaagctatcagggctgctaaggaagcaaaaaaggctaagcaagcatctaaaaagactgcaatggctgctgctaaggcacctaccaaggcagcacctaagcaaaagaatgtgaagcctgt

SEQ ID NO: 23285 - DNA, 470 bp, Homo sapiens
  misc_feature (1)...(470): n = A,T,C or G
agcgggnttttaattgaacatagcagcatctgccacgagctatgctccaccagttggaggcttctcttttgataactgccgcaagaatgccgtcttggaagccgattttgcaaagaggggatacaagcttccaaaggtccggaaaactggcacgaccatcgctggggtggtctataacgatggcatagttcttggagcagatacaagagctactgaagggatggttgttgctgacaagaactgttcaaaaatacacttcatatctcctaatatttattgatgtggtgctgggacagctgcagacacagacatgacaacccagctcatttcttccaacctggagctccactccctctgcactggccgtcttcccagagttgtgacagccaatcggatgctgaagcagatgcttttcaggtatcaaggatacattggtgcagcccctagtttaaggggagtagatggtactg

SEQ ID NO: 23286 - DNA, 500 bp, Homo sapiens
  misc_feature (1)...(500): n = A,T,C or G
agcgcncgcncccnattgccttgcgctgacgaattcggcacgaggaaattcatggtttcttacatgcgaaagaacagggaaagaagtcttggaaaaaaatttacttttttctaagaagatctggtttatatttttctactaaaggaacatcaaaggaaccgcggcatttgcagtttttcagcgaatttggcaatagtgatatttatgtgtcactggcaggcaaaaaaaaacatggagcaccgactaactatggattctgctttaagcctaacaaagcgggagggccccgagacctgaaaatgctctgtgcagaagaagagcagagtaggacgtgctgggtgaccgcgattagattgcttaagtatggcatgcagctgtaccagaattatatgcatccatatcaaggtagaagtggctgcagttcacagagcatatcacctatgagaagtatatcagagaattccctggtagcaatggacttctcaggccagaaaagcaaa

SEQ ID NO: 23287 - DNA, 473 bp, Homo sapiens
ctttgatcgcctgtctgattcgcctcgagtctaccacaagtctctgaaaataggtgaatttctagctcttcatggtcctgaacattgatttcagtctttgcaaagaatgaagaagtgaattcgctgtacatttgtcaccagcactgggtttttgttttttgtttgtttttccgcttaatttcaaagataaaatgcagttacttttgggggtggaaggctcatcttaaaacatgagcattaaatatatttggaatagcagaaggttaagtaatttcttatgtatagttaaactaaagcagtacttcagtgggacttaacaagtatttttttcatcactgaaaggttttttttttttatcactaaattgtatttggcaattgcaagttgcctgcaaatagggccgtgatactgtgttttgagccacacacaaaggaagatcatcaatggctgcggtagcctagtaggaatggact

SEQ ID NO: 23288 - DNA, 490 bp, Homo sapiens
ccccctccccccaattgatcgcctgtcagaatcatagagaggctgtgatgcaaaaccagcgtggcggccgcgctctcttccaggacatcaagaagccagctgaagatgagtggggtaaaaccccagacgccatgaaagctgccatggccctggagaaaaagctgaaccaggcccttttggatcttcatgccctgggttctgcccgcacggacccccatctctgtgacttcctggagactcacttcctagatgaggaagtgaagcttatcaagaagatgggtgaccacctgaccaacctccacaggctgggtggcccggaggctgggctgggcgagtatctcttcgaaaggctcactctcaagcacgactaaaagccttctgagcccagcgacttctgaagggccccttgcaaagtaatagggcttctgcctaagcctctccctccagccaataggcagctttcttaactatcctaacaagccttggaccg

SEQ ID NO: 23289 - DNA, 494 bp, Homo sapiens
  misc_feature (1)...(494): n = A,T,C or G
agggcggnncccnattgttggctcgcctgcagaattcggcacgaggcgacatggccaaacgtaccaagaaagtcgggatcgtcggtaaatacgggacccgctatggggcctccctccggaaaatggtgaagaaaattgaaatcagccagcacgccaagtacacttgctctttctgtggcacaaccaagatgaatagacgagctgtggggatctggcactgtggttcctgcatgaagacagtggctggcggtgcctggacgtacaataccacttgcgctgtcacggtaaagtccgccatcagaagactgaaggagttgaaagaccagtagacgctcctctactctttgagacatcactggcctataataaatgggttaatttatgtgggagaacattgaaaggagaaaggcccctggggggggggcgcgggccccgatcccccttaacggggggcgataaacttacctgtgccgttgtttaaaacgtgggaaagg

SEQ ID NO: 23290 - DNA, 498 bp, Homo sapiens
  misc_feature (1)...(498): n = A,T,C or G
agggcnggnccnccattcgcctgcatgcacgaattcggcacgagtgcaaatgataataaatcctttgttattataactgtccagaagtgtgggctatgtattatctgatcagtctatggtcccagtaaaagtaaagatgcaggaaacacagtctgtaaatgagcgacttttctttgttcagctttagttttagcaaacaccacaaatatgttttaagtaacatcgctcaagtttaagtaacatcgctcaagttgataatctcttgataagctctgttgttgacattttgcagtgatacaacagctccactcatagatttaaacttttatttttacttatcttggtcataagttggcattctctcacattccacatgatatagagggctacgttttggaattttccttttcttaattgcccagagttatcagacagattataaaaatggcttttaatggcttaaaccatttctaaacctctatcttagcagatcaatgc

SEQ ID NO: 23291 - DNA, 472 bp, Homo sapiens
  misc_feature (1)...(472): n = A,T,C or G
atttgcccacgctgcaggaattcggtacgaggtcttggataaactgaaagctgagcgtgaacgtggtatcaccattgatatctccttgtggaaatttgagaccagcaagtactatgtgactatcattgatgccccaggacacagagactttatcaaaaacatgattacagggacatctcaggctgactgtgctgtcctgattgttgctgctggtgttggtgaatttgaagctggtatctccaagaatgggcagacccgagagcatgcccttctggcttacacactgggtgtgaaacaactaattgtcggtgttaacaaaatggattccactgagccaccctacagccagaagagatatgaggaaattgttaaggaagtcagcacttacattaagaaaattggctacaaccccgacacagtagcatttgtgccaatttctggttggaatggtgacaacatgctggagccaagn

SEQ ID NO: 23292 - DNA, 473 bp, Homo sapiens
  misc_feature (1)...(473): n = A,T,C or G
ngattgccccgcctgcaggaattcggtacgagctgttctgtgcttttattttacgaaaaagctaatggcaaatctacattaaactaagttgaatacaaagtcttagtgaagaaagcctggtggtctcgtttacaaaaatggccagtgtcatatttgggcttaaaatttcaagaagggcacttcaaatggctttgcatttgcatgtttcagtgctagagcgtaggaatagaccctggcgtccactgtgagatgttcttcagctaccagagcatcaagtctctgcagcaggtcattcttgggtaaagaaatgacttccacaaactctccatcccctggctttggcttcggccttgcgttttcggcatcatctccgttaatggtgactgtcacgatgtgtatagtacagtttgacaagcctgggtccatacagaccgctggagaacattcggcaatgtcccctttgtagccagttt

SEQ ID NO: 23293 - DNA, 478 bp, Homo sapiens
ctggaagtcctaatagaccgcctgaggaattccgacgagctctggggtaagagtaaaggcttccagaagacatgctgctatggtcactgaggggttagctttatctgctgttgttgatgcatccgtccaagttcactgcctttattttccctcctccctcttgttttagctgttacacacacagtaatacctgaatatccaacggtatagatcacaagggggggatgttaaatgttaatctaaaatatagctaaaaaaagattttgacataaaagagccttgattttaaaaaaaaagagagagagatgtaatttaaaaagtttattataaattaaattcagcaaaaaaagatttgctacaaagtatagagaagtataaaataaaagttattgtttgaaatggaaaaaaaaaaaaaaaaaaaaaaaaaaaaaaaaaaaaaaaaattttggggggggggccgggccccaatttgccttta

SEQ ID NO: 23294 - DNA, 494 bp, Homo sapiens
  misc_feature (1)...(494): n = A,T,C or G
aggggnaaggngnnnnnnnnntttgatcgtcttaggcnttgctgaacttttatatatattttccccttaccaattgttttatccttatagtattgtaggccctgaaagtagaatttttctttaacttattttgagattgagatttaaattttatgtattgtttacagtcagagtaaatcactggatttcttttgtttgttttgatttgctctgttttattcagtcaaatctagagtttgaatcctctgctaaagaatttgcatccactggtgtaaacagtgaaaggtatttgcttgttgaaaaaaaaaactggcaaagtgaaaagatacagtcaaaaatctagaatttctttaattttgcttctctgacgagttgtgaagcaaaatacctgaagtgagtctttgggtaggggaagggtattgagaccttttctagtatgaatattttttaagtttgggggaagagaaacttgcagtgaaaaggagttttttcat

SEQ ID NO: 23295 - DNA, 471 bp, Homo sapiens
  misc_feature (1)...(471): n = A,T,C or G
atctgaccgcctgcangaattcggcacgagcttgaagataagcccgttcctctctctgggtcaagcctgcaatacctaaagctccagacctggaacccaaagctcccatcagtcgctaccctgtgaacctgtggaggatctgaagtacctgtttaaaaggcatccaaaagatagaatctatcaagctacaaatggctatgttgcctgaagccccagacatcatcctacaagaaataagtccagacttcttaatttccccctggatagagcggggtcttgttgaactggctagtgcttcaacaacaatgctaaataataaaggatctaacaatatttctgctttaaattgatttcagagggaatgtctctaacgttgcaattcgattcagttggaaagacatggttaatgcttaagagagccagaagaacccaaatctttgaacacacttagagcaaccacaaactgctgtt

SEQ ID NO: 23296 - DNA, 501 bp, Homo sapiens
  misc_feature (1)...(501): n = A,T,C or G
agggcnngnnnnnnttttgaattgcaccgcgctgcaggaattcggcacgagcggaagcccgtcaccatgtcgtgcgagtcgtctatggttctcgggtactgggatattcgtgggctggcgcacgccatccgcctgctcctggagttcacggatacctcttatgaggagaaacggtacacgtgcggggaagctcctgactatgatcgaagccaatggctggatgtgaaattcaagctagacctggactttcctaatctgccctacctcctggatgggaagaacaagatcacccagagcaatgccatcttgcgctacatcgctcgcaagcacaacatgtgtggtgagactgaagaagaaaagattcgagtggacatcatagagaaccaagtaatggatttccgcacacaactgataaggctctgttacagctctgaccacgaaaaactgaagcctcagtactctgaagagctacctggacaactgaaacaattcttcatgttt

SEQ ID NO: 23297 - DNA, 477 bp, Homo sapiens
  misc_feature (1)...(477): n = A,T,C or G
cgatttgctccgcgctgcaggaattcggtacgaggctcagtctggcaccatctttgacaacttcctcatcaccaacgatgaggcatacgctgaggagtttggcaacgagacgtggggcgtaacaaaggcagcagagaaacaaatgaaggacaaacaggacgaggagcaaaggcttaaggaggaggaagacgacaagaaacgcacagaggaggaggaggcagaggacaatgaggatgatgaggacaaagatcaggatgaggaggatgaggaggacaaggaggaagatgacgaggaagatgtcctcggccacgccacggacgagctgtagagaggcctgcctccagggctggactgaggcctgagcgcttctgccgcatagctggccgcgccaaataatgtctctgtgagactcgagaactttcatttttttccaagctggttcggatttgcggtggattntgggtgtgctgcctcctc

SEQ ID NO: 23298 - DNA, 487 bp, Homo sapiens
  misc_feature (1)...(487): n = A,T,C or G
gcgggcacaattgccgcctgatttgaccgcctacagaggncccagntactctgtgaatcgtgctgtatgcaacatcttgacaagagtggcaggcagttgaatctctggccttcgtgggaccactggacatctggcagagaaccaggaaaccacggttcccttctgtgagtccctcagccggaaaactacaagctcctcatgcagctgctgtctacagaccccctggactgcctggggaagtgagtcggagctcctgcagcagaggggtggaacagctacacgaagatccgaaggtggccaaaaataacagcgctttccagatgagggagccagttgtccagcacagtgtcatgggacagtgggccctggtgccacaatgcccggcatctccaccagatacagctttgagatcttcatgatgaagcttgctccaatccaagggctgtcaggtggngtttgcggntcagctgctaacctttctttgatn

SEQ ID NO: 23299 - DNA, 484 bp, Homo sapiens
  misc_feature (1)...(484): n = A,T,C or G
aggggcgnnnnnnnnnnnntactgcctagtgctgacgaattcggcacgagcagaagctcaccccatcgaccctgccgccctgcactgctgccagaggctgaaggaagagcagtgggaggtggaggacttgatgagggaattctactctctcaaacggagcaggtcgaaatttcagaaaaacactgttagttcggggccatgggaacctccagcaaggccaggaacactcttctcaccagaaaaccatgaccaggcaagggagaggaagcctgccaaacagaaggtcccacttctcagctgccccagtcagcccttcacctccaagttggcattactgggacaggttttcctagactcctcataaccactggataatttttttatttttatttttttgaggctaaactataataaattgcttttggctntcnnnnnnnnnnnnnnnnnnnnnnnnnnnnnnnnnnnnnaaccccggccggggggg

SEQ ID NO: 23300 - DNA, 481 bp, Homo sapiens
tggggggtcaccaattgacgccttattagtacgccgagcttggctccatgatccacctgccagagcttgatttttggctcgctgtccttattctacacactcttccagggtgactccagctgtagtgatggcttcagctctaacatgtgtgtggggatgccttaaacattgaatattgtatatcttcacttggatataccacagggcaactgaaatgtaacgagttcaagatggaaatgtcttttttccccagatctattctttttatctttatttactgccatggcagatgataccacctagttacccaacataaagtatggagggagaagaggtgaaagctttactttctccttatatgcattggaggcagagcaattttgccttccaggagaagaagagcagatgtgtactctgtagaagaaaaattcaaagccctagatattaatcagtatggttactgaacaagaacttaaaataa

SEQ ID NO: 23301 - DNA, 482 bp, Homo sapiens
  misc_feature (1)...(482): n = A,T,C or G
gattggcccgcgctgcangaattccgtatcccccggctgcaggaattcggcacgaggcgcaccaggttcaaggcatttgttgctatcggggactacaatggccacgtcggtctgggtgttaagtgctccaaggaggtggccaccgccatccgtggggccatcatcctggccaagctctccatcgtccccgtgcgcagaggctactgggggaacaagatcggcaagccccacactgtcccttgcaaggtgacaggccgctgcggctctgtgctggtacgcctcatccctgcacccaggggcactggcatcgtctccgcacctgtgcctaagaagctgctcatgatggctggtatcgatgactgctacacctcagcccggggctgcactgccaccctgggcaacttcgccaaggccacctttgatgccatttctaagacctacagctacctgacccccgacctctggaaggagactgtattcac

SEQ ID NO: 23302 - DNA, 452 bp, Homo sapiens
attgacccctctgcaggaattcggcacgaggcaattctttgcgttgctggaggatgggccgggggcaatgccaaatccaagtctctctttaagaactgtgacctgatgtggaagcagagcatatggacatcgaccatctccagccatctggctaccaagcatctcaaggaaggaggcctcctgaccttggctggcgcaaaggctgccctggatgggactcctggtatgatcgggtacggcatggccaagggtgctgttcaccagctctgccagagcctggctgggaagaacagcggcatgccgcccggggcagccgccatcgctgtgctcccggttaccctggataccccgatgaacaggaaatcaatgcctgaggctgacttcagctcctggacacccttagaattcctagttgaaactttccatgactggatcacagggaaaaaccgacc

SEQ ID NO: 23303 - DNA, 486 bp, Homo sapiens
  misc_feature (1)...(486): n = A,T,C or G
cgtgtgcncccattgatcgcctgcggtagacgcgccgaggtcttgtacgtgggtggactggcagaggaagtggacgacaaagttcttcatgctgcgttcattccttttggagacatcacagatattcagattcctctggattatgaaacagaaaagcaccgaggatttgcttttgttgaatttgagttggcagaggatgctgcagcagctatcgacaacatgaatgaatctgagctttttggacgtacaattcgtgtcaatttggccaaaccaatgagaattaaggaaggctcttccaggccagtttggtcagatgatgactggttgaagaagttttctgggaagacgcttgaagagaataaagaggaagaagggtcagagcctcccaaagcagagacccaggagggagagcccattgctaaaaaggcccgctcaaatcctcaggtgtacatggacatcaagattgggaacaagccggctggccgg

SEQ ID NO: 23304 - DNA, 478 bp, Homo sapiens
  misc_feature (1)...(478): n = A,T,C or G
ggggcgnnnngnnnnncatgccatgctgcgcatgtcgaatgcgcccgaggcacagataaatacaggaagattcctcgataggaaatgaggagaaggcagcgataactgaaactcagaggaagccatcagacgatgaagtgcttaataaagggttcatagacaccagtcagtatgtagtaggagaattggcagcactagagaatgagcaaaagcaaattgacacccgtgccgcgctggtggagaagcgccttcgctatctcatggacacaggaaggaacacagaagatgaagaagctatgatgcaggaatggtttatgttagttaataagaaaaatgccttaataaggagaatgaatcagctctctcttctggaaaaagaacatgatttagaacgacggtatgagctgctgaaccgtgaattgagggcaatgctagccattgaagactggcagaagaccgaggcccagaagcgacgcga

SEQ ID NO: 23305 - DNA, 479 bp, Homo sapiens
  misc_feature (1)...(479): n = A,T,C or G
cgcccccatgcacctgattgaccgctgcagaatccacgagccttcaatctgctacctgcatcccactgacgccatttgcaggatggaactacggggcttacaggagcttttgtgtgcctggtagaaactatttctgttccagtcacattgccatcactcttgtactgcctgccaccgcggaggaggctggtgacaggccaaaggccagaggaagaaacaccctttcatctcatagtccactgtggcactggccacccctccccagtacaggggtgctgcacgtggcggagcgaatgtaccccatcatgtgggccaactctcctgggctggccatctccctccccagaaacagtgtgcatgggttattttggagtgtaagtgactcgattactcattgaagcagatttctgcttccttttatttttatacgaatagaggaagaaatgtcagatgcgtgcccagctcttcaccccccaatn

SEQ ID NO: 23306 - DNA, 490 bp, Homo sapiens
  misc_feature (1)...(490): n = A,T,C or G
ggagggccccaattgaacgccttgatagaccgcctgcaggaattccgacgagggaatgtctctgagctgttcacgatgatgcttcttggttggcaagacttgggtgtagacatgaaaccatcttactaaaagcgtcttaaaatgaccaattccagaatcaagcgtattccgttttcttcctgcatgatccctgggccctcccgcaggctgagcaagtctgtaaactgattctgggagaaaccaagctgctggccgtagggtgtccttgggtacattccaggagtcttcattgcttctgttattaccccgtctcctctgccattttctacagcttgctgagttgtcattcctttgcaacattaaaatacatgctgaactcatatttttccttccttcactgttgtagtaaagagacatatttcatgaatggcattgatgctaataaatcctttgcacaaaaatttgaataaacttccagtggtttcgatan

SEQ ID NO: 23307 - DNA, 454 bp, Homo sapiens
atttgccccgcgctgcaggattcggcacgagccgcttcattcactcctgggcatttactcttcttgtgggtctgtgatattccttgctttccagggagaatgtgcttggcaaggtctggagaactaattcagaatcttaggggaaggggagagatggaaatacaaacctgcttactggaaaggtgcaaatatatgggttgagctggaggtaggaatacaggtaattaaggtttctagtttaagggaaaacagatctattgccatttaaataaggtaactgggatttggttaagttcacaaagatagcagaagatttatttacaggcttcacctgtactgtcagggcaagagaaagcctggtaaaccagctacagcagtttaccagtgtgatggctgtgacacagctccactccacgggtggacacagcagagggcaactgggctggcctggttc

SEQ ID NO: 23308 - DNA, 474 bp, Homo sapiens
  misc_feature (1)...(474): n = A,T,C or G
nattggacncgctctgcaggaattcggcactagcctaccaatgtggtgaccgcgggaaaaccttcacctggaagtcacgcctcaatatacatcagaagtctcatactggagaaagacactatgaatgtagtaaatgtgggaaagctttcatccagaaagccacactaagtatgcatcagataattcatacaggaaagaaaccttatgcttgtacagaatgtcagaaggcctttactgacagatcgaatctcattaaacaccagaaaatgcatagtggagaaaaacgctataaagccagtgactgagaaagtcttcacctggaaatcacaactgggtatgcatcaggtatctaatagcagggaggaggaaggcctgttgctgcaatcattgtacagggggaaatgggtatgagagactgaggcttgagtgaactgaaggcaaacagagccaagtatccttcagtccactggaaag

SEQ ID NO: 23309 - DNA, 487 bp, Homo sapiens
gatggtcacccaattgaacgcctgaggtgtagcacgatgaaccactcctttgtggaggtcgccagggtcattgtcgtggatttgcacagtcggctgggcggtgcaatggcgtaaagaaaaggaacagccaaagtggactttttgaagaagattgagaaagaaatccaacagaaatgggatactgagagagtgtttgaggtcaatgcatctaatttagagaaacagaccagtttgctgtagggtaccagcgattgaaaggaaaatgttgtctgtttccctttggcctgcactgtactggaatgcctattaaggcatgtgctgataagttgaaaagagaaatagagctgtatggttgcccccctgattttccagatgaagaagaggaagaggaagaaaccagtgttaaaacagaagatataataattaaggataaagctaaaggaaaaaagagtaaagctgctgctaaagctggatcttctaaatacca

SEQ ID NO: 23310 - DNA, 478 bp, Homo sapiens
  misc_feature (1)...(478): n = A,T,C or G
ggggggnnnnnnnnnnttatgacttgctgaccgtttcggcacgagccaagatgacaaagaaaagaaggaacaatggtcgtgccaaaaagggccgcggccacgtgcagcctattcgctgcactaactgtgcccgatgcgtgcccaaggacaaggccattaagaaattcgtcattcgaaacatagtggaggccgcagcagtcagggacatttctgaagcgagcgtcttcgatgcctatgtgcttcccaagctgtatgtgaagctacattactgtgtgagttgtgcaattcacagcaaagtagtcaggaatcgatctcgtgaagcccgcaaggaccgaacacccccaccccgatttagacctgcgggtgctgccccacgtcccccaccaaagcccatgtaaggagctgagttcttaaagactgaagacaggctattctctggagaaaaataaaatggaaattgtacttaaaaaaaaaaaaa

SEQ ID NO: 23311 - DNA, 467 bp, Homo sapiens
  misc_feature (1)...(467): n = A,T,C or G
ntctgaaactgctgcgcgctgcaggaattcggcacgagaggcaatgccaattccaagacaggggagccctcccggaaccctaagatcgtcgtccccatccctgtccacgtcagcaggttcgctatcagaagtcagcatcagcagctagaacaggcccggccctgagggtccagaagggccagggcctggcacccacctggagaagcccccgcacccgagggaacccatggtggactccactgtgtttgaagcaacaaagtcacagcccagctgtggccatcccaagcaaattgagaatatattcactaaatgggcttaaaagactgcttttgaaggggcttacagccacaccagaagacacgctaaatatttattatactatcctactttgtacataaatatctctatagactggatctcagctgcagtattttgaaagttataggacttaattacccagtaatttc

SEQ ID NO: 23312 - DNA, 490 bp, Homo sapiens
  misc_feature (1)...(490): n = A,T,C or G
tggtctcnnagtnataaattcagctacgtgctgcagtngccctgccgaaanccgcacagcaggagctttgaagccaccccggtcaaaggatgctgagtccggagcgcctagccctaccggactacgagtatctggctcagcgacatgtcctcacctacatggaggatgcagtgtgccagctgctagaaaacagggaagatattagccaatatggaattgccaggttcttcactgaatattttaacagtgtatgccagggaacacacattctctttcgagaattcagcttcgtccaagccaccccccacaatagggtatcatttttacgggccttctggagatgcttccgaactgtgggcaaaaatggcgatttgctgaccatgaaagaatatcactgtttgctgcaattactgtgtcctgatttcccgctggagctcactcagaaagcagccaggattgtgctcatggacgatgccatggactgcttgan

SEQ ID NO: 23313 - DNA, 524 bp, Homo sapiens
  misc_feature (1)...(524): n = A,T,C or G
tggggnnnnnnnnagcnncnnattgcaccgcctgcannatttgccccggctgcaggaattcggcacgagaggaagtgaggatggtgtgggccctccccgccggccccctgggtccccagtgttcgctgtgtgtgcgtttgtcctctgctgccatctgccccggctgtgtgaattcaagacagggcagtgcagcactaggcaggtgtgaggagccctgctgaggtcactgtggggcacggttgccacacggctgtcatttttcacctggtcattctgtgaccaccaccccctcccctcaccgcctcccaggtggcccgggagctgcaggtggggatggctttgtcctttgctcctgctccccgtgggacctgggaccttaaagcgttgcaggttcctgatttggacagaggtgtggggccttccaggccgttacatacctcctgccaattctctaactctctgagactgcgaggatctncagggcaggggtctccctctggagtctgaccattacttcattntgc

SEQ ID NO: 23314 - DNA, 505 bp, Homo sapiens
  misc_feature (1)...(505): n = A,T,C or G
ggtcgtgcnaatggacggctgtggaattcgaccggctgtangaattcggcacgaggaanaccttgctgttacaaattggacctttatacattttctgaaaacaatgaaaagagtatatttaaccttttctggctgtaaatggttaccttcctgtaactgccccgcacctggaggcatggagttgtgtgcatcctgcttatgtacaattgttttcagtgtttctaagaatgagtctgaatggttcttgaaaattagccaggatcaaatgctattgcagacaaagccaataaaaagttggacttcttttggggataacaagttttggaagagaaatgcaggccatatgtgcgcatgaccgagattttgaaaaaagatgtacatagtgacatgtttggtgcatggtttttgaggagggcttttgtcaaaaaggaggtataacctttcccccacagacctgagagctgtgccttttctatgcaatattacagacgttacatcggaaccc

SEQ ID NO: 23315 - DNA, 480 bp, Homo sapiens
atggaccgccctgaggatttccgccgcctgcaagaattcggcacgaggttgtgtcacacacctcatattgattccagtgtgattgattcacatgaaaaatggctctgtcggcagtgtgtttttgcaacaacaacaaagaggggtggtgcacttaagaaaggaccaaatgccaaagcattgcaagtcatgaagcagacattaccctatagtgtggcagaccttgaatgggatgcaggtcataaaaccaatgtccagcagtgttactgctattgtggaggccctggagactggtatttgaagatgctacagtgctgcaaatgtaagcagtggtttcatgaggcttgtgtgcaatgccttcaaaagccaatgctatttggagacagattttatacgtttatatgctctgtctgcagttctggaccagaatacctcaaacgtctaccattacagtgggtagatatagcacacctatgcctttag

SEQ ID NO: 23316 - DNA, 471 bp, Homo sapiens
attgcccgcctgcagattcggctcgagcacatccctggaaggacatccatgttccgagaagaacagataatccctgtatttcaagacctctgtgcacttatttatgaacctgccctgctcccacagaacacagcaattcctcaggctaagctgccggttcttaaatccatcctgctaagttaatgttgggtagaaagagatacagaggggctgttgaatttcccacataccctccttccaccaagttggaacatccttggaaattggaagagcacaagaggagatccagggcaaggccattgggatattctgaaacttgaatattttgttttgtgcagagataaagaccttttccatgcaccctcatacacagaaaccaattttcttttttatactcaatcatttctagcgcatggcctggttagagggctggtttttctcttttcctttggtccttcaaaggcttgtagt

SEQ ID NO: 23317 - DNA, 465 bp, Homo sapiens
  misc_feature (1)...(465): n = A,T,C or G
nttacccggctgcggaattcggcacgagaacgacgaagtcatatccagcggctcggaggactgcacggtcatggtgtggcagatcccagagaacgggctgacctccccgctgacagagccggtggtggtactggaggggcacaccaagcgagtgggcatcatcgcctggcaccccacggcccgaaacgtgctgctcagtgcaggctgcgacaacgtggtactcatctggaatgtgggcacagcggaggagctgtaccgcctggacagcctgcaccctgacctcatctacaatgtcagctggaaccacaatggcagcctgttttgctcagcatgcaaggacaagagcgtgcgcatcatcgacccccgtcggggcaccctggtggcagagcgggagaaggctcatgagggggcccggcccatgcgggccatcttcctggcagaatggcaggtgttcaccacaggctt

SEQ ID NO: 23318 - DNA, 495 bp, Homo sapiens
  misc_feature (1)...(495): n = A,T,C or G
attgaccgcctgcggaattcggcacgagagaggacggngaggatgaagactctgatgcagatgaggaggtggaactgatcctgggggacactgacagctctgacaactctgatttggaagatgacatcatcttatctctgaatgagtgaggagccatcactgcttggaagagattcttggcaggcgagaaactgagtcaaatgaattcagaacatattcccttctctttctcccagggctgtctgtcttttaaggagctgcatgccctgcattcagaagattatggcttagagagcctcattggcacccgagggtccttccagaatcaataaccaccacaaaaatgacaacagggactaggccctactctgcaccccccacatccaccccccaccatttcctaggatggacatatctttcaaggggaaaaaaaaaccatgtctctggggtatttcacaatatattttctttggataggggtctttacttaaagaa

SEQ ID NO: 23319 - DNA, 494 bp, Homo sapiens
  misc_feature (1)...(494): n = A,T,C or G
cgggccgcaccaaattcaccgcctgcatagaacggctgtggcaaatgctgccagataacgctttatagtccgaagacaatatattttggccatctacaaatgagaattataattatatgaattataatttaaactgtttaattttgtttagtgtgtatattgaatcttccaaagtgaagccattattctcaattaagtactacaactatgacaatgcttgacctacatttctaaaataaaaattcacattttttgataaataaactacagttttaccagaaattactatctaaatgtgtattagcagtattttttaaggtgaaattgccttggtatctaatgaatgtgtagacagggagataaaatgaaggattgccagactagctagaatagaatttacgattaggttagttttgaaaaatgatgctcgaatatatgggttctaacacatcctaccataacaactggaggagagatgtgcaacctcgctaatn

SEQ ID NO: 23320 - DNA, 508 bp, Homo sapiens
  misc_feature (1)...(508): n = A,T,C or G
tgcgcggtgnntttgaattgcatggctgtacgaatncggcacgagagaaagttctccgctcccagacatgggtccctcggcttcctgcctcggaagcgcagcagcaggcatcgtgggaaggtgaagagcttccctaaggatgacccgtccaagccggtccacctcacagccttcctgggatacaaggctggcatgactcacatcgtgcgggaagtcgacaggccgggatccaaggtgaacaagaaggaggtggtggaggctgtgaccattgtagagacaccacccatggtggttgtgggcattgtgggctacgtggaaacccctcgaggcctccggaccttcaagactgtctttgctgagcacatcagtgatgaatgcaagaggcgtttctataagaattggcataaatctaagaagaaggcctttaccaagtactgcaagaaatggcaggatgaggatggcaagaagcagctggagaaggacttcagcagcatgaagaagtactgcc

SEQ ID NO: 23321 - DNA, 435 bp, Homo sapiens
  misc_feature (1)...(435): n = A,T,C or G
nttgaccgcctgcagaattcgcctagctcacgccagatctgctgggttttgaggagtgattttctttcttccccttgaaggggaaaaagctattttcattggtacatttaaagtcccccaactatggggaggtaccaattctggacaagtgccactacaacaacactaaacctgaacttttcaactccgttggtggtgggaggcagcgggcagaaatttactgttggccactgccaggtctatttcatatttcaaaggaatattgggtgctgcatataggaactgaaggggtcaatgtattaaacctgtgattggttgttttcctgtcattttgagagactaaatgtggggggcagatgtcaaaatacctgtacaattttaaaatgtcacaattaaacatgagctggtttcccaaaaaaaaaaaaaaaaaactga

SEQ ID NO: 23322 - DNA, 466 bp, Homo sapiens
  misc_feature (1)...(466): n = A,T,C or G
natggaggccatcggaaaccgcaatggagcgtcctgcgcgactcggcggcggcgtctttttccacagatcctggtccctaccaataagcctgctcatgtgagataagaaaggagctcctggaaccaggaattcattctcagtgtagaagacctagctgagacctcactccacagttttggggcagaagcagaagagacgcacagtagaaccgatctcagccttgctgatcatctcgtacagcagcagaaaatgaccatgttacaggagtcattctcatttgacgatgtatctgtggacttcacccaaaaggagaggcagctactggatccctctcagaagaatttatacaaggatgtgatggtggagaactatagcagcctagagtcactggggtatgaagttatgaaaccagatgtcatcttcaaattggagcaaggagaagagccgtgggtaggagatggagaa

SEQ ID NO: 23323 - DNA, 512 bp, Homo sapiens
  misc_feature (1)...(512): n = A,T,C or G
tgcggngtnnnnttttgaccttgcacggccgtacgaattcggcacgaggactcctctgacttcaacagcgacacccactcctccacctttgacgctggggctggcattgccctcaacgaccactttgtcaagctcatttcctggtatgacaacgaatttggctacagcaacagggtggtggacctcatggcccacatggcctccaaggagtaagacccctggaccaccagccccagcaagagcacaagaggaagagagagaccctcactgctggggagaccctgccacactcagtcccccaccacactgaatctcccctcctcacagttgccatgtagaccccttgaagaggggaggggcctatggagccgcaccttgtcatgtaccatcaataaagtaccctgtgctcaaccaaaaaaaaaaaaaaaaaatttgagggggggccacgaccccacttcgccttattgtggggaggatgacaatccactgcccgatgttttacaaggtgatgg

SEQ ID NO: 23324 - DNA, 476 bp, Homo sapiens
  misc_feature (1)...(476): n = A,T,C or G
ctcgcccgccttgatgatcgcctttggcgnancctgcccagcagngcaactgaacctgagatggggctgcaggatgacaccagcacttcaggaaccgcgatccgcctctgaagagcacagctgtgtggaaacaggaagtcaagagccagtggccatttatttcaccagtgggacgacaggctctcctaagatggcccagcactctcagagcagcttcagcattgggttcaccgtctgtggaagatataaattcaagaggctgcggcactgcttgacaggaggggaggccctcaccccggaggtgctggagcagtggagggcacaaactgggctggagctacatgagagctatggacagacggaagtggacagtccagagaaaactgctgccacggtaccgtattgggccatttgaagtggagagtgtgcttgctgagcatccagcagttgtcaaatcagctgttgtcagtagtccn

SEQ ID NO: 23325 - DNA, 488 bp, Homo sapiens
  misc_feature (1)...(488): n = A,T,C or G
cgcccccccttcgccccctnttttgagcgccgtgcaggaatccgcacgagctacaccggtcagcgcatggagcccaagcctccgcaccggattccggagcccaagcctccgtaccggattccggagcacaagctgcaccgcgcatgcgcacacgccccagacccatgctgaggaggactgagaattttctgaccgcagtgcaccatgggaagctctgaagtttccataattcctgggctccagaaagaaaaaaaggcggccgtggagagacgaagacttcatgtgctgaaagctctgaagaagctaaggattgaggctgatgaggccccagttgttgctgtgctgggctcaggcggaggactgcgggctcacattgcctgccttggggtcctgagtgagatgaaagaacagggcctgttggatgccgtcacgtacctcgcaggggtctctggatccacttgtttgatctggagctgggttctgagctg

SEQ ID NO: 23326 - DNA, 479 bp, Homo sapiens
  misc_feature (1)...(479): n = A,T,C or G
ntttgagnccccttgnnnnnnnnnnnnaattgatccgcgctgcggaattcgcacgagccccacactgcttaatggccacatgccagtgccaatccccagtctggacagagctgcttctccagtactgctttcttcaaactctcagaaatcctgatgacgtctggccacaattaaggactcattaactgatgaaacaaatttgtccccacgggctagtttacctgtgtcgtgagaaggacattgtgaaactcttgttaatttggtttgcacttttcataacatggatagtctagatttatgttagcattttaaaaactgtttttgatatattcaagtatatatgaaaatctgtttggcattaagtgaattttaatgtttttgtttttatatccttttagctcttaagtgttgaacactgttgacagtgaagaacttttcttaatggttttcagtataactaataaggatgtgaagctttn

SEQ ID NO: 23327 - DNA, 400 bp, Homo sapiens
  misc_feature (1)...(400): n = A,T,C or G
ccgagaggtagtactattgactggccgctgctttacgtcatggcgactggaaaatagagtctcatgggagtgcgaaccctgttgtgaactgcacatgcgagggatctaggttgtgcactccttatgagaatctaatgcctgatgaatctaatgcctcatgatctgaggttgaatagcttcgtgccgaaaccatcccccacccccatcccgctaccccgagtccgtgaaaaattgtcttccgtgaaaccggtccctggtaccagaaaggttggggaccactggcttaaaataccaataaatttttgaaccttaaaaactttgaagaacaaggtaaattggtgttttatttaatgtcctaccctttaatttgttgcattttcctatactctntacactatnt

SEQ ID NO: 23328 - DNA, 469 bp, Homo sapiens
  misc_feature (1)...(469): n = A,T,C or G
gtgtgccatagacatcatgcggcattgcggaaactgctccccaatatattcctcttttcctttcttcaagctgcgtagcagggggcctttagctagtttctcccgagaggggcgggaagtacagctggtggagacagtgctgggagatgatcagaaatctcagggcacagcctcaggtctacctggacactcatccactgttggagatgctcaacagctagacacagatgctcacagccgacctgtggcctcttgctctgaagccatcccccatcttccctagacacagcagacatctgagaaagcttcagcatttctcttgctaacagattcagaaaagtgtctcaaagcagagcacagagttatttggtgtttgctgaagacagcctttgtgccacaatcacttattaaataagcgatcaatttcccattgaactgaacatgcaacatttatcatacattcagttcn

SEQ ID NO: 23329 - DNA, 490 bp, Homo sapiens
  misc_feature (1)...(490): n = A,T,C or G
nggggtttgatttgatcgcctgcggaattcggcacgagatggcggctgcgctgttcgtgctgctgggattcgcgctgctgggcacccacggagcctccggtgctgccggcacagtcttcactaccgtagaagaccttggctccaagatactcctcacctgctccttgaatgacagcgccacagaggtcacagggcaccgctggctgaaggggggcgtggtgctgaaggaggacgcgctgcccggccagaaaacggagttcaaggtggactccgacgaccagtggggagagtactcctgcgtcttcctccccgagcccatgggcacggccaacatccagctccacgggcctcccagagtgaaggctgtgaagtcgtcagaacacatcaacgagggggagacggccatgctggtctgcaagtcagagtccgtgccacctgtcactgactgggcctggtacaagatcactgactctgaggacaaggccctcan

SEQ ID NO: 23330 - DNA, 488 bp, Homo sapiens
  misc_feature (1)...(488): n = A,T,C or G
cgcgccccccattgaccgccttaggtagaccgtcctaggaanaacacgcaaaggagaagagtgttactgtacccttatgacagaattgtcctggattttgactccatccacgcccatcacctttctacattttgctgacagataactaaccgatgatgaggccgaggtaaaagagacatctgcagtgtgacagaagggagcatgagaagcatggctcaccagccagcctctgtggtctttgtaattagaagcttcagaaactcactaatactactgtacctttcattggcgcattaccccataaaactttttgagacgaggtgagatctgagtataaagataggtcacaagtattttaaagggcttaatgtgccaaaaagaaaaaaagctagagaccctttttgcaaacatttggtgaccacacatttgagggaagacgtggcgttaggtgaagcagaagcaaaccctgctcttaggggctcacctag

SEQ ID NO: 23331 - DNA, 465 bp, Homo sapiens
  misc_feature (1)...(465): n = A,T,C or G
gtggancnnnnaattgatatcatgcgccatttccgcacgagcagagaccacattaattcccttttgctatactgtgatccttagtatgttaattcttaagaaaccaacatatcactgaaagaaggctggcagaacgcaagtgcattttttcactgtgggaagaaagatcaagtgacgtattattttttcctggttgtcacttaatgggctgagtaaaaagcttgaaaactcagactttcggtcttggttctgccactcattggttatgaggaggcccagagcaggtaagttcaccttcctggccttactttcctgatgtgtaatacggaattacttcacagtagcatgacagtataagacaccagcagtagatacaactatgatgacattccatgagttggtatttttagttctaactgctaaatttgttctctttacgggacagatttctaataaagtgcttgg

SEQ ID NO: 23332 - DNA, 508 bp, Homo sapiens
  misc_feature (1)...(508): n = A,T,C or G
cgcggggngnntttgaactgatcggctgtacgaattcggcacgagtggcaggccactgcgcaagtgtggacagcctacaccaagggaagagtcaggggagaaggaacacaagactccggaagcatgccagcgtataaaaccacactttgcctcattggttcgtgcctcagcttccaatctggacatggagcacaataacagtgggcccactgctctccgaattcctgcgcgcacttgaagggagtgtctggtgcaggcatgcagggaggaagaatgactctgagcttgaccattcaacttcgaaactttaacatcaatggatcagcacacactggtgtacggtctgctatgcatgcagccctgtgctaggcaaaagaagtatcagaccaggaactgacagcctcactgcaacaggaagagaggcttcacacaataagcgtttcattcaaccaggctggacctgtgcttattgagttgaacatcactgagcacaaaatgcaagccagac

SEQ ID NO: 23333 - DNA, 505 bp, Homo sapiens
  misc_feature (1)...(505): n = A,T,C or G
cgtgcggccnattgacggctgtggaaatcgaccggctgtangaattcggcacgagacttttatgacttgctgctattgttttaaaaaccccacttagtctcttcctttctgatttctaaagtaagcctcagaatttccaaaccaattcatccacagctgtttctgggctggtttttaaagtagctgcaacagaatcatgaggctttccctttttatcaaatacgaaaaacattttttaaaattctgcacacccagtgatcatcttttgtgcgggaaagcaagatgatgatggatgattttattcatccttttagtaaagacacaaaacatttttctcaacatttgtacagttctgaaaaaaacctggtcaccaaaaatatcttctctgctaattcagcaattcttgggctccagttaggggagctggggcctcactttctcccaggattgtgggcttcactggaagtgaaggtgcaggaatgactggactgtccaccccagccct

SEQ ID NO: 23334 - DNA, 475 bp, Homo sapiens
  misc_feature (1)...(475): n = A,T,C or G
cttgcccgcctgcggtagacgcgccntgaggaattcagcacgagctcacacgtgcccatgtggagtgcctgcctgctcacacacgtgcccatgtggagtgcccgcctgctcacacaaagccctggcatggtggctctgtaggtttcctgtcctgccggccgagtcagacgctgataccgtacattctactcatggtggctttttaatacgtttttatgtcaaggatcccttttatatttctctgcacctcgagataacgaaggaatattacggatgagatggaagaggagagggtgtttttgtaaaattgaattcaggactgatttgatagcctggtgcttttcgtatcacaccttttaatgaatcttcatggatgctgattaaaagacacagaaaaataataaaatcctggggggggccccggtacccaactcgctttattgggggagctaatccatttcccgggccggtgttt

SEQ ID NO: 23335 - DNA, 508 bp, Homo sapiens
  misc_feature (1)...(508): n = A,T,C or G
cgcgggnttttnaattgacattctgtagcaattcgcacgaggagaagccganagtgcttcctctaagtgaaaaggtgaaagttctcgacttaatcaggaaagacaaaaaatcctatgctgaggttgctaagatctacgggaagaatgaatcttccatccgtgaaattgtgaagaaggaaaaagaaattcgtgctagttttgctgtctcacctccaactgctaaagtgacggccacagtgcgtgataagtgcttagttaagatggaacaggcactgcatttgtgggtggaagagatgaacagaaaacgtgtccccattgacagcaacatgttgcgccagaaagccttgagcctataccaagacttcagcaagggatgctctgaaactgacaccaagccatttactgcgagtaagggatggttacacagattcaggcatagattctcacatcattacaagaagaagaagggcggatcacctgaggttgggagctcgagatcagcctgacc

SEQ ID NO: 23336 - DNA, 476 bp, Homo sapiens
  misc_feature (1)...(476): n = A,T,C or G
gtttgagaagccattanaactggacacgcgctgcaggaattcggcacgagcccagacctacccgggcgaagcgggcgagcggtggtttggacgccggcggagacgcgggcgagtggttagcaggaagaagatgagccttaagtctgaacgccgaggaattcatgtggatcaatcggatctcctgtgcaagaaaggatgtggttactacggcaaccctgcctggcagggtttctgctccaagtgctggagggaagagtaccacaaagccaggcagaagcagattcaggaggactgggagctggcggagcgactccagcgggaggaagaagaggcctttgccagcagtcagagcagccaaggggcccaatccctcacattctccaagtttgaagaaaagaaaaccaacgagaagacccgcaaggttaccacagtgaagaaattcttcagtgcatcttccagggtcggatcaaagaagg

SEQ ID NO: 23337 - DNA, 484 bp, Homo sapiens
  misc_feature (1)...(484): n = A,T,C or G
gcggccnnnattgaaatcatcgcatgcaggaanaccgccgagagatagagagagagagacagagagagagagagacagagagagagagacagggacaaaaccactgggtccaaagtagagggaatccaaatacgaccttgggaggaatgaaaaatggcaacgagagagggggccttaaattggatgccacttttggactttcatcataagaagtgtctggaatacccgttctatgtaatatcaacagaaccttgtggtccagcaggaaatccgaattgcccatatgctcttgggcctcaggaagaggttgaacaaaaacaaattcttttaattcaacgggtgctttacataatgaaaaaaccacttgtggcacacgatgggcatctaacatcatcatcttctaatgtgttggagattttcatttcaaatatattttttaaattactctattttccaaaacacgtaatgcatttttctcgaaaat

SEQ ID NO: 23338 - DNA, 506 bp, Homo sapiens
  misc_feature (1)...(506): n = A,T,C or G
agcgagtnnaattgacggcttagttgcaccggctgcaggaattcggcacgaggaacagctcatccccaacttggctatgaaggaggttattgacgcattcatctctgagaatggctgggtggaggactactgaggttccctgccctacctggcgtcctggtccaggggagccctgggcagaagcccccggcccctatacatagtttatgttcctggccaccccgaccgcttcccccaagttctgctgttggactctggactgtttcccctctcagcatcgcttttgctgggccgtgatcgtccccctttgtgggctggaaaagcaggtgagggtgggctgggctgaggccattgccgccactatctgtgtaataaaatccgtgagcacgaggtggagcgtgctggtgtgtgaaaaaaaaaaaaaaaaaaaactcgggggggggccgggcccccaattccccctatagggagccggataacaattcacgtgcccgcgtttaacaacg

SEQ ID NO: 23339 - DNA, 487 bp, Homo sapiens
tggtgccccaattgaccgcctgcggaattattcgagagcgataattcagctccttaaaattggcagtgctatccagcgacttcgctgtgaattagacattatgaataaatgtactttcctttgctgtaaacaatgtcaagaaacagaaataacaaccaaaaatgaaatattcagtttatccttatgtgggccgatggcagcttatgtgaatcctcatggatatgtgcatgagacacttactgtgtataacgcttgcaacttgaatctgataggccggccttctacagaacacagctggtttcctgggtatgcctggactgttgcccagtgtgagatctgtgcaagccatattggatgggagtgaaccgtcaccacaaaagacctgactgctcacgaaatttggagcttaaagcgatgtgatctggtgaccaccatgcgagacactgaagatgaaataagttcagacgaaggaatatttctgcttgag

SEQ ID NO: 23340 - DNA, 477 bp, Homo sapiens
  misc_feature (1)...(477): n = A,T,C or G
atagaaagccctgagaggntgtcangaattcggcacgagtggaagtgaatttgggattagtcatcctaatcccctcacttttagagatggggcaactgagtcatgcgcggtggctcacgcctgtaattctagcactttgggaggccaaggtgagcggatcacctgaagtcagggatttgagaccagcctggccaacatggcgaaaccccatctctactaaaaatacaaaaattagccaggcatggtagcaggagcctgtaatcccagctgttcgggaggctgaagcaggagaatcacttgaacctgggaggcggaggttgcagtgagttgagatcgcgcaattgcgctccagcctgggcgacaagagcaaaactccacctcatagaaaaaacaaaacaagacatggggcagctgaggccttttgtataccacgcatttatcgagttattcatgtgggccaggttctgtgataaatgn

SEQ ID NO: 23341 - DNA, 509 bp, Homo sapiens
  misc_feature (1)...(509): n = A,T,C or G
gtgcgttccnncacnnaattgctccgccctgcaggaattcggcacgagctgagggagtgggagaacgtgaaccccaaaactggaccaaccctgagaaaggaactgattttgtcttcaaatattggacaacatgatttggacacaaagactaaacagattcagcagtggattaagaaaaaacacctagtccagattaccataaagaaaggaaaaaatgtagacgtgtcagaaaatgaaatggaggagatatttcatcaaatactccagactatgcctggaatagctacattctcatctaggccacaagctgttcaaggaggaaaagctttaatgtgtgttcttcgtgctttgagcaaaaatgaggagaaggcatataaagaaactcaagagacccaggaaagagacactttgaacaaagatcatggaaatgataaggaatcaaatgttctgcatcagtaattttaataaagaaaagcatgctctgagagaaaaaaaaaaaaaaaaaactt

SEQ ID NO: 23342 - DNA, 507 bp, Homo sapiens
  misc_feature (1)...(507): n = A,T,C or G
ngannnaatactgatnngccngtnngtactgacncggcctgcangaattcggcacgaggtgagatgctggagaccattccagaggaggcgggtatcaccatgagcccagggcctcaatgagcctggtccatgaagtgcccaccacatcgcagcacttttaccacgttttgtcctcagaccccgcccatgctgtgtggtctctgcatgtctccattcttctctgtctctgtcttgcatgtctcctaccatgtcactgtccctgggccacccagtgaaagcaaagcctgggaatctgctcattgttgtttgggctcaggtattgagcctgatggcccaggtattgagggcctcccctgctggtggccctgtcctgggatcctcagaagcctgactgtcctatgggcttctccagtgtccacaggggcttgngaatggtgtggggggctggcccctctatgcctttcggtccttcctgggcaaatctaagccttggccagggngcagatt

SEQ ID NO: 23343 - DNA, 466 bp, Homo sapiens
  misc_feature (1)...(466): n = A,T,C or G
aggtgcctctgaccgcctgcngaattcggcacgagaagacttgatacttcagaaaccctttttattgacccacacgcagatatttgaattacttcttactttattgctccaagattctggatgggctgcatttactgtgtgaaggataaaaatcattagcctggattctgatttctataaattgccattaaaagctttttttcccctaagaactgaaatgtgctcaccagccaaaacattttaacttgtaaattttgagggcagttaaccaaacctgtgactaatcatatctcctcctaccccccatttccaaggacatttgttactcacatacttgttatactaatacttgaacttgtaccttatgggatttgctatcttttaactagtcatgatattcttatactttagttacacttttggaatttgatacaaggctgagtggggagtgtgggtgtatgtacaa

SEQ ID NO: 23344 - DNA, 474 bp, Homo sapiens
ctttgcttcgcgctgcacgaattcggcacgagcagcagcaggggaaagattatattttataagagggaacaaattttcacaatttgaaaagcccacataagttttctcttttaaggtagaatcttgttaatttcattccaaacatcggggctaacagagactggaggcatttctttttaggctctgagactaaatgagaggaaaagaaaagaaaaaaaaatgattgtctaaccaattgtgagaattactgtttgaaacttttcaaggcacattgaaatacttgaaaacttctcatttatgttatttatgatgttattttgtacgtggtattattattatattggtttataaatggagggacaggatatcacctgaattattaatgaatgcccaggaagtaattttcttctcattcttctaaaactactgcctttcaaagggacacacacgcgttcacatacactgcattcgttg

SEQ ID NO: 23345 - DNA, 407 bp, Homo sapiens
  misc_feature (1)...(407): n = A,T,C or G
aggagaaacggctcgattactcaaatccctattctaaccatgcctaatgatgatatcactcaccccatcccagacttgactggctacattacagaggggcagatctatgtggacagacagctgcacaacagacagatttatccacctatcaatgtgctgccctcactatcacggttaatgaagtctgctattggagaagggatgaccaggaaggatcatgccgatgtatctaaccagctatatgcgtgctatgctattggaaaggatgtgcaagccatgaaagctgtcgttggagaagaagcccttacctcagatgatcttctctacttggaatttctgcagaagtttgagaggaacttcattgctcacggtccttacgaaaatcgcactgtctttgagactttggn

SEQ ID NO: 23346 - DNA, 495 bp, Homo sapiens
  misc_feature (1)...(495): n = A,T,C or G
aggggcctctgatcggctgtggattgcggcacgaggttgttcaggggtcaactatatgttagtgaccaggactgtgtcacttggctgccctgtctgcagtagaggctgggaaaggttctttttttaaaaaaagctgtgtgatctcctactaaaacaggggctctgtgagtgacataggaggggcacatgggagtgtggcaggcagcaagctgtttctgtcatagcctggcttgggaaggcagagaactgaatggtacttgctgcattgcacaagctagtcttcctttgccactttctttttttctagttttttccccttatttatctcatttataaaaataaacctttttttcttaaatcattgggttatttccttttaaaattctactgaaagtggtaactgtggtacagggtgcaagatgagatgcggngcactgatgatggttggatgagcattgaggatcactgcagttaattgttaataaggcaatgtgg

SEQ ID NO: 23347 - DNA, 487 bp, Homo sapiens
  misc_feature (1)...(487): n = A,T,C or G
atttgcaccggctgcanganctgccattgccnccgcgctgcaggaattcggcacgaggaagaaaaagggccgttctgccatcaacgaagtggtaacccgagaatacaccatcaacattcacaagcgcatccatggagtgggcttcaagaagcgtgcacctcgggcactcaaagagattcggaaatttgccatgaaggagatgggaactccagatgtgcgcattgacaccaggctcaacaaagctgtctgggccaaaggaataaggaatgtgccataccgaatccgtgtgcggctgtccagaaaacgtaatgaggatgaagattcaccaaataagctatatactttggttacctatgtacctgttaccactttcaaaaatctacagacagtcaatgtggatgagaactaatcgctgatcgtcagatcaaataaagttataaaattgcaaaaaaaaaaaaaaaaactcgggggggggcccggcccccaa

SEQ ID NO: 23348 - DNA, 485 bp, Homo sapiens
  misc_feature (1)...(485): n = A,T,C or G
tggccngtgnnaattgannnaattgatcggcctgtaggaattcggcacgagccccatgtgaagtcactgtgccagcccagaacactggtctcgggcccgagaagacctcctttttccaggctttaagtatcaccactaaaatctccaggggcaccattgaaatcctgagtgatgtgcagctgatcaagactggagacaaagtgggagccagcgaagccacgctgctgaacatgctcaacatctcccccttctgctttgggctggtcatccagcaggtgttcgacaatggcagcatctacaaccctgaagtgcttgatatcacagaggaaactctgcattctcgcttcctggagggtgtccgcaatgttgccagtgtctgtctgcagattggctacccaactgttgcatcagtaccccattctatcatcaacgggtacaaacgagtcctggccttgtctgtggagacggattacacctttccactt

SEQ ID NO: 23349 - DNA, 410 bp, Homo sapiens
  misc_feature (1)...(410): n = A,T,C or G
attcggcacgagccgaggaggatttcccagtggaggtggtggcggtggaggacagcancgagctggtgactggaagtgtcctaatcccacctgtgagaatatgaacttctcttggaggaatgaatgcaaccagtgtaaggcccctaaaccagatggcccaggagggggaccaggtggctctcacatggggggggtgagcacagacaggatcgcagggagaggccgtattaattagcctggctccccaggttctggaacagctttttgtcctgtacccagtgttaccctcgttattttgtaaccttccaattcctgatcacccaagggtttttttgtgtcggactatgtaattgtaactatacctctggttcccattaaaagtgaccattttagttaaaaaaaaaaaaaaa

SEQ ID NO: 23350 - DNA, 495 bp, Homo sapiens
  misc_feature (1)...(495): n = A,T,C or G
ggggccccttgacggctgtggattgagcacagtggatctgcagcattgggttttgccatcacggttacaggcttcccaagtaaagttgaaaagtaaaggacgagcaagttcctcaggaaatcaagaaagcagcggtcagagctgtattattctcctctttgatgtaataaagtcagctattagatatgagaaaaccatttcagaagcctggattaaggcaattgaaaacactgcctcagtatctgaacacaagggcattttagattatctggataacatatcccctcagcaaatacgaaaactcttctatgttctcagcacactggcatttagcaaacagaatgaagccagcagccacatccaggatgacatgcacttggtgataagaaagcagctctctagcaccgtattcaagtacaagctcattgggattattggtgctgtgaccatggctggcatcatggcggcagacagaagtgaatcacctagtttgan

SEQ ID NO: 23351 - DNA, 508 bp, Homo sapiens
  misc_feature (1)...(508): n = A,T,C or G
aggggnccccttgancggcctgtnngcattgatngccgtgtcggaattcggcacgagaaaacaccttgagtcgggcacgaagttttagcaccggcacaagtgccggtggtagcagcagcagccaacaaaattctccacagatgaagaattcccccagctttccttttcatggcagtcggcctgcagggctgccaggcctgggctctagtacccaaaaggtcacccaccgggtgctgggccccgtcagaggtaagccagtctgggagcccctgcaacatgtgttcggttgtctggggcattgctgggggaagtaagagcttgaagatatactgttggcccaggaccaaggggtgaatcaataaaattagtttgtagcagaaaaaaaaaaaaaaaaaaaaaaaaaaaaaaaaaaaaaaaaaaaaaaaaaannnnnttntnntggggnnataaagaggtatgagcccggggggggggcccgcccccccccnatcccagntggggaggttaa

SEQ ID NO: 23352 - DNA, 468 bp, Homo sapiens
  misc_feature (1)...(468): n = A,T,C or G
nttgaaagcattaagattgacccgcctgcaggattcggcacgagatacattggcgccagggctgatgctggggtgtgggttttatgaagaacattgagaacaatcagctggtaattatggatggaggaagagggagaggaaaaaaatattgtatttttgaatcattgttgcaggagggggtgggaatcttaggatttgttgccagatttgaaagtcactggaacttgcatattttcattttaatcctaagtgttattacgcaccagttggggttcacccttcatccctcacatttaattgtctgatatagaatagtgttgtgtccactgccccgctagacggctttcttaggggaattttcttctggttgtttcacaagacagattctgtccttgtcacccgggacagaaaactcagtcttttcaccctcattcagatgaagggactcaggacaggctctgtgactta

SEQ ID NO: 23353 - DNA, 487 bp, Homo sapiens
  misc_feature (1)...(487): n = A,T,C or G
agcgtgtnnnaattgatttcatcagcattcggcacgaggcatactgacattttaaaacgtggctctgaaatggacaacaactgctcaccaaccaggaaagacttcactggtgagaaaatatttcaagaagataccatcccacgaacacagatagaaagaaggaaaacaagcctgtatttttccagcaaatataacaaagaagctcttagccccccacgacgtaaagcctttaagaaatggacacctcctcggtcaccttttaatctcgttcaagaaacactttttcatgatccatggaagcttctcatcgctactatatttctcaatcggacctcaggcaaaatggcaatacctgtgctttggaagtttctggagaagtatccttcagctgaggtagcaagaaccgcagactggagagatgtgtcagaacttcttaaacctcttggtctctacgatcttcgggcaaaaaccattgtcaagttctcaa

SEQ ID NO: 23354 - DNA, 488 bp, Homo sapiens
  misc_feature (1)...(488): n = A,T,C or G
gaggaaaaaaaancggacccgcctgcaggatttcggcacgagattggtcttcaggagttaagattttacattgtcacattttaatttttaagcctatttttcatctctgaaactttccttttctccttggttctggctatacttggactcaaactgatcagtgtgatcatgtccaaaacagcttggcctggaagaggtaggccttattttttcagcctagtagtgtcccatgcacatgctctttgtagcattcaagtgtttaacattggataaattaagaaggtcaagaatgttgttgaaacttcaaggtctcaaaaggaaatgatggggacatagaacaactgttggtgtaccaaaaaaaggtacagaggggcaccatttgtattgtcacacaacaatgatcagaatgatcagtttagaatgatcagaacaaaaacaccactctttaatgggtctttttcttgggctagagtctttcctcagttttg

SEQ ID NO: 23355 - DNA, 478 bp, Homo sapiens
  misc_feature (1)...(478): n = A,T,C or G
atagacncgcctgaggaattggagcccagaagatacctgatctaaccaacccccatcctgcctttgacctccaaactgtctttcatcactcctaggcctgggccaaactaattttggaagatatttatagtttaaacgataatagcccttctcccgaactgaactgcctgtgtaaagctaatgaaaggccagtaggttaggaggatgagaggagcctggattctgctaaaatatagatgtaaacgacgaccagccattactctggaggtcacaagatttgcagcttctgcagataaacatcactattgtagaacctaagattggccgtttgagatgtcctttcaagtttttgcatttctgatgtccgactgatcctgtggccccactcagaagcggactccctggcctgctaaactacccttgaaatacagtagcctccaaattttcagggaaatagatttaagtaatggtcaggcct

SEQ ID NO: 23356 - DNA, 467 bp, Homo sapiens
  misc_feature (1)...(467): n = A,T,C or G
gtggcngnnnnnattgatttgatccgcgctgcaggaattcggcacgagaacatttattaacgatcaataaacttgattgcattatggccagcactattaaggaagccttatcagttgtgagtgaggaccagtcgttgtttgagtgtgcctacggaacgccacacctggctaagacagagatgaccgcgtcctcctccagcgactatggacagacttccaagatgagcccacgcgtccctcagcaggattggctgtctcaacccccagccagggtcaccatcaaaatggaatgtaaccctagccaggtgaatggctcaaggaactctcctgatgaatgcagtgtggccaaaggcgggaagatggtgggcagcccagacaccgttgggatgaactacggcagctacatggaggagaagcacatgccacccccaaacatgaccacgaacgagcgcagagttatcgtgcca

SEQ ID NO: 23357 - DNA, 469 bp, Homo sapiens
  misc_feature (1)...(469): n = A,T,C or G
catcgaccgcctnatgcaccgcctgcaggaataccgcacgagctatgttggagacccaatcagttcactcattcctggtcctggggagacgcccagccagtttcctccactgagaccacgctttgatccagttggcccacttccaggacctaaccccatcttgccagggcgaggcggccccaatgacagatttccctttagacccagcaggggtcggccaactgatggccggctgtcattcatgtgattgatttgtaatttcatttctggagctccatttgtttttgtttctaaactacagatgtcaactccttggggtgctgatctcgagtgtcattttctgattgtggtgttgagagttgcactcccagaaaccttttaagagatacatttatagccctaggggtggtatgacccaaaggttcctctgtgacaaggttggccttgggaatagttggctgccaatctc

SEQ ID NO: 23358 - DNA, 462 bp, Homo sapiens
  misc_feature (1)...(462): n = A,T,C or G
nattgancgcctgatgaattccgccgagccaaatgttcttggcccatcatgacattgggtagcattaactgtaagttttgtgcttccaaatcactttttggtttttaagaatttcttgatactcttatagcctgccttcaattttgatcctttattctttctatttgtcaggtgcacaagattaccttcctgttttagccttctgtcttgtcaccaaccattcttacttggtggccatgtacttggaaaaaggccgcatgatctttctggctccactcagtgtctaaggcaccctgcttcctttgcttgcatcccacagactatttccctcatcctatttactgcagcaaatctctccttagttgatgagactgtgtttatctccctttaaaaccctacctatcctgaatggtctgtcattgtctgcctttaaaatccttcctctttcttcctcctctattc

SEQ ID NO: 23359 - DNA, 475 bp, Homo sapiens
ctttgcattcgctcgcctgcaggaattcggcacgagctttctgaagcaagtttccaagaagctcttcaggaaagcattcctgacattcaagcgcacgagtgggtgccgctgtggctactgcggtattcggtcattgtgaaaagtagaggaattatcaaatcaaaaggctacattttacaagctaaaagaaggggttcttaactgacttaggagcataacttacctgtaatttccttcaatatgagagaaaattgagatgtgtaaaaatctagttactgcctgtaaatggcgtcattgaggcagatattctttcgtcatatttgacagtatgttgtctgtcaagttctaaatacttatcttgcctccatatcaatccattctcatgaacctctgtattgctttccttaaactattggtctctaattgaaattgtctataaagaaaatacttgcaatatattcttcctttattagta

SEQ ID NO: 23360 - DNA, 477 bp, Homo sapiens
  misc_feature (1)...(477): n = A,T,C or G
nttgcccgcctgcaggattttagcaccagccagagtgctgggattacaggcatgggtcaccgcaccaagcccgcatttatattttgagttaccaaaatgatcatcatctgtgaagcatcatggtagcttccaagcatttgcggcccactggccagtgcatccaaaacacattcaggaaacccgagagttgtaagttgcacatgtgtggcctacagtgacttccatgtagtaacagggctgagcaaggcaggctctccaccagacttaaagcattcaaccactctgcccccaggccgacactgacatgtgttcactgtcgctgccacagctggccacctgtgttcagtctccatgaaggattcaccttctgctctcactgacatctccttggctacacaaatgtgcaggtgtctcttgtcaaagctaatttttcttttctaaataaacatcctttaatacaaaaaaaaaaaaaaaaat

SEQ ID NO: 23361 - DNA, 375 bp, Homo sapiens
  misc_feature (1)...(375): n = A,T,C or G
ntcgaccgcctgaggattgccccccctgcaggaattcggcacgagcttgtgtccagctgtggccctggatgctggagctggagggttttctgtgctcagactgtagcctgtagctcttggcctgtgtagagccccctcctgtgccctcagtggctgtcgtttgttaacatcatcaggaagatgggaaaggtcaggcagaatttttctgccctacaaagggtggaagagaaaggacacagtattttcatgaatttaccatatatctttgtttttcttcaacgaaaaagttaattgaggcaatgtcatctgctcaaagttgagtggtttattcacaataaactgtaagtttctgattataaaaaaaaaaaaaaaaaa

SEQ ID NO: 23362 - DNA, 463 bp, Homo sapiens
ctcgaccgcctgatgactcccctcaggaaacgcgcccaagacgagattaaccaacgcagatataggaacaccaagcaatcttcagcacattggacatgttggttgggatacaaatacaggctttgatctgaataatttggatccagaattgaagaatcttttcgatatgtgtggaatctcagaggcacaacttacagacagagaaacatcaaaagttatatatgactttattgcaaaaacaggaggcgttgaagctgttaaaaatgaactgcggaggcttgggtgcgttcaagattcaacttcacccgtaacccaccgccatggccgaggaaggcattgctgctggaggtgtaatggacgttaatactgctttacaagaggatctgaagactgccctcatccacgatggcctagcacgtggaattcgcgaagctgccaaagccttagacaagcgccaagccct

SEQ ID NO: 23363 - DNA, 494 bp, Homo sapiens
  misc_feature (1)...(494): n = A,T,C or G
gccattggggaanangnnannannnnanaaaattgatccgctctgcaggaattcggcacgagtccacccatcgtcagtattgtgttggtttgttaatttgttgatttggtcatagtatttaatatgatttgtgtttccttatttatttagccaccgttttgattgcctttttttttccgaatggtaatttctgcatgatacacttctgtacgttgtcttctgactgttacagactttctactacctctcccgatctgctgtttccttgtttcttaacaggattttttacagtgttgcgtctaatgtaacttagacaataaagggtttggttgtctacactgcagcttctcggtgtctctcccctgctttccgctcgctgcttcccgctctgcccctgctggggcctggctgcaccctggcctgccttcctatactctcctgtttcccgctcatatctcttcctcatttttgcgttcaaataacacacagctaag

SEQ ID NO: 23364 - DNA, 475 bp, Homo sapiens
  misc_feature (1)...(475): n = A,T,C or G
aatggccccggcnnaattgcacctggctgcaggaattcggcacgaggcctcttcgagcaactgggctagacggccgcctcctggggcctgcacgtcaacaattggctgcaggtcagcttcacggccaagcacgccaacaaggtcaaggtgctggacgcccccgtgcccgactgcctgggtgtgcactgtgacttccaccaaggcctcctgtccttctacaatgcccgcaccaaacaagtgctgcacactttcaagaccaggttcacacagccgctgctgcctgctttcacggtatggtgtggcagcttccaggtgacgacaggcctgcaggtccccagtgctgtgcgctgcctgcaaaagcgaggcagtgctaccagcagctccaacaccagcctcacctaggcccccaggcacccacccagcatgggtgtttttgggggagtcgccgccaagcccaggctgctggagccaggca

SEQ ID NO: 23365 - DNA, 481 bp, Homo sapiens
  misc_feature (1)...(481): n = A,T,C or G
gggagagcgggnnnnnnnnnaattgaccgattgacccgcgctgcaggaattcggcacgagagaagccttttgggcaggaggcttccttgcctcttgcaggggaagaagagttatcgaagggaggggagcaagactgtgccctggaggagctatgtaagcccctgtactgcaaactctgcaatgtcaccttgaactctgcacagcaagcccaggctcattatcagggtaaaaatcatggtaagaaactccgaaattactatgcagcaaatagctgtcctcctcctgctagaatgagcaatgtggtcgagcctgcagctactccagttgttccagtccctccgcagatgggctcctttaagccaggaggccgagtgatcctggccacggagaatgattactgtaagctctgtgatgcctccttcagttccccagctgtggctcaagctcactatcaagggaagaatcatgccaagaggctgcg

SEQ ID NO: 23366 - DNA, 473 bp, Homo sapiens
  misc_feature (1)...(473): n = A,T,C or G
nttgaccgatgaaggcntgcggcgagctttcctatggaccttgtttgtctgtcccttccttccagccacactccagggcggagttggatgaggcccgtccggagggagccatctcttgctcccgaggctgggacagtcctttctgtgggggctctagggcccctctgctgctgtgctgggtggggaagcggctgccctgagccccaggtcttgtgggaggctgcgaggacgagagcctggctggagcccgcgttgctgttcccacagggcctcggtttttcctaacttgctctgcatgctgtcagcggctgccccgccgtcatagacttaaaggactgcaataaatgtagagttgatgtctaacaaannanaannnnnnnnnannnnnnnaaactctgggggggggcccgggcccaattgcccctaaagggggggggaataaaattcccgggccgggggttaaaaaagggggg

SEQ ID NO: 23367 - DNA, 495 bp, Homo sapiens
  misc_feature (1)...(495): n = A,T,C or G
ctcgcccgcgntgngganatttccaccgcgctgcaggcgagggcatgcccgactcagacatctctcctttagtggaatgagtggggcgagactcctgggcatccaccatgatgctgtcatcttcctggccgagcagctccccggagcccagcgttgccagcactataagttccgttaccaccagcagggagagggccaggaggagccgcccctgaatccccatggggctgctcgggcagaggtctatctccggaagtgcacctttgacatgttcaacttcctggcctcccagcaccgggtgctccctgagggggccacctgtgatgaggaagaggatgaggtgcagctcangtcaaccagacgtgccaccagcctggagctgcccatggccatgcgttttcgtcaccttaagaagacgtccaaagaagctgtgggtgtctacagatcagccatccacgggcgaggcctgttctgtaagcgcaacatcgacgcggg

SEQ ID NO: 23368 - DNA, 474 bp, Homo sapiens
  misc_feature (1)...(474): n = A,T,C or G
atgtgccctctccgcccggctgcaggccaggatggagcacaggagcgccacacatggaggaaagcccctgtaacgttacctaccttaaactccactcatcaaatctgagaaaagtatccactggtccccagggtttcagtcatgcttttgggggtcattgggtattagagaagtaagtatcttttctgagagagggggagtcaccccccctactggggattcctctgggctttattcactcccagccctggccctgacctttgtgggcctccctaatgcccagggcatggatggcttcagaggagtttttgaatcgaagcccagggtccttgttgatgtttcttctcctagccacacttggaggaaagttgcaggtgggttgggcagggagcaggcatggttctgctttgctgtttgtcttcctagataaggctctttataaagagcttgttcttcatgttttaagcactttan

SEQ ID NO: 23369 - DNA, 503 bp, Homo sapiens
  misc_feature (1)...(503): n = A,T,C or G
ggtctctncnnnaaggagggcccnaggggnnncncatagatcgcccgtggagcaacntccagaggaccgagnaagccgctgcaggccaccatgaaccaggttgcggatgactaccacccctactctggtgaagagcctagcgaccacgagccggctttgagcaactctgaggatgaaatggatgtgcttttacatggaactcctgaccaaaaacgaaaactcatcagagaatgtcttaccggagaaagtgaatcatctagtgaagatgaatttgaaaaggagatggaagctgaattaaattctaccatgaaaacaatggaggacaagttatcctctctgggaactggatcttcctcaggaaatggaaaagttgcaacagctccgacaaggtactacgatgatatatattttgattctgattccgaggatgaagacagagcagtacaggtgaccaagaaaaaaaagaagaaacaacacaagattccaacaaatgacgaattacg

SEQ ID NO: 23370 - DNA, 484 bp, Homo sapiens
  misc_feature (1)...(484): n = A,T,C or G
agggggagccnggnnccnnnnnaattgatnngcttgatccgcgctgcaggaattcggcacgaggggaaacaaggctttggtattccgctggctccagcgctttttctgaaacccgaggctggccagggtgctgtcaccgtgtggtctttgattgcagccattcaatgcccacatgcttttccttcttgtttcagaacagcacatggtcacaacaagatattttctttccctccaaagccttttgtctccttgtgcctctttttatccttaggaaaagatccaggtgcttgtgaaaagaatcatgaatgcaacaagggaggctggtcctgttgctgtcgccgattaagctttaaacttttatttattatttatgtctgccgtattttaaataaacattctcgttccttccagttccagtcatagagtgtctgtggcattccagtccaaccatgtgacttatttattctaatttgagggctgcact

SEQ ID NO: 23371 - DNA, 467 bp, Homo sapiens
ctcgaccgccctcggtagacccggctgcaggaattcggcacgaggttgctgtaaggggtcctccctgcgccacacggccgtcgccatggtgaagctgagcaaagaggccaagcagagactacagcagctcttcaaggggagccagtttgccattcgctggggctttatccctcttgtgatttacctgggatttaagaggggtgcagatcccggaatgcctgaaccaactgttttgagcctactttggggataaaggattatttggtcttctggatttggaggcaatcagcggacagcatggaagatgtgtgctctggctcggataaaagatgggacatcattcagtcactagttggatggcacaaggctcttcacagacgcatctgtagcagagtggaacttgtactaacttatgatagaatgtatcagaataaatgtttttaacagtgaaaaaaaaaaaaaaaaaa

SEQ ID NO: 23372 - DNA, 502 bp, Homo sapiens
  misc_feature (1)...(502): n = A,T,C or G
cggaaataaacctcgagcgcccttgngaattcgccacgaggtgatattggaagttcagtcaaatcccaaaataagaaaaggtgcagtacagaaggtttctaaaaaattagaaatgcacgtttacagcaagaggttggagatcatgctccaggacatatttggagaagactgtgtaagtgtaaaggatgactctattcttagcgtcacagtggacgggaaaactgccaaccttaacttggagacacggactgtagaatgtgaagagggaagtgaagaccatgaatccctccgagaaatggtggagctggctgcacagagactgtacgaggccctgacgccagttcactgagactgtgcctgtatatgaactttgaaaaaatacttgactctacttttgttacctaaaataaaatgcattcgtttctctgggaaaaaaaaaaaaaaaacaaaacaaaaaannaaannnnncctttcnnccccgccccccctattngggcccttt

SEQ ID NO: 23373 - DNA, 466 bp, Homo sapiens
attgcctgcgctgcacgaattcgacgagatatcttcaggttaaacctcttggcagttacccttttcacaaagtgcacagcgggaatcgagaatctataggggtaattttggagcagtggcttataccattcacctctggttttttgtgattatttcacagataatgagaccttagtaacaaagaggggtagaaaaattttcacattgaaatgatagaaacatttgatgtaataaaacttggttggcttgatattccaaggaattgaaacctagcactcttattggagagacaagaattggtctccagctgcctttgatcaagattcgggtgcaagtggagcaggagccatatacctggagggaatgtgctttgtcacaccaaagaggattggtgtttcttcaaactctgatgatggctaggtttcaaaatctgtgccgcaaggctgatctgctttcattaactgga

SEQ ID NO: 23374 - DNA, 457 bp, Homo sapiens
  misc_feature (1)...(457): n = A,T,C or G
nctgaccgctggaggacttcggcacgagctgattctcatcttcgccgaggtgctcggcctctacggtctcatcgtcgccctcatcctctccacaaagtagaccctctccgagcccaccagccacagaatattatgtaaagaccacccctcctcattccagaacgaacagcctgacacatacgcacggggccgccgcccccagtagttggtcttgtacatgcgcagtgtcctagtgcccatcgtctgtttccccggccttgcccccgcccgccccgtgccgtggacatctgggcccactcatcgcccctccaggcccccggcgccccaccccctagagtgctctgtgtatgcggatgatttagaattgtcatttctctttactggatgtttatttataaagatctggcctgttcctgcgtctgcggagcggcccttgtctcccagctatctataaccc

SEQ ID NO: 23375 - DNA, 403 bp, Homo sapiens
acgagcagaaacaacacccttgaaagagagctataaggaggaatctacaaattctggactgtccattctgcttgagagcattgtatctgatcttgaaaaatctcttggaacaggtttatcttcaatattagaaacagaaatgaaaattgcttttggaaacctttggatggagatcctgtacctgaaaccaccatggactctactacatttactacagtgctttaaaaaacattggttggctgtatttggattagttatggaaaagaacttgcttttaactattgagagcctatacaaaaatctccgtaaagctaataaagcagtggattttacaacagtcaaattcttgcttcaggattctagaagtttgttacatgctttcagtacaaggtcaaattatgat

SEQ ID NO: 23376 - DNA, 463 bp, Homo sapiens
  misc_feature (1)...(463): n = A,T,C or G
ntttgannnctctgccccgcgctgcaggaattcggcacgagttttttttttacaacaacaaaaaataccaatatttattctgaaaggcaatcgtatgttccaagtagcagatattaacaacttccaacacgatctctaggaataatccgcagttctgaaccatgttttagaaaaacatttccagcagtctgtgcaggatttattcctattccatcattggtaataattgcacttgttgcagcaggaactttaaattcttctgctgcaaactttaagactgctgtgaaaggtgtactttcaggaacactgagtactttgtacggcagccgtgggtccgacgtcagcgtgatcttaaaggaaaccttcgacatggtggtgccggaatgaatccagaacacacgacaactccgcgggggtagcacgacttcctctgaactagtctcgagggggggcccggtacccn

SEQ ID NO: 23377 - DNA, 322 bp, Homo sapiens
attgccctgctgcggattcggcacgagggaaatctcccagtcccactctcggagggttaagagaaggcctcctgcagctgtgccgtccacacctctaggtcgccagagccctggcccccagcccccagcaagcctgagcccgggaagaaccagaggccctcccgagagacccagtcacacgtctctgctttaagccttagccagctagtgacgagtacaacgagataacgcccatgtgttttggaacatttatgtaagattgtcatatgaaatgtatttgggaactacattaaacttttaactaaaaaaaaaaaaaaaaaaa

SEQ ID NO: 23378 - DNA, 497 bp, Homo sapiens
  misc_feature (1)...(497): n = A,T,C or G
gaaagaaaaattgaacgcctgattcgcccgcctgcaggaattcggcacgagtgtgggaatgctgattttcttttgttacgtagtggaaacattttgcattgtttacatagttctcatggaacatggaaatttttgaaagtgatatatgatacacattttttgtgtatgtattctaattagtgtgaataaagcagtaacattaatgcattttttaagcagcaaacttatgtatttctcttgtcttccttaaaagtgtccccatgaactcagtgtttattcccttttcattttgagtacctgcttatatggtcagtatgtaacgttagcattggctcctaatggtagaattagaacagcaagattgtagagctgtaattgactccagacaacatagatttcagccacctcattctacagctgaggccaggacaataaatgcctttcccagactgngtagtggcagatctgggatggaatatnggtttcttgattccctt

SEQ ID NO: 23379 - DNA, 459 bp, Homo sapiens
  misc_feature (1)...(459): n = A,T,C or G
nattgatnngcatgagagccctgcggaattccgacgagccggacgtaggtagtttggtgggccgggttctgaggccttgcttctctttacttttccactctaggccacgatgccgcagtaccagacctgggaggagttcagccgcgctgccgagaagctttacctcgctgaccctatgaaggcacgtgtgggcctcaaatataggcattctgatgggaacttgtgtgttaaagtaacagatgatttagtttgttcggtgtataaaacagaccaagctcaagatgtaaagaagattgagaaattccacagtcaactaatgcgacttatggtagccaaggaagcccgcaatgttaccatggaaactgagtgaatggtttgaaatgaagactttgtcgagtacttaggaagtaaatatcttttgaattagagaaagtgttgggacagaaagtactctatgtt

SEQ ID NO: 23380 - DNA, 473 bp, Homo sapiens
aattgcccgtcctcccgcactgcaggaatacggcacgagccagaccgcatccccggccctatgcacctaccccaagtccgtctctcccgcctccggcctccctgccgccttcagcacgttcgagtggatgaaagtgaagaggaatgcctctaagaaaggcaaactcgccgagtatggggccgctagcccctccagcgcgatccgcacgaatttcagcaccaagcaactgacagaactggaaaaagagtttcatttcaataagtacttaactcgtgcccggcgcatcgagatagccaactgcttgcacctgaatgacacgcaagtcaaaatctggttccagaaccgcaggatgaaacagaagaaaagggaacgagaagggcttctggccacggccattcctgtggctcccctccaacttcccctctctggaacaacccccactaagttgatcaagagacccggcagcccttctt

SEQ ID NO: 23381 - DNA, 455 bp, Homo sapiens
aattgaccttgaccccgcgctgcaggttagatatgtcggggagcaggtgggtggccacatcaagaggagttctggttctggtagatggaagctttctctttcaacaggtccagacacaggtggcagctccagacttccttcagggggctcagacatggacggggtgagacagtacatgcggtagccacgatcgcagtcatcacagaagagcaactggtcgtcattctcggaggtgccgcagatattgcaacatttgcactcgatgcactgccagcggtgtgtcttcactgccgccatcatcacgggggtaaattggaggcaagatggatgccctgagcggccacagtcagaacaggacaccagctcctcgggttgtcccggcttcttgttaatctttgagtcccccaggcagaagtcacagtacttgttgggcaaggccaatccatcatgaccct

SEQ ID NO: 23382 - DNA, 407 bp, Homo sapiens
ggaattccgcacgagatgacatacagcctatcaccagcctcccaggagtggccaggtatggtgtgaagcggctggaagagatgctgaggcccttggtggaagagggcctacgctgtgtcttgatctttggcgtccccagcagagttcccaaggacgagcggggttccgcagctgactccgaggagtccccagctattgaggcaatccatctgttgaggaagaccttccccaacctcctggtggcctgtgatgtctgcctgtgtccctacacctcccatggtcactgcgggctcctgagtgaaaacggagcattccgggctgaggagagccgccagcggctggctgaggtggcattggcgtatgccaaggcaggatgtcaggtggtagccccgtcggacatgatggat

SEQ ID NO: 23383 - DNA, 474 bp, Homo sapiens
aggggccaattgacaatagtgcggcattcggcacgagatcttaacggctgctgttggttgggggccgtcccgctcctaaggcaggaagatggtggccgcaaagaagacgaaaaagtcgctggagtcgatcaactctaggctccaactcgttatgaaaagtgggaagtacgtcctggggtacaagcagactctgaagatgatcagacaaggcacagcgaaattggtcattctcgctaacaactgcccagctttgaggaaatctgaaatagagtactatgctatgttggctaaaactggtgtccatcactacagtggcaataatattgaactgggcacagcatgcggaaaatactacagagtgtgcacactggctatcattgatccaggtgactctgacatcattagaagcatgccagaacagactggtgaaaagtaaaccttttcacctacaaaatttcacctgcaaaccttaaa

SEQ ID NO: 23384 - DNA, 518 bp, Homo sapiens
  misc_feature (1)...(518): n = A,T,C or G
gagcgaggggcnccattgaccgccctgngatagtaccgcgctgcaggaattcggcacgagaaggatttaaaacaatacagtcttgagacttagtttctgtagatagaaatctcctctctctgtctatcagtcatggtccaaataggagacagaaaccattccagttatttcaacaatatgataaaaagaattactgacacagtaaccaaaaaagcaaaaaacccacacaagaattaaggaagtagcaacttccagaagtgctctaaggatgggtgttgctcacctggtcctgggtctttgagcccatcatgaagctggttctgagcaggtcagaaatggcagctgggatcacatgcagctgtgagagcaaactgctgcagcagtgctgacaggaacgggaaggagcacgccccttcttcctgcagcatggaagcttccctctactggaaaaatccaacaggatgccagctgcgaagcagagatgtttgcagagttctgtcgctggtatcacaaaagca

SEQ ID NO: 23385 - DNA, 502 bp, Homo sapiens
  misc_feature (1)...(502): n = A,T,C or G
ggacgggccattgannccccntnnattgcatcgcctgtcggaattcggcacgagcggacttctcccaagttcctaggcattatcttctggaccctatcctgcagaggtgaagcgtccctttggggactctcgctgggaggcggcgacggcggcggcggggggagaggaagagaaagaagcgtctccagctgaagccaatgcagccctccggctctccgcgaagaagttccctgccccgatgagccccgccgtgcgtccccgactatccccaggcgggcgtggggcaccgggcccagcgccgacgatcgctgccgttttgcccttgggagtaggatgtggtgaaaggatggggcttctcccttacggggctcacaatggccagagaagattccgtgaagtgtctgcgctgcctgctctacgccctcaatctgctcttttggaatcatcacattccacttctaaaaggagctttaaagatggcctggttgaacgtccttccttt

SEQ ID NO: 23386 - DNA, 493 bp, Homo sapiens
  misc_feature (1)...(493): n = A,T,C or G
aggggacaattgatcgccctcggttngaggcacgtgcattgaaatcctgagtgatgtgcagctgatcaagactggagacaaagtgggagccagcgaagccacgctgctgaacatgctcaacatctcccccttctcctttgggctgggcatccagcaggtgttcgacaatggcagcatctacaaccctgaagtgcttgatatcacagaggaaactctgcattctcgcttcctggagggtgtccgcaatgttgccagtgtctgtctgcagattggctacccaactgttgcatcagtaccccattctatcatcaacgggtacaaacgagtcctggccttgtctgtggagacggattacaccttcccacttgctgaaaaggtcaaggccttcttggctgatccatctgcctttgtggctgctgcccctgtggctgctgccaccacagctgctcctgctgctgctgcagccccagctaaggttgaagccaaggaagag

SEQ ID NO: 23387 - DNA, 496 bp, Homo sapiens
  misc_feature (1)...(496): n = A,T,C or G
ngggggcaaagaaagccctnngttgcncggctgtcagaattcggcacgagtccacctcggtagcccctggtgactctgttacagcctctgttgacctatgatctgcagggagacgcacagccaggacatcctggaacctgggaaaggggactcttgacgtttaggtatgtggccatagaattctctctggaggagtagcagtgcctggacactgcacagcagaatttatagaggaatgttatgaaaacctggccttcctgggtattactgtctctaagccagacctgatcacctatctggagcaagaaaaagagccctggaatatgaagtgacatgagatggtggatgaacccccaggtatatgccctcattttgcttaagacctctggccagagcagggcatggaagattccttttaaaaagtaatactgagaagacatgaaaaatgtggacatgataatttactgttgagaaatggctgtaaaagtgtggatga

SEQ ID NO: 23388 - DNA, 476 bp, Homo sapiens
attgaccctcgccgccgcgctgcaggaattcggcacgagggccaagatacagccagccaggcctgtcgtctgggacccaggaggcctctgatgaccaagggctttcacatcctaagtcatttggaaggaggccttgagaacaaagtcacctttgtcactcccagtgaactgaatgaggaacatgctgtctcctgtcttggcctcccctttcatgagatactggggaaccatattgcccctccctcccccatcaaacttccttcatttaacttgctataaaatgagtcatataaagaaactctatatgggtgaggtatatcccacttctgtgaaaacattacaaatcaaaccgcttctctcagtttatttaagatgcttttgttgcgagcggagctctagagtgaagcctcctgtgtgtgtgtgagataataacaccttgtaactcattacagctgggcactatttacataaaccag

SEQ ID NO: 23389 - DNA, 526 bp, Homo sapiens
  misc_feature (1)...(526): n = A,T,C or G
gtgggntnnnnnagggattgacgccntnggaanntttcgcaccgcctgcangaattcggcacgagccaggacggtcatttacgagattcctcggagtcaggtcgaccccacgtccgccaacttcctgatctggcccccgtgcgtggaggtgaaacgctgcaccggctgctgcaacacgagcagtgtcaagtgccagccctcccgcgtccaccaccgcagcgtcaaggtggccaaggtggaatacgtcaggaagaagccaaaattaaaagaagtccaggtgaggttagaggagcatttggagtgcgcctgcgcgaccacaagcctgaatccggattatcgggaagaggacacggatgtgaggtgaggatgagccgcanccctttcctgggacatggatgtacatggcgtgttacattcctgaacctactatgtacggtgctttattgccagtgtgcggtctttgttctcctccgtgaaaaactgtgtccgagaacactcgggagaacaaagagacagtgcacatttg

SEQ ID NO: 23390 - DNA, 472 bp, Homo sapiens
  misc_feature (1)...(472): n = A,T,C or G
aggtgccaattgacatcgtgcggcattcggcacgaggacgcgtccggcgccgagattcaaactagtggcgggaggctgtgagctgagcggtggggtctgcgtacgcctggagtccttccccgctgtgctcagcatggaccctatccggagcttctgcgggaagctgcggtctctggccagcacgctggactgcgagacggcccggctgcagcgagcgctggacggagaggaaagcgactttgaagattatccaatgagaattttatatgaccttcattcagaagttcagactctaaaggatgatgttaatattcttcttgataaagcaagattggaaaatcaagaaggcattgatttcataaaggcaacaaaagtactaatggaaaaaaattcaatggatattatgaaaataagagagtatttccagaagtatggatatagtccacgtgtcaagaaaaattcagtacacgan

SEQ ID NO: 23391 - DNA, 456 bp, Homo sapiens
  misc_feature (1)...(456): n = A,T,C or G
cgcgcacacctganactcattcgcgctgcacgnnaaagcgaaaaagtgacggattttctctttcttaaacttacctgacacttaaccagagtaccagttctcgtgatgtgaattaatttttttgtgtgctaggggagggagagtgaggagggagtgttatttccttgggaacctagggaggagaggttcctttgttgggaaacttttgttgatagctgctgcctttgtcctgatcgttttctttcccttttctctggtggcctgttgtggtgcaacgagctgatggcatttgatcttgccccattcaggttggggagtgaagtgtgaggacccttttcccccgcttgctgtgaaagcacagattcattgactacagtacactgttgttcagaaaagaaggctgcaaatgacttctgagactttatgtcttttcttccagaccaagaccgtagaagg

SEQ ID NO: 23392 - DNA, 478 bp, Homo sapiens
  misc_feature (1)...(478): n = A,T,C or G
ggcccccaccccattgccccgcgcngnatgtaccccggctgcaggaattcggcacgaggtgcctcctgcgattaaccagttcacccaggccctggaccgccaaacagctactcagctgcttaagctggcccacaagtacagaccagagacaaagcaagagaagaagcagagactgttggcccgggccgagaagaaggctgctggcaaaggggacgtcccaacgaagagaccacctgtccttcgagcaggagttaacaccgtcaccaccttggtggagaacaagaaagctcagctggtggtgattgcacacgacgtggatcccatcgagctggttgtcttcttgcctgccctgtgtcgtaaaatgggggtcccttactgcattatcaagggaaaggcaagactgggacgtctagtccacaggaagacctgcaccactgtcgccttcacacaggtgaactcggaagacaaaggcgctttg

SEQ ID NO: 23393 - DNA, 474 bp, Homo sapiens
cggggcccattgacattgatccgcgctgcaggaattcggcacgagggaatttgacttcctggggaaggactgcatccgctactacaacagagtgccggtggagaagccggtgtacaagaacttacagctctttatggagaacaaggacccccgggacgacctcttcgacaggctgaccacgaccagcctgaacaagcacctccaggagctgatggacgggctgacggccaaggtgttccggacctacaacgcctccatcactctgcaggagcagctgcgggccctgacgcgcgccgaggacagcatagcagctaagatcttatcctacaaccgagccaaccgagtcgtggccattctctgcaaccatcagcgagcaacccccagtacgttcgagaagtcgatgcagaatctccagacgaagatccaggcaaagaaggagcaggtggctgaggccagggcagagctgaggagggc

SEQ ID NO: 23394 - DNA, 404 bp, Homo sapiens
acgaggaagaacctcgtgtggaccagcggtatctcagccctggatggtgaatttcagtcagcctcagaggttgacttctacattgataaggacatgatccacatcgcggacaccaaggtcgccaggcgttatggggatttcttcatccgtcagatccacaaatttgaggagcttaatcgaaccctgaagaagatgggacagagaccttgatgatattcacacacattcaggaacctgttttgatgtattataggcaggaagtgtttttgctaccgtgaaacctttacctagatcagccatcagcctgtcaactcagttaacaagttaaggaccgaagtgtttcaagtggatctcagtaaaggatctttggagccagaaaaaaaaaaaaaaaaaaactcgagggg

SEQ ID NO: 23395 - DNA, 492 bp, Homo sapiens
  misc_feature (1)...(492): n = A,T,C or G
agaaaaagaantttgaccgcttgatgatcctgcacgagggactagcgatctgaggggtaggggttgggtgggcgaaaggctgtgcctccctcggtggcgtcaacatcctggccatgttgtcacatgcacttgctggcaaaattcccaagccatgcgctcacagtttgtgcagtgatgagtgtggcaaacacagctcagttaaaaataaacatcattttatagattagctgaagaatacaatgtcccacgagactatgtggccatcaagaaattaacttttctgacctaatggcccaagaagcactgcgggcagcgtctcgccccgtgtaacgcagcacccgcagaagtgcccgggatcagcctttgcctcggcgggatcctggttactggttcttccaagggcatggcgaggtccccgctcccttatcttgaggaaagtaataagtaacccagctctttcaactcccaaggttactttgtcaataaagtgcg

SEQ ID NO: 23396 - DNA, 499 bp, Homo sapiens
  misc_feature (1)...(499): n = A,T,C or G
agggcccnaatagatcgcttgaggactntcgccgagttcgcttcctgtatggtgatatcatatgtaacatttactcctgtttctgctgattgtttttttaatgttttggtttgtttttgacatcagctgtaatcattcctgtgctgtgttttttattacccttggtaggtattagacttgcacttttttaaaaaaaggtttctgcatcgtggaagcatttgacccacagtggaacgcgtggcctatgcaggtggattccttcaggtctttcctttggttctttgagcatctttgctttcattcgtctcccgtctttggttctccagttcaaattattgcaaagtaaaggatctttgagtaggttcggtctgaaaggtgtggcctttatatttgatccacacacgttggtcttttaaccgtgctgagcagaaaaacaaacaggttaagaagagccgggtggcagctgacagaggaagccgctcanatacctttcacataa

SEQ ID NO: 23397 - DNA, 500 bp, Homo sapiens
  misc_feature (1)...(500): n = A,T,C or G
agtggacgggtccngnncccaggnancctagntagcagncggaaanncgcacgagctggctcccagggccatgaactttgtccggtggaaggccttctttctagagagggaattctcttggctggcttccttaccgtgggcactgaaggctttcagggcctccagccctctcactgtgtccctctctctggaaaggaggaaggagcctatggcatcttccccaacgaaaagcacatccaggcaatggcctaaacttcagagggggcgaagggatcagccctgcccttcagcatcctcagttcctgcagcagagcctggaagacaccctaatgtggcagctgtctcaaacctccaaaagccctgagtttcaagtatccttgttgacacggccatgaccactttccccgtgggccatggcaatttttacacaaacctgaaaagatgttgngtcttgagtttttgtcttatttttgttggagccactctgttcctggctcagn

SEQ ID NO: 23398 - DNA, 491 bp, Homo sapiens
  misc_feature (1)...(491): n = A,T,C or G
agtgcaggannccnnanccagggagccagcntactccgcaagcncnatgcgcaggatgagtcgcttcaagtttatcgagattggtatcaacttgactgaccctatgttcagaggaatttataggggggttcaaaagcatcaagtttatgattacaggtggaaatctacaagacagtaaagatgcactgcatttggcacaaacaaatggtatgtttttcagtacagttggatgtcatcctacaagatgtggtgaatttgaaaagaataaccctgatctttacttagaggagatgctaaatcttgctgaaaacaataaagggaaagttgtggcaataggagaatgcggacttgattttgaccgactgcaggtttgtctcaaagatactcaactgaaatattttgaaaaacagattgtactgtcagaacaaacaaaattaccaatgtttcttgattgtcgaaactcacatgctgaatttttggacataatgaaa

SEQ ID NO: 23399 - DNA, 498 bp, Homo sapiens
  misc_feature (1)...(498): n = A,T,C or G
ccccttgcccgcctgcagtggtgatcacgctctcagtggctcgcaagcctcttagcgagagactgggccgcgacactaagaaacatctagtggtgccgggggatacaatcactacggacacaggattcatgcggggccatggaacgtatatgggagaagagaagctcattgcatctgttgctggctctgtggagagagtaaacaagttgatctgtgtgaaagctttgaaaaccagatacattggtgaagtaggagacatcgtagtgggacgaatcacagaggtaacgtcgatatcagattggtgtttacaaagtcgaggcaggctggcgatttcattcatgggacagtcattccacttgtagttacatgaaaaaggcattcattgcatttggccgttgtgtggcttctgatgtaaatatgtggcttgttcgatttcagattactgggtgacagagcgagactgtgtttcaaagaanaaaaaaaacaagcagccttttg

SEQ ID NO: 23400 - DNA, 545 bp, Homo sapiens
  misc_feature (1)...(545): n = A,T,C or G
ggagatcgacaacttcgccggctgcagaattcggcacgagcgagttctgngagtaaggccacctcattgaagcaaggaggaggacatgggtggggcatagaggatggcccacttccttatctcctcccctgggatacaggagccactgtcttcgggggagtgggaggagggtgcagatctggagataaatttatgcctttggccatagacaggactggaatcccagttctgccacttactggctgtttgaccttaggcaagccactcctcctttctgagcctcagtttctttacctgtaagataaaaagaatgaatcattactaccctgtgaggcaggtatgcatacttatgttgtctaaaaatgatacagttttcttaatgtattttaggaaaaaatatattctgttattgcacagagaanaannnnnnaaaaaaaaaaaaaaaaaaaaaaaaaaaaaaaaaannccccggggggggggcgccggccccaatccccccttaaggggggcgattaacattccggggccggtttttaacacggggg

SEQ ID NO: 23401 - DNA, 449 bp, Homo sapiens
attagaaaagtttgccccgcgctgcaggaattcggcacgagggataacagaggagaggtgacagggccaagggcacatggccagcgagcggcagagctgggactgcaacctgggtctgactccctgcaagccctgcgttctgtacattcacagagtatggcccaaccttcctcccattactccctgcacacagaggctccaggagagtaatttcatcccatttcagtgtacctaggccttctatttctcactagccctctcattacccacaaccccatttgacaaatggggccctgggtgacctggtggggcagacatcgctgcgggtgaccttgtcagcagagagcccatcggtcatggcgacactacaccgcttcatgtggctgcccttggagcctgaggggctgacggggctagcatgcttgctactcccctgtcacatgccatag

SEQ ID NO: 23402 - DNA, 514 bp, Homo sapiens
  misc_feature (1)...(514): n = A,T,C or G
cgcccaattcgatccngcccctgcagganatcgacacngcgctgcgcgaattctgcacgagtcgggtcgaagcacggtcccttttcaggagagatgagccgagctttccttcacgcagacttaatttactggacttagtgctaacgtcaataccaaacctgtaggaaaagagctttaactacacaaacacatactgacagattcagccaaactccgagagtcccagaccggagcctgtgtccctagcgcaggtgtgtctgtcgggcagccgacggtgcctgtgcaggcagtggctggacaccactactcccttctcttccctccctgcttgatcgcgctgtgggattcctgatgctgtgagggtctctggctccccctgctgtagaaggggagtactgcccctgggacacagaactgcaaggccagtggcgccaggtacctcccacaggaagaagatttgaggacatttaaaggtacccactttaccccgtgcccaccttctaccccagctccc

SEQ ID NO: 23403 - DNA, 471 bp, Homo sapiens
  misc_feature (1)...(471): n = A,T,C or G
ntttgaanattcgcccggctgtcggaattcggcacgagaaatgtgctaaggggcgtgtaaagaatcaaaagaaactattaccaataatagttttgataatcacccataattttgtgtttaaacattgaaattatagtacagacagtattctctgtgttctgtgaatttcagcagcttcagaatagagtttaatttagaaatttgcagtgaaaaaagctatctctttgttcacaaccataaatcaggagatggagattaattctattggctcttagtcacttggaactgattaattctgactttctgtcactaagcacttggtatttggccatctccattctgagcaccaaacggttaacacgaatgtccactagaactctgctgtgtgtcacccttaaatcagtctaaatcttccagacaaaagcaaatggcatttatggatttaagtcattagattttcaactgacattn

SEQ ID NO: 23404 - DNA, 475 bp, Homo sapiens
atcgcccgcttgcacgaattcggcaccagggacaaggtagatgatcatcctgaagtgctggatgtggcagcagtggaagcagcactgtcattttgtgaagaaaatgatgatcctcagtccctgcctggcccctgggagcatcctatccagcaggagcgggacaagccagtacctctccctgcaccagaaatgacggtcaagcaagagagactggactttgaggaaacggaaaacaagggaatacatgaactggtggacatcagggagcccagtgcagagatcaaggtggaacctgcagaaccagagccagtcatttcaggagccgaaatagtagctggagttgttccagccacaagtatggagccaccagaactcaggagtcaggacttagatgaggaactgggaagtactgcagctggagagattgttgaagcagatgttgccattgcgaaaggcgatgagacgccgctgtgct

SEQ ID NO: 23405 - DNA, 499 bp, Homo sapiens
  misc_feature (1)...(499): n = A,T,C or G
cggggcagcccaattgacgccgtngattgatcggcagtcagaacggcacgaggncatgcagggtgtgagcagggctgagatgggcaccgcggatctggggccgttctcagtgcctattccaactaatgttacaattgaatcctataacatgaaccctatcgtatattgggagtaccagatcatgccacaggtccctgtttttaccgtagaggtaaagaactatggtgttaagaattcagaatggattgatgcctgcatcaatatttctcatcattattgcaatatttctgatcatgttggtgatccatcaaattctctttgggtcagagttaaagccagggttggacaaaaagaatctgcctatgcaaagtcagaagaatttgctgtatgccgagatggaaaaattggaccacctaaactggatatcagaaaggaggagaagcaaatcatgattgacatatttcacccttcagtttattgaaatggagacgagcaggaa

SEQ ID NO: 23406 - DNA, 496 bp, Homo sapiens
cgccattgaccgcctgcagaattggcacgcgctgcgcagaggctacagggtttgtgtgggcagcccacaataaagacgtccttcgtccgatgaataagcgctaccccacgacgttcgttatggtggtcatgttggcgagctatttccttatctccatgtttggaggagtcatggtctttgtgtttggcattacttttcctttgctgttgatgtttatccatgcatcgttgagacttcggaacctcaagaacaaactggagaataaaatggaaggaataggtttgaagaggacaccgatgggcattgtcctggatgccctagaacagcaggaagaaggcatcaacagactcactgactatatcagcaaagtgaaggaataaacataacttacctgagctagggttgcagcagaaattgagttgcagcttgcccttgtccagacctatgttctgcttgcgtttttgaaacaggaggtgcacgtaccacccaattatct

SEQ ID NO: 23407 - DNA, 348 bp, Homo sapiens
  misc_feature (1)...(348): n = A,T,C or G
aacgnncngnnncncnnnanannantncnctgccttccaaanaaacnattgaacatganaagcaagcatgcgaatcgtaatgaggcgtgcgccgccaatatgcactgtacattccacaagcattgccttcttattttacttcttttagctgtttaactttgtaagatgcaaagaggttggatcaagtttaaatgactgtgctgcccctttcacatcaaagaactactgacaacgaaggccgcgcctgcctttcccatctgtctatctatctggctggcaaggaaggaaagaacttgcatgttggtgaatgaagaagtggggtggaaaaagtgtggtgggactacagtt

SEQ ID NO: 23408 - DNA, 461 bp, Homo sapiens
  misc_feature (1)...(461): n = A,T,C or G
atatgccccgcgctgcatgaattcggcacgagtgtggcccatgccttgacagaaaaatccaaggccatgactggtgtggaacaatggccatacagggctgttgcccaggccctagaggtcattcctcgtaccctgatccagaactgtggggccagcaccatccgtctacttacctcccttcgggccaagcacacccaggagaactgtgagacctggggtgtaaatggtgagacgggtactttggtggacatgaaggaactgggcatatgggagccattggctgtgaagctgcagacttataagacagcagtggagacggcagttctgctactgcgaattgatgacatcgtttcaggccacaaaaagaaaggcgatgaccagagccggcaaggcggggctcctgatgctggccaggagtgagtgctaggcaaggctacttcaatgcacagaaccagcagagn

SEQ ID NO: 23409 - DNA, 546 bp, Homo sapiens
  misc_feature (1)...(546): n = A,T,C or G
aggagattcacggcttcgaattctgccgagcggaggcggaggcggctctggcggtggtagcggaagcaattttggaggaggtggaagctacaatgattatgggaattacaacaatcagtcttcaaattttggacccatgaagggaggaaattatggaggcagaagctctggcccctatggcggaggaggccaatactttgcaaaaccacgaaaccaaggtggctatggcggttccagcagcagcagtagctatggcagtggcagaagattttaattaggaaacaaagcttagcaggagaggagagccagagaagtgacagggaagctacaggttacaacagatttgtgaactcagccaagcacagtggtggcagggcctagctgctacaaagaagacatgttttagacaaatactcatgtgtatgggcaaaaaactcgaggactgtatttgtgactaattggataacaggttattttagtttctgttctgtggaaagtgtacagcattccaacaaagggttntaatgtagatcattttttttgcac

SEQ ID NO: 23410 - DNA, 467 bp, Homo sapiens
  misc_feature (1)...(467): n = A,T,C or G
nattgaccgttctgangacttctgcacgagagaacctggtgagttgttttgaacagaactgttttttccccttcctgtaagacgatgtgactgcacaagagcactgcagtgtttttcataataaacttgtgaactaagaactgagaaggtcaaattttaattgtatcaatgggcaagactggtgctgtttattaaaaaagttaaatcaattgagtaaattttagaatttgtagacttgtaggtaaaataaaaatcaagggcactacataacctctctggtaactccttgacattcttcagattaacttcaggatttatttgtatttcacatattacaatttgtcacattgttggtgtgcactttgtgggttcttcctgcatattaacttggttgtaagaaaggaaatctgtgctgcttcagtaagacttaattgaaaaccatataacttgagatttaagtctttggg

SEQ ID NO: 23411 - DNA, 466 bp, Homo sapiens
ctcgacccgcgctgcattgaacccccgctgcaggaattcggcacgagctgactggcagtttgagtgcaagtggaagccacatggatcgaataggagccatccgagacaacctgagtgaaacggccagcaccatggcactagctggagccagtataacggggagtctgtcaggaagtgccatggtaaactgttttaacaggttggaagtacaagcagatgtacagaaagaacggtacagtctaagtggagaatctggcacagtcagcttgggaacagttagtgataatgccagcaccaaagcaatggcaggatccattctgaattcctacatcccattggacaaagaaggcaacagtatggaggtgcaagtagatattgagtcaaagccatccaaattcaggcacaacagtggaagcagtagtgtggatgatggcagtgccacccgaagtcatgctggcggttcatc

SEQ ID NO: 23412 - DNA, 501 bp, Homo sapiens
  misc_feature (1)...(501): n = A,T,C or G
gtggggtcnnnnnaaattgagnaatcgagcgcctgcggaattcggcacgaggagcagctccactggcccgaccccgcgggatgagaagacagcttggctccccgcaggggccgtcggaaaatacccctggggttggtctgcgaccatgacgagcgaccctattggcccaataccgggaagcgaggcggagcttcctcttctccgagccccacctgggctttcagcccgcctcaggactgtgcgcctgcgcgaagtgcactggctgtgagctggacctgggctgtcttgtgtatttggagttggacagccaactacgtgactgcagccgggactggggacgatggaagcggactgggtagtacctgttgagcctaacaaagggtacaaccccagagtactggtgcttgagcaaggaatccccctgctcacctttcatgtgcaagtcctgtttgaaaatcagtacttcacagtgtaataaaattcacctggcatttactgagg

SEQ ID NO: 23413 - DNA, 548 bp, Homo sapiens
  misc_feature (1)...(548): n = A,T,C or G
aggagctcgacgcttgacggcctgacgaattcggcacgagaaataatcgtgcatctgtgggttagccttgtagaagtggaaaacattccattttccaatgcatttaaatgtaaagccaaatctgcatgttgtgaatttaagaaaacttattatcctaaaggtgcctttctcttggcatcatcccgcttgtgagaagcctagaggacgctccaggtggaaggaaatcccctgggtggttttatcttttgttacccagtgagcactggttccccgcaaatactggggaaaagcaaaaatacacaagcaagttaaaattaattttgcacatctgggaggttataaaagaaagcactaatagtagtcactgcccagactttactggccacaaatgcccagctgaagagcatgactgtggatcactggtttttccctcctgctggaaatgctgnggtggtagcggtcgattaggattttcagtggagaagcacaagacagttctgtaatttatgggactccttagccaacataaagaactgcaggaaataact

SEQ ID NO: 23414 - DNA, 488 bp, Homo sapiens
  misc_feature (1)...(488): n = A,T,C or G
ggtgtacccnnaggagaaaaaattgaccgcctatagatctgcgctgcaagctcccgcaaagaaaggtggcgagaagaaaaagggccgttctgccatcaacgaagtggtaacccgagaatacaccatcaacattcacaagcgcatgcatggagtgggcttcaagaagcgtgcacctcgggcactcaaagagattcggaaatttgccatgaaggagatgggaactccagatgtgcgcattgacaccaggctcaacaaagctgtctgggccaaaggaataaggaatgtgccataccgaatccgtgtgcggctgtccagaaaacgtaatgaggatgaagattcaccaaataagctatatactttggttacctatgtacctgttaccactttcaaaaatctacagacagccaatgtggatgagaactaatcgctgatcgtcagatcaaataaagctataaaattgcagaaaaaaaaaaaaaaaactcgggggg

SEQ ID NO: 23415 - DNA, 459 bp, Homo sapiens
ctcgacccacgctgtaggccccgcgctgcaggaattcggcacgaggagctgtcactgtggcagcatggggatgcacctagttcaggatctgaaagagctctgcctttggaatgcatgggagatagagactcggagttgttgtacatttacctttgtttaacagggcaccactgttgaattaacccattcagtcaacaagctctgaatgtctgacttcctatctattccattgtggtctgggtttcctttggtgaaattcaggctcaagtcttagcgaaatgtcagcagtctatactgacacaccagcctcatttacaaaaaggagatattaaaacagtgacagtattttttttttaagctctttacaaatccacgttttatgtattttttaatgacatgagctctccaggaaatgtacctcatccccgcagttttcctccaagtggattcatttgggag

SEQ ID NO: 23416 - DNA, 532 bp, Homo sapiens
ggaattcgcgctcgattcgccgacacctttaaattaccttcaggcgttcccttggtgacttccaaacagacggatcctaaaaatcacctggagccttgacaatcacacagactcctgcggggcagagctcatctctcaaacaaagggaacagaaaataaatacatgctaattcctggaggccacaggcttcacacatttattttcttactgtgaagtctctcctgagaggcctgctctaagtccctctctttattcaccttcctcctgagggccttggtgtgctctctctctcccagcttagagcttctgccctgcaactttccactattccaggaccaaatgtccatgctcatttcaggatgggatggcagagacctcaatggcctcattcacagacacctctgctgtccacataaccgacgttgtgaatttttgtacaaatcccactggttacaaatataaactccctcaaacccaaaaaaaaaaaaaaaaaactcgggggggggcccggacccaattgccctataggga

SEQ ID NO: 23417 - DNA, 503 bp, Homo sapiens
  misc_feature (1)...(503): n = A,T,C or G
gccattgcccgcctgcangaaatctgcacngcgctgcaggaattcggcacgagaagactggaaaggtaagttgaaggtaaagaatgtgtggtgggcctcaaatcccaggctcattcctcaaatcacttcttacttccctcacttatctttgtttaaataaggttagtacattcactaggggcaaatgggtttttctaaataaatgacataaaaaagaactggttgtctttctttaaagaaagtcttagttacaggattctgtgattaaaatccttaaatattgggttgccttctgcagctgtagtatcagtttttgaaccacagtaatgggaagaaagacaaatggattcccttagaagtaagatttctatttgcaggatgagttgggcaaggaaaaaggtagggttcatcngtgaactcaacactgtgatgagactagaacttcactttatgatataaacacaatacgattattcaatgtggtgactggggtagactgtgaa

SEQ ID NO: 23418 - DNA, 462 bp, Homo sapiens
  misc_feature (1)...(462): n = A,T,C or G
natttcccccgcgctgcatgaattcggcacgagggcaagttcatgaaacctgggaaggtggtgcttgtcctggctggacgctactccggacgcaaagctgtcatcgtgaagaacattgatgatggcacctcagatcgcccctacagccatgctctggtggctggaattgaccgctacccccgcaaagtgacagctgccatgggcaagaagaagatcgccaagagatcaaagataaaatcttttgtgaaagtgtataactacaatcacctaatgcccacaaggtactctgtggatatccccttggacaaaactgtcgtcaataaggatgtcttcagagatcctgctcttaaacgcaaggcccgacgggaggccaaggtcaagtttgaagagagatacaagacaggcaagaacaagtggttcttccagaaactgcggttttagatgctttgttttgatcattaa

SEQ ID NO: 23419 - DNA, 472 bp, Homo sapiens
  misc_feature (1)...(472): n = A,T,C or G
natgcccggcataggtgccccggtacggaagtgttccggngtccgtggggagcatgagagggaggcggcggaccgtcccgcgcggggcacgatgttgaacatgtggaaggtgcgcgagctggtggacaaagccaccaatgttgttatgaattattcagagatcgagtctaaggttcgagaggcaacgaacgatgatccttggggaccttctgggcaactcatgggagagattgccaaggctacatttatgtatgaacaatttccagaacttatgaacatgctttggtcacgaatgttaaaagacaacaaaaagaattggagaagagtttataagtcgttgctgctcctagcttacctcataaggaatggatcagagcgtgttgttacaagtgccagagaacacatttatgatttacgatccctggaaaattaccactttgtagatgagcatggtaaggatcaaggtataaat

SEQ ID NO: 23420 - DNA, 504 bp, Homo sapiens
  misc_feature (1)...(504): n = A,T,C or G
agggtnnnnnnnnttttcgacgtctgtangacttcggcacgagcgaggaccttctcggcgacggtgcgggcttcacagggccccgtctacaaaggagtctgcaaatgcttctgccggtccaagggccatggcttcattaccccagctgatggcggccccgacatcttcctgcacatctctgatgtggaaggggagtatgtcccagtggaaggcgacgaggtcacctataaaatgtgctccatcccacccaagaatgagaagctgcaggccgtggaggtcgtcatcactcacctggcaccaggcaccaagcatgagacctggtctggacatgtcatcagctcctatgagatggtggaagcaccccttgtcctgtgcttgtgggagactttgcggggaggaggcagcagacactggagatgacattcttccacacgagacggagcttcagccgggcatggtccctctcaagtatctcctggaggaaggggtatggggggcaggtgt

SEQ ID NO: 23421 - DNA, 506 bp, Homo sapiens
  misc_feature (1)...(506): n = A,T,C or G
acgggngtttttactgatatgtctggccttcggcacgagccaaaagccctcaggcgagagctgcctgaggaggcagccgctgaggaggaaaggagaaagattgaagttccaagtgagattgaggtcccgagggaggccctggagcccagtgttccccttatggtgtctttagagatctccctagaggcagctgaagaggagaagtcccgcatcagcctcatcccaccagaagaacggtgggcctggcctgaggtggaggcgccagaagctcctgcattgcccgtggtgcctgaactccctgaggtgcccatggagatgcctttggtgctgcccccagagctcgagctgctctcactggaagcagtgcacagcccccgcaggatggctgcccgggtcttctacctgctcctggtgctctcagcgcaacagattcttcacgtgaaacaagaaaagccatatggtcgcctcctgatccagcccgggcccagattccactgagggtagag

SEQ ID NO: 23422 - DNA, 496 bp, Homo sapiens
gggattgcccgcctgcggaattcggcacgacgtttctgtaatccttatgggagaccaaccttgtgcctccgggagatccactctcccacctggaaacgcacgggaagccaagcctccaaaaaagcgctgcctcctcgctccgcgttgggattatccggaaggaactcccaacggaggtagtaccactctaccctccgcacctcctcctgcatcagccggcctgaagtcgcaccctcctcctccggagaagtagagaaataaatttctcccaccctaaaccagtctttgagtgattgcagtatgactccatttccctggtgcattcatataatagttcacctggtgaaaacaatgaagattatttacaatgctaccctgctttttctggtgtcctgaaccctgaagttgtgctttttaagtcttatgatgtaatcagcacgatttcacttcctgaatttcgatgaattctaagacatgggcaagatcgggttgtaag

SEQ ID NO: 23423 - DNA, 468 bp, Homo sapiens
  misc_feature (1)...(468): n = A,T,C or G
nacctgatcgcctgcggaattcgctgaagcctttgcaaagggagaggtagacactgcaccacagggtaataaagacttaaaggagcatgtgcttcaaagttccttatcccaggagcataaagacccaaaagcaacacccccatgatacaggtctgtggggaagagtgtttatatccctacgttaactttgcctagtagaggcccttctttgcacttgcttctcatttggctattcttttcctaaggaagtccattctcctctgtacagacagctgagtcacccagtctacttagtacctggttgctgcctctgaccttttcagcttgataccctgggctttagtgtaaccaataaatctgtagtgaccttacctgtattccctgtgctatcctgtgggaaggtaggaatgggctaagtatgatgaatatataggttagggatcttttggttttaaatcacagaaaacc

SEQ ID NO: 23424 - DNA, 504 bp, Homo sapiens
  misc_feature (1)...(504): n = A,T,C or G
aggcnnnnncnattgactctgcccggctgtangaattcggcacgaggaacaatatggtcgacctatcagtgggcaaaaagaggtgcatggcatggcccagccaagtcagaacaactactggaaagccatggaaggcatcttcatgaagcccagtgagttgttgaaggcagaagcccaccatgcagagctgtgaatctagaggctctgagccactgttaacgcacaatgttcacagacatctgttgctgcctcaccttgggatccctgccacaagttccttgggcagtggccatgtcaccattgagatgaagatatacaacagaaaatagtggctgtgtttggaagcttcagccctgcacatttgaactagtcactctcccagacttgcgtgggtcagttctttctgagtagaggacttgctggtaaaggggcagatgctttttattagtactgataaaacaaactgagggaaacatccctcttagctgggaaacttttactctt

SEQ ID NO: 23425 - DNA, 466 bp, Homo sapiens
  misc_feature (1)...(466): n = A,T,C or G
attggccccccccnaatatcccccgcgctgcaggaattcggcacgagtgacaaccggcagattgtctctggatctcgagataaaaccatcaagctatggaataccctgggtgtgtgcaaatacactgtccaggatgagagccactcagagtgggtgtcttgtgtccgcttctcgcccaacagcagcaaccctatcatcgtctcctgtggctgggacaagctggtcaaggtatggaacctggctaactgcaagctgaagaccaaccacattggccacacaggctatctgaacacggtgactgtctctccagatggatccctctgtgcttctggaggcaaggatggccaggccatgttatgggatctcaacgaaggcaaacacctttacacgctagatggtggggacatcatcaacgccctgtgcttcagccctaaccgctactggctgtgtgctgccacaggccccn

SEQ ID NO: 23426 - DNA, 470 bp, Homo sapiens
  misc_feature (1)...(470): n = A,T,C or G
nattgaccgttgttaggacttcggcacgaggagaaatgatgccgttttttaaatgtgaagcagactataattctcagctctcttttcttcttagccttaaattaatattctctttcttctagttttggaaagtgtagtgggaatattcagacaaaagaggccattttccatttttaaagcttcttactggtgaaacagcccagttgtagtaggtgccagtcagtcaaggcaggggccctctctccgtcaatatggaaaactcagcagttttcctctcccccagttgtgttcttgtaacgttgttaatgggttcctttgctttttgctttctccttttctgaaaatgaatgtgttttgcctctcttttggctacatcttcaaaatatttcttttgtgcctatgtacatgtgtaaacatgccatagcatgtgtggtaggtgtcctgtattttgtttgggaaaaaaactatca

SEQ ID NO: 23427 - DNA, 504 bp, Homo sapiens
  misc_feature (1)...(504): n = A,T,C or G
aagccnnnnnnnaattgacaatcgatcgccttcggaattcggcacgaggaaaactgggtagttcatctggatgcctgtgattcgagaattgaacctgaaacccaaagtgaactggggtgggggaagggaaaaaggaaagtatcaagtgttgggaaactggattcagtgggatctacaaagaatgtcatttttgggcatcctacagtgaggagtaactgatcaggtgtctataacatttttcattctctctggaaacagactcaggtttctttggaccaaatccaaaagaacacatagctgtaacacagctgtagatgactagaatgctctgtatactttatattaaaaaatgctttgcatttcttccagtgcaatgaaattcatatggtgtcccaccttatttaatgatggtacaatttaaaatcttagtcaacttctgtagaaaggtttctctatgaaagtaaagctgttttgaaaattattatttttttacagatctttcta

SEQ ID NO: 23428 - DNA, 502 bp, Homo sapiens
  misc_feature (1)...(502): n = A,T,C or G
gagtgtnngnnnaattgagaaatcgatcgncatncggaatncgccacgagtgaattaaccatttatcaagagtgcgcctgaaaagagtagaaaaaaataaaggagcccatcaaaaaaaagttccctggcaagtgggagggaggacatgatgttaggagccctgtttggggaaggaaatgttatccaggtcatggatgccatttttgtcaatgattcgaacactgaaggttggcagattcaggatgaagcgtttctggagctcctccagacatttcctaaggagttccactgccctctcacgtgagatagctgaaagagaacacagagaccaaatatcggtgtgtagtatcggtcgaggatactgagagtcaggaaggcaccatagccgtgggctgcaaaaggggccttggccaaggctgccaggtagtccatgtaatacagcgctggcccttcatgctcatcatagccagccaggaggaggttcacatgatatggcgtccgn

SEQ ID NO: 23429 - DNA, 499 bp, Homo sapiens
  misc_feature (1)...(499): n = A,T,C or G
tggtncccnnaantagtaaatatagactccctcctacagatacgtctccgagaancgccacgagatggcagccccatctatgaaggaaagacaggtctgctggggggcccgggatgagtactggaagtgtttagatgagaacttagaggatgtttctcaatgcaagaagttaagaagctctttcgaatcaagttgtccccaacagtggataaaatattttgataaaagaagagactacttaaaattcaaagaaaaatttgaagcaggacaatttgagccttcagaaacaactgcaaaatcctaggctgttcataaagattgaaagtattctttctggacattgaaaaagctccactgactatggaacagtaatagtttgaatcatagtgaacatcaatacttgttccctatatacgacacttgataattaagatgatcaagaaccagaagatctgtgaagaaatgaaataaaatggtatttagtaagaaatctctattt

SEQ ID NO: 23430 - DNA, 456 bp, Homo sapiens
attgcccgcctgctgttagtcgccgccatgacgaccgcgtccacctcgcaggtgcgccagaactaccaccaggactcagaggccgccatcaaccgccagatcaacctggagctctacgcctcctacgtttacctgtccatgtcttactactttgaccgcgatgatgtggctttgaagaactttgccaaatactttcttcaccaatctcatgaggagagggaacatgctgagaaactgatgaagctgcagaaccaacgaggtggccgaatcttccttcaggatatcaagaaaccagactgtgatgactgggagagcgggctgaatgcaatggagtgtgcattacatttggaaaaaaatgtgaatcagtcactactggaactgcacaaactggccactgacaaaaatgacccccatttgtgtgacttcattgagacacattacctgaatgagcaggtg

SEQ ID NO: 23431 - DNA, 465 bp, Homo sapiens
  misc_feature (1)...(465): n = A,T,C or G
nttgatcccctgcagattgcgncccagttatacaacattgaattagatccacgtttcaatgatatcttgggcagacactctcgaaagcgatgggaacgctttgtccacagtgaaaatcagcaccttgtcagccctgaggccttggatttcctggacaaactgctgcgatatgaccaccagtcacggcttactgcaagagaggcaatggagcacccctatttctacactgttgtgaaggaccaggctcgaatgggttcatctagcatgccagggggcagtacgcccgtcagcagcgccaatatgatgtcagggatttcttcagtgccaaccccttcaccccttggacctctggcaggctcaccagtgattgctgctgccaacccccttgggatgcctgttccagctgccgctggcgctcagcagtaacggccctatctgtctcctgatgcctgagcagaggtgggg

SEQ ID NO: 23432 - DNA, 506 bp, Homo sapiens
  misc_feature (1)...(506): n = A,T,C or G
agcnananannnnaagggagncccaganncaccccccaatcccccgcctgatgaaccgccttgaggagatcgcacgagcctggagcccgctctaggtgggtgtcccctcggcgcttcccagctgccgactgcaccagccatggactgctacacggcgaactggaacccactcggggactctgccttttaccgaaatatgcctgtgcaattggccgagcgtggtggctcacgcctgtaatcccagcactttgggaggctgaggcaggcagatcacgaggtcaagagttcgagatcagcctggccaacatgatgaaaccccgtctctactagaaatacaaaaatttgccgggcgtggtggcacacacctataatcccagctactcgggaagctgaggcaggagaattgcttgaacctgggaggcggaggatgcggtgagccaagatcgcaccactgtactccagcctgggcaacagagcaagactccatcttggggaaaaaaaaaaag

SEQ ID NO: 23433 - DNA, 472 bp, Homo sapiens
  misc_feature (1)...(472): n = A,T,C or G
agggtgtagcngngccnnnnncctganncatgagtgcntgcggaatncgcacgagaaaatctccagcctatcaagtttgagctttctggctgcaccagcatgaagacataccgagctaaattctgtggagtatgtaccgacggccgatgctgcaccccccacagaaccaccaccctgccggtggagttcaagtgccctgacggcgaggtcatgaagaagaacatgatgttcatcaagacctgtgcctgccattacaactgtcccggagacaatgacatctttgaatcgctgtactacaggaagatgtacggagacatggcatgaagccagagagtgagagacattaactcattagactggaacttgaactgattcacatctcatttttccgtaaaaatgatttcagtagcacaagttatttaaatctgtttttctaactgggggaaaagattcccacccaattcaaaacatt

SEQ ID NO: 23434 - DNA, 479 bp, Homo sapiens
  misc_feature (1)...(479): n = A,T,C or G
attagatnnccccntnnnnnntttgcccccgcgctgcaggttataatgcatatttcttctcagtttaaatgtatgtaaatatcgaagctatatggtatgatttataaagataaatgggccaaagtgtacattgagactggcagccatctatggtaccactgaaaccctgacccagaaaagtggcttgcttggacacccagctgcctttgtttctgcattaaaccaatattgatcacacatatgacacaggctagtcctataaaagtaatgacttcatagaaatggcattataatttttaagttgatactctacaggtagctattgatataattagttttaataaaacatgctgcaaccatggtatacaacaaaaatacatttctttggtgattgaaattaaggccgtatttacaatgacttaatataagactgacttttatcctgcttcataacttgtatggagaactcaccaagaaag

SEQ ID NO: 23435 - DNA, 496 bp, Homo sapiens
  misc_feature (1)...(496): n = A,T,C or G
gaggcgggnnngtgaaaattgatggactgaaggacntgcgcgagnnccgantnccgcggatgctcccccaggcatggcacagggcctcgcctcactatggcagcagcacggcacagcacgctcgacttcatgctcggcgccaaagctgatggtgagaccattctaaaaggcctacagtccattttccaagagcaggggatggcggagtcggtgcacacctggcaggaccatggctatttagcaacctacacaaacaagaacggcagctttgccaatttgagaatttacccacatggattggtgttgctggaccttcagagttatgatggtgatgcgcaaggcaaagaagagatcgacagtattttgaacaaagtagaggaaagaatgaaagaattgagtcaggacagtactgggcgggtgaaacgattaccacccatagtgcgaggaggagccatcgacagatactggcccaccgccgacgggcgcctggttgaat

SEQ ID NO: 23436 - DNA, 499 bp, Homo sapiens
  misc_feature (1)...(499): n = A,T,C or G
agcgccccaatcgccaatagaccgccctgcggaattcggcacgagggtacccgagcctggcgaccatgcaggagtcgctgcgggtgaagcagctggccgaagagcataagcgtcgggagagggagcagcacatcgcagagtgcatggccaagatgccacagatgattgtgaactggcagcagcagcagcgggagaactgggagaaggcccaggctgacaaggagaggagggcccgactgcaggctgaggcccaggagctcctgggctaccaggtggacccaaggagtgcccgcttccaggagctgctccaggacctagagaagaaggagcgcaagcgcctcaaggaggaaaaacagaaacggaagaaggaggcgcgagctgctgcattggctgcagctgtggctcaagacccagcagcctctggggcacccagctcctgaggctntgtcccttcccaataaagcctgctacctggcagtacccctgaagagaaaaaaaa

SEQ ID NO: 23437 - DNA, 487 bp, Homo sapiens
  misc_feature (1)...(487): n = A,T,C or G
gcggnnnnattgacctcgatcgcctgcggagcagctctcatagccaataagaatttgacaaggatggatctcagtggcaacggcgttggattcccaggcatgatgctgctttgcgagggcctgcggcatccccaatgcaggctgcagatgattcagttgaggaagtgtcagctggagtccggggcttgtcaggagatggcttctgtgctcggcaccaacccacatctggttgagttggacctgacaggaaatgcactggaggatttgggcctgaggttactatgccagggactgaggcacccagtctgcagactacggactttgtggctgaagatctgccgcctcactgctgctgcctgtgacgagctggcctcaactctcagtgtgaaccagagcctgagagagctggacctgagcctgaatgagctgggggacctcggggtgctgctgctgtgtgagggcctcangcatcccacgtgcaagctcn

SEQ ID NO: 23438 - DNA, 499 bp, Homo sapiens
  misc_feature (1)...(499): n = A,T,C or G
cgggnatttaactgagttcgtggacttggccgaganaaacctgctttctcattagattactgaaatgctttaattcatactatgattttgttattagtgtgaattttaatgtagagaattcagtgtgctaagtgatatgccagtgtttcactacattcatttattaaaaaaaatcattcttgattatgcatgaaaacctgttttgtaaaataaaataaactgcttgggggtggtggttgcctttatcaatgtttcactattatcatagaatctatacttaaaaattgcattcccaagactcttaaagtagtttttatatctcactccctggtatactaagggagcataactctggagaaaaaataatttggttggttgagaatgtcttacttccctgacttggtaggggactacactcagttgaaattgcagcagacaatgctttgcactactttattaataataaacttggatggggtaaaagtggggttatactgaa

SEQ ID NO: 23439 - DNA, 497 bp, Homo sapiens
  misc_feature (1)...(497): n = A,T,C or G
aggtggccnttagaacgtatgaggacttctcgacgagagtttgcagaanaccctaaggccggcgatgaatttgtggagaagaccctgagcaccatagcgaccagcacggatgcagcctccatttcttcaacccagtgcctgtcatgaaacttgtggaggtcattaaaacaccaatgaccagccagaagacatttgaatctttggtagactttagcaaagccctaggaaagcatcctgtttcttgcaaggacactcctgggtttattgtgaaccgcctcctggttccatacctcatggaagcaatcaggctgtatgaacgaggtgacgcatccaaagaagacattgacactgctatgaaattaggagccggttaccccatgggcccatttgagcttctagattatgtcggactggatactacgaagttcatcgtggatgggtggcatgaaatggatgcagagaacccattacatcagcccagcccatccttaaataag

SEQ ID NO: 23440 - DNA, 488 bp, Homo sapiens
  misc_feature (1)...(488): n = A,T,C or G
ataaataataaaaacggaaanggggnnattttgatcgtcgtgcggcaattcggcacgaggtcaataataatggcagtactaagagatttataatcataatgtttacaatgcagcctactggattgtctctagatctgtttttcttaaacactaacagaataattctttataaataggtaagccttacacttgttaaagaaatttacctctaatttcagtctcactaatgtaaaatactgggacttaagtatacaattcagtcactaactgtacagttttatgtggggaacaattcatgcaggctactggaaaattaaatcttattaccaactccttgtgatatctttgccatcaccatcacatgagcaagatgatgttttgcagcattccccattgctgatacaaatggagagggcagagaagactttatacaaccagtttttccattgcagagtcttaagaaagattattagatgacttacctatat

SEQ ID NO: 23441 - DNA, 465 bp, Homo sapiens
  misc_feature (1)...(465): n = A,T,C or G
tcgtaaccnttgatcccgctgcaagaattcggcacgagcaaaggggaactgttgacactcgggccctttgagggggtttcttttggacttttttcatgttttcttcacaaatcaaaatttgtttaagtctcattgttagtaattctgggacaggttattaaaggatttaaatttgaacctggctttctcacagctggacataattctaggaaaataagatactatgtcgccacttggtcataatcatttagatggtggtgtagggcaaagctgttagaaagattgtagcgttttactctccctgggctttcctccgccttgctgcaacagagaggaaatgcccatgtccacagcttgtacacactgccccctcactatcttgttatccagtggcatgccaaaggagaactgaattagcttctgaggcttctgctgtaaatcagaagtgtatgttagtcaagagtg

SEQ ID NO: 23442 - DNA, 484 bp, Homo sapiens
  misc_feature (1)...(484): n = A,T,C or G
aggggagggaccgggggccnnnnnnnaattgacnaatctacgtcgtcctgcggaattcggcacgagccaaagtgcagagtctccacttgtggaacaatggtaggaatcatttaatttttaatttatattccggcacttggcctgactacaccgaggacgtggggtttgacatcggccaggcgatgctggccaaagccagcatcagtactgaaaacttccgacccaactttgatgtttctattcccctcttttctaaggatcatccaaaaacttagatgagcagaatgacaaaaaaaaaaaggccaatgaaaactcaactcctggctcctgggactgcaccaaactgctccaaactcacctcactggcttttgtgtcccaaaactaggttgtgtacagtttaattatggaacattaaataattatttttgaaatgatggctatgcaggtttaaacttttttaatgatcaaaactattaaaaacca

SEQ ID NO: 23443 - DNA, 477 bp, Homo sapiens
  misc_feature (1)...(477): n = A,T,C or G
cctagacccgcactgnaagattttgacngcgctgcaagaattcggcacgagtgaatagtcaatcactagatgaagatgctctctaccatggtttagattgcaagtgtactttataccattgtttcaacttcaacctttatttttgtatatattttttcaactacttaaactgttcatgaataggcgtactttctgtatttaaaaatggcccctcaagcaccgttaatttacattccagttatttacatgataattcatgacattctgaaacttgcctgtatattatctgaaaaatggatttcttgaggaaaagatctgtttattgtatgtaaggaaaaattttacctgaaaacaaacaaacaaaccctaaaactcagcaccactaccatttccagaagcttttttagcaagtgaatattttttacataatggataataaatgggatttattcatcatgattttctaagtaatgcttn

SEQ ID NO: 23444 - DNA, 322 bp, Homo sapiens
aattgacctgcgctgcaggaattcggcacgagaatctatgcaagcggctctggccgccatcatctcctgggatgccagagggctgcctctccagcggcttgggccggggaggggacactccagttctctagcatggcctgaggtatggggtatgtgcatgtggaggccagggtaaggtgaatggggaggctgggaggactggtgttgccctttggagcttggtgaggagggtgggcctagggcttggcgagtgccacttctggcaggtttggaaatttccaaataaatccttttgtctattgaaaaaaaaaaaaaaaaaaaa

SEQ ID NO: 23445 - DNA, 453 bp, Homo sapiens
  misc_feature (1)...(453): n = A,T,C or G
atttgccccgctctgangacattcgcacgagctgctgttccccgcgtggaggaagcccacccagcaagctctctcctaccccaggtaaaaggtgctcctttgcctgggtttgaattccagcgctgccacttcctctctgcacctcctggcaagtttcttctattccccacatttaaagcgatggcacctccgtcccagggtggtgtgaggattacccagtgtggtaggtgctcaataaatgttggtcattgttatcactgaagcccaaaaaaaaaaaaaaaaaaaaaaaaggggggccccggccccaattcccccttaagggggggggaataaaaatccatggcccgggttttaaaaacgggggaatgggagaaaaaannnnnnnnnnnnnnnnnnnnnnnntttnnttttnttttnggggggttnntttttntgnttttgtttttnggttgg

SEQ ID NO: 23446 - DNA, 398 bp, Homo sapiens
  misc_feature (1)...(398): n = A,T,C or G
ggagtctcgnnagttaaaaaatgtcgcgctggatgagacgcacttggcgaggctaccttaactatcactgaagaaagaaattttctgacacactgatggcatgtgacttgtctcctaagtcagtgaggcatcactttgtttgcataaagtatacggtttgttaaggcctttgttcttgtgagatgcaaaacagctgctagtctgcaacctagttttccctctcacctttaactgacgttttgtcctcaataattacacaaggacctagagtacctataggacaaaaagtatagaataaaaatatgcctttagtcatttggtttttcttaaaaagttgagattcttaatctgacttacatgttactttatccgtatgtctttgttagtggagaccggca

SEQ ID NO: 23447 - DNA, 512 bp, Homo sapiens
  misc_feature (1)...(512): n = A,T,C or G
agctgtgttttnnttactgactgtctcgtatgcattcggcacgagcagcaacgggaacttcctgtacagaatttgagtcggngcttggcttatggagatgcctcgtgaaacacagctgggcaagtattaatgtatatggaacagcctggatttctgcatatggataagccaccttggaataggaagaggtgttgagcctggactgtgggaggaaagagctgcgtggatagattcaaacttcctgtggtagtgctcccagtctgacctctgtagaccttcagtactcactcttcttgcttaggctctctgtgtgttgaaagccatcccgtgttgcatgtgttgttacaattttctgtgatacttgcaatttatgtttgagaagaagtgaaaagtttgccttctgacctcatttccttcttgatcagtgaacactaacattttggggacaacttagtcaattggttttccttacaacaaaataaagtaaaatgtagcagtcaaaaaaaaaaaaa

SEQ ID NO: 23448 - DNA, 481 bp, Homo sapiens
  misc_feature (1)...(481): n = A,T,C or G
ntttgacggcctaggaaanctcgacgtcctcggaatacgcacgagattgtgtgttctcactcataagtgagagctaagctatgagggtgcttaggcataagaataattttatgaactttggggacctgggggacagggtggagggaggtgagggataaaagaccacaaattcggttcagtgtatattgctcgggtgatgggtgcatcaaaatctcgcaaatcaccgctaaagaacttactcatgtaaccaaataccacctgttccccaaaaacctatggaaataaaaaaaaaaaaggaaaggcagttactagtcaatatcactagtaaacatgagtttttaaaatcctaaataaaatattagcaacctgaatccagcaattattttaaaagcaacatgaccagattgtgttttcttccaataatgtaaggctggtttcacattagaaacctattaatacattttaccatactcccttaagg

SEQ ID NO: 23449 - DNA, 450 bp, Homo sapiens
  misc_feature (1)...(450): n = A,T,C or G
tatgaatcgtgggcactgcgaanncggnacgagggaaatcggctgtgggagagaggctaggcctctgaggaggcgaatccggcggttatcatagccatcagaaccgccaccatgacggggggcaagagcagcaagatgctgcagcatattgattacaggatgaggtgcatcctgcaggacggccggatcttcattggcaccttcaaggcttttgacaagcacatgaatttgatcctctgtgactgtgatgagttcagaaagatcaagccaaagaactccaaacaagcagaaagggaagagaagcgagtcctcggtctggtgctgctgcgaggggagaatctggtctcaatgacagtagagggacctcctcccaaagatactggtattgctcgagttccacttgctggagctatcgggggcccagggatcggcagggctgctggcagagga

SEQ ID NO: 23450 - DNA, 491 bp, Homo sapiens
  misc_feature (1)...(491): n = A,T,C or G
gagggttttgaactgcatgancaattcggcacgagatttcctctgcccttttccacctcccccttccatcccaccagctgccagtggctcccagaaagccttattgagccccttgttgacacttggggctgcggaggcctctccctactggtctggcctttcctgagaggcaggtcttccgtcctcagagcctttctggaacaaggagaatgcctgtgcaggtggacacacaggcctggcctgtcgctctcacttgtcttccagcggggagcttcacgttgccgagtggaagaaccatgacctccacttgcttccaaggtgctagggaagtttcagggtacgctggttcccctctccagctggaggccgagtttctggggactgcagatttttctactctgtgatcgattcaatgcccgatgcttctgtttcattcccgaccctttctactatgcattttccttttatcaggtgtataaagttaaatactg

SEQ ID NO: 23451 - DNA, 468 bp, Homo sapiens
attgacaacaataaaatttgaccccgctgcaggaattcggcacgagcaacatatgaattttcagggttatcattcagtccaaagtacttaatatgattcttttccgtttccacatagacaatcacataatctgtaaataatgactcttacttttccactttagtcgttaggttatacctatatatatattttcttgctttactggactaatttcaacctccagcacaccaccaatgaatagcagtaataccagcataattgtctgcagttctgctgagatacgtgctctattttattggcttggctgtaggtttttattttattttttgaagaggctaatctcttacaggaaaggtttctttttatatccagtttttacatgatgaatgatttcccagtatttcataattcatgaggctgaattcctcttgaatttattaaatgcttcctgtgcaaaaaaaaaaaaaa

SEQ ID NO: 23452 - DNA, 504 bp, Homo sapiens
  misc_feature (1)...(504): n = A,T,C or G
ggggagggggccnnnnnntttgancgtatgcancgcctgcgcgacttcgccacgagattttttgtacggctttttcgagttggcttacgcagaattctcctctgagcgataaagacgacatgcttcccactgaactttttctccaattcgcgtactagccggacttggattttctggaaagatttcagttgaggaacgggaacaaagattatgatagctttccgaccaccaccaacttcaatttccttagctgccgtaatattcagctccctgagctgagccttgaggtccgagttcatccctggcttgggaaggcgtgggccacatggtcccctctggggcgtccccagcctccccgtcctctgtctaacctcaccctcttaacgttcagcggtggaaagatttttataattttaaattattactgctttgaaataaacggacgtttgagctcaaaaaaaaaaaaaaaaaaaaaggggaagcnngnaaccaaaaaannnggga

SEQ ID NO: 23453 - DNA, 405 bp, Homo sapiens
  misc_feature (1)...(405): n = A,T,C or G
cgaggtgacccaaagtcagaccaacttcacctgccccattacaaaggaggaaatgaagaagccagtgaaaaataaagtgtgtggccacacctatnaagaggacgccattgttcgcatgattgagtccaggcaaaagcggaagaaaaaggcctattgccctcaaattggctgtagccacacggatataagaaagtcagatcttatccaggatgaagcacttagaagggcaattgagaaccataacaagaaaagacatcgtcattccgagtaggaaaagccacctgcctgcagggacaccagcagcctacctcctaccccagctgtctgttgagagcagtgttgaccccagcagttagggactggctgcatagcatacttgttgggggtaaaacttgttgcttttat

SEQ ID NO: 23454 - DNA, 497 bp, Homo sapiens
  misc_feature (1)...(497): n = A,T,C or G
ggggnnntaaggggnnnnnnnnnnnnnaactgataatacgatcactcattcggcacgaggnncgaattccctgtnntaacatggatatcnnngttctgcctcacanntttcccacttgagggttgaggggcgtactggagaacaacacctcagaccatcntgaaccccantcagtggacgaaaatggnggctgttaatatanctctaaaagccatactaaaaatgctctgagggaactggctaagaatagtgggcctggtgattgtctatcacgcaaggctttgttttgtactgttcagaaatctgtcacctttctgcctgcccttgtttcctgaatgaaatgcttctggggttatttatgaaaggagtgatcctggggcaggcaggaggcagtgggcttcatggctccttgaagttattactgatcttgaccttctctttggctacctttagacaaagaatacgccaatcaatacttggggctctaagttttacaa

SEQ ID NO: 23455 - DNA, 452 bp, Homo sapiens
ataggcacctcgccgcccggctgcaggaattcggcacgagcggactatgacttagttgcgttacaccctttcttgacaaaacctaacttgcgcagaaaacaagatgagattggcatggctttatttgttttttttgttttgttttggatttttttttttttttggcctggccccaggattaaaaaccggaaccgggaagggggacaccacccggtgggaccaaccaccccccaaagtccacaaggggcccgaggcctttaatggcccatgggggttttttaaaaagccttcccaaaaaaaaaaggcgtggttccaggaagcccctggcctccctaaaaccccccccccttctttttaaggaaaagggcccagccctcccccaagcccccccaggggaggggaaaccatggctttcgggaaaataatgaaaggcaaaattttttaattctccc

SEQ ID NO: 23456 - DNA, 487 bp, Homo sapiens
  misc_feature (1)...(487): n = A,T,C or G
tgtaaataaagcgaaaanggnaaaacttgannctcgatccgcantgcggaannccgcacgagctgacatggaggatgatttcatgtgcgatgatgaggaggactacgacctggaatactctgtagatagtaactccgagccaaatgtggatttggaaaatcagtactataattccaaagcattaaaagaagatgacccaaaagcggcattaagcagtttccaaaaggttttggaacttgaaggtgaaaaaggagaatggggatttaaagcactgaaacaaatgattaagattaacttcaagttgacaaactttccagaaatgatgaatagatataagcagctattgacctatattcggagtgcagtcacaagaaattattctgaaaaatccattaattctattcttgattatatctctacttctaaacagaattctgattttttatgtcagatggatttactgcaggaattctatgaaacaacactg

SEQ ID NO: 23457 - DNA, 455 bp, Homo sapiens
  misc_feature (1)...(455): n = A,T,C or G
nattgacccttcgctgacgaattcggcacgaggcagctggggctgctcttcccgccggcggaggccctgcaggtgggcatagtggaccaggtggtcccggaggagcaggtgcagagcactgcgctgtcagcgatagcccagtggatggccattccaggtgaggcacggggcatggcgggcgcccgatgatgctggggagaccagaaggttctccacccaaaggttttctgtggacatcgtgacttcgggagactgttgataatcacagccatgtgggtgtcaggaggctgctgtaacaacgcagcacagaccgggtggcccagaccgcagaagctcatctcacggtgctggagaccagaggtgcaaaatcaaagtgtgggcaggactgcacttcctccctgcgttccagggaggctccttcctgccccgcccacttctgctggctccaggcctcc

SEQ ID NO: 23458 - DNA, 408 bp, Homo sapiens
  misc_feature (1)...(408): n = A,T,C or G
ggaattccgcacgaggccgcttgtgctgcagccatgtctctagtgatccctgaaaagttccagcatattttgcgagtactcaacaccaacatcgataggcggaggaaaatagcctttgccatcactgtcattaagggtgtgggccgaagatatgctcatgtggtgttgaggaaagcagacattgacctcaccaagagggcgggagaactcactgaggatgaggtggaacgtgtgatcaccattatgcataatccacgccagtacaagatcccatactggttcttgaacagacagaaggatgtaaaggatggaaaatacagccaggtcctagccaatggtctggacaacaagctccgtgaagacctggagcgactgaagaagattcgggcccatagagggctgcgtcan

SEQ ID NO: 23459 - DNA, 518 bp, Homo sapiens
  misc_feature (1)...(518): n = A,T,C or G
tggggtnnngcccccccccccatcgacccccctgcaggaattcgacacgcgatagagaagacttttaagagcgccgtangcagaaggagcgctatgagaaagagaagacttttaagagaaaagaagaagaaatgaaaaaagagaaagacacacttcgggataaaggaaagaaggctgaaagtacagaatcaataggcagctcagaaaaaactgaaaagaaagaagaagtggtcaagagagatcgaataagaaacaaggatcgtccagcgatgcagctttaccaaccaggagctcgaagccgaaatcgactctgtccccctgatgacagcaccaagtctggagattcagcagcagaaaggaagcagggtcgtccagggatgcagtcttaccatccaggagttcaaagccactatcaacactattttcctgatgacagcaccaactatagatactcaccagtagaagaaaagcaggaaagtagtattagctgtagaanagaaggaggaggccaggcgtgn

SEQ ID NO: 23460 - DNA, 469 bp, Homo sapiens
  misc_feature (1)...(469): n = A,T,C or G
catcgaccgcctgatggagcgcctgcgggnngcgcaaggctcccagggacctctaccagatcatcctcaaggcgctggagcggggctccctgctgggctgctccatagacatctccagcgttctagacatggaggccatcactttcaagaagttggtgaagggccatgcctactctgtgaccggggccaagcaggtgaactaccgaggccaggtggtgagcctgatccggatgcggaacccctggggcgaggtggagtggacgggagcctggagcgacagctcctcagagtggaacaacgtggacccatatgaacgggaccagctccgggtcaagatggaggacggggagttctggatgtcattccgagacttcatgcgggagttcacccgcctggagatctgcaacctcacacccgacgccctcaagagccggaccatccgcaaatggaacaccacactctacgaagg

SEQ ID NO: 23461 - DNA, 490 bp, Homo sapiens
  misc_feature (1)...(490): n = A,T,C or G
gggggtgnnaattgaccttcgtgtancaattcggcacgagccggaatgggcatgtggcggagtaccaagaccagcggccccccttggaccagcccttggaactggcccctctgaccactattactttcccttaaagcaaaacaagataataatcttttgctgcttaatttgcacatccccaccccttgacaactttaaatgctagttaggcacttagatggccctgttccttggtaaactgctcttagctaagatgcaaattctcagtgctttcaagtggattctgttgaagaaaatctcttgtaaatagcctttttgatgctgctgtgtacagtcttcattatgcattgggcagtatttctggctagagttttaaaaggaacagaaagaaaaccagcttattttccttcttacggactcatctttagcgtttatttcaaccttttgctaattctctgagaaatctgcagcactcagccatacaccaaca

SEQ ID NO: 23462 - DNA, 457 bp, Homo sapiens
cttgaccccttggaatcgcagaccagcacaccccaggacaagccaagcttcgtgcgggctcgggtgaagaagctgctggcagcgggtgtggtgtcggccatggtgtgcatggtgaagacggagagccctgtgctgaccagttcctgcagagagctgctctccagggtcttcttggctttagtggaagaggtagaggaccgaggcactgtggttgcccagggaggcggcagggcgctgatcccgctggccctggaaggcacggacgtggggcagacaaaggcagcccaggcccttgccaagctcaccatcacctccaacccggagatgaccttccctggcgagcggatctatgaagtggtccggcccctcgtctccctgttgcacctcaactgctcaggcctgcagaacttcgaggcgctcatggccctaacaaacctggctgggatcagcgagaggg

SEQ ID NO: 23463 - DNA, 475 bp, Homo sapiens
  misc_feature (1)...(475): n = A,T,C or G
attcgacacccccttanaatttggaccccgctgcaggatttctttactatcacaatatattttattctggacctctttcagatctgattcaaattacagttgtcaaagcaatacaatgcataggggaactgctacaacaacaacaacaagaaatgtgcctagaaaggataaaagggtcactggggacaaatcattgtgatgtggaactaaaatacgtccaaagcgtaattaacatgggccaggacagcacagaacatctacatcagtcttccttacacaataatcatgagaactgaacaatgaagttctttaacatgtacaaaaacctgtcatgggctggtttacacttttacaacagttgtaaagataactggataactaaagaaatgatgcagacattttaatccagagctataggtaggctcacagaattagaccccaaggattggcaataacactgatggaggcagtatgn

SEQ ID NO: 23464 - DNA, 491 bp, Homo sapiens
  misc_feature (1)...(491): n = A,T,C or G
cgcccccgaattgagncgcctgcaggaanaattgcaccgctctgcatgaataccgcacgaggtgatttgtgaggacttaactagataccccggtttcttccttgttttggcttcttttcagaatgccgggagagtacatgcagggattccatctaatcaccctcagcactctttctctggtcctgctggatagatttagatttcctttctttttttagggcctcagtctgctatctcctttggtggctaccaccactcactcccttgatatcttctactcccttgccttcaccttgcttaagactgagaagggagttagattttgtcactagctcttctttttcctcactgtgtaccccaccaaacaagattagttcaagttaaaaagaacctactggaggtaaactgggagagcacgtgttggatctgggctggtccctttcccataaaattagggccctggatgtatgttcccatagcaccccatactt

SEQ ID NO: 23465 - DNA, 477 bp, Homo sapiens
  misc_feature (1)...(477): n = A,T,C or G
aattgaccgcgnctgagaattcgttggagtgcccggcagttcgctatctggcatcctggacaaagatctctcggaccgcagcaatgacattgacttagaaggttttgactccgtggtatcatctactgagaaactcagtcatccgaccacaagcagaccaaaagctacagggaggcggcctccgtcccagtccctcacatcttcatccctttcaagccctgatatcttcgactccccaagtcccgaagaggataaggaggaacacatttcacttgcgcacagaggagtggacgcgtcaaagaaaacttccaagactgttaccatatcccaagtgtctgacnnnaaagcatccctgccgcccaagccggggaccatggcagcaggtggcggtgggccagcccctctgtcctcagcggcgccctcccccctgtcatcctctttgggaacagctggacacagagccaactccccgtcttt

SEQ ID NO: 23466 - DNA, 479 bp, Homo sapiens
  misc_feature (1)...(479): n = A,T,C or G
nattagccnccccctgcaggaattcggcacgagcgcagggtctataagggagaattccaactacctgactttcttaaagaaaaaccacagactgagcaagtggagtagcagaaccaggagcctcttccatacatgaggaaagattgctgccttttcagcagaagggaaattcctaggattggctgtcccctgccaagcttggtggagcgtctgcaccttggctgcgccgcctgtgcatttgccagtttcctcccactgagaggatggaggtgtccgcacagctttgggcctcgtgagggatctgcctcctgagcaaagagctcttgatcccgatttcatgnnnnccctgcagtaaggagcccagaaggaacatgtgtttcctgttaaaactcctcttgttctcttttcttacattatgacgtttggtttcaaggagagggtttaaaaatgggatcctgtangcagacccgggcagtctc

SEQ ID NO: 23467 - DNA, 472 bp, Homo sapiens
  misc_feature (1)...(472): n = A,T,C or G
nttcgaccgcctgcaggaattcggcacgagccagtgtgacctcggctgccctccggtggatgtaccaccactcacagctgcagggtgcccacggggacgcggtcatcctgggcatgtccagcctggagcagctggagcagaacttggcagcaacagaggaagggcccctggagccggctgtcgtggatgcctttaatcaagcctggcatttggttgctcacgaatgtcccaactacttccgctaggcccatcatggctcaagctgcccaaggcttttctgtcacctcttttgttctctcacactgaccagtcttggccttaagctgacttagaagggtttttctgaattgtctagatccatgcattatttttctagcttcctgccttgctccctattcactttacactgtgaaaggtggggggtgagtcccacttgagcgcttcctggttgataaagcaggcacttgacctg

SEQ ID NO: 23468 - DNA, 465 bp, Homo sapiens
  misc_feature (1)...(465): n = A,T,C or G
nattgacccccggctgcaggaattcggcacgagtgtatgctcacttccccatcaacgttgttatccaggagaatgggtctcttgttgaaatccgaaatttcttgggtgaaaaatacatccgcagggttcggatgagaccaggtgttgcttgttcagtatctcaagcccagaaagatgaattaatccttgaaggaaatgacattgagcttgtttcaaattcagcggctttgattcagcaagccacaacagttaaaaacaaggatatcaggaaatttttggatggtatctatgtctctgaaaaaggaactgttcagcaggctggtgnnntnnntctaagagttacctggctacagaaagaagatgccagatgacacttaagacctacttgtgatatttaaatgatgcaataaaagacctattgatttggaaaaaaaaaaaaaaaaaaaaaaaaacctcgggggcggg

SEQ ID NO: 23469 - DNA, 466 bp, Homo sapiens
  misc_feature (1)...(466): n = A,T,C or G
attagaccgccttgagcgcagctgccgctgagctccaggcttctgggggtccgcggcacccagtgtgtctgttggtgttgggaatggcgggatccgggaaaaccacttttgtacagaggctcacaggacacctgcatgcccaaggcactccaccgtatgtgatcaacctggatccagcagtacatgaagttccctttcctgccaatattgatattcgtgatactgtaaagtataaagaagtaatgaaacaatatggacttggacccaatggcggcatagtgacctcactcaatctctttgctaccagatttgatcaggtgatgaaatttattgagaaggcccagaacatgtccaaatatgtgttgattgacacacctggacagattgaggtattcacctggtcagcttctgggacaattatcactgaagcccttgcatcctcatttccaacagttgtcatctatgn

SEQ ID NO: 23470 - DNA, 481 bp, Homo sapiens
  misc_feature (1)...(481): n = A,T,C or G
ggtggggattgacgtctgtggaattcggcacgagccgagtttgggattcggctgttgggaaaaaaaaatcgcgttggtaccttttccccccacagatgagaagagtttgtaatggatttgtatttttcttaattttatgctctttagacgtttaaaagaaccaaaaaagaaacttttgcttcttcgatttcggttgggatttgcaggttaatggcctcagatccttctacagatgcccagggtttctttgtgttatttatggagaaaaaccggtcactttgtccagcgcactgtgaggcccccactcaggccagccctggcccccccttggtacttggaaccgaagttacagattatattaaaataataatgtacggaaaaaaaaaaaatggcggaaaaaaaaanttggggggatttttcctctccccccagttttggtttaattggaggggaaaagcccggcccccttctttgggttttg

SEQ ID NO: 23471 - DNA, 462 bp, Homo sapiens
  misc_feature (1)...(462): n = A,T,C or G
catggcccncttttcccccgcgctgcaggaattcggcacgagctgggcctgatccagcgcgtggtgagggagaacaaggaaggctgctacactaataggatgtaccaaagggcggaggaggagatccagaagcaaacacaagcaatgcaagaactccacagagtggagctggagagagagaaagcgcggataagagaggagtatgaagagaaaatcagaaagctggaagataaagtggagcaggaaaagagaaagaagcaaatggagaagaaactagcagaacaggaggctcactatgctgtaaggcagcaaagggcaagaacggaagtggagagtaaggatgggatacttgaattaatcatgacagcgttacagattgcttcctttattttggtacgtctgttcgcggaagattaaacttaatgaaaatctgaaaaaaaaaaaaaaaaaaaactcggggga

SEQ ID NO: 23472 - DNA, 456 bp, Homo sapiens
  misc_feature (1)...(456): n = A,T,C or G
atttgccccgctctgangaattcggcacgaggcactttccacatgcttcaaacatcaccttgtacaaggatcagttacagttgtggattcgaggcaacgtgagtgcctgtgcgaggtccatcttcatatttgatgaaatggataagatgcatgcaggcctcatagatgccatcaagcctttcctcgactattatgacctggtggatggggtctcctaccagaaagccatgttcatatttctcagcaatgctggagcagaaaggatcacagatgtggctttggatttctggaggagtggaaagcagagggaagacatcaagctcaaagacattgaacacgcgttgtctgtgtcggttttcaataacaagaacagtggcttctggcacagcagcttaattgaccggaacctcattgattattttgttcccttcctccccctggaatacaaacacctan

SEQ ID NO: 23473 - DNA, 484 bp, Homo sapiens
  misc_feature (1)...(484): n = A,T,C or G
agggataatggggcggaaaggggaanatttgaccgtcgtgaggcatncggnacgaggnttttcggatcatgtctggtggctccgcggattataacagagaacatggcggcccagagggaatggaccccgatggtgtcatcgagagcaactggaatgagattgttgataactttgatgatatgaatttaaaggagtctctccttcgtggcatctatgcttacggttttgagaagccttccgctattcagcagagagctattattccctgtattaaagggtatgatgtgattgctcaagctcagtcaggtactggcaagacagccacatttgctatttccatcctgcaacagttggagattgagttcaaggagacccaagcactagtattggcccccaccagagaactggctcaacagatccaaaaggtaattctggcacttggagactatatgggagccacttgtcatgcctgcattggtggaac

SEQ ID NO: 23474 - DNA, 488 bp, Homo sapiens
  misc_feature (1)...(488): n = A,T,C or G
agggaataaggggcgaaanggaaaaaattgaaactcgatccgcgctgcaggaattcggcacgagggaaggccaatgtcgggtagatgacaaggtgaatttccattttattctgtttaacaacgtggatggccacctctatgaacttgatggacgaatgccttttccggtgaaccatggcgccagttcagaggacaccctgctgaaggacgctgccaaggtctgcagagaattcaccgagcgtgagcaaggagaagtccgcttctctgccgtggctctctgcaaggcagcctaatgctctgtgggagggactttgctgatttcccctcttcccttcaacatgaaaatatatacccccccatgcagtctaaaatgcttcagtacttgtgaaacacagctgttcttctgttctgcagacacgccttcccctcagccacacccaggcacttaagcacaagcagagtgcacagctgtccactgggccattgtg

SEQ ID NO: 23475 - DNA, 482 bp, Homo sapiens
cttcgacggccctaatccatcggctgcaggaattcggcacgagcggcacgaggagagagagagagagagagagagagagagagagagagagagagagggcagctgctcgcttgggtgtgcctgctgtgcaccgacgcgtggggcatggcggcacgggtgtgagcgcacagtccacccacagagggaggcttcaagaatctttgcggcgctgccatctggacatctgtgtcattgaagtcacaggaggaggcttcaagaatcttcgaggcgctgccatctggacatctgtgtcattttgataacgtgtgagagatcagtgggggggagccttaagaaaatcgggtgtggtttaataaactgaacttcccgctgctttgagccggaccctcctggactggaaaggcgtgggccttatggccacctccggcctgcgcaggtgggtgtgcactctcacaagtgtgctgagcccacgcttgtgccct

SEQ ID NO: 23476 - DNA, 479 bp, Homo sapiens
  misc_feature (1)...(479): n = A,T,C or G
agcacacttgcccgcctgttgaattcgccacgaggtggagtgtcagagtggcctgtccatcccatctcattcttctgagttgacagagcagaagcttcgtgcctgtttagagggtagtataaatgagcacagtgcacattgtccccacacacctgaattttcagtcactggaggaacagaagaaaagtccagtcttctcatgagctgtctggcctgtgatacttgggctgtgatcctctagagccagcttggactcacatcattctatggggttgaagacaactcattccctctgaggagccttgtacatacaagccttttatttataacttattttgtattgaaacttttaaacaatactgaagaaaaaaaaacttttccgacatctgttcttggtcttttgtgacgcangttgaagggggaggaatagaaaaagacaaactgccttggaggagataaaccaattttatgtctatcat

SEQ ID NO: 23477 - DNA, 455 bp, Homo sapiens
  misc_feature (1)...(455): n = A,T,C or G
ttcggacnccttttcccccgcgctgcaggaattcggcacgagaaattgctcaaataatggagcaaggtgacctctcagtgagagatgctgccgtcgacactctgtttggagacttgaaggaggacaaagtgacgcgtcatgatggagccagctcagacgggcacctggcacacatcttcagacatgcggccaaggagctgttcaacgaggatgtggaggaggtcacttaccgagccctgagaaacaaagacttccaagaggtcacccttgagaagaacggagaggtggtgttacgctttgctgcagcctatggctttcgaaacatccagaacatgatcctgaagcttaaaaagggcaaggtcccattccactttgtgggggccctcgctgtgctggagggatgttaaatggcagagggcaggccagacttcagaagacatgcggatanggcctgc

SEQ ID NO: 23478 - DNA, 408 bp, Homo sapiens
  misc_feature (1)...(408): n = A,T,C or G
cgtgggttnnannaaattgatcgcgtgcggaattcggatgagctccgctgctcgccatgtcttctcacaagactttcaggattaagcgattcctggccaagaaacaaaagcaaaatcgtcccattccccagtggattcggatgaaaactggaaataaaatcaggtacaactccaaaaggagacattggagaagaaccaagctgggtctataaggaattgcacatgagatggcacacatatttatgctgtctgaaggtcacgatcatgttaccatatcaagctgaaaatgtcaccactatctggagatttcgacgtgttttcctctctgaatctgttatgaacacgttggttggctggattcagtaataaatatgtaaggcctttctttttaaaaaaaaaaaaaaaaaa

SEQ ID NO: 23479 - DNA, 489 bp, Homo sapiens
  misc_feature (1)...(489): n = A,T,C or G
agaagagaaaaattggaccgcctgttgacaccgcctgcaggaattcggcacgagggcaactgtgagtccctgcttcccgacaccagcctcatggaatatgcaacaactcctgtaccccagtccacggtgttctggcagcagggacacctgggccaatgggccatctggaccaaaggtggggtgtggggccctggatggcagctctggcccagacatgaatacctcgtgttcctcctccctctattactgtttcaccagagctgtcttagctcaaatctgttgtgtttctgagtctagggtctgtacacttgtttataataaatgcaatcgttttgaaaaaaaaaaaaaaaaaaaaaaaaaaaaaaaaaaaaaaaattctgggggggggggccgggccccaattcccccttttggggggggtataaaaatttccgggcccggtttttaacacggggggatgggaaaaaaannnnnnnttncnctattgtn

SEQ ID NO: 23480 - DNA, 450 bp, Homo sapiens
  misc_feature (1)...(450): n = A,T,C or G
nttagccnccgctgtgccccgcgctgcaggaattcggcacgagaaggctgtggtcactgggaagatggatgagaaccagtttgtggctgtgaccagcaccaatgcagccaaagtcttcaacctttacccccggaaaggccgcattgctgtgggatccgatgccgacctggtcatctgggaccccgacagcgttaaaaccatctctgccaagacacacaacagctctctcgagtacaacatctttgaaggcatggagtgccgcggctccccactggtggtcatcagccaggggaagattgtcctggaggacggcaccctgcatgtcaccgaaggctctggacgctacattccccggaagcccttccctgattttgtttacaagcgtatcaaggcaaggagcacgctggctgagctgagaggggttcctcgtggcctgtatgacggacccgt

SEQ ID NO: 23481 - DNA, 481 bp, Homo sapiens
cgagaacaattgcccgcctgctgctatatacgtaattgttgtttataagagtttatatttcagaagcagaaaatgtcaaatgatagtctttgtaaatggtggagcaccttctctatgcacatctgtcttttacatcaaaaagagctgtggtcatgctaaaattagagataactttttgaatgacttggtcaagctgtgtgtaaaatatttaaccataagtcaagtacagagtactatgtttaataaagttacatttaatgcatttattgcatatatgaatatatacatgaagaggctttatgtcttctgggatttgattttgaatgatttttaaggcagtggtgcctttaggcaagaactttcgaaactaatcattctttgcgtgttctgatttttcaggtaacatgtacactatctagaaaccatcatagcttattcaccttaaaacagtgattgtattattgaaatatatcacttagat

SEQ ID NO: 23482 - DNA, 471 bp, Homo sapiens
atttagacaaccttcgatacgccttacgaattcggcacgagccgcgccgaggggaccacgggacgccctccttcccttctcaagaaactggcccttaaagtgattgagtggctgtggagtcttcagtttgcctgcatgccaggtgcaagccaaggagttgtaagagcatccccctcataagctaccagtaggccaggactccagtgtggagggatggatctctgaaggtcacagcttggcccttctctgaagaacgtccaccagcatgtcatcccagctgcactgcaggagtgaagggtgagatgactgtcaataaggataaaggccatcttccccacccgtcactcatcctgccaagccatcactgggtaaccaggactcatgggcagtgtcacctctggggccatgctggcatctgtaacctccatccatccttgtggtgccatccagccatctatgcccccttgactg

SEQ ID NO: 23483 - DNA, 486 bp, Homo sapiens
  misc_feature (1)...(486): n = A,T,C or G
tggggngaagggggnnnaattgatttgctgtangcattcggcacgaggtggacaaaggtgtgtaccaagtgaatttaaataattggtgtggattggccagtagctaagtgggcttttaaagagtattgaagattgaaagggtttttctttcttttttaaaaaagaaaaacaaactattgattgtagataatgaaaagctagggtttgccctcttcatgtctactctccttccaaatagttatatccaaaactgtttttccctctcccctaccttgtcccccctattaaaatagaaacagggattgattaatgtcccgctcctgaatacatgtaaaatttgtacaaaaatatcttctatgaaaatgatttgtaatctgtagacttattacctgggagatgtcttgatgtaaaatcccatcctttgggttgtgggttttttgttttctccaaataaatctgatctttaaagttcaaaaaaaaaaaaaa

SEQ ID NO: 23484 - DNA, 479 bp, Homo sapiens
  misc_feature (1)...(479): n = A,T,C or G
catggaccgtntgcggaaatcgaacgacctactgctctccagcctgggcaacagagcaggattttccctctcaaacaaaacaaaacattacagaaaaacaataattttaaaacaggtagggtgacccccatttactccttggagatctagttgaatttatattgttcttccaattctcaggtctgcagaatttaaaaccctccccaaggtttttacagagtttccaccttggatgttctcctggtcccctctacctccagctcccgtgctgtggtcattgctgcccttcaacccatatccgtcataataagaaacttgggctttctaccaggttccttttaaaaatccacttgcatgtgtttgtagagtgagctcagtgaatgctggggtatcatgatggagtcacactgcctttagggctttacttggaattcttgttttcccctcttcttccattctgaataaggcttctctgcatg

SEQ ID NO: 23485 - DNA, 425 bp, Homo sapiens
gtgtggtcattgacgtccttatgacttcggcacgagctcatgtctcgcctaggccgggccgcagctgacagcgatcccaacctggacccactcatgaaccctcacatccgcgtgggcccctcctgagcccccttgcttgtggctaggccagcctaggatgtgggttctgtggaggagaggcggggtaatggggaggctgagggcacctcttcactgcccctctccctcaagcctaagacactaagaccccagacccaaagccaagtccaccagagtggctgcaggccaggcctggagtccccgtgggtcaagcatttgtcttgacttgctttcctcccgggtctccagcctccgacccctcgccccatgaaggagctggcaggtggaaataaacaacaactttattaaaaaaaaaaaaaaaaaaa

SEQ ID NO: 23486 - DNA, 487 bp, Homo sapiens
  misc_feature (1)...(487): n = A,T,C or G
gagggggcctggnactcatcggctgtcagttgggttaagggacagttgtctgctaggtgttgcttcctggagatggctgaaaagccagtccagtctgcagggaccaggccaccacccacctgatgtgggagcatttcccccaatccctgctgggctgctgaatctgggggacatagggaagctgaggctggtgttctgagtagtggcagagctgagccacagggcatgtctgaggtcagccccgagcaaaatggaatagggactcagggtgggtcaggtaactggaaagcgggcactgtgcacgcagcccttgaggggagccagggtgggtggggatcccccactgtgtgcagaaggcagcagccttggaagcagggtgtgctcctcggtgtggtcgctcgataccagaaaatgactctaaaaactgaagagtgtttgagtttcattcacacaaaacatggacatcatctgtgaggctctgtcccag

SEQ ID NO: 23487 - DNA, 464 bp, Homo sapiens
  misc_feature (1)...(464): n = A,T,C or G
nattgaccgcattgaggaatcgccacgaggttttctatgcagggcactggggaaaaggattgctgattctgactgaccctgatcagagagattaggattgtattttgacataggatttggaacccatctaaatgttgaagttccctgagacagctctccagctgctgagcctgcgccaggggctaagcagcccctaatgagaggctctgctccctttcccacctcgccaatgttgttgttgctgcctttttgatttgtatcctctgttatagacattttttaaaaacgatttcctctttcattgtgcacaagtgctgagagtctgaggccccatttctgctgtgtatatatatcctgactcggggcttttattcagcaaactgttcattcttctgtcagacaatgtcatattcaactctgttcatattaaaccactgtgaagcaaaaaaaaaaaaaaaaaaact

SEQ ID NO: 23488 - DNA, 471 bp, Homo sapiens
  misc_feature (1)...(471): n = A,T,C or G
cttcgaccncccattgcacccgccntgcagaattcggcacgaggcgacttagtagaacgctgcatgcgagtgctgtactaccgagatgcccgttcttacaaccgggtgagggatgtgctgggaacctaattggcgggctctggctacttgcaatccctgggtctctatgctttgaagaacagattgccttacttgtgtgactcctattttcacattggggaagacctccacctgacctttcatttaaggacttaaggcgtgggcattattgaatgctctgctttcttccagtttcaaatcgccactgtcaccgaaaaaggtgttgaaatagagggaccattgtctacagagaccaactgggatattgcccacatgatcagtggctttgaatgaaatacagatgcattatccagaactgaagttgccctacttttaactttgaacttggctagttcaaagatagactcttct

SEQ ID NO: 23489 - DNA, 461 bp, Homo sapiens
  misc_feature (1)...(461): n = A,T,C or G
aatagaccgccnncggcaccgcctgcggaattcgcacgagccggtgcgggcggcacccagagactcacccgtgctgttgggaagtcgctggcgatggagatggtcctcaccggtgaccggatctcagcccaggacgccaagcaagcaggtcttgtcagcaagatttgtcctgttgagacactggtggaagaagccatccagtgtgcagaaaaaattgccagcaattctaaaattgtagtagcgatggccaaagaatcagtgaatgcagcttttgaaatgacattaacagaaggaagtaagttggagaagaaactcttttattcaacctttgccactgatgaccggaaagaagggatgaccgcgtttgtggaaaagagaaaggccaacttcaaagaccagtgagaaccagctgcccctgcttcacacctctgcttggagaggacaagtgcagcctgtcagtt

SEQ ID NO: 23490 - DNA, 493 bp, Homo sapiens
  misc_feature (1)...(493): n = A,T,C or G
cttcgaccccccnttnnnnnntttagacccgcgctgcaggaattcggcacgagcgccggggttggaccagtctcccgggcatggcacgccctggttattctgtacccgtgatttgtggcggggcaagacgttaagttgggtgacaccgaggtgagccacggtcctcggcaccagatgaggaaccactgtctcaataagtgacaccagtgatgctgttaaacaaggacaatccggttcatggattgtgacaacgcacgctgacatcaagcagaccctgccgtcaggtacagagggcaccacagtgaccaggaactgctgtcctttcataccaggttttaggaggctttaccagaaggaatggaaaatgctggtggggcagtaagattgaacagcatctgaggactggttcttgcacaaacctttaaatctttcaggactttgacatttggttattctttgaaccaattaanaactattctggggtggtggtaga

SEQ ID NO: 23491 - DNA, 485 bp, Homo sapiens
  misc_feature (1)...(485): n = A,T,C or G
catagcnccgcgntgcaggaatttggcacgaccgtaatcgccatcattgctctgtttgttcagataggaaaggaacatgttggcttgaaggctgtgactgaaatcctccaagatattcagtataaggggaagtccaaaacaataccttgctttaatcctaacactttattaccagaccctctgctgcgggattactgggtgtatgaaggctctctcaccatcccaccttgcagtgaaggtgtcacctggatattattccgataccctttaactatatcccagctacagatagaagaatttcgaaggctgaggacacatgttaagggggcagaacttgtggaaggctgtgatgggattttgggagacaactttcggcccactcagcctcttagtgacagagtcattagagctgcatttcagtagccaaagaggacaggaacaagtctgtcttcatgagggtatgtccagattaagtaaggaacatg

SEQ ID NO: 23492 - DNA, 468 bp, Homo sapiens
  misc_feature (1)...(468): n = A,T,C or G
nttggaccgtctttaggacttctgcacgagggaaggcagctgtgtgagctgccaagctagtgggcttcaggtgcaagggtacctgtgccacaccaacctgggagcacacagaatactattaatgtgcacccacctggtctccccaggcaagaaggtatcctcttcccaaggtgtacccactgaatgctgttactacatattgagagtcattttatgcatatgcattctacctttcctgctttatgagtatttttaagcttttagttcaaggttatattcagaaaatatttcccagtataatgatacatcgtagcctaagaaatattttctcaatgtaattcccttcccagctacccaaatgctacagagaaatgttttctacttggccactatcagggttcgtcatctattgtgttgactattaatggctttttgattgggtaaggattttgctatagatgaaggtag

SEQ ID NO: 23493 - DNA, 466 bp, Homo sapiens
  misc_feature (1)...(466): n = A,T,C or G
cctagacccgccctgantattcggcacgaganaaggacacgtggaatgcctcanggtcatgattacacatggtgtggatgtgacagcccaagatactaccggacacagcgccttacatctcgcaggcaagaacagccaccatgaatgcatcaggaagctgcttcagtctaaatgcccagccgaaagtgtcgacagctctgggaaaacagctttacattatgcagcggctcaaggctgccttcaagctgtgcagattctctgcgaacacaagagccccataaacctcaaagatttggatgggaatataccgctgcttcttgctgtacaaaatggtcacagtgagatctgtcactttctcctggatcatggagcagatgtcaattccaggaacaaaagtggaagaactgctctcatgctggcctgtgagattggcagctctaacgctgtggaagccttaattaaaaag

SEQ ID NO: 23494 - DNA, 463 bp, Homo sapiens
  misc_feature (1)...(463): n = A,T,C or G
cttgaccgctatagatcntcatgcgangatctgagaagatgaaggtttaaatattgttgaaagttgcagttttttaaatgtgttcctttttcttctgtgaatatttagggcaatcgtgtcgctaatagaatatgtagtacagggggtggggaggtaaattcctctgacttgccaaagaaaaagaagggaaccacagtggatatgctagcattttaactgtgcacagggcggtagtgtgggaaaagtgtttccattctgggaaaagcccaaaccgaatacggtcagcagtcaactccagggtttgggcttgattcctgttgaataatagccttgagcattctttgcggctaaataaattcttaaatctgcctagttttgatgaattcttttgtgaaacttgaaagagaatagacagtctgacatatagaattaatacaaaacaagttaacaaccatttaactgc

SEQ ID NO: 23495 - DNA, 499 bp, Homo sapiens
  misc_feature (1)...(499): n = A,T,C or G
attagccncgcgctgcanngaagacgttcgaccccgcgctgcaggaattcggcacgagggaaactggaggagactcaggagcttctggcagaggttcagggactgggagatgggaagcgaaaggccaaggacccccctcggtctccgccggattctgagtcagagcagctgctgctggagacggaacggctgctgggagaggcatcatcgaattggagccaggcaaagagggtgctgcaggaggtcagggagctgagagacctgtacagacagatggacctgcagaccccggactcccacctcagacagaccaccccgcacagtcagtaccggaagagcctgatgtgagggcagggtggnnnnnagaacttgtcgggttggacagactcttatctccgtgttgctggataaagcttttttatttacctcaatcaaaaaaaaaaaaaaaaaactcgaaattagcgggacaaggggggccagactgacacaaaattgcaaa

SEQ ID NO: 23496 - DNA, 497 bp, Homo sapiens
  misc_feature (1)...(497): n = A,T,C or G
ggggatatgacggctgtaganatcggcacgcgcacggatctaagttattctcccagccagagcccgagctcctgctccctgggaaaagtggcgtatggccctgagctgggctttatattttatatctgcaaataaatcacattttatcttatatttagggaaagccggagagcaacaacaaaaaatgtttaagccgggcgcggtggctcacatctgtaatcccagcactttgggagtccaaggagggggatcgcttgagtccaggagtttgagaccagcctggacaacatggtgaaaccccgtctctacaaaaaatacaaaaattagccatgcatggtggctcatgcctgtagtcccagctacttgggaggctgaggcaggaggatcacttaagcccagaaggcaaaggttgtagtgagctgagatcgcaccactgcactccagcctgggcaacatagcaaaatcctgtctcaaaaaaaaaagttaaaaaatattgc

SEQ ID NO: 23497 - DNA, 508 bp, Homo sapiens
  misc_feature (1)...(508): n = A,T,C or G
ngaggcgtggggnggnccttgannccccctcgagcgcctttangaattcggcacgagggacagcaggtgtaaagggaaagtcaccaacacctgtggtgaacttagcaaggatgcactacagcatgtttctaaacagagggcagtgtctgcatatattttcttgggagttcataaaattttcattctaaaatactgatatattgtcatttgaatgataattctcaataatctaatagaaatctacttgggaatttgtgggtaaccactttataatgagtaccgctgcgagagctaagcacccctgtgtgcatccagggctgccgtcacagcagctggtgccatgcacaggttgcaaggaatggtttggttttagcaaaacatgcttccgttgtttatttcgttaaatttttttcttgacctccccgcccctggcaaaaagccaaaagctcttaacgggtccatgagcttctgaagcttcagatttttctattaggaccaagactttatc

SEQ ID NO: 23498 - DNA, 504 bp, Homo sapiens
  misc_feature (1)...(504): n = A,T,C or G
ngaggcggtnnnggggattgaccgccttaggaattccgtacgagagaggatagaagactatggactaaaacctgttccaggggacctcgttctcaaaggagccacagccacctatattgaggaagatgatgttaataattactctatccatgatgtggtaatgcccttgcctggtttcgatgttatctacccaaagcataaaattcaagaagcctacagggaaatgctcacagctgacaatcttgatattgacaacatgagacacaaaattcgagattattccttgtcaggggcctaccgaaagatcattattcgtcctcagaatgttagctgggaagtcgttgcatatgatgatcccaaaattccacttttcaacacagatgtggacaacctagaagggaagacaccaccagtttttgcttctgaaggcaaatacagggctctgaaaatggatttttctctacccccttctacttacgccaccatggccattcgagaagtgct

SEQ ID NO: 23499 - DNA, 458 bp, Homo sapiens
  misc_feature (1)...(458): n = A,T,C or G
cggcgggtcccccncattgacccccaaatgacccgcgctgcangaattcggcacgaggaactacctttttaccaaaaagtgtggctacttaagggtctttgtgactttgtgtatgaaacacaaaaggaagttcaagatgctgtacttggacagcctatccatgaatgcagggaagttattcttggttatgattatttggagaatgcttatgtacattttccacagttctgtggtgcagatgtacggatttataaacagagaccctttcaggccccagaatttccaattccacccattaaaatacaaagagtacctcggattaaattggagaaattgaagtgtgactatgttagtacaagtaatggagaacatagatgtagcagagatagcctgccctcttccttcaagaaagagcaggaaaataattttgatccagcttgctgtcctgctaaaatgat

SEQ ID NO: 23500 - DNA, 465 bp, Homo sapiens
  misc_feature (1)...(465): n = A,T,C or G
natttgacccgcgctgcaggcggtacgagatgactggcatgagccaccatgccagacttcccattttactttctgcaagctgtttccctagcagctccctctaggggagaggtgaaatcttgcaagttgtagcaagagcacacaggaaacccctaactttcctataccccacccgcctcttcccctttctgtcccgggatacctggcggcaagagacttcttggctattgtccatgctcccagaatcaagcataaatgccagacacggcgattgagaagccaatcagtgaaccctttggcaaagcccccatccacacctggcactcccctctaccaatccctggcacagggttcctggagagcaggtgctgtacattttacagctttacaatggggctgttgacagccataattagggaggcatgaattatgcggctataatgcagagccctacaattaaggcgg

SEQ ID NO: 23501 - DNA, 473 bp, Homo sapiens
  misc_feature (1)...(473): n = A,T,C or G
catcgacccccaatagacccggcatgcaggaattcggcacgagccaaccctcattctgcagggccacctggtgtgtggaggtggcgggaggggtcagtgactctgggggtctcctcagtgacccccatacctcatcatgaacccttgggtagcttgattctgcctaccatccaggaaaacttgtgctggaattgctgatggaaacaattaaatatttactattaaaaaaaaaaaaaaaaaaaaaaaaaaaaaaaaaaaaatcttggggggggggccgggcccccatttccccttaagggggggggaaaaaaaattccgggcccgggttttaaaaccgggggaaggggaaaaaaaannnnnnnnnnnnnnnnnnnnnccccncccccccccttctntccctccntttctcctttctctctttnctcctctcctctctttcccttcctcctttctcttctccccctccccctccc

SEQ ID NO: 23502 - DNA, 468 bp, Homo sapiens
  misc_feature (1)...(468): n = A,T,C or G
ntttgcaccgcgctgcaggaattcggcacgagcagtggggtcgggaagtgagtttctttgcagtgagcagtgcagtggaagtcgggcacagaggtagcagacagatgtgaagcagtggtgaaggccatgtagcaagtggggaaatacatccaaagggcctgggagttggggggtgcccaacgcaatccttgggggtgcagggtggagcagaaagtgaaggagggacacgtgcaagagtggtgtgcatggtggtgtgacatgaggaccgttcctaggatgggacagtgggtcaggcaggacaaggagaaagcagggcagaatgatgcctagaggaccacatcaggcatggctgacagcttgtgcccatgggctgtggcgtatgtcagatcgcagggtaggaacgagtctggcctggtgccggcccagtgtttcctcagctcatccgccctctgttgctccctagcattc

SEQ ID NO: 23503 - DNA, 498 bp, Homo sapiens
  misc_feature (1)...(498): n = A,T,C or G
ggggaaatcgatgcctgtagaattgaccgcgatgatggcggcgcgaagtctgtgtctcacgagaagcagcgttccagggactccgttcccgccacccgttcagcaaccctctacacctggacccgacctcctcgccttggaggaagaatataagcgtttaaatgcagaattgcaggcaaaaacagctgacgtggttcaacaagctaaggaaataataagagatcggcaagaagtacgatctaggcctgtttcaacacaaatgaaatcatgtgatgacgaagatgattacagtttaagaggtctgttaccatctgaagggatagttcatcttcattcagaaactaagccaaagaccaaaaacattgatcctgtaaacaaggttcaaaacaaattacactctgcaaataaaggaaggaaaacaaattcaagtgttaaattgaaatactctgatgtccaaactgccgacgatgttgccattccagaggatttctcagactn

SEQ ID NO: 23504 - DNA, 461 bp, Homo sapiens
  misc_feature (1)...(461): n = A,T,C or G
gcctgcgtnccccncaattgaccnccnattgacccngcgctgcaggaattcggcacgaggcacagcgaggcgccggcccagactccactccccagctgtgaaaggaggagctctacggtgactttgaagacttggaaacaggggacgtgcacaagggaaaatcgggccccgatactcagaatgaagatgtagagaaacaaggaagaaattgaccctgacgaagaagaaagtgccaagaaaaagcatttggataagaagagaaaattgaaggagatgtttgatgtggaatatgatgaaggagaaagcacatattttgatgatcttaaaggagaaatgcagaaacaagcacagataacagcatacaggttttccccccccaccccgtcatgtacagctgaatcatgcagaatttgaagatcaagatgatgaagccagagttcagtatgagggttttcgacctg

SEQ ID NO: 23505 - DNA, 446 bp, Homo sapiens
agtggacctgtttcctgcgattcgcacgagccacaggaacctcttcagaaagtgtgctttatgctgaaacagaatactgttaaaggaaaaaaaagaggggggaagatcaggtcatactatctactctcctcatctctaacagctcaggatctcttagcattttaattagatgtaattgtttgtctttaactgtcaaaaagtttggttctgtgtctgtgttttaataagacgagaggacgagcgattgaggtgtatggagagaaaacagacctaatgctccttgttcctagagtagagtggagggagggtggcctaagagttgagctctcggaactgcatgctgctggacagtatcactgtctttcctagatggcagtcactgaattccattttttcaaggtaatttcttgtgcctctaatagcccaagaatgggaggttgatcaga

SEQ ID NO: 23506 - DNA, 502 bp, Homo sapiens
  misc_feature (1)...(502): n = A,T,C or G
tggnnngnnnnnnaattcgcctgcctgcangaattcggcacgagctgaatcctccagaggaggaagctgtgacatccaagacctgctcggtgccccctagtgacaccgacacctacagagctggagcgactgcgtctaaagagccgcccctgtactatggggtgtgtccagtgtatgaggacgtcccagcgagaaatgaaaggatctatgtttatgaaaataaaaaggaagcattgcaagctgtcaagatgatcaaagggtcccgatttaaagctttttctaccagagaagacgctgagaaatttgctagaggaatttgtgattatttcccttctccaagcaaaacgtccttaccactgtctcctgtgaaaacagctccactctttagcaatgacaggttgaaagatggtttgtgcttgtcggaatcagaaacagtcaacaaagagcgagcgaacagttacaaaaatccccgcacgcaggacctcaccgccaagcttcggaa

SEQ ID NO: 23507 - DNA, 463 bp, Homo sapiens
  misc_feature (1)...(463): n = A,T,C or G
nttgccctgctgcggtgctccgggctctgccgatcgcctatgtgacagcaaaggggcctacctgctcatggagttagccaagagccaggacaagactctcaagatttatgaaggtgcctaccatgttctccacaaggagcttcctgaagtcaccaactccgtcttccatgaaataaacatgtgggtctctcaaaggacagccacggcaggaactgcgtccccaccctgaatgcattggccggtgcccggctcatggtctgggggatgcaggcaggggaagggcagagatggcttctcagatatggcttgcnnaanaaaaaaaaaaaaaaaaaccctggggggggggccgggcccccattcccccttatgggggggggattaaaaatccctggcccggggtttaacaacgcggggagggggggaagnnnncgcctgtnntcccngcnctttgggaggccaaggg

SEQ ID NO: 23508 - DNA, 509 bp, Homo sapiens
  misc_feature (1)...(509): n = A,T,C or G
tgcggcnnnnnaattgatcgcctgtctgtangaattcggcacgagactttattaacctgtaacattcatcattttaaaggagtatataaaaactgtcaaaatgggtcagaaacaaagtttgcgatgctcataatcatcttcagcagtggcaacatttaactttttgagtcagtcgcaacagactggcaatataactaacacaatacataacgataagtgttgttcttgataaaaaaccaaattatttttctatttacaatttttagaaaaggtttaatgtaaaaatatttttcttctttatatatttccctgccatgataatgttaaaacatatcaagatcctcctcaaacttcaagggtgaaaagcataccattccattttagttgaaatattccttcacatagccaacacantttttcaaggcactctagctactacaggaaaaatgttcctctttgctactgattattttccctcanacttatctaaattaaacactggtataacn

SEQ ID NO: 23509 - DNA, 474 bp, Homo sapiens
  misc_feature (1)...(474): n = A,T,C or G
agactcgcccgcctgcggaattcngtttgccccgcgctgcaggaattcggcacgagatggttgtctctttcccccgctatgtcatangtagtggaggaagcgaacgaagtgaacgctgaatgtgacgcatttctgaagagctcagctgtcaccgggcatagcctggaagccccaagtctgttctgactttgcctggctgtctccttgacccgcctcctagatcattgtccttgatgtccaggctgggtcatttaaaatagagatgcaatcaggaaggttgggggacttgggactgtggctgaattgagaccttgctgatgtattcatgtcagcacctgagtcacagcccaggtgcccggaagcagcctcttcgcataggcagtgatttgcgattactttaaagctcaccttttttcttcccctctctgttcgctgctgtcagcataaatgattgtgttcccttccctatggaan

SEQ ID NO: 23510 - DNA, 472 bp, Homo sapiens
  misc_feature (1)...(472): n = A,T,C or G
nggcgggnttttnttatgtactgagtggcattcggcacgagagagggcagaacttcagtaaggagacctgtctgggcaacggtttcaggacacgcggtggggaaagcgactagcctccggcggggcagggcgggctgtccttacctgcagaaccaccggccacgatctgccgagaagcctcgcgcactaagctgacttcaggcttggcggacatcttcgccaggcgggaggacaagggagtgggctgagatgcgtcaacgagctcgcagcctgcacagcctactgatccagagagccccggctgggctggtcctcaagcgcgttggctccctgtggagcagcaatccggcgactgctggaaagcgagggttcgaggcgcagattcgtcgcgcgatctccggcgcgtcggaacctgttcgcagcgctctcgcagaggcgccctcggctcccaaaatgtctctggaaagaagaa

SEQ ID NO: 23511 - DNA, 470 bp, Homo sapiens
  misc_feature (1)...(470): n = A,T,C or G
nttggcccctctgctccgcgctgcaggaattcggcacgagcagaaactggggaatgttctgaagtagaggccatctattaccgttccacctgagataggcttaattgtcacttctttctgttttcaacttctccttttctatcaacagctctttggtattgtgtagtgagcctaattctcttaccttaaaaggaaatatgctttattttcactttgtgttccttcttaaattgtcctataactatttccctttattggtagatatctttgaaaagtagtctatactcccatgttttacttcacattcacttctgaaaatgctaaaacaacttttgcccttgtcctttattaaaaacggattttgccaccagtctttaaaaaaatgataaattcctcttcaaaaaatacaaaagttaggcccggcgtgggggctcacgcctgtaatcccagcactttgggaggccaaggcn

SEQ ID NO: 23512 - DNA, 525 bp, Homo sapiens
  misc_feature (1)...(525): n = A,T,C or G
tgggtnnncncagggagccccccaatgggacggcaatagaccgcctgtacgaattcggcacgagagatgggaaagaattccgtcttgctcagatgtgtggacttcatattgttgtacatgcagatgaattagaagaacttatcaactactatcaggatcgtggctattttgaagagctgatcaccatgttggaagcagcactgggacttgagcgagctcacatgggaatgtttactgaattagctattctatactctaaatttaagcctcagaaaatgagggagcacctggagctgttctggtctagagtgaatattcccaaggtgctaagagctgcagaacaagctcatctttgggcagaactggtgtttttgtatgacaagtatgaagaatatgataatgccataattaccatgatgaatcatccaactgatgcctggaaagaagggcaattcaaagatatcattaccaaggttgccaatgtggaactatactacagagcaatacagttctacttagaattca

SEQ ID NO: 23513 - DNA, 403 bp, Homo sapiens
  misc_feature (1)...(403): n = A,T,C or G
ggggggggaagaggcccnnnnnnnttttganttactgcaccgcctgcaggaattcggcacgagcgcacacgagaacatgcctctcgcaaaggatctccttcatccctctccagaagaggagaagaggaaacacaagaagaaacgcctggtgcagagccccaattcctacttcatggatgtgaaatgcccaggatgctataaaatcaccacggtctttagccatgcacaaacggtagttttgtgtgttggctgctccactgtcctctgccagcctacaggaggaaaagcaaggcttacagaaggatgttccttcaggaggaagcagcactaaaagcactctgagtcaagatgagtgggaaaccatctcaataaacacattttggataaaaaaaaaaaaaaaaaa

SEQ ID NO: 23514 - DNA, 500 bp, Homo sapiens
  misc_feature (1)...(500): n = A,T,C or G
ggcncacccaatcgtacgccgtnngattgagcggctttggaatncggcacgagccacaccaacgaggtgatctagcagatacatggcaacgtgtgaactgcaacaacgcctggtgccccagcaccaaccttccaagtgtaaaaacaatgtgctgctgcttcacttccgccctccggttatcaagcaaaatgtctcttgtggcccatcttactggaagagagttccgggaaacatagcctcaccaaggtgacacattacaaagccaccctaccatgaatccgctcccaagggtctcactgctcacctgaggataactcaatataactatgttgctgaaaatgcaaagctgaagaccatggatttcatggtgattccagcaagtacagagattctatgaagcccacccagaaaaaacttgctggtcctggctatttttgtgtcatttattcaagtattgagaacctggcctgtggtaggcactgtacttaatactatgatat

SEQ ID NO: 23515 - DNA, 496 bp, Homo sapiens
  misc_feature (1)...(496): n = A,T,C or G
ggcggtcnnnnaattgacggctgtggatcggacagctcacctgcggtcaggagtttgagaccaacctgaccaatgtggtaaaaccccatctctactaaaaatataaaaattagccaggtgtggtggcaggcccctgtaatcccaactactcaggaggctgaggcagaatcacttgaacccaggaggcggtgagctgagatcatgccactgcattctagcctggcgacagagcgaaactccgtctcaaaaaaaaaaaaaaggtattttcaaggggaaatttttatttgttaacctaaaagggaagggaaagggtttttacggtttaaagaaaaaaactacaaaatggcttaacaaaagaaggggggaggaccattttggcaagtaatggggattttttttttaaataaaattcgggggaacttgggcaaaaattgcgggtttgaaacaagggttaacaagccccaggggggttggttgcccccataaccccatattt

SEQ ID NO: 23516 - DNA, 504 bp, Homo sapiens
  misc_feature (1)...(504): n = A,T,C or G
gacggtgcaattgacggctgtggaaatcgacacgccttggnannnnggctcggnngaagggactgacgttgggagactcaggtgttgggaaatcttcgttagttcatctcctatgcctaaatcaagtgctgggaaatccatcatggactgtgggctgctcagtggatgtcagagttcatgattacaaagaaggaaccccagaagagaagacctactacatataattatgggatgttggaggctctgtgggcagtgccagcagcgtgaaaagcacaagagcagtattctacaactccgtaaatggtattattttcgtacacgacttaacaaataagaagtcctcccaaaacttgcgtcgttggtcattggaagctctcaacagggatttggtgccaactggagtcttggtgacaaatggggattatgatcaagaacagtttgctgataaccaaataccactgttggtaatagggactaaactggaccagattcatgaaacaaagn

SEQ ID NO: 23517 - DNA, 467 bp, Homo sapiens
  misc_feature (1)...(467): n = A,T,C or G
nttttgcccgtcctgcangaattcggcacgagggctcccagggcaagggttaaggcctgaatcatgagcctgctggaagcccagcccctactgctgtgaaccctggggcctgactgctcagaacttgctgctgtcttgttgcggatggatggaaggttggatggatggtggatggccgtggatggccgtggatgcgcagtgccttgcatacccaaaccaggtgggagcgttttgttgagcatgacagcctgcagcaggaatatatgtgtgcctatttgtgtggacaaaaatatttacacttatggcttggagctattcaagaggaaatgtcacagaagcagcttaaccaaggactgagcaccctctggattctgaatctcaagatgggggcagggctgtgcttgaaggccctgctgagtcatctgttanggccttggttcaataaagcactgagcaagttgaaaaaa

SEQ ID NO: 23518 - DNA, 499 bp, Homo sapiens
  misc_feature (1)...(499): n = A,T,C or G
ggtggggaggggggnnnnnnaattgaccgtctgcagccgtctccagctgagcgcttttgcccgctttctccaaccagtggctaagggatgcactatggactcagaaagaaatgtcatatttaagttctgcctctgatttctctgctcttagctgatctaaggtttttctagactccttagtttccactcacagtgctgggtaatggagccctaccgcactgattgagaattgccggccagtgggttggtacagagcaaattgtccttgctaacaacctttttcctttgctgttggattccactaagtggtgagaggggtcagttttagatttttgcaattgcccagcgtggagacaggccggctctattcgagaataagtgataggcacaggaagaatttggcagcgttcccgggttgattctattttggtctcttgaacacattattcttcctgatagaacaaatccctgggatggtnaggacagcattcacggaagg

SEQ ID NO: 23519 - DNA, 512 bp, Homo sapiens
  misc_feature (1)...(512): n = A,T,C or G
agctgttataattganatcctgtngacctctgcacgagcagctntcttcttcagtgataaataaaactagtcctccacagcctgtgaatccccctagacctttcaagcatagtgagcggagaagaagatctcagcgtttagccaccttacccatgcctgatgattctgtagaaaaggtttcttctccctctccagccactgatgggaaagtattctccatcagttctcaaaatcagcaagaatcttcagtaccagaggtgcctgatgttgcacatttgccacttgagaagctgggaccctgtctccctcttgacttaagtcgtggttcagaagttacagcaccggtagcctcagattcctcttaccgtaatgaatgtcccagggcagaaaaagaggatacacagatgcttccaaatccttcttccaaagcaatagctgatggaagaggagctccagcagcagcaggaatatcgaaacagaanaaaaagtgaaattggaagacaaaagctcaa

SEQ ID NO: 23520 - DNA, 493 bp, Homo sapiens
  misc_feature (1)...(493): n = A,T,C or G
aggggncaattgatcggctgtagattgcggcacgagctaccccgtgtggtccatagccgagcacgggcctacccactgcctggtcaagcagctacggccactgctggccacatacggggtcactgcctacctgtgcggccacgatcacaatctgcagtacctgcaagatgagaatggcgtgggctacgtgctgagtggggctgggaatttcatggacccctcaaagcggcaccagcgcaaggtccccaacggctatctgcgcttccactatgggactgaagactcactgggtggctttgcctatgtggagatcagctccaaagagatgactgtcacttacatcgaggcctcgggcaagtccctctttaagaccaggctgccgaggcgagccaggccctgaactcccatgactgcccagctctgaggcccgatctccactgttgggtgggtgggccctgccgggaccctgctcacaggcaggcttttcctccaa

SEQ ID NO: 23521 - DNA, 502 bp, Homo sapiens
  misc_feature (1)...(502): n = A,T,C or G
gagccnnnnnnnattgacatcgatcggctgcggattcggcacgagtttataacctggatgtctatggataccaaatatatgataaaatgggcatttatggttcagtaccttatctcctggcccacaaactgggcagaactataggtattttctggctgaatgcctcggaaacactggtggagatcaatacagagcctgcagtagagtacacactgacccagatgggcccagttgctgctaaacaaaaggtcagatctcgcactcatgtgcactggatgtcagagagtggcatcattgatgtttttctgctgacaggacctacaccttctgatgtcttcaaacagtactcacaccttacaggtatttgcacgaagaagtgccagtttcttgttctgttatatatccaatgtcccatgtgtcatcacgggaagttaatatttgttgtatactatgtagagtttataacttacccaagcattntaattagcaagcatttctgttc

SEQ ID NO: 23522 - DNA, 471 bp, Homo sapiens
  misc_feature (1)...(471): n = A,T,C or G
nttcaccctctgcgccgcgctgcaggaattcggcacgaggtaaattagatgggataatagaattcataacccataatattctttgaaagctaagctttaaacttcattttatgtcctttcacaaataaattagtttaaaacagaaagtggctacttgccattttgacatcaactcattttgcgaggcttaggcagctagacatcgtttaaaacaaaatattaacttatattacatgtgtatctatctattgtcagtcgtctctcagttcttgaggtatattattttaatcattccatgccttaatatgcttgcaatacaagaatatcttcagatgggtgaataccaaaagggcttcagtttttagtcagaaatcaagcattgggctgtggtagccaaaaaccataggttagctaaaaagatcatgatacaattattttattaagtcatgggtaataacaaatgaatccaga

SEQ ID NO: 23523 - DNA, 476 bp, Homo sapiens
ggcggggtttttatgtactggtagcatcggcaggtccggcacatgtttccgcggagcggacccagcaatgacggatgatatcacctcttcttctctggtgagagtctgaggatagagacttttttctcaccatgaatgtcaccccagaggtcaagagtcgtgggatgaagtttgctgaggagcagctgctaaagcatggatggactcaaggcaaaggcctcggccggaaggagaatggtatcactcaggctctcagggtgacactgaagcaagacactcatggggtaggacatgaccctgccaaggagttcacaaaccactggtggaatgagctcttcaacaagactgcggccaacttggtagtggaaactgggcaggatggagtacagataaggagcctttctaaggagaccacccgttataatcatcccaagcccaacttgctgtatcagaagttttgaagatggctacattga

SEQ ID NO: 23524 - DNA, 468 bp, Homo sapiens
cttgcccgcctgcattagttccgcactgagatctttcctcgtaccccgctcccccttgctccgaggtggctgctgcagagaagtctggaacgttgttttttatagttacatacttgctacttacttgtaccccgagacccccagacatacagaactccagaatgatcaaatgagatcactacccaatgaaatgataggccgaggagccagaaattgtcctactacctgcttttcaggtccagattccacgagagccttctgggctcccaccagagaccctcagtgaagactctgttgaagactttatgaccatgctagaaagcctaccggcagaggttcaggaagttctgctatgaggatgcagctggccccacggatgtcctcaggcatctctaggaccttgctggacggtggtggctgagacctgatatccacacaaaggagcagactgtggaaatgctggtgcag

SEQ ID NO: 23525 - DNA, 503 bp, Homo sapiens
  misc_feature (1)...(503): n = A,T,C or G
agaggcncnnnnnaattcgacgtctgtagacttcggcacgagcagcctggtatcattacaggagttggtgtcctttgaggaggtagctgtgcacttcacctgggaggagtggcaggacctggatgacgctcagaggaccctgtacagggacgtgatgctggagacctacagcagcctggtatcattggggcattgcattaccaaacctgagatgatcttcaagctagagcaaggagcagagccatggatagtagaagaaaccctaaacctgagactttcaggtggaagcaagaagcaagttttctcaggtatttgccacaggagcctggtggagctccaagaggttcatttggtctgatggattcatgtaccattgaaattctgatagtttcaaaatcttttatctccaggtttgagctctcttgtgaactctggaactgtattcccaactgtcaattggacatccctacgcatgggacctcagatatttcacacatgatgtg

SEQ ID NO: 23526 - DNA, 471 bp, Homo sapiens
  misc_feature (1)...(471): n = A,T,C or G
nttggcccctctccgccgcactgcaggaattcggcacgagcgagcaccgagccggagccggatgcagtaagactggactcgggccatatccgtggtgccgtcaacatgcctttcatggacttcctgactgaggatggcttctagaagggcccagaagagctccgcgctctgttccagaccatgaaggcggatctctcgcagcctctcattgccacgtgccgcaagggagtcaccgcctgccacgtggccttgggtgcctacctctgcggccagcctgatgtggccgtgttcgatggctcctggggcgagtggattcgccggtcccccccagagagccgtgtgtcccaaggaccgtctgagaaggtctgagccgtgacctattctgcttactggaactgccgccggtttagtgaccccatgacttacagccggttcttacctcttaggtgaacgcacgacatggtttagaat

SEQ ID NO: 23527 - DNA, 488 bp, Homo sapiens
cttgcccgcctatggaacgcctgcggtgactccggtgctcgccatgtcatctcacaagactttcaggattaagcgattcctggccaagagacaaaagcaaaatcgtcccattccccagtggattcggatgaaaactggaaataaaatcaggtacaactccaaaaggagacattggagaagaaccaagctgggtctataaggaattgcacatgagagggcacacatatttatgctgtctgaaggtcacgatcatgttaccatatcaagctgaaaatgtcaccactatctggagatttcgacgtgttttcctctctgaatctgttatgaacacgttggttggctggattcagtaataaatatgtaaggcctttctttttataaggaacaagggcgagaaaagaaaaaaaaaatttctgggggggggcgccggacccaattgccctttttggggggttgttaaaagtattgtgcccgccctttaacaacgg

SEQ ID NO: 23528 - DNA, 496 bp, Homo sapiens
  misc_feature (1)...(496): n = A,T,C or G
gggggcaaagaaagccctngattgcccgcctgcaggaattcggcacgagttcaatttcagctatacccaagtagatttacatgtatatgaagcaaatatttttaaaaatttctgtttgtacatattctgcatgttttataatttcaaaatgcatcacttacataggtatttctcccacagaaatgatgaaagtgaccagaaaaaaacaaaaacaaaacccctttactctgtaggtcattgaaacgaagtaagctggcagctggttttattggaatgacagtgttctcggaaggagcagcctacaagataacttgaatttgccaattctgcaaaatctgtgcttttttgaaaatttaagagtggggacgtgaaactgtattctgtgccttccatcatgatttccacatgaaagcactttaaggcactgattttaagataatgtttttggaaaacccaatgcatatggtttctgaaatattttatggacttatttctt

SEQ ID NO: 23529 - DNA, 470 bp, Homo sapiens
  misc_feature (1)...(470): n = A,T,C or G
cgccccccccggnnnnnnnnnatttgaccngcgctgcatgaattcggcacgagttaaaccacaccgaggtgtctaatttcaacccctaatgcatttaagaagctgataaaatctgcaacactcctgctgttggctggagcatgtgtctagaggtgggggtggctgggtttatccccctttcctaagccttgggacagctgggaacttaacttgaaataggaagttctcactgaatcctggaggctggaacagctggctcttttagactcacaagtcagacgttcgattcccctctgccaatagccagttttattggagtgaatcacatttcttacgcaaatgaagggagcagacagtgattaatggttctgttggccaaggcttctccctgtcggtgaaggatcatgttcaggcactccaagtgaaccacccctcttggttcaccccttactcacttatctcatcacagn

SEQ ID NO: 23530 - DNA, 479 bp, Homo sapiens
  misc_feature (1)...(479): n = A,T,C or G
agggggnttttntactgtactgtgtcgcaattcggcacgagctggaaccagattcagttcaacttgctagacttcacacggcgagcatacggcaccaattacatcgagaccctcagagtgcagatccatgcaaattgtcgcatccgacgggtttacttctcagacagactctactcagaagatgagctgccggcagagttcaaactgtatctcccagttcagaacaaggcaaagcaataactggaattgtgactcgagggatagacccctggatgtgactcttctttttaaaaggaaactatgtggaggacgatgcaaaaacatatttatcttaatttgctctgctgtagttctgttatttatacttggtgttgcttgtcatggacaccggtgaacatgccgtaactctgtgactgcattgtaagtgcagtgggggtaagcagtcctgtgagtggcgcatgaacgctggagcttattcc

SEQ ID NO: 23531 - DNA, 466 bp, Homo sapiens
  misc_feature (1)...(466): n = A,T,C or G
agcgaaaaannccggccctgcctgccgatttcggcacgagcaacaggactggaatgacgcggtccatggagggtggaggcccacgagaccaaagggaggggctctgccgcttatcagagaagaaagggcctgggaggtggtgggagggagaaggaagggaagaaaggggaggaagaatagatagaaatagggattggagacagtaaccttgaagctcacgaaactgtcctggctgggctgagtcaggaccttgccaggacgggctgtacccctggcttctataagactgcctagcacacagtaggcattcaatacttgttgaataaataaactggctttcacctatggaaaaaaaaaaacaaaaaaaataaatttcggggggggccccggcccccatttccccttttaggggggcgttttacatttccttgcccgcgtttttacaccggggggactgaggacacaa

SEQ ID NO: 23532 - DNA, 485 bp, Homo sapiens
  misc_feature (1)...(485): n = A,T,C or G
gggaccacccaattgacccgcccgnttttgctccgcctgcaggaattcggcacgagtccacatctatatttataacacatttatggatgaaaattaaacaggtgtccgggtgcggttgctcatgcctgtaatccgagcacttgtggaggtgggaggatggtttgggccccggaggtagaggttgcagtgagctgagattgtgccactgtattccatcctgggcaacagagccagaccctgcctcaaaaaaaaaaaaaaaaaaaaaaggggcgggccaaggggtttcccccttgaatccccaccttttgggggggtggggggggcaaaaactttgggggcaaaactttgaaaaccacctggcccaactggggaaacccccttttttccaaaaaaaaaaaaaaaaatttccccgggggggggggggggggcttttccccccgctttttcgggagcttaagccccgaaatttttggccttccgggggg

SEQ ID NO: 23533 - DNA, 506 bp, Homo sapiens
  misc_feature (1)...(506): n = A,T,C or G
gagccnnnnnnaattgacaatcgcatcggctgtangaattcggcacgagcttgagcccaggaatttgagaccaaccttggcagcatgtcaagtcctaattcgaagcagagtcctcagggaaaatggaaaatacattcccaaacagtctttcttgacacgaaaatattatttcaacaacccagaggatggatttttcaaaaaaactaaacggaaggtagtgccaccttctcctatgactgatcctactatgttgacagacatgatgaaagggaatgtaacaaatgtcctccctatgattcttattggtggatggatcaacatgacattctcaggctttgtcacaaccaaggtcccatttccactgaccctccgttttaagcctatgttacagcaaggaatcgagctactcacattagatgcatcctgggtgagttctgcatcctggtacttcctcaatgtatttgggcttcggagcatttactctctgattctgggccaagataatg

SEQ ID NO: 23534 - DNA, 506 bp, Homo sapiens
  misc_feature (1)...(506): n = A,T,C or G
agcggtgnnnnnaattgatcgcctgtcgaattcggcacgagcatgaacgagctctccggcagcgacaacgtgccctacgtggtcaccctgcttagcgtgatcaacgccgtcatcttgggccccgaggacctgcgcgcgcgcacccagctgcggaacgagtttatcgggctgcagctgctggacgtcctggctcgcctgcggtgagtccccactgtagcggtcctgccggctccccctcctgctcccaaggccaggcccacctgccctttggctcccagccacctcacctaagcagcacctccagatggcagggaggtggctccctcggagtaaccccaggggtccagccagaagccaggtctcaggctagaatccagctcactgtccctggcagctgcccacagaaactanggttgcagcagccatagaaaggacagaatgagctcatatncttttgacacccgtgatggagctggaggccgngattcctagtgaaccaaccagaa

SEQ ID NO: 23535 - DNA, 521 bp, Homo sapiens
  misc_feature (1)...(521): n = A,T,C or G
aggantnnncnaggggnnnnnnnnattgaccggctgtggaattcggcacgagccactggagagccccgcccctaggtactatgagtcctcaggggtcaagttcagaaacggcccagccagacctaaacccacacgcccacaaagtggattgcacacagacaagaactcccgtgcgggcctccactctattcccacccttgagggagcccccttactgggggagggtccttgcaattccagcgaatcggaggccaggccaggacgtccttgctccctgcaccctcactgttctgtgcactttttctacctacataaacacacgcattccacctcaaaaaaaaaaaaaagcccagggtttcaataagctggatatcttgacaaaccacgtccccgggggttgggctgttgaataagccaacccttggagccttgggttgtccagaaaaagtttatgaccacccgtgggaatgggggggtacaaagctctgttgtggactactaacaccaaaggctgggggccc

SEQ ID NO: 23536 - DNA, 486 bp, Homo sapiens
  misc_feature (1)...(486): n = A,T,C or G
cgcccggcccccaattgaacgccatgnaattgctccgcctgcaggaattcggcacgagcggcgacgaggacttcgtacacctgcgagtgttccaatctctccctcatgaaaacaagcccttgaccttatctaactaccagaccaacaaagccaagcatgatgagctgacctatttctgatcctgactttggacaaggcccttcagccagaagactgacaaagtcatcctccgtctaccagagcgtgcacttgtgatcctaaaataagcttcatctccgggctgtgccccttggggtggaaggggcaggattctgcagctgcttttgcatttctcttcctaaatttcattgtgttgatttctttccttcccaataggtgatcttaattactttcagaatattttcacaagagatatatttttaaaatccttagtggcaaaaaaccgctcaagaactgagactggggcttaccttatgcagaagctcg

SEQ ID NO: 23537 - DNA, 505 bp, Homo sapiens
  misc_feature (1)...(505): n = A,T,C or G
agaggtnnnnnnnaattcgacgtctgtagacttcggcacgagcaggctcacagattgtgtgtcggctgcagcagagattccaacaagcagctattgtgggggaaacacagcatttaaaaagatcatcattaaaaaacaagatttatacaacaattacttaggatgtttgtgatctgccgaccttgctatagatgccatgttaccaatgatttcctgtggggggggcttgccattgtttactctcttatttaccaacttctggcctaggcatgacagtgggcaccttcccccagccctggctgggcccagcgcctgtgttctgtgttagaaaggttttatatatatataaaattacatatatatgtagaaatatatgtacttttgggggccctgttccttgcacattttacgagtacctcatttttcccatgtatgtatttgagaaaatgctaatatatacagaaataagtggctaaaaaacaattaaagagagacgccggactga

SEQ ID NO: 23538 - DNA, 512 bp, Homo sapiens
  misc_feature (1)...(512): n = A,T,C or G
cgcccattcgaacgccntgnnnggattttgacnccgcgctgcaggaattcggcacgaggttccctctcttcgcggagcggcgccgcgtagcttccatccgccagctgccatgagcgagcgcctccgtcccacgaaaaggagaaggaatggcagcgaagaagacaaccatcttcccccccagaccaaaagaagtagcagaaaccctgtctttcaggattcctgggacacagagtcttcaggcagtgacagtggtgggagcagcagcagcagcatcaacagcccggacagggccagcgggccggaaggcagcttgagccagaccatggccggatccagccctaacacgcctcagcccgtgcccgagcagtccgcgctgtgccaaggcctctacttccacatcaaccagaccctgagggaggcccacttccacagcctacagcaccgagggcggcctctgacatgatgtgccggcagtttcttgccttctgtgaagggacagcgctgtgcagatt

SEQ ID NO: 23539 - DNA, 502 bp, Homo sapiens
  misc_feature (1)...(502): n = A,T,C or G
aagccnnnnnnnaattgacatcgatcggctgtagcagaaccccgcctcaggtaacatggcccttggcacgcagaggggtcccaactgcttgagcaggactggaagcaacgtgtgtgagtttccctcaaggaacttccaggagaagcaggtccacccctatgctctgtcatcacacgaggacgcagcagtgtggaggcgactggagtccagggagcactgggctgcagtcctgtatctgggcagggatcgcccaacctgtgttcaggccgtggaggggatgtcgcggtgagaagaggagctgcagagccttcctttcgtcccccactaaggcccatacagttcctctcccacccgcttcttggagactcgtggctcgcatatgcacaaggcgccatcgtggaaatggaccctttttcatttgtacattttaaaaaatgaggtgaccgggtgcagaggctcacgcctataatcccagcgctttgggaggccagggcgggtggat

SEQ ID NO: 23540 - DNA, 469 bp, Homo sapiens
cgcccccccccccccccccccattgacccgcgctgcatggattccgatgagaccggctgtgttatccccatccaagactcaggccaccctgaaacctaaggaccatcatcagccccttggaagggccaagggggttgagaagcagcagttgccagagcagccttttgagaaagctgccttccagaaacagaatgatacccccaaggggcctcagcctcccactgtgtctcccatccgttccagccgccccccaccagcaaagaggaagaaatctcagtccaggggcaacagccagctgctgctatcttagatggttgaaaactagacgggtggctcactgccattgtcaccaggttggaactcttgcctctgtgaggatgccttctctactgtgcatacccatgaaatttaatacacattttaaaacctcaaaaaaaaaaaaaaaaaaactcgggggggggcccggcac

SEQ ID NO: 23541 - DNA, 456 bp, Homo sapiens
  misc_feature (1)...(456): n = A,T,C or G
agtcggnngatttgccgaaaacgtgggaaatcccacgaggtccgccccagagctgtcgagagtccggagctagctcctgccagcggggagaaggccaggctgagcgaggcccctggaggcaaaaagagtctgagcatgcttcactatatccggggcgctgcacccaaggacattcctgtgccgctgtcccacagcaccaatgggaagagcaagccgtgggagccctttgtggcagaagagtttgcacatcagttccacgagtcagtgctgcagtccacccagaaggccctgcagaagcataaagggagcgtggctgtgctgtctgcagagcagaaccacaaggttgacacgtccgtccactacaacattcctgagctgcagtcctccagccgcgcccctccaccccagcacaatgggcagcaggagccccccactgcaaggaagggccccccaacc

SEQ ID NO: 23542 - DNA, 498 bp, Homo sapiens
  misc_feature (1)...(498): n = A,T,C or G
ctcgcccgcgctgangatttcagcacgatgacaccggcgggcgcgagccgttgcagttctctttgggtgatcgctccttccctcttcaacggatccctccccgcctccatcctcgttctgtgggagagaccagccttctggtgctgcagtcaggaatggagcttgacagcgctctggaagccccatcgcaggaagactctaatttgtccgaggagttgtctcactccgcctttggacaggccttctccaagattttacactgtcttgcccgcccggaggcacgacgaggcaacgtaaaagatgcagttcttaaagacctcggtgatctaatagaagccacaggatttgataggttatttgaggggactggtgcacggctccgcggaatgccggagacactgnggcaggtagcaaaagccctggagaagtatgcagccccctccaaggaggaggaaggtggaggtgatgggcactccgaagcggccgagaaagcagccc

SEQ ID NO: 23543 - DNA, 500 bp, Homo sapiens
  misc_feature (1)...(500): n = A,T,C or G
aggggnnngnncgnnccgnnnnnnnnnnnaattgaccgtcgtgagacttcggcacgagctgagtttcaagcccctgcaatcaatgagacagttttgatgagctaatgggaaatgcatctccctcccttgattttcccctctataaataatttcccagcgtattctcatgacagataaactccatactttacacacggctctttgttctgtttcagaatctttcggttctcaagaaaagctctgaatttgccttgatttctatctgaggattatgtgatctgacaagttttatttcgggatggattttgcataaaataaacaggggtattaaatggaattccacagggagggaagctggtaggaatgctttgagttagatgcatatcagtatgttggacagacacccggctcaccgttccacatgcctgtactttgcttggtgggtactgaactgacctgctcctgtgtggacattctttgggcctgagttgccccttctg

SEQ ID NO: 23544 - DNA, 492 bp, Homo sapiens
  misc_feature (1)...(492): n = A,T,C or G
gggcnnnnnaattgacgctcgaggacctttgacgagaggaagagcagggtcccgccttcaggtgtttgggactcagctgagggtgtgggtgccccgcggtgggggctgaaccttcctggggtgtggagagacgaaaggagcccagatccaagttccctcgttcccgctttggcataagttgccctggcggtctcatgagagagagaaagagctgggaccctcctcgccccagtgagtgtgatgtcttgctccgggtgtcctggggcaactttctatacaggcgggacgtgggaggatcagacagtgtaacatcagacaagggtgttgactctgcagcacagaaccagtagtttgtggagaagaatggaggtgtggtgttgaatctgctagacaggctactgaagcacaagtcaagagatccagattccatcatggggacactttagttcttcatcgggtaattgagctgatatcaggtgtctgaaggaggcn

SEQ ID NO: 23545 - DNA, 501 bp, Homo sapiens
  misc_feature (1)...(501): n = A,T,C or G
acgttttntcctagatcgctctaggacttctgcacgagaagcgatttgnggacgatcttaatcacatcagctgtgtcatcaaggaacggacagtggcccagataaaggccactgtgaaacgcaaggtatatgaagattctggcatcccccttccagctgagtcacccaagaaagggcccaagaaggtggcatctggtgtcttgtcacctcctccagctgcccctcctcccagcagctccagtgtccctgaggccgggggtccccccataaagaaacagaaggctgatgtgacactcagtgctctgaacgactccgatgccaacagtgacgtggtggatattgaagggctaggagaaactcctccagctaagaaactcaacttcgaccaggacagcctgaccctggattctggccttctcatgacctctgctgatcctcctctcctctcctgctgagccttccacctctgacctctcactgttcatgccggacctgtggatn

SEQ ID NO: 23546 - DNA, 467 bp, Homo sapiens
  misc_feature (1)...(467): n = A,T,C or G
nattgcccgcctgcatgaattcggcacgagcagacatttgtccgactccataaccagaagactggccaggaagtggtgtttgttgccgagccagacaacaagaacgtgtacaagtttgaactggatacctctgaaagaaagattgaatttgactctgcctctggcacctacactctctacttaatcattggagatgccactttgaagaacccaatcctctggaatgtggctgatgtggtcatcaagttccctgaggaagaagctccctcgactgtcttgtcccagaaccttttcactccaaaacaggaaattcagcacctgttccgcgagcctgagaagaggccccccaccgtggtgtccaatacattcactgccctgatcctctcgccgttgcttctgctcttcgctctgtggatccggattggtgccaatgtctccaacttcacttttgctcctagcacgagtat

SEQ ID NO: 23547 - DNA, 501 bp, Homo sapiens
  misc_feature (1)...(501): n = A,T,C or G
aggcgggcnccncaaggcccgcctgcggtttcggcacgagttggcttcatcagaggaggctgaaggccggatgaggggccccagtgttggagcctcaggaagaaccagcaaaagacagtccaacgagacttatcgagatgctgttcgaagagtcatgtttgctcgatataaagaactcgattaagaaaggagacaagttccatgggatacaacctccctcttgttttgtttgtctctccttttcttttgttactgttcttgctgctagaacttttttaaataaactttttttcaatgtgagaaaaaaaaaaaaaaaaaaaaaaaaattttggggggggggccgggcccccatttccccttatgggggggggtttaaaaattcctgggcgggggtttaacacgggggggagggaaaaaaaacnnnnnnccnnnnnnnnnncnnccnnnncnnncncccccnnnnaaccccccccccnttcccaccnncnnnncccaaaaccn

SEQ ID NO: 23548 - DNA, 519 bp, Homo sapiens
  misc_feature (1)...(519): n = A,T,C or G
agagcgagggnccncnatttgacncccctnnnatatgcccgcgctgcaggctgaacatggtgaaagaagtgacttggaagaggacaacgagagggagggaacggaaaatggagccattgatgctgttcctgttgatgaaaatcttttcactggagaggatttggatgaactagaagaagaattaaatacacttgatttagaagaatgacaccaaacacatcgctgaaaaaattaagtcagctcagcacgagttgaaattgactacattaatttctttccacctagaatcaacaggatgtttatttcctatgctgattctggaggagttaacctcctgcaaaaaaggcatcttgtccctacatcttctcttctgactttggctacatctcatagtaagttcagagtagttcatgataaattgaaaatataatggtcattgcagaaaatgattgatgttgtaactgtccacccaagtaagaagtgtatctgcctttccatcttttggttttcatttgcgca

SEQ ID NO: 23549 - DNA, 493 bp, Homo sapiens
  misc_feature (1)...(493): n = A,T,C or G
ggggagcncagccccaattgacnnccccnnattgcaccgcctgcaggaattcggcacgagtactttctggatagataatctggtaataaatgataggtaaatcaaaaattacttttatttaggagtttgaattcttactctcatcagacattttttttctagggacgcttactaattaaatgatttaagttgtttcttaggggttttttgcctatatatttatgactgtgttaatgagtagtgaaatgatgcggaaagacagctatcaggaagaggaaatacagaagcctgaataatctatgggttagaaaagcatccctgaataatcaaaaattggcagtattggcattgttctcaggcctttttatgaaaatgaaatctgaaatcaccagatgtaaacctgggaacattattctagagttgctgtcttggattcatgttaagaagcgtcttcattctttgctcatgtggcccacttcttggggatttgtcg

SEQ ID NO: 23550 - DNA, 520 bp, Homo sapiens
  misc_feature (1)...(520): n = A,T,C or G
acgggcaannnnnnnaggggnaattgaccgcctgcggtttttctcttgctgtactacaaagagatagaatcaaactgctttttttcgacatactggtttttctttctgtttttcttctctttcttctatttcttgtggatattatggctaataacacaacaagtttagggagtccatggccagaaaacttttgggaggaccttatcatgtccttcactgtatccatggcaatcgggctggtacttggaggatttatttgggctgtgttcatttgtctgtctcgaagaagaagagccagtgctcccatctcacagtggagttcaagcaggagatctaggtcttcttacacccacagcctcaacagaactggattttaccgccacagtggctgtgaacgtcgaagcaacctcagcctggccagtctcaccttccagcgacaagcttccctggaacaagcaaattcctttccaagaanatcaagtttcagagcttctactttccatccctttctgcaatgtcc

SEQ ID NO: 23551 - DNA, 489 bp, Homo sapiens
  misc_feature (1)...(489): n = A,T,C or G
atggaacgcangactagcccgcctgcggattcggcacgagccacgattggagaatactttgcttcatagtattggagcacatgttactgcttcattttggagcttgtggagttgatgactttctgttttctgtttgtaaattatttgctaagcatattttctctaggcttttttccttttggggttctacagtcgtaaaagagataataagattagttggacagtttaaagcttttattcgtcctttgacaaaagtaaatgggagggcattccatcccttcctgaagggggacactccatgagtgtctgtgagaggcagctatctgcactctaaactgcaaacagaaatcaggtgttttaagactgaatgttttatttatcaaaatgtagcttttggggagggaggggaaatgtaatactggaataatttggaaatgattttaattttatattcagtgaaaagattttatttatggaattaaccatttn

SEQ ID NO: 23552 - DNA, 432 bp, Homo sapiens
  misc_feature (1)...(432): n = A,T,C or G
aggccnattgacctcgagacttcgccgagccccctcctgtcaggtactgagcaaggccccagatccttctctctggaggaagagggaagcccaggggtcctgtttgtaaaacaacggtggcaacagctcctcttccagagctgtctctgcctttatcctgggagatggggaggaagccccatctctgctgttccccgcgtggaggaagcccacccagcaagctctctcctaccccaggtaaaaggtgctcctttgcctgggtttgaattccagcgctgccacttcctctctgcacctcctggcaagtttcttctattccccacatttaaagcgatggcacctccgtcccagggtggtgtgaggattacccagtgtggtaggtgctcaataaatgttggtcattgttatcactgaaaaaaaaaaaaaaaaaaa

SEQ ID NO: 23553 - DNA, 401 bp, Homo sapiens
  misc_feature (1)...(401): n = A,T,C or G
tccgttatttaataataacggggnataaaaagggggnagaaaaggtttgctccgcgctgcttgaattccgcacgagcttcagtggtgtgtaagcaggtggaatactcacccaccaagctctggggtaccccgagggcctgacaagaggatggggtgggggtggcatcctccaaagaccagcctccacccccactccagcctcagcggggccccagcgatgttttcttgttgtacaagaaccaggtccgagtgttgcctgctcttccttccggaagccaaactgctcctttattttttagagctgctgattgtgaatctcagagtcttaagagagaagccaaatatattcctcttgtaaatgaagaaataaacctatttaaatcaaaaaaaaaaaaaaaaaa

SEQ ID NO: 23554 - DNA, 446 bp, Homo sapiens
attgacttctctccgctgcaggaaaaaaaaagccctcctggggacttggaatcagtcggcagtcatgctgggtctccacgtggtgtgtttcgtgggaacaactgggcctgggatggggcttcactgctgtgacttcctcctgccacgggatttggggctttcttgaaagacagtccaagccctggataatgctttactttctgtgttgaagcactgttggttgtctggttagtgactgatgtaaaacggctttcttgtggggaggttacagaggctgacttcacggtgtgaatgacaacctgaactacctacagggggggggcgcggcgcccatgaccaccctttgtgatgtgtgtgaacattggactgactggcactaaacactctctaaggggagaaacgttgtagagcctgaataggctcctggccccatgaccccttctacg

SEQ ID NO: 23555 - DNA, 476 bp, Homo sapiens
  misc_feature (1)...(476): n = A,T,C or G
agcggganatttgaaactgactcgcgctgcaggaattcggcacgagcacacttgtgccaacttgattcatattgggcattactaacaacccctgggcaaggtaaataggttgaacaatcaataacattatccctgcctgcatacatgtgaacaaaagctatagaggacatgcaaattctacagtcattcctcatatgctttagacagagtgcagctactggaatcttccagatttcagtgttttaaaatcagagctctgaatacacaaaaggaaagagaaatggagcagctgacatattttaagctcacagtgatactcagtgacaggagcacagagctctaatgtccacaggatgttgtagggtagggtctctcagtaaatcaagtcccttacctatgttctgacactgaggctcttggagctatgggttagaaatccaggaggcaatatgtctttattctaatgaagtcctcat

SEQ ID NO: 23556 - DNA, 502 bp, Homo sapiens
  misc_feature (1)...(502): n = A,T,C or G
gagtttcnnnnnaattcgacgtctgtaggacttcggcacgagaagcagcccccgcctctgatgaagaagcacagccagacggacctcgtgagccgcctgaagacccgcaagatcctcggcgtgggcggggaggatgacgacggggaggtgcatcgctccaagatcagccaggtcttaggcaatgaaatcaagtttaccattcgggagcctttggggctcagggtctggcagttcgtctctgctgtgctcttctccggcattgccatcatggcgcttgccttccctgaccagctctatgatgcggtctttgatggagcccaggtgaccagcaagacccccatccgcctctacggcggtgccctcctcaatgctgcgcccacaccccggcctctgatgaagctctctgctggggatgtgctgccatcttgtggccattggtggaatacacccaatgggttggagcttgcagtcgccaccatctgcaaggagcgctcatatgtgn

SEQ ID NO: 23557 - DNA, 489 bp, Homo sapiens
  misc_feature (1)...(489): n = A,T,C or G
agaagagaacactttgcccgcctgtttgcaccgcctgcaggaattccgcacgagtgaacgcccacgactctcatggtccagaggccgtgagaccggccgcggctgaaaggtaaagaaaccaagtggaagagtgcttcctcctctggccgtaaagcagctgtccccgccctactccggaccgccccaaagactccatgggatggacctgagtcagccgaatcctagccccttcccttgggcctgctgtggtgctcgacatcagtgacagacggaagcagcagaccatcaaggctacgggaggcccggggcgcttgcgaagatgaagtttggctgcctctccttccggcagccttatgctggctttgtcttaaatggaatcaagactgtggagacgcgctggcgtcctctgctgagcagccagcggaactgtaccatcgccgtccacattgctcacagggactgggaaggcgatgcctgtcgggagctgcn

SEQ ID NO: 23558 - DNA, 498 bp, Homo sapiens
  misc_feature (1)...(498): n = A,T,C or G
aggggnnattgancctgatcgcctgcggattcctttgtgcaacactttattgggaaagatttacacacggtgacctgtcataggccaagcgatgagaagagggcgccaggagtgctggggtcccgaggtggctcagatggaagccatgggacggccgtccccaggcccgcgcacccgcacctcagtttcccctttgtgaaatgggaagcttatgcttccttccaagtctgcaatattggtgcgatgagctaaaagtggagcgaaagacacaaggaagaggcttcccactcccaggacctgcccccaagctccgaccccacattgtggatgcaaagaaagggaatttgcccaaaaccagcatctttggagatccgaagaagatcgtcacagaagagtttgtgcgcagagggtacctgatttataaaccggtgccccgtagcagtcccgtggagtatgagttctttctggggccccgagcacacgtggaatcgagcanat

SEQ ID NO: 23559 - DNA, 505 bp, Homo sapiens
  misc_feature (1)...(505): n = A,T,C or G
ttcgttttatnaattatggggagataaangggaggaaaanggtttgancgcctgtggaaaaacgtgaaaaaaacagaatggaaagagtaaaaaagttgaagaggcagagcctgaagaatttgtcgtggaaaaagtactagatcgacgtgtagtgaatgggaaagtggaatatttcctgaagtggaagggatttacagatgctgacaatacttgggaacctgaagaaaatttagattgtccagaattgattgaagcgtttcttaactctcagaaagctggcaaagaaaaagatggtacaaaaagaaaatctttatctgacagtgaatctgatgacagcaaatcaaagaagaaaagagatgctgctgacaaaccaagaggatttgccagaggtcttgatcctgaaagaataattggtgccacagacagcagtggagaattgatgtttctcatgaaatggaaagattcagatgaggcagacttggtgctggcgaaagaggcaaatatg

SEQ ID NO: 23560 - DNA, 504 bp, Homo sapiens
  misc_feature (1)...(504): n = A,T,C or G
agcaggctnnnnnnnnttagatngcctgaaagaccntggcgagagcacaaaaaaagatctcgaacaagatcacgtgctaccaagtaccattcgtcatccaagaccaggtctagatcacactcaaaagcaaagcattctcttcccagtgcctatcggacagtgcggcggtcgaggtcccgctcccggtcccctccgaggagagcccactcccctgagagacggacggacgagaggagtgtgcccactgcctaccgcgtgagccgcagccctggggccagcaggaagcggacccgctcccgatttccccacgagaagaagaagaagaggcggtcccggtcgcggaccaagtccaaggccaggtctcagtcggcgtcacccagcaagcaggcagcgccccggcccgcggcccccgcggcccactcggtgcactcagccagcgtctcccctgtggagagtcggggctccagccaggagcgctccangggagtctctcatgaaaaagan

SEQ ID NO: 23561 - DNA, 528 bp, Homo sapiens
  misc_feature (1)...(528): n = A,T,C or G
atcggttataatatattaatgatgggggatgattaaaanncgganagaaaanagggatttgatngccntncttgcaacgccnctgcaggaattccgcacgaggagaaatccaaaatctttaaacacattagcaagaaatcatctgacagcaggcagttctctcactgaacacatgccttcctttcatcttgaataactttgtcctaaaatgaattttttttccccttgatttaacaggatttttgtagactttagaatttggacttacctaacaagagtataaattgacttgggttgcaagcactgagcactgttacttctatcacgtctctcttttatttctgggatataaaacaggctttaagtttcttggttgcccaagggcagagcaaggaatatctggtgtttcttgtgatgataatattttaattttaaatatccctccctcatacaagtgtatgttaccattttaatataattctttttgtacctttccttcttgttttgtgaagatttttgtggcatggn

SEQ ID NO: 23562 - DNA, 505 bp, Homo sapiens
  misc_feature (1)...(505): n = A,T,C or G
gggatggcnnnnnnntttggaantttagcaccgcctgcangaattcggcacgagccagagcaggctgggcccagctctggagtcacgaacaggtgcccgttcctcctggacaattgccttggcacatctcagtggcccccaaggcgacgacgcaagcagctgttcaccctgcagacggtgaactccaatgggaccagcgaccgcacaacctcccctgaagaagtccatgcccagccgtacattgctatcgactgggagccagagatgaagaagcgttactatgacgaggtagaggctgagggctacgtgaagcatgactgcgtcgggtacgtgatgaagaaggctcccgtgcggctgcaggagtgcattgagctcttcaccactgtggagaccctggagaaggaaaacccctggtactgcccttcctgcaagcagcaccagctggcaaccaagaagctggacctgtggatgctgccggagattctcatcatccacctgaaacgct

SEQ ID NO: 23563 - DNA, 479 bp, Homo sapiens
aatcgaccgcaatgcgaccggctgcaggaattctgcacgagcgcagacgaggtcggcctcgtcattccccgcagaccgccgcgcgtccctcttgtgcggttcaccacagttgtatttaagtgatcgtgtgagtcgtcgttaaatgcctgtctccccgcggatcatgggctcctcgaggacagggactggcctgtctgtccactgctgtaaccccgcgccggcatagggacctaaggcccactggagggcgctcatcaagtagctgctggatgttgacgaaggaagcggcggcgcagctcagggatctccgagtcaggacggtcggccagacccacggggtaacgggtctaatcgtgtaggaataaagctgtattccagtgcttccaaaaaaaaaaaaaaaaaaaaaattcgggggggggccgggaccccaattccccttatagggagccgaataacaattcacggcccgcggtttaacc

SEQ ID NO: 23564 - DNA, 407 bp, Homo sapiens
ggaattcggcacgagcagaaacagagacaggcctgccggtctccacactgaattcctgcccagagatccatattgacacagcagacaaggagatagaacaaggagatgttaccgcctctgttacagctttgctggaggggccagaaaagacctgcccctcacggccgtcatgcttagagaaggatctcaccaatgatgtgagctcccttgatcctactctgccaccagttctgctttcctcctctccacctggtcctctcagctcagccaccttcagctttgagcccctaagcagtcccgatggtccagttatcatccagaaccttcgtatcactggcaccattacagcccgagagcacagtggcactggattccacccatacacactctatactgtgaagtacgag

SEQ ID NO: 23565 - DNA, 487 bp, Homo sapiens
  misc_feature (1)...(487): n = A,T,C or G
tggatggtccncnntttgcaccgcctgcatgaattcggcacgaggaaagacggngcagtggcgagagccgatgggtggtagggagaaatggaagtccagctgtccaaagcgggcactgtcctatgcctaagatgcctccagggagctgttgcccttaaaggggagctgcctttgtttatatgatcgtcctgggaagatttgggtgtgatttctctcctccttctccctaattgccaccccccacctcatttattgagctttcgcctaccacgtactgtactggggtctgttctgagagcctcacaggacacagggagctcccaggctggaaggagaatgccaggcttgatcacccatgccgttgggaagggagtatcctctggtgaggggtacagtcctgaatgaccccagtcagtcctttctatggagtcaccaccttgcatagtgctgggcctgtggtagacatccaataaatacttactgcatg

SEQ ID NO: 23566 - DNA, 504 bp, Homo sapiens
  misc_feature (1)...(504): n = A,T,C or G
gggtgtnnnnnnntttagaccgtttgtancgcctgcangaattcggcacgagcaaccgagactacaagcggcctctgcacgaggcggcctccatgggccaccgagactgcgtgcgctacctgctgggccggggggcagcggtcgactgcctgaagaaagccgactggactcctctgatgatggcctgcacaaggaagaacctgggggtgatccaggagctggtggaacatggcgccaatccactcctgaagaacaaagatggctggaacagtttccacattgccagtcgagaaggcgaccctctgatcctccagtacctgctcactgtttgcccaggtgcctggaagacagagagcaaaattagaaggactcctctgcatactgcagcaatgcatggccatttggaggcgagtcaggtgcttcttaagaggtgccaatatgaaccagactacagagacaacttgtgcgtcaccgccttgatggacgcaatccaagtgtggcaca

SEQ ID NO: 23567 - DNA, 350 bp, Homo sapiens
acgcgcccccattgatcgcttgaggaactcggcacgagccgggtggttgctgccgaaatgggcaagttcatgaaacctgggaaggtggtgcttgtcctggctggacgctactccggacgcaaagctgtcatcgtgaaggtactctgtggatatctccttggacaaaactgtcgtcaataaggatgtcttcagagatcctgctcttaaacgcaaggcccgacgggaggccaaggtcaagtttgaagagagatacaagacaggcaagaacaagtggttcttccagaaactgcggttttagatgctttgttttgatcattaaaaattataaagaaaaaaaaaaaaaaaaaaaa

SEQ ID NO: 23568 - DNA, 510 bp, Homo sapiens
  misc_feature (1)...(510): n = A,T,C or G
aggggnnnnagnnngnncaggggnnnnngnnnnaattgtancaattgtanccgcgctgcaggaattcggcacgagcgttgtgaggccaccccatgtggggtctgtggtgagagtcctgtaggatccctgctcaagcagcacagaggaaggggcaagacgtggcctgtaggcactgtctcagcctgcagagaagaaagtgaggccgggagcctgagcctgggctggagccttctcccctccccagttggactaggggcagtgttaattttgaaaaggtgtgggtccctgtgtcctcttccaggggtccaagggaacaggagaggtcactgggcctgttttctccctcctgaccctgcatctcccaccccgtgtatcatagggaactttcaccttaaaatctttctaagcaaagtgtgaataggatttttactccctttgtacagtattctgagaaacgcaaataaaagggcaacatgtttctgttaaaaaaaaaaaaaaaaaaaaaaaacc

SEQ ID NO: 23569 - DNA, 484 bp, Homo sapiens
  misc_feature (1)...(484): n = A,T,C or G
ggttcccnnnntttcaccggctttgcgaattctcacgagcgctagaggagttgaacgtagtaaagcatgtgcgggttcaggttagcgaccccgagagtacagtggctgtggctttcacaccaaccattccgcactgcagcatggccacccttattggtctgtccatcaaggtcaagcttctgcgctcccttcctcagcgtttcaagatggacgtgcacattactccggggacccatgcctcagagcatgcagtgaacaagcaacttgcagataaggagcgggtggcagctgccctggagaacacccacctcttggaggttgtgaatcagtgcctgtcagcccgctcctgagcctggcctttgacccctcagcctgcatactggtatcctggtcccagctcctgccagggctgttaccgttgttttcttgaatcactcacaatgagaaactaacattttgctttttgtaataaagttaatttata

SEQ ID NO: 23570 - DNA, 498 bp, Homo sapiens
  misc_feature (1)...(498): n = A,T,C or G
aggggtgnnnnnncctggacgctcgagcggcctttcagagaaatggggcttttgatgccgtgaagtgcactcactgggcagaagggggcaagggtgccttatccctggctcaggccgtccagagagcagcacaagcacccagcagcttccagctcctttatgacctcaagctcccagttgaggataaaatcaggatcattgcacagaagatctatggagcagatgacattgaattacttcccgaagctcaacacaaagctgaagtctacacgaagcagggctttgggaatctccccatctgcatggctaaaacacacttgtctttgtctcacaacccagagcaaaaaggtgtccctacaggcttcattctgcccattcgcgacatccgcgccagcgttggggctggttntctgtaccccttagtaggaacgatgagcacaatgcctggactccccacccggccctgtttttatgatattgatttggaccctgaaacaa

SEQ ID NO: 23571 - DNA, 492 bp, Homo sapiens
  misc_feature (1)...(492): n = A,T,C or G
atggaaaaaantttgatcgccttaggaattcggtacgagacacagcggcggcagagagcggtgatctgtggtcagtgggtcattgacctgcacggtgattctcccacctccaaaaggtaggggtgggactggaggcgtacctaggtcacgccgttgagttcgagctccgatgggccaccttgaatccaggactgaccgcccgtgtgtgcacagtttgttcttggacgaggactcgtgaggatcgagggctggggaccccggtgtgagcaggatggggccctgccctcccgtgggagttgtggactcgagcccatgggctgcccgtcacagcggtgtcccatgtccctgccatccgattttacctgggatgtcttctctggagtttggaattgcttgaggaaccctgcgtgtgcttggagaggccagagggcttgctgagaaccccatggacagtggagagcgggattcgaaccaaaggctggactcccacan

SEQ ID NO: 23572 - DNA, 500 bp, Homo sapiens
  misc_feature (1)...(500): n = A,T,C or G
nggaggaggggggcnnnnnttctgacgttcgccgacctcggagagtggccaggctcctcttgtggccatgtacccagggctggctggcctgccatttgcctctccccggagacagccgttcttctgcaaccacaccccgtgcctagccacaaccccaggctgcagctgctcagaagctccaggcattttgtttctggtgaccgcccctaatgggatatcggtgatcactggtccacccttcctgtcagggcttttctggggctgctcttggaaatgaagtcttaagtactgaataactcccctggggatagctggggcatttgtctagctgggctactttctaacactttgccatagctcagaccacttctcatcgttcagggatggactgcaaccttaatttacttggccgagtgtacattctaatgtgggtatactagggggctgtgatgatgatttttttttttttacacaattctctgtagactaggagaagaaaa

SEQ ID NO: 23573 - DNA, 474 bp, Homo sapiens
  misc_feature (1)...(474): n = A,T,C or G
aatagaccaaccctanaaanttttgaccacgctgcaggaattcggcacgaggcgaaaccccatctctacgaaggatagaaatattagccgggcatggtgtcaggcacctgtaatcccagctacttgtgaggctgaggcaagagaattgcttgaactcgggaggcagaggatgcagtgagccatgatcatgccatcccactctagcttgggcaatagagcaaggctccgtgtcatgaaaagaaggtcatttgccaagactagcataggagtatccatttaaaatacattcagcttcctcccatttccgcgctattaatcacttgtgagagcaacatgacatgcgcagcattccacttgccgagaatgatactccttatactctgagctcttgatgcctagacctcagaaaacaccaattcaccacagtagaaccggcagcacggacagctcatcttctctgaatatcacactttg

SEQ ID NO: 23574 - DNA, 499 bp, Homo sapiens
aatagacccgcgctgtaggaattcggcacgagccccacctccccagggtccaacagacaagtcatgcacaatgtaaaaaccagccaagcaaggccataaagggaggtgacttaaaaaagaaaatggattagtgacaaaagtcactgatccataactttccttagttttgtgcttataactggagatcttttggcttttctatgttgtcgaatgtaatgtctgagactagctaaattaacacgggcatttgtattttgtaatttttttaaataactggacatatgtcattttaaggacaatagaaacacttagacttacttgaaaatccaatgctgcaccacttgtaatgaaggcaacaccgctctccacattgtacagagcttcaggtttaatgtagcccagctgagtcagaaaggttgtgacctgaaggcagaagaacccgaatgccacacctcattggagtatagccagtggtggtctgtggcacttgggctgaaag

SEQ ID NO: 23575 - DNA, 500 bp, Homo sapiens
  misc_feature (1)...(500): n = A,T,C or G
tggatattttttaatgggagataaacggaggaaaanggtttgaccgcctgttggaattcgcacgagtgctcctctggtgatcttgaacaggtggtccatctcgcctcctttgggaaacactgcaccaatgtttattatcgtagaagaaaattacatagaagaaatctagaagaaatttcaacgaattttagaacactgaagaatttaggggtccagatagctttcttatttttttgttgttcaaatcttatcttttgtaagagaaatttgaatagctagggacattggtgatatcagaaacctagatttcacttcctctatcattgtttataaaatcaaaacgatggagtcctaagaacagactaaatttattttataaacaccaaaagaatgtatttgataggaaactagcacctgatcaaagtgaatattgacatggagggagaaatttcctgagaaggctgtanaactggcgttatgttagtttacaagaaaatgaa

SEQ ID NO: 23576 - DNA, 489 bp, Homo sapiens
ggggattgattgccttagcaattcggcacgagactgagcgggacctgcgagcagcgcgggcggcagcccgggggaagcgtccgggaccatgtctgtagaactaccaccaaacattaacatcaaggaacctcgatgggatcaaagcactttcattggacgagccaatcatttcttcactgtaactgaccccaggaacattctgttaaccaacgaacaactcgagagtgcgagaaaaatagtacatgattacaggcaaggaattgttcctcctggtcttacagaaaatgaattgtggagagcaaagtacatctatgattcagcttttcatcctgacactggtgagaagatgattttgataggaagaatgtcagcccaggttcccatgaacatgaccatcacaggttgtatgatgacgttttacaggactacgccggctgtgctgttctggcagtggattaaccagtccttcaatgccgtcgtcaattacac

SEQ ID NO: 23577 - DNA, 488 bp, Homo sapiens
  misc_feature (1)...(488): n = A,T,C or G
ggggnngggaaggggnnnaaaaatagagtgccctgcggcattgatcangctcaacagtcactggagcttatccagtcaaaaatagtaaaagctgctggagacactactgttattgaaaatagtgatgtttccccagaaacggagtcttctgagaaggagacaatgtctgtaagtctaaatcagactgtaacacagttacagcagttgcttcaggcggtaaaccaacagctcacaaaggagaaagagcactaccaggtgttagagtgaagtaattgggaaactgttcatttgaggataaaaaaggcattgtattatattttgccaaattaaagccttatttatgttttcaccctttctactttgtcagaaacactgaacaagagtttgtcttttctaatccttgttagactactgatttaaagaaggaaaaaaaaaagccaactctgtagacaccttcagagtttagttttataataaaaactgtttga

SEQ ID NO: 23578 - DNA, 480 bp, Homo sapiens
atagcaccgcctgcagaattcgacgagcaaaccaggccctctgcatcgttgttgtaataatcagctctggcatattcagctgcaactgtccctgaagaagaggtttctgagctggctgaccccatgtaggagggtgttaccttgtagaaaaagctggagggacctggtgggacagtgcagtgaggcagggtagaaatggtcagttgtttagggccagtggccacataccaaaataccaccaatgtgcccagggccaaactgccttaattctgagtgctgtgtgttctgcaggtgacagtttcctgaggagaggggtgtatccaggcttacctcccagcaggagtggtaccatatggtgtttatgtactactctatagaactcttggcttgcacttctacagctctgtacatttataagagtaaatgcaatcacactagaaaaaaaaaaaaaaaaaactcgagggggggcccggccccaat

SEQ ID NO: 23579 - DNA, 509 bp, Homo sapiens
  misc_feature (1)...(509): n = A,T,C or G
gggaggagaggggcnnnnnnnattgancgctcgcacgactgcagactacggacgaggagcgcttccagaacctggacaagaaggcgagctccgagggtggcacggctgcgggcgcgggcctagactcgctgcacaagaacagcgtcagccagatctcggtgctcagcggcggcaaggccaagtgctcgcagttctgcaccactggcatggatggcggcatgagtatctgggatgtgaagagcttggagtcagccttgaaggacctcaagatcaaatgacctgtgaggaatatgttgccttcatcctatctgctggggaagcggggagaggggtcagggaggctaatggttgctttgctgaatgtttctggggtaccaatacgagttcccataggggctgctccctcaaaaagggaggggacagatggggagcttttcttacctattcaaggaatacgtgcctttttcttaaatgctttcatttattgaaaaaaaaaaaaatgcccccaa

SEQ ID NO: 23580 - DNA, 483 bp, Homo sapiens
  misc_feature (1)...(483): n = A,T,C or G
tggggnnnaaggggnnnaattgatatcgctggctgcggaattcggcacgagcaaaaagtacagcgagattgaggagttttaccagaaactgagcagtcgttatgcagcagccagcctccccccactacccaggaaggtcctgtttgttggggagtctgacatccgggagaggagagccgtgttcaatgagatcctgcgctgtgtctccaaggatgccgagttggcaggcagcccagagctgctagagttcttaggtaccagatccccaggggctgcagggctcaccagcagagattcctctgtcctggatggcacagacagtcagacagggaatgatgaagaggctttcgacttttttgaggagcaagaccaagtggcagaagagggtccgcccgtccagagcctgaagggcgaggatgctgaggaatccttggaggaggaggaggcgctggaccctctgggcattatgcgctccaagaagcc

SEQ ID NO: 23581 - DNA, 487 bp, Homo sapiens
  misc_feature (1)...(487): n = A,T,C or G
ntttaccacgtctgcaggacttcgcgcgaggagaaacagggcagtggaccaatggacagctccaccagctccacatctttggaagctagatttggggagagagaagctctaccccagacttaatacccattgaaatttcacctcacgtgttgtgtcctgtgtctggttaagtgtcccatggaaggggaaagccttcacgtcagaacccaaccctataccttttacttcttaaatggtgctaaccacaggtgtcccagggtgctctgtgccagttaagatttttaactttcaaggggcagggcatactgggaaatgtagtttcccaaactgccttatcacttgggtggacatatgtctccttttatgccctttggtcttgagtaattaacagcatcctcttccacgcctcaaaagggtctgggtggggccagggaatgtggctcaccgcctgtagtccaacactttaggagggcgaaggcggcggatc

SEQ ID NO: 23582 - DNA, 454 bp, Homo sapiens
  misc_feature (1)...(454): n = A,T,C or G
agaaaacttgaccccgnctgaagaatttgacacgcgctagggccgtctcagcctggacgacctgctgcagcgattgcaccacaatcctcggcgcatctttcacctgcccccgcaggaggacacctatgtggaggtggatctggagcatgagtggacaattcccagccacatgcccttctccaaggcccactggacaccttttgaagggcagaaagtgaagggcaccgtccgccgtgtggtcctgcgaggggaggttgcctatatcgatgggcaggttctggtacccccgggctatggacaggatgtacggaagtggccacagggggctgttcctcagctcccaccctcagcccctgccactagtgagatgaccacgacacctgaaagaccccgccgtggcatcccacggcttcctgatggccgcttccatctgacgacccgaatccatcgagcc

SEQ ID NO: 23583 - DNA, 488 bp, Homo sapiens
  misc_feature (1)...(488): n = A,T,C or G
agacgccggggagattaaaaactgatgatgagaacntgccgaggngccgngaaaactacccctaaaagccaaaatgggaaaggaaaagactcatatcaacattgtcgttattggacacgtagattcgggcaagtccaccactactggccatctgatctataaatgcggtggcatcgacaaaagaaccattgaaaaatttgagaaggaggctgctgagatgggaaagggctccttcaagtatgcctgggtcttggataaactgaaagctgagcgtgaacgtggtatcaccattgatatctccttgtggaaatttgagaccagcaagtactatgtgactatcattgatgccccaggacacagagactttatcaaaaacatgattacagggacatctcaggctgactgtgctgtcctgattgttgctgctggtgttggtgaatttgaagctggtatctccaagaatgggcagacccgagagcatgcccttn

SEQ ID NO: 23584 - DNA, 486 bp, Homo sapiens
  misc_feature (1)...(486): n = A,T,C or G
gtggggtaaanaaactgaccgcctgcggaattccgtttaactcgtctaaactgcgccctagcagcctcgaggctgacctcatctaaccaaatgtggctgcaaatgcaaatggacgggcgaggagatactgagggggaaccgtgcataatggtgagaaactcaatcaagggcttcctgtatctcccgcttactcccctttgtcctgcctccaacctgcacatggcagtgcatccacatgcacacacattcaagcaggacataaggcggccggccggtccacttcagatcataaccaaaagtcttggcccctcaccactcacctgtcagcctaaggcagtcagggacccatcatgggaggcacacctcatgagaactaccccaatgctcaagtgcccgcacatgcccacaaacccttaaatgtgtctaggaacctttcaccaactgaagcctgactgcaagatgaaggaaggaccttcggaatgtaat

SEQ ID NO: 23585 - DNA, 458 bp, Homo sapiens
  misc_feature (1)...(458): n = A,T,C or G
agaaacttgaccgcctgaggaaatcgaccngcgctgcaggaattcggcacgagcaattgtatgcctaaactatactgtccaatttcatcctcacaacctatgtgggatctattttgatctgtttcatagataggaaggcagatgcagagaagttacactatttgttcaagcaaatggcagagctgggatttgaacccagtcttagcaccggcaatattgtctttttaggaaatagagttgggagtatcaccatatctaacccccttacagtacagatgaagaaattgaggtccagagaaggtaaataacttgtccagtgtcacatccagaataggtgaaagttccagaactagatcttgtttcttctgactttaaacccagcctttttttaaatttctatttttcctactttcctttgcaattcaaagcaaatttacatgaggctacttggcctcact

SEQ ID NO: 23586 - DNA, 487 bp, Homo sapiens
  misc_feature (1)...(487): n = A,T,C or G
atggtaanncctgatgccttagaaangctacgagcatagaccacttatacttgagaacatggaagaatttgcctgatactctctttggggaaaagagtctctcctcttttcctcaaaccccagtacactcagcctctctgccccaccttctcctgactttgtcctcacttgcttctgcagtacattggaacctgaattgaaagaaagtcttccttgaataattggagtttgtcttgagaggcaaatatagccccaagaatcacaagattcgaggaccatgtaggtcttttacgtagcccaaatccataaattagtctcactttttgtatttatcggttcatattaaaccctctatatcaaatgttcatcatgattttgtatgatttttataactattttattcattttattagatttattctaaaattttttaatgggaaattcttaaactgtggaaaccactgaaggtgcttattaactgttctcn

SEQ ID NO: 23587 - DNA, 476 bp, Homo sapiens
  misc_feature (1)...(476): n = A,T,C or G
cattcgcccgcgctgangaattcggcacgagcagagtcttgctatgctttccaggctggttttgaactcctagcctcaagcgattttcctgcctcagcttcccaaagtgctgggattacaggcacaagccactgcacccggccctgttgttgttaagaaaattacaagttaaatcttgtaccagtgaacaagatttagcttgtgaaccttcttcagtgtaatttttctggaaccaccatgatgaagtagagtcattgtctggggtaaatacctgaggttccttctctcagccaggaaatcgaggacatggacacacgagaagtggatttaagagcagaagtttaataggcgaaagaaagagaaaagagaatctctctcctgcagagagagcggggcgcctgagtgggtcttccggtcccatggtgaagtacacaggttttatagactggcttgaggaggtggtgtctgatttacat

SEQ ID NO: 23588 - DNA, 484 bp, Homo sapiens
  misc_feature (1)...(484): n = A,T,C or G
ggggagtnccccggnaggggnnnnaactgatncccactgatagccttcggaanaagcggaaggccgacatgaccaactttgatgtggaggatcttttgaacatccatgataatgaagtcattgtgggcattgcattgactgaagagagtctccaccgaagaaatataacacattttggacctacaactcttagatcaactcttgcctatgggatgctcaggctctgtgatcctctaccttatgatataatagtcgatccaatgtgtggaactggggcaataccaatagagggggccactgaatggtctgactgcttccatattgctggtgataataatccactggctgtgaatagagcagcaaataacattgcatctttattgaccaagagccaaattaaagaaggcaaaccctcctggggcttgcccatagatgctgttcagtgggatatctgcaatctgccattgagaactggctctgtggn

SEQ ID NO: 23589 - DNA, 449 bp, Homo sapiens
  misc_feature (1)...(449): n = A,T,C or G
ggagggtannnnnaattgaccgccttgagaatccggcacgagcggcacgttgtccctgctggccgtgacctcactgccgtccattgcaaactcgctcaactggagggagttcagcttcgttcagtcctcactgggctttgtggccctcgtgctgagcacactgcacacgctcacctacggctggacccgcgccttcgaggagagccgctacaagttctacctgcctcccaccttcacgctcacgctgctggtgccctgcgtcgtcatcctggccaaagccctgtttctcctgccctgcatcagccgcagactcgccaggatccggagaggctgggagagggagagcaccatcaagttcacgctgcccacagaccacgccctggccgagaagacgagccacgtatgaggtgcctgccctgggctctggaccccgggcacacgagggacgg

SEQ ID NO: 23590 - DNA, 483 bp, Homo sapiens
  misc_feature (1)...(483): n = A,T,C or G
tggggnggagggggnnntttgatttgcccggctgcagggtctaatgcatgtgatttaatgtatgtttaatttgatatcatgttttaaaatatcctacttctggtagccatttaattcctccccctacccccaaataaatcaggcatgcaggaggcctgatatttagtaatgtcattgtgtttgaccttgaaggaaaatgctattagtccgtcgtgcttgatttgtttttgtccttgaataagcatgttatgtatattgtctcgtgtttttatttttacaccatattgtattacacttttagtattcaccagcataatcactgtctgcctaaaatatgcaactctttgcattacaatatgaagtaaagttctatgaagtatgcattttgtgtaactaatgtaaaaacacaaattttataaaattggacagttttttaaaaactactcacaactagcagatggcttanatgtagcaatctctgcg

SEQ ID NO: 23591 - DNA, 470 bp, Homo sapiens
  misc_feature (1)...(470): n = A,T,C or G
cttgaccgcctgcagaattggcaccggttggatcggcgctctaggcgtctgtcacagacctatctgcgggtcgccttcacccagcatctcagaaactgcgcgcgggatgaacattcgggtgtttccggcaggtgacgctgccgagtccccgcagcacggggcgagcatgggactcgcgggtgacgggacacggatcctctaatgcccagagtgtcccgagtagcggcagtggggagtgctcagggtacgctaatgatctgtgtcttgtaaagagcatattgctgggcttacatccgtttatcttgtttgactgtgattttaataggtcctggttccacaaggataaaacacatctgcagtgcaaatagaagtctgaggaacaggtgtcttatcatggaaggagacctgacctgagacctgccttanaggctggagagtcctgaaagagagtggaccctggagttgctgan

SEQ ID NO: 23592 - DNA, 442 bp, Homo sapiens
attgaaacctgaccgcctgcagaattcggcacgagtggaccagtgcgggtctgccacgccctgttcagccatccctgtcctgttgtgtcgtgcaagccacatctgtccacacccccaccacccaccagtgctggctctcctctcttctcccctgtgctcccagcatgcctcgtggccggtgccgtcagcagggccctcgcattcccatctgggcagccgccaattatgccaacgcacatccatggcagcagatggacaaggcgtctcctggggtggcatacaccccccttgtggatccctggattgagcggccctgctgtggggacaccgtgtgtgtgcgaacgaccatggagcagaagagcacagctagtggcacttgtggcggtaaacctgcagaaaggggtcccctagctgggcacatgcccagctcccgaccccacag

SEQ ID NO: 23593 - DNA, 480 bp, Homo sapiens
  misc_feature (1)...(480): n = A,T,C or G
ggggnggagggggnnttatgactggctgcagcgcatgcgatgctggcgggtcacctcctctgtaccattgcccagtggaagcacgagcagcccaggccggggccggggtgaggtgcgcctggaactggcttttgaatacctcatgagcaaggaccggctacagtgggtcaccatcactagcccccaggctatcatgatgagcatctgcttgcagtccatggttgatgaactgatggtgaagaaatctggcggcagtatcaggaagatgctgcgccggcgggtggggggtactctgagacgctcagacagccagcaagcagtgaagtccccaccactgcttgagtcacctgatgccacccgggagtctatggtcaaactctcaagtaagctgagtgccgtgagcttgcggggaattggcagtcccagcacagatgccagtgccagtgatgtccacggcaatttcgccttcgagggcattgg

SEQ ID NO: 23594 - DNA, 448 bp, Homo sapiens
  misc_feature (1)...(448): n = A,T,C or G
nttttgccccgcgctgcaggaattcggcacgagggagtctagatatttacctgatactaatcaggaaatatatgatatccgtatttaaaatgtagttagttatatttaatgacctcattcctaagttcctttttcgttaatgtagctttcatttctgttattgctgtttgaataatatgattaaatagaaggtttgtgccagtagacattatgttactaaatcagcactttaaaatctttggttctctaattcatatgaatttgctgtttgctctaatttctttgggctcttctaatttgagtggagtacaattttgttgtgaaacagtccagtgaaactgtgcagggaaatgaaggtagaattttgggaggtaataatgatgtgaaacataaagatttaataattactgtccaacacagtggagcagcttgtccacaaatatagtaa

SEQ ID NO: 23595 - DNA, 488 bp, Homo sapiens
  misc_feature (1)...(488): n = A,T,C or G
nattagccccgcgctgcaggcaaatggatcctcaccagaaactacaacacctagtacccttggaagtaccagcctgcaccctgtgtctcaacatggcaatgaggccacaacaaacatcacagaaacgacagtcaaattcacatctacctctgtgataacctcagtttatggaaacacaaactcttctgtccagtcacagacctctgtaatcagcacagtgttcaccaccccagccaacgtttcaactccagagacaaccttgaagcctagcctgtcacctggaaatgtttcagacctttcaaccactagcactagccttgcaacatctcccactaaaccctatacatcatcttctcctatcctaagtgacatcttctgtgggtgacccaggtccttgtttgctgttgatttctttccagaggggttgagcagggatcctggtttcaatgacggttggaaatagaaatttccagagaagagagtattgg

SEQ ID NO: 23596 - DNA, 490 bp, Homo sapiens
  misc_feature (1)...(490): n = A,T,C or G
ngcggaattgaccttcgtgangcattcggcacgagggtaaatttaacccaattgagacatttctcttgtgaagttgtgcatctgacaggaatatagttctgtgcgatatgaggcaagctactcctttgaaaaaggttatcttagatatgagaacaaatacaatctgttggaaccctatggaagctttcatttttacagcagcacatgaagattataacttatatacttttgatatgcgtgcactggacactcctgtaatggtccatatggatcatgtatctgcagagcttgatgtggattactctcccactgtgaaggagtttgtgtctgctaaattcgataaatctattcgaatctttcctgtagacaaaagtcgaagcagggaggtatatcatacaaagagaatgcaacatgttatctgtgtaaaatggacttctgacagcgagtatattatgtgtggatctgatgaaaatacattcgcctgtggaaa

SEQ ID NO: 23597 - DNA, 403 bp, Homo sapiens
  misc_feature (1)...(403): n = A,T,C or G
atagananccggtcccgcgctgcaggaattcggcacgaggagaggggtgcaagatcctgatttttcaggcagagagaggagaattcagccacctgaagtcagcacctacagaagcacagtctcctggctttgcctctgaattattaacagcagagcagcattaaagagcccacacactagaaggaggatatgaagaaacacccagagaatgtcacaaaaacccagaatgtcacagtattgttttcttcttgctggtgtcctatcctctctcctaacaccagccaccaaagctgatttttaaaaaatgccatgatttctcttgtttacaagaagctgtttcctataccctattcttgaaggataaagaaatagtcattcaaaagaaaaaaaaaaaaaaaaaaaa

SEQ ID NO: 23598 - DNA, 483 bp, Homo sapiens
cccccatagcccgcctgcagaattggccacctgatttttgtataggtccgggaaaataagcctaaacaaatagttgtagccttagaaaaactgttttcccatttctttctgagttagaatcagcatagcctccctgtcgccttaaatgtaaaaatcctattttgattaataccccagcctaagagttatagcaatacgagagactgaatctatttttgtttcgggtctttacctcatagtatgaaattagtaagacactgcatagattttgccctgaatactggtgtgcccaggtatgccgtgctctctctctgtttccagtggtggtaattttaaggcctaaagaaagctggggttaatcctgaagctaaaagtaaatgtttcttgaattgattttgttctgtggtacaaataacatctatgaatatcatatctgtatatatctgaaccaagttgtgtgcagagaggttgatataactatat

SEQ ID NO: 23599 - DNA, 499 bp, Homo sapiens
  misc_feature (1)...(499): n = A,T,C or G
cattcgccccgcccctgngcggacttttgacnccgcgctgcaggattcggcacgagggacgcagaagtgacttctgcttgaggacgtctgcagctcctcctacaccagcacactggtgggaggctggcggagtcagtgactatggcccccacgttcaggaggaaggtgtgatgccgtcatacagttacaggaaaaataagaacttcctcagaaagaacaggtccgaattcttcctgtcgcgtcactgattttgaggttcttttttctcttggtgacaataggtgacccacgtggctctgtgtgtttttaaaaattgtccaccaagaagcactttgtgcccagaaagttcctgaagcatcatcctggcagggaggcgcctgctccaccagctggtgggtgtttgtaatcgccaagcaccagctataggtcacagccacatcactcacagctgatcactggttggtggaaaataaactatgagcagcagannaaaaaaaaa

SEQ ID NO: 23600 - DNA, 485 bp, Homo sapiens
  misc_feature (1)...(485): n = A,T,C or G
atagcccgcctgcangattccgcacgagcttaatttgaagtatacaagttatagagagtaattcctaaggtattaaaagattgtttaacagtatgtgtggtgatgtcattatctccacagaggcttcaagaaatcctttggaaataaaaagttaaatgtttacatttcatgtggtatttcaggtcttcaggttctgattagcttacttttttcctttgtctttggctgatttctgctttgtagatcagtaataatagccctgagatgtttctaacatttaaataagaaaaaaatcaaatcgaagtcagcctgctggaaaagtgatcacatggcagttgcagtaacttgtatggaaagagaaaatgcaatgagcccagttactgcacttgccactaccatgctgtccatggaaggaataatcagcagttcagttgtcacaagccgcccttgaagaanacgcagcanaatattttaaaatgaagata

SEQ ID NO: 23601 - DNA, 519 bp, Homo sapiens
  misc_feature (1)...(519): n = A,T,C or G
ggtacctttcnaagcccncncnnanaatagaccgcctganaaanncctttttgccgcgctgcaggaattcggcacgagctcaagccgaaaagaaatcaagagcccgagcccagcacattgtgccctgtactatatctcatctgctttctgccactttggttgatgaagtgttcagaattgggaatgttgagatttcacaggtcactattgtggggatcatcagacatgcagagaaggctccaaccaacattgattacaaaatagatgacatgacagctgcacccatggacgttcgccagtgggttgacacagatgacaccatcagtgaaaacactgtggttcctccagaaacatatgtgaaagtggcaggccacctgagatcttttcagaacaaaaagagcctggtagcctttaagatcatgcccctggaggatatgaatgagttcaccacacatattctggaagtgatcaatgcacacatggtactaagcaaagccaacagccagccctcagcaggga

SEQ ID NO: 23602 - DNA, 461 bp, Homo sapiens
  misc_feature (1)...(461): n = A,T,C or G
aacttgcaccgcctgtatgaattcggcacgagtgcctgacgcatctgtctgatgagcggtcagtgacgcgatggagcgggcatgggatcgcttacacctgagacgaactacagaacagcacgtaccagaggtggaagtccaagtcaaacgcagaaggactgcctcactgagcaaccaagagtgtcagttgtacccgaggcgttctcagcagcagcaagtacctgtggtggatttccaggctgaactgaggcaggcattcttagctgagacaccaagaggtggttaaagccatattggagtagcgaggaatctgattccaagcaaaaaccagacaatgtaataaaaatattattcataatttttcaaaanaaaaaaacccannnnaaaaaaaaaaaaaaaaaaaaaaaaccccccccgcccaggggggggccgggccccaattcccccttatggggagtata

SEQ ID NO: 23603 - DNA, 448 bp, Homo sapiens
aatagaaaaccttgatccgcgctgcaggaattcggcacgagccgatgtgcgcccattgtaaccaggtcatcagaggaccattcttagtggcactggggaaatcttggcacccagaagaattcaactgcgctcactgcaaaaatacaatggcctacattggatttgtagaggagaaaggagccctgtattgtgagctgtgctatgagaaattctttgcccctgaatgtggtcgatgccaaaggaagatccttggagaagtcatcaatgcgttgaaacaaacttggcatgtttcctgttttgtgtgtgtagcctgtggaaagcccattcggaacaatgtttttcacttggaggatggtgaaccctactgtgagactgattattatgccctctttggtactatatgccatggatgtgaatttcccatagaagctggtgacatgttcctgga

SEQ ID NO: 23604 - DNA, 476 bp, Homo sapiens
  misc_feature (1)...(476): n = A,T,C or G
ctctttcgattctgcnccgcgctgcaggaattcggcacgaggacaaagaaaagaaggaacaatggtcgtgccaaaaagggccgcggccacgtgcagcctattcgctgcactaactgtgcccgatgcgtgcccaaggacaaggccattaagaaattcgtcattcgaaacatagtggaggccgcagcagtcagggacatttctgaagcgagcgtcttcgatgcctatgtgcttcccaagctgtatgtgaagctacattactgtgtgagttgtgcaattcacagcaaagtagtcaggaatcgatctcgtgaagcccgcaaggaccgaacacccccaccccgatttagacctgcgggtgctgccccacgtcccccaccaaagcccatgtaaggagctgagttcttaaagactgaagacaggctattctctggagaaaaataaaatggaaattgtacttaaaaaaaaaaaaaaaaaaactg

SEQ ID NO: 23605 - DNA, 485 bp, Homo sapiens
  misc_feature (1)...(485): n = A,T,C or G
attgaaccccctcnttttgatcgcctgtccgaantcgccacgaggaagcttgggatccgtctcctctttcgcctcctgcaccttgggagccctgggctactctctcacagcccctgttgccctgtgatctgtaggtccttggggacgcatagtcaaggtgccaggacatcctggaagctgggaaatgatttcttccagaccatggctggagaaggaaagaagatttttgcagtggcaggaccaagttcaaatgagtcatagccaagtctacagtaagatgtggtagtattctgttttgaagcgaggaccatgattggcaagcttgccacttagtcaagtgcttaccctctaaagatgtcttccttggtctttgcctccagctgggtgtcacaaaccctgaactggattctaaggctttcatgaatgcacttatgtttgctgtgacagctcgattatgttgtgggggatgcgcatgccgaccctct

SEQ ID NO: 23606 - DNA, 500 bp, Homo sapiens
  misc_feature (1)...(500): n = A,T,C or G
agtgggtaaaaannnacttgatcgccctcgngaattccgttttgaaccgcctgcaggaattccgcacgagcaggcttgagggtggacggcgtgcctctcccaggagccttccccatgtccttgccttgctgagaattgccctcccatgccgctgaggtgttaggtggtttagggccaaaaggggaaaaccacttgagtcttgtggtgtgtggtgggcagacaccacagggtggcatcacctggtggcatttccagaacctcagccccgattccagcacccaccaccgcctgaccctgtgtaacctgctgtcccgggtcccagagtgcactctgccccactgctctgctgcctgtcctgggaaagtagctttgccccactaggaaatgtaaacaggagggcttggggagcgtgggcacttttctcatgagcagctactgcggcgttggcaggactcgctgctgctgctgctgcttgtgtaggtcggggagccggagatccc

SEQ ID NO: 23607 - DNA, 474 bp, Homo sapiens
  misc_feature (1)...(474): n = A,T,C or G
nttgcccgcctgcggatttcggcacgagcaacagcagtgttattgtagtgtggcagtttcttttatacataagtgagagtttttaaagtgtaagggaaaaattaattttttaaaaaacaccatgcttggagggtgggggtagaaatagacacaatattatttctaaggaatcggggtttcatttactctggactggtgaaaatattttttaaagccagagctctaagacctcagcttttatctcataaccccatgggttccagaccaagagtacaggaaatcaaattggtgtgctgtctgtctatagcttggaacagggagctttgattactgactccgggtccacacactgtacgatcaaataaccatctccacatttgaaagagatgtaaggtgtatacatagggatggtggctcaacaaatcatgcgaactggaatcaaggggagggggaatggaatgatatggataggga

SEQ ID NO: 23608 - DNA, 517 bp, Homo sapiens
  misc_feature (1)...(517): n = A,T,C or G
agtttctttcaccaggcnccnnccncccttttgccccgcgctgcaggaattcggcatgagagccactctgccctctctcctactttggctgactcttcaagaatgccattcaacaagtatttatggagtacctactataatacagtagctaacatgtattgagcacagattgtttttggtaaaactgtgaggagctaggatatatacttggtgaaacaaaccagtatgttccctgttctcttgagctacgactcttctgagctctattgctgcgcactgctttttctacaggcattacatcaactcctaaggggtcctctgggattagttaagcagctattaaatcacccgaagacactaatttacagaagacacaactccttccccagtgatcactgtcataaccagtgctctaccgtatcccatcactgaggactgatgttgactgacatcattntatcgtaataaacatgtggctctattagctgcaagctttaccaagtaattggcatgacan

SEQ ID NO: 23609 - DNA, 428 bp, Homo sapiens
  misc_feature (1)...(428): n = A,T,C or G
nagcgttcacggctgcagattcggcacgagatccgctggagcggagccggccgtacgcggtgctgcgagggcagaacctggatcaaactcttcattgaagtactcatcaggcgtgatggctgtggggttgtttgcagtagcacattccgtggtgaggtcctgctgagccagaactcaggagagtcagaaatgccaaatgatgttcacaagtgaaggcctgtggcactcagtgtctgaggtggacgtgttaaccagctaaagaccgngaagttctattcactaacttttttgcatggaacaagaaaatctatgaggatatcaccaaactacacaggaagtgtaatggatttcttcattttaaaatatttctctactctcctttacatttttatctcctgattataacaaagaaaaaaaaaaaaaaaaaa

SEQ ID NO: 23610 - DNA, 422 bp, Homo sapiens
aggaacattgtcgcctgtggaatatggcacgagcgtaggtgaacgtgaaattgacttaacatgcgacagaccagtttggtttgttgcccccaaaataccctccttccccccaccttttactgagaagacttttttggggggggggcccaaacaacttgggaaattgcatcaagcgtccgaacatgctgcttacaactttagaaacgcaaaatgcgttgttgtgggagttgtgtaatttttagtaggtgctcaaatacttgctgaacttggtgtctatttttaagtcttgcccattgatgtaaactgtccctaggtcacgtgtatcttgaggtctaaaagattatttatgcaataaattgaaattcccatagccaattaaagattcaaaaaaaaaaaaaaaaacctcgggggggggccgggcc

SEQ ID NO: 23611 - DNA, 446 bp, Homo sapiens
  misc_feature (1)...(446): n = A,T,C or G
gtggggnccnaaatgcccgccatggatgactcttaaacttttcgacattgttaacaagcatgttcatcttttcttgtcactagtccaagaaaaatatgcttaatgtatattacaaaggctttgtatatgttaacctgttttaatgccaaaagtttgctttgtccacaatttccttaagacctcttcagaaagggatttgtttgccttaatgaatactgttgggaaaaaacacagtataatgagtgaaaagggcagaagcaagaaatttctacatcttagcgactccaagaagaatgagtatccacatttagatggcacattatgaggactttaatctttccttaaacacaataatggtttcttttttcttttattcacatgatttctaagtatatttttcatgcaggacagtttttcaaccttgatgtacagtgactgtgtaaaan

SEQ ID NO: 23612 - DNA, 236 bp, Homo sapiens
  misc_feature (1)...(236): n = A,T,C or G
ngtggggagnaaaaaaactgagaggcttcgatagcatcgcaggaaacgcacgaggagaggttgcggtgctagtttctctaagccatccagtgccatcctcgtcgctgcagcgacacacgctctcgccgccgccatgactgagcagatgacccttcgtggcaccctcaagggccacaacagctgggtaacccagatcgctactaccccgcagttcccggacatgatcctctccgcct

SEQ ID NO: 23613 - DNA, 331 bp, Homo sapiens
agtgggactttgcctgcctgccgtgccacccatgaaccagcccagcatccagccagtgagtgggcacccaatgcctctcaggatgagaccagtaaatgccggaggtggagctgggcagctgtggagccccaggccacaggccagtctcgcttggctctcatgactgtggtggtggagatagcgtggggagcctcgcccatggtctcacgtggcaagaagtgcctttagctctggatcccaaccgtttggcacagctttggccacagccaggcccctctggaattgtccttattaaaccagtttcccgagaaaaaaaaaaaaaaaaaaaaaa

SEQ ID NO: 23614 - DNA, 499 bp, Homo sapiens
  misc_feature (1)...(499): n = A,T,C or G
cttggccncgcttttgccccgcgctgcaggaattcggcacgaggttttcttcaagcatttggtcgagattaagaattaaaaatgtcatccaaacaagaaataatgagtgaccagcggtttagacgggttgcaaaggacccgagattttgggaaatgccagaaaaggatcgaaaagtcaaaattgacaagagatttcgagccatgtttcatgacaagaagttcaagttgaactatgccgtggataaaagagggcgccccattagccatagcactacagaggatttgaagcgtttttacgacctttcagattctgattccaatctctctggtgaagatagcaaagcattgagtcaaaagaaaataaagaagaaaaaaacccagactaaaaaagaaatcgattcaaaaaatctagttgagaaaaagaaagaaaccaagaaggctaatcacaagggttctgaaaataaaactgatttagataattctatacgaattaananaa

SEQ ID NO: 23615 - DNA, 484 bp, Homo sapiens
  misc_feature (1)...(484): n = A,T,C or G
attagaccccgcgctgcanngaanncnatagaccccgcgctgcaggaattcggcacgagcatccgcatctccatgtgccagaacctcggctacaacgtgaccaagatgcccaacctggttgggcacgagctgcagacggacgccgagctgcagctgacaactttcacaccgctcatccagtacggctgctccagccagctgcagttcttcctttgttctgtttatgtgccaatgtgcacagagaagatcaacatccccattggcccatgcggcggcatgtgtctttcagtcaagagacgctgtgaacccgtcctgaaggaatttggatttgcctggccagagagtctgaactgcagcaaattcccaccacagaacgaccacaaccacatgtgcatggaagggccaggtgatgaagaggtgcccttacctcacaaaacccccatccagcctggggaagagtgtcactctgtgggaaccaattctg

SEQ ID NO: 23616 - DNA, 543 bp, Homo sapiens
  misc_feature (1)...(543): n = A,T,C or G
gagcgttcgcgncctgtgattcancggctgcaggaattcggcacgagccaatctgaaacctcgtgcctggctcgtctgccacctacatttctctttccagctgctgttttgtaaaaagaaaaagaaaaaagaagcccaaactagtgagagtaatatctaattatctcattttttgtaggtctgtgataaagaacttagtcatcccttccacctcctactgtgaagaacagaccctgggtcccacactgaaatcccctctagtcacccattcccaccccccagggagctgcctcccaggcagggggtgcagaaaatgattgatgggctggggaaccctggagagcctcgactccggaagtctcaaggtgcctcctcctctccttagctggcccgttggttttctgagcagggggctgaactgtgaacaagtcagacaaataaagcaagggtctgcaccatctgcaatgtcaaaaaaaaaaaaaaaaaactcaaggggggcccgggcaccattcccccctatagggagcggtatacaatccacgg

SEQ ID NO: 23617 - DNA, 463 bp, Homo sapiens
  misc_feature (1)...(463): n = A,T,C or G
ggaagaaaggaaaanattgcttggctgcagaattcggcacgagccgaagcgggagcggccaaaatgaagtttaatccctttgtgacttccgaccgaagcaagaatcgcaaaaggcatttcaatgcaccttcccacattcgaaggaagattatgtcttcccctctttccaaagagctgagacagaagtacaacgtgcgatccatgcccatccgaaaggatgatgaagttcaggttgtacgtggacactataaaggtcagcaaattggcaaagtagtccaggtttacaggaagaaatatgttatctacattgaacgggtgcagcgggaaaaggctaatggcacaactgtccacgtaggcattcaccccagcaaggtggttatcactaggctaaaactggacaaagaccgcaaaaagatcctcgaacggaaagccaaatctcgccaagtaggaaaggaaaagggcn

SEQ ID NO: 23618 - DNA, 479 bp, Homo sapiens
  misc_feature (1)...(479): n = A,T,C or G
atcgcccgcctgaattgaccggcatgcggagagccaccacttctggctgagtgggccatcttaaccacttttttcattctactaaataaaataaataggttaaacaatcttgactgcctagattgtcattcttacagctaaggagacccatcatttcctcctcataaaaaatataaattaggcaaaagtgatatcagactggtgaaaactaggagagttggttcagcccaatccatttattttatttatttttatgatgataactaactttcattgagtatccattataaattgagtgctatatattgtttagaccaataaatttagtgtgtgtgtttatgtggtctacacacactttaatacatatgcttttttttttttggccaaaaaaaaagggaaagacccctattttttttggattcccaatttttaaaaaccccttggttttcaaaaaattttaaaaaaggtttagggggaan

SEQ ID NO: 23619 - DNA, 501 bp, Homo sapiens
  misc_feature (1)...(501): n = A,T,C or G
agtggtgannnnnnaattcgccggcctgangctggtgatactctaatatttgcaggacaaaatgatcccttgaaagacagttacggtatgtctccctgcaacacagctgttgtacctcaggggtggtctgtggaagccttaaactctccacactcagagtcctttgtttccccagaggctgttgcagaacctcctcagccaacggcagttcccttagagctagccaaggagatagaaatggcatcagaagagaggccaccagcacaagcattggaaataatgatgggactgaagactactgacatggcaccatctaaagaaacagagatggccctcgccaaggacatggcactagctacaaaaaccgaggtggcattggctaaagatatggaatcacccaccaaattagatgtgacactggccaaggacatgcagccatccatggaatcagatatggccctagtcaaggacatggaactacccacagaaaaagaagtggcc

SEQ ID NO: 23620 - DNA, 470 bp, Homo sapiens
atcgcacgcttattgacggcctgggcatgccccataacctctgggcatcagacatcagcaggtctgtgtgcctcagccctgttaaggggcaggtttctctttagccctcttcctgcacttgggagcaaaggcactaccagtagagaagggccatccagccgtgccccagcctggacccctggggctcagatagaggtgctgagcccctgtgtcaaagttgttaaatgtttttgttttgctccattgtagctcttttttttttttttcccttttccgggggagggattttacaaaaaagagtaacttctttaaaggcccctgaaggggaatcggggagggggcacagggaaaaaactattccccggggggtgaggggggattttggcacaacgccatgtgaaaggggttctaaatatatgcgccccttccgagggggaaccctaaataccctctgggggggaggggccact

SEQ ID NO: 23621 - DNA, 483 bp, Homo sapiens
  misc_feature (1)...(483): n = A,T,C or G
catcgccccgcccttaattgacccgcatgtcagaattcggcacgagaaggagttacacccgtgagtggggaatgaggctggtcctgcagcctctccctccgctcagggcttgaaggtcggtggcggagggggtggctctcacagggcccaactctaaagtggaagaaccttgttagaccgagagcttgccatccagccaagctgctcgaggccctgcagtggccttggcaatgtctgtgccacctcctgagccctcccagcatgtcctcacatgctcatgcccacccgctcctccacaagcctagtccatcctgcctgagctccagcccccagcccccactgtgcccagacatgtgtgctcagggtggctttctccctaggaccttctgtgtatatagntagttttataaccctgaatgcccccacccttcccctaagcacacaggggttaaagctgtgtgtccctcccagtggctgtggcag

SEQ ID NO: 23622 - DNA, 500 bp, Homo sapiens
  misc_feature (1)...(500): n = A,T,C or G
agagcccggagtgcggnnaactgaaanngctgnnagnctgcggaaatnccgcacgagcttggttccatcgtgaagccataaacaggaatgcctttggcaatagccttgagcctagagggccctctgatgccccactgaggtgctgttggtttattgctggcaacgtgaattctctcaggggtctaggaggggcattttggagactgcctgacaccacccctatcccctgcctccccctctcagaagagggtggaagatgaaatgaaagctatgggactcttggaggatacccagtgtctattctgggttagagaagtgcttactaaggggttttctaataaaaacaaatgccacattgaanaaaaaaaaaaataaaaaaaaaaaaaaaaaaaaaaaaaggggggggggcccgggccccaattcccctttaaggggggtgaattaaaatttccgggcccgggttttaaaacgggggggggggggaagaggncntcntnntn

SEQ ID NO: 23623 - DNA, 465 bp, Homo sapiens
  misc_feature (1)...(465): n = A,T,C or G
ntttgccccgtcctgcangaattcggcacgagcccaagctggagtacagtggcaccatcttggctcactctagcctcgacctcctgggctcaagtgagcctcctacctcagtctcccaaaatgctgggattacaagcatgaaccactgtgacttgccttcttggcaattttaaatgaaagaagaagatggaataatgcctactgaggactatgtttgaggggtgttttatgaccccgttttccatacccagccaacttgtcatgtgacaagtccacagaaagatgttatatgacaggaatctatgaactagtcttccctgaaatgtacctgactacagctaacatcatatcacatgatgaaagacccggttgttttcccctgaggttggcaatcagctgctgtgttcatggagatgcttccaccagatggccagcccgccttgaagtgacatttcccatttcccg

SEQ ID NO: 23624 - DNA, 499 bp, Homo sapiens
  misc_feature (1)...(499): n = A,T,C or G
gggatgggagcagggccnnnnnnntttggannaattgcnccacctgcaggaattcggcacgaggacaaaaccaatgaggtttgtaaccagattcatcgacttggatggcctatcatgtatcctcaactttctaaagaccatggactacgagacctcagagtctcgaatacatacttctctcattggctgtataaaagcgttaatgaacaactctcaaggccgggctcacgtcctggctcattctgagagtattaatgtaattgctcagagtctgagcacagagaacattaaaacgaaggtggccgtgctggaaatcttgggcgccgtgtgcctggttcccgggggccacaagaaggttctgcaggccatgctgcactaccagaagtatgccagcgaaaggacccgctttcagacattaattaacgacttggataaaagcactgggcggtatcgagatgaagtgagtctcaagactgccatcatgtccttcattaatgca

SEQ ID NO: 23625 - DNA, 509 bp, Homo sapiens
  misc_feature (1)...(509): n = A,T,C or G
agggacgcncncccaaattgancggcctgtggaancgatcggctgtaggaaaacggcacgagctntcattggctttaagatgtgttaggaatgtcaacagagacgggagactataggcattcctggaatcacattcttagcacacctacacctcttgaaaatagaacaacttgcagaattgagagtgattcctttcctaaaagtgtaagaaagcatagagatttgttcgtatttagaatgggatcacgaggaaaagagaaggaaagtgatttttttccacaagatctgtaatgttatttccacttataaaggaaataaaaaatgaaaaacattatttggatatcaaaagcaaataaaaacccaattcagtctcttctaagcaaaattgctaaagagagatgaaccacattataaagtaatctttggctgtaaggcattttcatctttccttcgggttggcaaaatattttaaaggtaaaacatgctggtgaaccaggggtgttgatggt

SEQ ID NO: 23626 - DNA, 553 bp, Homo sapiens
  misc_feature (1)...(553): n = A,T,C or G
tggannnnnnnnnnnaggggnnnnccnnnnaggggnccnnnaatagtacggccntnattgancgncctgtaagaattcggcacgagctgcttgatggaggagccaaccccctgcagaggaatgaaatgggacacacacccttggattatgcccgagaaggggaagtgatgaagcttctgaggacttctgaagccaagtaccaagagaagcagcggaagcgtgaggctgaggagcggcgccgcttccccctggagcagcgactaaaggagcacatcattggccaggagagcgccatcgccacagtgggtgctgcgatccggaggaaggagaatggctggtacgatgaagaacaccctctggtcttcctcttcttgggatcatctggaataggaaaaacagagctggccaagcagacagccaaatatatgcacaaagatgctaaaaagggcttcatcaggctggacatgtccgagttccaggagcgacacgaggtggccaagtttattgggtctccaccaggctacgttggccatgaggagggtggccagctgac

SEQ ID NO: 23627 - DNA, 449 bp, Homo sapiens
ctttgaccctcgctgcacgcgaccggcacgagcaccagcactctgcaggccatacgaaagaagtgcagactggaccacattcctcccaactccctcttgcaggaagattggacggcttttcagaactccattaggataatagccacctgtggagagcttttgcggcattgtggggacttcgagcagcagctagccaacaggattttggccacagctgggaagtatctatctgattcctgcagcccccggagcctggctggttttcaggagagcatcttgacagacaagaagaactctgccaagaacccatggcaagaatataattacctccagaaagataaccctgctgaatatgccagcttaatggaaatactttatacccttaaggaaaaagggtcaagcaaccacaacctgctggctgcacctcgagcagcgctgactcggcttaa

SEQ ID NO: 23628 - DNA, 497 bp, Homo sapiens
  misc_feature (1)...(497): n = A,T,C or G
nggggtgggaggggnnngnnnnnnaattgcaccgtctgtangacttcggcacgagggagagtggagggtactttggggaggaaagtgtacaggtgatggagaggatgggagtggaaagactgaattgaactagactacagaggaccttacatactataacaaagaatttgggggtgagtatggtggctcatgcctgtaatcccagttctttgggagacggaaatgggtggatcacttgagcccaggaattcaagaccagactgggcaacatggagaaacctagtctctacaaaaactacaaaaattagccgggcatggtggcactcacctgtagtcccagctgctcanggagctgaggtgggaggatcacctgagccaagggaggtcaaggctacaatcagccatgagcgccactgtattccaccctagatgacaaagtgaatacctgcctcaaaataataataacttgggtcttgtaacatgtatagaaaggagga

SEQ ID NO: 23629 - DNA, 444 bp, Homo sapiens
  misc_feature (1)...(444): n = A,T,C or G
gtggggcnnnnaatgaccgcctggggaatctctcacgaggggactggtaccaccgcatcgaccccaccgtgctgctgggcgcgctgccgttgcggagcttgacgcgccagctggtacaggacgagaacgtgcgcggggtgatcaccatgaacgaggagtacgagacgaggttcctgtgcaactcttcacaggagtggaagagactaggagtcgagcagctgcggctcagcacagtagacatgactgggatccccaccttggacaacctccagaagggagtccaatttgctctcaagtaccagtcgctgggccagtgtgtttacgtgcattgtaaggctgggcgctccaggagtgccactatggtggcagcatacctgattcaggtgcacaaatggagtccagaggaggctgtaagagccatcgccaagatccggtcatacatcc

SEQ ID NO: 23630 - DNA, 453 bp, Homo sapiens
  misc_feature (1)...(453): n = A,T,C or G
attagaactctcccccgcgctgcaggaattcggcacgagaatgaacatgggagatccctatggttcaggaggccagaaatttccacctctaggaggtggtggtggcataggttatgaagctaatcctggcgttccaccagcaaccatgagtggttccatgatgggaagtgacatggtaagaatgattgatgttggctgatattggagtgctcattcacatgaagtggatagatacttctcaagacatcacacagcgtgagtcaatcaaggagggaagccacaagcagactgacaacgtttctagcaggatcaggtgagctgtgtccagaaaaccaacgagaaggagtggaaggaggaatgaacgtttcattctcgttaataaaggcattatcctaattannnnananaanaaaaaaaaaaaaaaaccctggggggggggcccggcccccattt

SEQ ID NO: 23631 - DNA, 455 bp, Homo sapiens
aatttgccccgctctgcaggaattcggcacgagattttctaacaagcttttacccagcacctgtccagtgaaacaacttgataatcgtttcgaggggcgtccgccgggttaggaagccactgcctggcagcttgtggaagcctcatttgcaaagccacccctcagatgttttgaagatcgtgacgtcttgtaactagcagtgtgtgcacagaatcctactcaaggaacgtcttggcccagcgatgcaaagaactgaagtttcaaggttttatgtctattgctggatggtcggggtagccccagtaactgggaactgctccgcagtccgctcacgtggacccctgtgggaatagcaagctggaagagcctgtattgtcctcacaatagtatagaagaattcaagagaggagagagagacagcaccgaatgaagactgtaaaagaaaagaaggaatg

SEQ ID NO: 23632 - DNA, 494 bp, Homo sapiens
  misc_feature (1)...(494): n = A,T,C or G
gggggcnnnnnaattcacggctgcggatccagctgccttaatagaagtactcaagtcttttgggtagtgagctggaaagcctacaggaaaagaggggtacctgttttcatttgaaaactttgattcatggaacctttaaaactaatctcagaaaaatttttggtgcccatgcagctgtagttgttcactgctttcctggatggatgggactcttatgtcataacttctgttactcctttggcccatagctaaggtcatccttccccacaggggtggctttgggattggatgatacagcttttgcttctgtgtagtatacctgtacatacttgtttcaggcagcctttctttaatgttttcagttggtttgtattctgtagctcagtagctgctaataaagttaaagatcctgaggnnaaggacatnaaaaaaaaaataaaaacccttggggggggggccgggcccccaatcccccttaaggggggggattaaag

SEQ ID NO: 23633 - DNA, 460 bp, Homo sapiens
  misc_feature (1)...(460): n = A,T,C or G
agcgggnnnnncctgaaactgatgccatcgcagacgacgctggacccctggctgtgactgtggccgccacggccacccggaatgtgaagggcgctccgggctctgagcccgcagcttttacgacttctccctgcctcgttccttatattcacagaagccccatagtttcactgggttgcggttattttcctggtagtttgcgtgtaagaaagggagaatatagttttagaggaagctgaactatgacgatgctgggcgaagcggttggaaatggcagagctgaaacttattccaagctttcaaaataatcttttaagaagccaggattctccggtctggaatttctgagtgagtcctttttttatggtgtcctccctctgtgaatgtacaggcggaactgtacgaacagctcccttccatccatttttaactctttcggaaataacacctcacagcagcg

SEQ ID NO: 23634 - DNA, 451 bp, Homo sapiens
attagacactcgacccccggctgcaggcaagaaggcactcatagaggttctgcagcccttgatcgcagagcaccaggcccggcgcaaggaggtcacggatgagatagtgaaagagttcatgactccccggaagctgtccttcgactttcagtagcactcgttttacatatgcttataaaagaagtgatgtatcagtaatgtatcaataatcccagcccagtcaaagcaccgccacctgtaggcttctgtctcatggtaattactgggcctggcctctgtaagcctgtgtatgttatcaatactgtttcttcctgtgagttccattatttctatctcttatgggcaaagcattgtgggtaattggtgctggctaacattgcatggtcggatagagaagtccagctgtgagtctctccccaaagcagccccacagtggagcctttggctggaa

SEQ ID NO: 23635 - DNA, 500 bp, Homo sapiens
  misc_feature (1)...(500): n = A,T,C or G
gggggcgcncaatcgacgcctgtngattgagcggctgtangaattcggcacgaggaaacatattgtctctttataaatgtcattttacaaattatgtgattatctggaagctctaagatgagagcaaatgcctgatcactctggccaaatgtcagatactaaagcccattcttggccgggcatgttggctcccgcctgtaatcccagcactttgggaagcccaagtgggtgaatcacctgaggtcaggagttcaagaccagcctgaccaacatggggataccccgtctctactaaaaatacaagccgggcgtggtggcgcatgcctgtaatcccagctactcaggaggctgaggcaggaaaatcacttgaactcgggaggcagaggttgcagtgagctgagatcgcgccattgcactccagcctgggtgacagagcaagactctgtctcataaataaatacaaagcccattcttccagagtcttgtgccttagataaaac

SEQ ID NO: 23636 - DNA, 492 bp, Homo sapiens
cttcgccccgccatttgacccgcgctgcaggaattcggcacgagggccagactggtctcaagctcctgacctcaggtaatctgcccgcctcggcctcctaaagtgccgggattacaggcatgagccatcgcatcgggccgagaatgttagatctcttaactttggtgtcgtggaagcagcatgggctttagagtcaggcagatctgggttcaaatcctgtctggcagtctagtggtgtagcttctttctggtaagaaacctacctttcctgatgctcagtttcctcatctgtaaaatgggaacaaaaataacctgttttgtggagttgttctgtgacggtggttctcatgtgtggtagctggggcagcaccagcagcagtggcggcctcagcatcacctgggaacttgtcagaaatgcaaattctcgggcttcaccctagacctcctgaatcaggaattctgggaatgactaggcaaactattttcatgagc

SEQ ID NO: 23637 - DNA, 449 bp, Homo sapiens
aattgacctgcgctgcacgaattcggcacgaggatgagatttccatccatgctgactttgagaatacatgttcccgaattgtggtccccaaagctgccattgtggcccggcacacttaccttgccaatggccagaccaaggtgctgactcataagttgtcatcaatcaaaggcaatcatattatctcacggacatgcacatcatgtcgtggcaagagccttcgggttcataagatcaagccttctatactgggctgcaacatccttcgagttgaatattccttactgatctatgttagcgttgctggatccaagaaggtcatacttgacctgcccctggtaattggcagcagatcacgtctaagcagcagaacatacagcatgggcagacgaaccatgtctgagatgaattgggtagatctgaacatccctgataccccagaagctgct

SEQ ID NO: 23638 - DNA, 475 bp, Homo sapiens
catcgaccgcctgcattagatcggcacgagcacaaatacaccttgtaccagataatgctttcttgtagtagaagaagaatcgggtaaattctactagattttagcagggtttctttcctattcattgttgcttatcaggttaaaaggattcctttaagcatgtcagatgaaaagcaattaggattaaaagtttccatttaatttcccttagacccttgaggcttcattaaactcttttcacttactaaacttttgtatcttctttgttttgacacactcccctttgcttttatctcttacctgccagaatgttctcaaatgatttagttcaaatactgaaatacttaatgagcaattacttgatttttaatgatgacttcgaaggagtcatcactaggtgctttgtcctttttggattctagttgcacccacctcttggattggatatagcaataacatttattggccgtctggg

SEQ ID NO: 23639 - DNA, 504 bp, Homo sapiens
  misc_feature (1)...(504): n = A,T,C or G
agtgtncaatgaaatcgatggcgttttttagccaagtctctttattggaaccgggccccgctggccctggctcaggcatttccatttccattagtgggaccaacccactgggtgatttgagtgttgagccgctggttggtccagtcctgccggatgtcatcaaggtggcagtcaaagtccacaaggtgctggtgggcccgatcttccagtaaagctcccaccatctgccgtgactcttcccagtccctccacatcactaagttcttatccttagggacccagcggagaccttggttctccaggacgatgaccgggggcacacgaggctgaggcaccagtttctgattatccaacataataagtactgcatcagggaagaattctgcaattcgcccagcaattttcaaggccaggggcccagggctgtgtaaagggaagatcaaaggagtgaggagccaactgtgggcaaaacccatccatttgagctgggcctcccaagtctaa

SEQ ID NO: 23640 - DNA, 519 bp, Homo sapiens
  misc_feature (1)...(519): n = A,T,C or G
tagccggagcncncnccattagancgcgntgcanatttgncccgcgctgcaggaattcggcacgaggagaaatcacattttggctattccccgacttgaaccaggggatagaaatcgtagtcaccggctgggcgcagcggctcatgctgtaatcctggcagtttgggaggccgaggcgggcagattattgaggttaggagttcgagaccagcctggtcaatatgatgaaacaccgcctctagtaaaaatacaaaaattatccgggcgtggtggcgagcgcctgtaatcccagctactcaggaggctgaggcagtagaatcccttgaacctggggtgcggaggttgcagtgagccaagatcgcgccactgcactccaggctgggcgacacggcgagactctgtctcanaacnnancnnnnnnnnnnnnnnnnnnnnnnnnaaaaaaattgggggggggggccggccccaattcccccttatggggagggtttaaaattcctgggcccgggttttaacacg

SEQ ID NO: 23641 - DNA, 466 bp, Homo sapiens
  misc_feature (1)...(466): n = A,T,C or G
ngattgaccgcctgcggaattccctggaggacctctttctgcacatgactaagatagaaaactgccaaggacaaatgaggagtagttagattttgaaaatattaatcatagaatagttgttgtatgctaagtcactgacccatattatgtacagcatttctgatctttactttgcaagattagtgatactatcccaatacactgctggagaaatcagaatttggagaaataagttgtccaaggcaagaagatagtaaattataagtacaagtgtaatatggacagtatctaacttgaaaagatttcaggcgaaaagaatctggggtttgccagtcagttgctcaaaaggtcaatgaaaaccaaatagtgaagctatcagagaagctaataaattatagactgcttgaacagttgtgtccagattaagggagataatagctttcccaccctactttgtgcaggtcat

SEQ ID NO: 23642 - DNA, 482 bp, Homo sapiens
cttcgacgctcgcaccgcctgcaggaattcggcacgagcacattttaaagctgatctcatcagttacttgatggcttataatgccccttctctcaaggagtggatagatgtcattcacaagcacgatctctctgaaacaaatgtttatcttattggttcaaccccaggacgctttcaaggaagtcaaaaagataattggggacattttagacttaagaagcttctgaaagaccatgcctcatccatgcctaacgcagagtcctggcctgtcgtaggtcagttttcaagcgttggctccttgggagccgatgaatcaaagtggttatgttctgagtttaaagagagcatgctgacactggggaaggaaagcaagactccaggaaaaagctctgttcctctttacttgatctatccttctgtggaaaatgtgcggaccagtttagaaggatatcctgctgggggctctcttccctatagcatcc

SEQ ID NO: 23643 - DNA, 521 bp, Homo sapiens
  misc_feature (1)...(521): n = A,T,C or G
agaggtgtnnnnccttgatgccctcggaatttgcacgagcagaaaggcacttccggtgtctgttgccaggcgcgggcccagtgggccgtaggggcgacattgttgccgtcgactttccccccccagacccggggatggagatgtcgggactcagcttttcagagatggagggctgccgtaacctacttggcctactggacaacgacgagatcatggccctatgcgacaccgtcaccaaccgcctggtgcagcctcaggaccgccaagatgctgttcatgcaatattagcatacagtcaaagtgcagaagaacttctgaggcgtagaaaagtccaccgagaagttatatttaagtacttggcaacacaggggattggtatacctccagctactgaaaaacacaatcttattcagcatgcaaaagattactggcaaaagcaaccacaactgaaattgaaggaaacgccagagccagttacaaagacagaggacatccacctatttcaacagcaggtgaaagaa

SEQ ID NO: 23644 - DNA, 522 bp, Homo sapiens
gcccccccccccgccccccccccccccattcgcccgccttgtcgcccgcgctgcaggaattcggcacgagctcatacctcttgtagttgggggattgcagtttataattccaataaatggggcaaattcaataataacataatacaaatgagtttgaatgcaggacaggtcttcaaagcatacacaacatgggcctacatatgtacaacaataataatttataagttactgtttggatggaaagtaaaagtacagaaaatttgttaaaggaaattaaaatggagatcatgtctcaataatctctgagcagacaaaattagttaggtctcataagtgatctcaacctcgcttgatttgcaaatacaaacaaaacttacattatttcttgtagctgcatattgaaaaaagagaaatgaagctcaaccagtcagaagtagccaacaaccttatataaatagaaactgtccaacaaggtaaacagacaaacaaaaaacaataaaaaaagttgtgctaccaccaaaa

SEQ ID NO: 23645 - DNA, 451 bp, Homo sapiens
  misc_feature (1)...(451): n = A,T,C or G
nattgaccctcgctgcacgaattcggcacgagcagggctctggcgcccgcccctgtccgcaccgctggcagcctgaagagagtcgctggccgtggtcgccgctaggtaggatatatctgcatcttgaaaggaagataaaacaaaagccttctttggaatagatggatttttgtcactttctgtgtgaactaaagtgattcaatgtctcttttggattgcttctgcacttcaagaacacaagttgaatcactcagacctgaaaaacagtctgaaaccagtatccatcaatacttggttgatgagccaaccctttcctggtcacgtccatccactagagccagtgaagtactatgttccaccaacgtttctcactatgagctccaagtagaaataggaagaggatttgacaacttgacttctgtccatcttgcacggcatactcccacaggan

SEQ ID NO: 23646 - DNA, 455 bp, Homo sapiens
aattcgactttcgctccgcgctgcaggaattcggcacgagtcacactcaacctgttttagagtccaacttgtgcccagactggccttctcattctgaagatgcgagtgctctgcagggcggaacttctgttgcccagattaaggcccagctgaaggaaatagaggctgagaaagtagagttagaattgaaagttagttctacaacaagtgagcttactaaaaaatcagaagaggtatttcagttacaagagcagataaataaacagggtttagaaatcgagagtctaaagacagtatcccatgaagctgaagtccatgccgaaagcctgcagcagaaattggaaagcagccaactacaaattgctggcctagaacatctaagagaattgcaacctaaactggatgaactgcaaaaactcataagcaaaaaggaagaagacgttagctacctttct

SEQ ID NO: 23647 - DNA, 489 bp, Homo sapiens
  misc_feature (1)...(489): n = A,T,C or G
attcgcccgccttgaggaattcggcacgagaccacctanatatganagattcatcaggccaatgggcttgcgtttcaagaaagcccatgtaacacatcctgaactgaaagccaccttttgcctaccaatacttggtgtaaagaagaatccctcatccccactgtatacaactttgggtgttattaccaaaggtactgtcattgaagtaaatgtgagcgaattgggccttgtgacacaaggaggcaaagttatttggggaaaatatgcccaggttaccaacaatcctgaaaatgatggatgtataaatgcagtcttactggtttgacagcaatttcatatataattattgaggactacacaccaattgaagaaactgccattactgtgatgtttctgaatactaccaaacagccatacatgtctgcaatgaagagatttattaaattggtaacattaaaaaannnnnnnnnnannnnnnnnnnnnnnnna

SEQ ID NO: 23648 - DNA, 409 bp, Homo sapiens
  misc_feature (1)...(409): n = A,T,C or G
gcgtnaaattggatcgacggcgtagaataggccgaggttttctgcaagggttgtgacctgaaactttttaaaaaccacccacctttggggaagcatttctgaatttatccatcaccaaccatttcttcttggataccatcaagtaacagctattatttgccaagtggagctgtcatttaatttgatgcacctctggattcagatgaaacattaaattgtcttcctcgattctccatcgggtgtagagtttttaaactatcaatggcatttcaagtcttctgaaacagcatggctgtatgtgcgtggtccatagcacagtacatgcagcatctaataagagtttccattgtagaatgttttcacatacttgaataaatcaaatctttaattgaaaaaaaaaaaaaaaaaa

SEQ ID NO: 23649 - DNA, 483 bp, Homo sapiens
aatttgaacgttttgcgcgacctcggcacgagataaaactgagcaagaggctctggagtatttcatgaaacaaatgaatgatgcacatcatggtggctggacaacaaaaatggattggatcttccacacaattaaacagcatgcattgaactgaaaagataactgagaaaatgaaagctcactctggattccacactgcactgttaataactctcagcaggcaaagaccgattgcataggaattgcacaatccatgaacagcattagaatttacagcaagaacagaaataaaatactatataatttaaataatgtaaacgcaaacagggtttgatagcacttaaactagttcatttcaaaattaagctttagaataatgcgcaatttcatgttatgccttaagtccaaaaaggtaaactttgaagattgtttgtatctttttttaaaaaacaaaacaaaacaaaaatccccaaaatatataga

SEQ ID NO: 23650 - DNA, 480 bp, Homo sapiens
  misc_feature (1)...(480): n = A,T,C or G
attgaccatcgaccggttgcangaattcggcacgaggaaagaacagggcctgttggatgccgtcacgtacctcgcaggggtctctggatccacttgggcaatatcttctctctacaccaatgatggtgacatggaagctctcgaggctgacctgaaacatcgatttacccgacaggagtgggacttggctaagagcctacagaaaaccatccaagcagcgaggtctgagaattactctctgaccgacttctgggcctacatggttgtctctaagcaaaccagagaactgccggagtctcatttgtccaatatgaagaagcccgtggaagaagggacactaccctacccgatatttgcagccattgacaatgacctgcaaccttcctggcaggaggcaagagcaccagagacctggttcgagttcacccctcaccacgctggcttccctgcactgggggcctttgtttccataacccactt

SEQ ID NO: 23651 - DNA, 475 bp, Homo sapiens
  misc_feature (1)...(475): n = A,T,C or G
ngactgatntccttngaannnncactgatctgcctcgcggaattccgcacgaggttctaggagtgagctggggcctgctgaggtgggggtggggctgactctgcaaaatgggggtgtcccccgatcctggccgaggtgaggaacagacagggggggtctagattctgagggggttggtggatattgggcaaggcaggaaacctctggagacctcattttctccatggggaagacagccatgctcttcaggaggagactccaagggcaaaggagggtgtcttggctgtgcttgaaggcgaaaccctgccatatccccagtgccagtcccctcagcctgtggtggccttgcatcctgactggatgttctcagccccttgttctgggcaagaacccagagctccccagtgtggatactaataaacctcttggagcacaaaaaaaaaaaaaaaaaaaactcgggggggggcccggtccc

SEQ ID NO: 23652 - DNA, 473 bp, Homo sapiens
attgacgccgtggactcgcacgagcccagctccggagcttccgaagaaacaggaccagagagggaaggtgacctgaaagtcacagaataattttttagagctgaacaagaatccaagcctgcaactgcagagacgagagatctttctgctgtctatactcttggaaagcacatcctaagatctttgcagattatcctgtggaaggaaaatgcctaaagtcaaaagaagccggaaagcacccccagatggctgggagttgattgagccaacactggatgaattagatcaaaagatgagagaagctgaaacagaaccgcatgagggaaagaggaaagtggaatctctgtggcccatcttcaggatccaccaccagaaaacccgctacatcttcgacctcttttacaagcggaaagccatcagcagagaactctatgaatattgtattaaagaaggctatgcagacaaaaacctgg

SEQ ID NO: 23653 - DNA, 495 bp, Homo sapiens
  misc_feature (1)...(495): n = A,T,C or G
naattgcaccgccntgnaggannnnnnagaatagacccgctctgcagggaaaaatgctgatgaaatggaaagagatggctgacagatatgatcgcttgctggagacctgctctattgcccttgtgggcaaatacacgaagttctcagactcctatgcctctgtcattaaggctctggagcattctgcactggccatcaaccacaaattggaaatcaagtacatagattctgcggacttggagcccatcacctcgcaagaagagcccgtgcgctaccacgaagcttggcagaagctctgtagtgctcatggagtgctggttccaggaggatttggtgttcgaggaacagaaggaaaaatccaagcaattgcctgggctcggaatcagaaaaagccttttttgggcgtgtgcttagggatgcagttggcagtggttgaattctcaagaaacgtgctgggatggcaagggtgggcagctggcctccaaaatgacaggc

SEQ ID NO: 23654 - DNA, 479 bp, Homo sapiens
  misc_feature (1)...(479): n = A,T,C or G
attgcccgcctgcggtttctagatagcacggcttaccagcaaaccagtgaatttattcgtgctttgaaaccgcctcatgtgattttagtccatggagaacagaatgaaatggccagattgaaagcagcactgattcgagaatatgaagataacgatgaagttcacatagaggttcataatcctcggaatacagaagcagtgaccttaaacttcagaggagaaaaactagccaaggttatgggatttttagcagacaaaaaaccagaacaaggccagcgggtctcaggaatacttgttaaaagaaactttaattatcacatactttctccttgcgacctgtccaattatactgacctggccatgagcacggtgaagcagacccaagccattccatatactggtccctttaatttgctctgttaccagctgcagaaattgacaggtgatgtggaagaattagaaattcaagagnaacctgc

SEQ ID NO: 23655 - DNA, 510 bp, Homo sapiens
  misc_feature (1)...(510): n = A,T,C or G
acgtgtgcattgaaatctgacngacgtcggcacgagggcatatctgtgtttgccttacatggcattgcagcagcatcatcttctctccgatgtcaccgttcgggggtttgttgctggagctactaacatcctttttcgacaacagaaacacctcagtgatgccattgtggaagtagaagaagctctgatccagatccatgatccagaactcaggaagctgcttaacccaaccactgcagacctaaggttcgcagactacctagtgaggcacgtgactgagaatcgggatgacgtcttcctagatggcacgggctgggagggaggtgacgaatggatccgggcccagtttgcggtctacattcatgccctgctggctgccacactgcaattagacaatgaaaagatattatcggactatgggacaacttttggtacagcatggaagaatactcacaactacagggtgtggaacagcaacaagcatccagcacttgcagaaataaatacaac

SEQ ID NO: 23656 - DNA, 473 bp, Homo sapiens
  misc_feature (1)...(473): n = A,T,C or G
nttgaccgcctgcagattcgttggaggccactgtggcacacgtgggcacctgagcacagggagcaggagtggacagaagccaaagaactgctgcaggagtcacaggaggaggaggaagaggaagaggaagaaatgcccagcaaagacccttccccagagccccctagccgcaggcaccagagggtccaagacaagactggaagggcacctcgggttcgggaggagctgtgagtggctgagccagctccttgaggatgtggccacttgacttgtggaaggccatcttgatgccaggacgcacaggaagcccctgtgtgacatcaggagcagaacagcaagctctctgtccctgcacccccaccatcttggggacctacaagggcctggactcagaggacagtgcacaggctagcctggagctcaccaggcctggggagctgggacggtgccccgctgccggacctgcagccctg

SEQ ID NO: 23657 - DNA, 439 bp, Homo sapiens
  misc_feature (1)...(439): n = A,T,C or G
nttgacatcgtccgcctgcggaattcggccgagaggaaccctaggccaccctccacgaggtgtgactaactatgcaataatccacccccaggtgcagccccagggcctgcggaggcggtggcagactagagtctgagatgccccgagcccaggcagctatttcagcctcctgtttggtggggtggcacctgtttcccgggcaatttaacaatgtctgaaaagggactgtgagtaatggctgtcacttgtcgggggcccaagtggggtgctctggtctgaccgatgtgtctcccagaactattctgggggcccgacaggtgggcctgggaggaagatgtttacatttttaaaggtacactggtatttatatttcaaacattttgtatcaaggaaacgttttgtatagttatatgtaccagttattgatattcaataaagc

SEQ ID NO: 23658 - DNA, 491 bp, Homo sapiens
  misc_feature (1)...(491): n = A,T,C or G
gcctttgccgcctgggaattggccgctttccgtntgtggcccatggtgtcagatgaatatgagcagctgtcctctgaagccctggaggctgcccgaatttgtgccaataagtacatggtaaaaagttgtggcaaagatggcttccatatccgggtgcggctccaccccttccacgtcatccgcatcaacaagatgttgtcctgtgctggggctgacaggctccaaacaggcatgcgaggtgcctttggaaagccccagggcactgtggccagggttcacattggccaagttatcatgtccatccgcaccaagctgcagaacaaggagcatgtgattgaggccctgcgcagggccaagttcaagtttcctggccgccagaagatccacatctcaaagaagtggggcttcaccaagttcaatgctgatgaatttgaagacatggtggctgaaaagcggctcatcccagatggctgtggggtcaagtacatccc

SEQ ID NO: 23659 - DNA, 495 bp, Homo sapiens
  misc_feature (1)...(495): n = A,T,C or G
natttgaaccgcctctgcaggaannncccaaaagcaccgcgctgcaggaattcggcacgaggagaaagcagcccaagttgggttactgtttcttaaactgttagggaaagttgagactgctaagaattccctggtcggccctgcatggcagacgggcctgcatcacttggcaggacccgtttatatttttgccatcacacacagcttggagcaaccatggaccactccgagatctcgggaagttgctagggaggtgctcacctcactgcttcaagttactgaatgcggttctgtggcaggattcctacatggagaaaatgaagatgagaaagggagactttcggtgatactagggcttctcaaacccgacttgtataaggaatcctggaagaataaccctgccatcaaacatgttttctcatggactctgcaacaggtcactcggccctggctgagccagcatctggaaagggtacttcccgcatcattggtcat

SEQ ID NO: 23660 - DNA, 487 bp, Homo sapiens
  misc_feature (1)...(487): n = A,T,C or G
gtggtntaggattgacggctgtggttacacaactctcttgtgccctattttggtgttttaaacttctttgctgtacatttaagaaaatcagaatttcagtagactcctcgtgcagtctgaggaggcagtttcctatctggtttgacttaaggggctgcagaagacattcttatcccacatatttcttctgctgatcagtcagcaactgaaattccaactaatggattccattcttccagttaagacatcatctccagaaaactgtgctagttggcatccagcagtgcccaagtattatttaacccactagaacctgtgactgtatcagctttatatcctggacctcagcctggaacaaaggagagctacacttggatactaaacacaagtggtctggatagattatgctgggaaaagaagcctggagcaggcagtacagtgggagaacaaggagagaatgagttgcagcagactgctcaggaattgt

SEQ ID NO: 23661 - DNA, 503 bp, Homo sapiens
  misc_feature (1)...(503): n = A,T,C or G
tggtngcnnnaattgaccgacctcgctaattcgccacgagaacatggcggcgtccgtgaggggctcctttgggcaggggtagtgtttggtgtccctgtcttgcgtgatattgacaaactgaagctttcctgcaccactggacttaaggaagagtgtactcgtaggcagacagctttagtggccggccggccgctctcatcccccgtaaggagcagagtcctttgtactgaccaagatgagcaacatctacatccaggagcctcccacgaatgggaaggttttattgaaaactacagctggagatattgacatagagttgtggtccaaagaagctcctaaagcttgcagaaattttatccaactttgtttggaagcttattatgacaataccatttttcatagagttgtgcctggtttcatagtccaaggcggagatcctactggcacagggagtggtggagagtctatctatggagcgccattcanagatgaatttcattcag

SEQ ID NO: 23662 - DNA, 474 bp, Homo sapiens
  misc_feature (1)...(474): n = A,T,C or G
nttgcaccgcctgcaggaattcggcaccaggaataattcacccaaatctagtggtcttatttcataggctaatctggtttatatttgcattaaagatactggagggcaatatttacagagtttagtttttcttaattaaaaacagtcctctattaatatagtgtgaaatatctttcaaaatttagagtttaggtttaagatgtctactagatatctttaagattttcctgtaaactcactgcacaaactggaattactttccaaaagacttagggaatgcaaatatgttactcataagatgcattgagtattgtaaataaaacaaaccatttttgatttgtttaaattgctcgttacagttctcttgtggggagggactttgtcagtcattttgcatcttaagctagactaaactttttgttggtggtttcctaaaaccataggtgcaagctttgccgctgggaagtcatattg

SEQ ID NO: 23663 - DNA, 487 bp, Homo sapiens
  misc_feature (1)...(487): n = A,T,C or G
aagaaaaaatttgaccgcctgttgactccgcctgcaggaattcggcacgaggaacctattgggtactgtacaacttcaagcctcgaaatcagataggcaccaccaacctcatttcctgtttcaccttgattttctgtgataccaaaatctcagcttcacaaagtcattgaaagtgttggttcatgaagttttaccatcaattcaagtaatcataaatggcaaattctgcaaaagcagaagaatatgaaaagatgtctcttgaacaggcaaaagcgtcagtgaattctgaaacagagtcttcattcaatattaatgaaaacacaacaacttctgggactgggctttctgaaaagacttctgtctgtacgcaagtagacatagcaagaaagagaaaagagtttgaagatgatcttgtacaggaaagttctagttgtgggaaagacactccatccaagatgagaatacttgatcctgaaattgtcccaan

SEQ ID NO: 23664 - DNA, 348 bp, Homo sapiens
agaacaggaacaccacgcccggctttcctacacccagctctctttttctaatgtaaatgttgtgtacaatagttttatttgattaagcttcatgactgttttgtaaagcgaggtgggaccagatgtggcacacgccagctgcggtttcccagagcgtgggaggcagtgctgctgctcccgcccgaggctcatgacaactcaataaagcactgcttttattttttgcagtcttcaatttgagacaggtgagaaataatgttctcaataaatgagattcataccattaaactccaaatcaaaattaatgccctcttgaggggggacccggtaccactattctctctattg

SEQ ID NO: 23665 - DNA, 496 bp, Homo sapiens
  misc_feature (1)...(496): n = A,T,C or G
cattcgccccgccatgtgcgccgcgctgcaggaattcggcacgagcggcctcctgtgagcagcgggaacctggaaagcagcacccagagcgccagcccgttccacagatggggccagactccggcccctcggagacatagtggccgggtggtgggggcccacaggccagggcttctgagccctgtcttcgtctacagcccagcctttcagagtggtggggaggagggtttatggatgtcaaacacctgcaccttgagataatcctacaaccacatgcagttgtgggaccgcagtttggtcctggggaccattcatacccacacacccagcttgtgcctgtggttaacatctcataaaactctggtaaatgatcactccaggatattgacacgaatacacgttactgatcttactcnccnnnnanannnnnnntngntaaaaaataaaaaaaaataaaaatttggggggggggccgggccccaattccccctatggg

SEQ ID NO: 23666 - DNA, 487 bp, Homo sapiens
cattgcccgcctgcagaattcggacgagcagcaagttacagggatccgggaagttgtgtggctggaaacccaggcagggctgcaccacagggaccatttgctggagatgcagcacttgccacagccaccaccactgacagcatgacacccacaaaaagggagcctccagctgcacccctgctgctgcgagtacttcctcagctgtcttccatgagcttaaggttaagtaccaggagggaggatatgattgggcaaacctcaggcatgtgttcattctgtagcttccagaacatgcgaggagagagcatctggctcctttgtctcgaggaggagggggcaggactctgccagaactcactcgataaaagattttcccaaaaggaagggtgttcagatgacaaaagtccactacaccactttccttggctatctgatgcacccccatcttcccatgcgcgcacctcagaaatcaggctcccacctgaca

SEQ ID NO: 23667 - DNA, 477 bp, Homo sapiens
  misc_feature (1)...(477): n = A,T,C or G
nattgancgcctgcggaattcgcatagacagctcttatttatgcttcgtatgcaaggattttgaatgatgagagaatagaggcatgttgtttcattttgtgtgaatttatcaatttagactttgttgaattggtacttgtgtcttgaaatttataagtgaattctagagccaattattttttcccttctagaatatcttagtattcttttttaaaagtactttttaaaaagtattctttttcaaggagtgaatttggggttgctttgaagtctcctgacatggggtaccttggtatgcttggtagagctatgacaggttctactgaagccagggagcaagccatgactgcacaacattcttggagggaagggcccaaggaaaaggatttggggaaaggcatggaaacaaatatatctttcttcataattggtaatatccttgtatgtggatacacctgctttgntattnttttttgn

SEQ ID NO: 23668 - DNA, 488 bp, Homo sapiens
agaagagaaaactttgcccgcctgttgtacccggctgcaggaattcggcacgaggtcgtctggacctacaagaggcagggacaggaagggagcacggtctttctagcagagtcagtagtgatgcggggtgaaactacagagaaccttcaccagatctgcacatgaggcaggcagcatcagggacacagacccatccctgttcccccaccattcattcctgctggctctgggcccaaagctggggcaaaatgtttttatgactctcttaagatccacttgtatctttacaaatcatgttgagtatgtttcgagtctccttctctagacggactgattcttatttatggtcctagaacacaacacagtgcctggtacagaatgtgggttaagcattgtcagcaatgattttgcagataggaatattctgttttatataaacagtgctgaggctttctcacagaccggattgtcctcctatgttgtggcaa

SEQ ID NO: 23669 - DNA, 502 bp, Homo sapiens
  misc_feature (1)...(502): n = A,T,C or G
tggtcncnnnccttggggactgtcctaggaatccgccacgagctttagcacacttcacttgtttctagaagtccagaattttggacctccacgtgaaagaactgttcttacctctgaactgggggctcccataagggataattttcctcagagtagcaaagtttctcttattagagaaatcttgtgactcagatgaagtcagggatagaagacccttggacctggcaggttaatgctgattattccttggcctttcccttgtatttatgcaaggaaggatatactgagctgatactcttccaagcctacaacttcaagttttatcatttgaactcaagtacttttgctgctgaggaatggaatcaaaagaacgtagtctcctggtaaccacctcagatctctattattaggctagatgtatagcctctactcccccagcttcttgctcttgaccctgcacttgaagttgcccttctattagcagccaaggaaaagggaaact

SEQ ID NO: 23670 - DNA, 501 bp, Homo sapiens
  misc_feature (1)...(501): n = A,T,C or G
agcccngnnnnnnnattgcattgcatcggctgcaggcagatacagagatggcttctggttctaacagaacaccagttttttcctttttagatctcacttactggaaaagacagaagatatgttgtgggatcatctataaaggccgttttggggaagtcctcattgacacacatctcttcaagccttgctgcagcaataagaaagcagctgctgagaagccagaggagcaggggccagagcctctgcccatctccactcaagagtggtgactgaggtttttatgtagaaggggaacaaaaaaaaaaatatctgaattttgaaaaaccacaaagctacaaactgactctttttttttttgaaacggagttttgctcttgttacccaggctggagtgcaggggcgggatcttggctcactgcaacttccgtctcccgggttcaagggattctcctgcctcagcctcccaagtagctgggtttataggtgcccgccaccagaccc

SEQ ID NO: 23671 - DNA, 511 bp, Homo sapiens
  misc_feature (1)...(511): n = A,T,C or G
gagccncnnnnnttttgacgatcgatcggctgtcngaattcggcacgagatctaaatgacattatatcatgttttcctgccgcaggtgcatagccacatccagaaatatcacagctgtgccagtaataaggatgctaacaattaatttgatcaaacctaactgtgacagctgtgatttgacacgttttaattgctcaagttaaatgaaatagttttccggcgacttcaaaaacaaattgcactgataagacaaaaacaaaagtatgttttaaatgctttgaagactgatacactcaaccatctatattcatgagctctcaatttcatggcaggccatagttctacttatctgagaagcaaatccctgtggagactataccactattttttctgagattaatgtactcttggagcccgctactgacagtatagatcacatctgtgtgaagccaaagacccgtggttagccatgagaagtgtccttgntcattgtcacccaaaatgaagtgtg

SEQ ID NO: 23672 - DNA, 442 bp, Homo sapiens
agactgaccgcctgcggaattctttgcgaggcctagtgacaccattgagaatgtcaaggcaaagatccaagacaaggaaggcatccctcctgaccagcagaggttgatctttgctgggaaacagctggaagatggacgcaccctgtctgactacaacatccagaaagagtccaccctgcacctggtgctccgtctcagaggtgggatgcagatcttcgtgaagaccctgactggtaagaccatcaccctcgaggtggagcccagtgacaccatcgagaatgtcaaggcaaagatccaagataaggaaggcatccctcctgatcagcagaggttgatctttgctgggaaacagctggaagatggacgcaccctgtctgactacaacatccagaaagagtccactctgcacttggtcctgcgcttgagggggggtgtctaagtt

SEQ ID NO: 23673 - DNA, 502 bp, Homo sapiens
  misc_feature (1)...(502): n = A,T,C or G
agcgnnnnattgacaactgattgccatgcggaattcgccacgagaataaagtaagcatactttgttgttagtaaatagatgaggcatgcctgggaaatgctcccttggcataaatagcaatcaattataattagtaaacaggtgtaccaataaaaagaatttacatgataggttaacaaggaccaggaaagtgagtttcctgaaggagttctttgttcctgatcaaagaaattgatacctgttagcattcactgccaccatattttaaggagaaagaactctattggtgtcgtctgagcagccatttaaaaattggaatctaaaggatggttgctgatgtactgtgtggtctggtagaagtggggaaatatgagagatggaggaaaaacttgattatgtcttccatggcatatttactcttactttacttcgtgccaaatcaaatgaaacaagccgtcttacaagtcgntattgcctttaaaaatctgttccgttnttttcn

SEQ ID NO: 23674 - DNA, 468 bp, Homo sapiens
  misc_feature (1)...(468): n = A,T,C or G
nattgaccgcctgaggacntcgcacgagccgagatcgcaccactgcactccagcctgggcagcagagcaagtagtaataaccaccgtgtagacaagtgggagggaagaatagaatggcactgtccagctctgggctagccagatcaactcccccacccgtcttcttcctctgtcccagaatggaaaatgatgtatggtcagtcacgctgaagtatagcagcgactgtgttaagagagagcagtgactctctcttctagagaagagggtttcaataacagggcttggaaatgaactagaataggaaatagatcttttcagatgctgctttcccatgtaatacaagcgtttctacagggtaccagaggtgtgaaatatgtgacacttaagaacagtgatttttattgggaattttcttagggttattacacttaaagcaacaaccaactagtaacagctccaggataggg

SEQ ID NO: 23675 - DNA, 488 bp, Homo sapiens
  misc_feature (1)...(488): n = A,T,C or G
tgaaaggtcnnnnntttcgcccgcctgcatgaattcggcacgaggtcggnggcgcgctcgggtacctgtaccccacgtagtcgccggttaccgatcggactaagttccagtggtgatttacaagtcaagttaaaatgtccccagaagtggccttgaaccgaatatctccaatgctctcccctttcatatctagcgtggtccggaatggaaaagtgggactggatgctacaaactgtttgaggataactgacttaaaatctggctgcacatcattgactcctgggcccaactgtgaccgatttaaactgcacataccatatgctggagagacattaaagtgggatatcattttcaatgcccaatacccagaactgcctcccgattttatctttggagaagatgctgaattcctgccagacccctcagctttgcagaatcttgcctcctggaatccttcaaatactgaatgtctcttacttggtggggaa

SEQ ID NO: 23676 - DNA, 501 bp, Homo sapiens
  misc_feature (1)...(501): n = A,T,C or G
agggccccntttgcccgctagaggacttcggcaccagccacgagattatacttaccgtgattatggtcattccagttcacgtgatgactatccatcaagaggatatagcgatagagatggatatggtcgtgatcgtgactattcagatcatccaagtggaggttcctacagagattcatatgagagttatggtaactcacgtagtgctccacctacacgagggcccccgccatcttatggtggaagcagtcgctatgatgattacagcagctcacgtgacggatatggtggaagtcgagacagttactcaagcagccgaagtgatctctactcaagtggtcgtgatcgggttggcagacaagaaagagggcttcccccttctatggaaagggggtaccctcctccacgtgattcctacagcagttcaagccgcggagcaccaagaggtggtggccgtggaggaagccgatctgatagagggggaggcagaagcagatactn

SEQ ID NO: 23677 - DNA, 460 bp, Homo sapiens
  misc_feature (1)...(460): n = A,T,C or G
nttgcctggctccgaatcgccgagaagatgcgtcctaggaagggggccgccaccctcccctatgctggtagatgctgaggcccctaggtgcccagggccagtgggaccctctcagaaccaaatctttcccctttctcggggcttggggctcgggccgtaggggctcctgagtgtcatgaagtgcacaggagccaaatgaccgagccctggagagccccatggtgggaggtggttcgtgctgtgctctggcaccatcagcctgttccagaaggaggattcgagcatcaggctaagaccctgtgtcctccaccatgcactcacccctagccctggttagctgacagtcagctgtggggaacacagctacaaccctaccctggcagggacctgagagcatctcangaggggcagcgcatgtgtgcatgtgctgtgtgagtgagcacacccgtgtgcacactca

SEQ ID NO: 23678 - DNA, 473 bp, Homo sapiens
  misc_feature (1)...(473): n = A,T,C or G
ntttgatcgcactgagagagtttgattgcctctgggcctctgctgcgtcctgctgaccttcgggtcggtcagagctgacgatgaagttgatgtggatggtacagtagaagaggatctgggtaaaagtagagaaggatcaaggacggatgatgaagtagtacagagagaggaagaagctattcagttggatggattaaatgcatcacaaataagagaacttagagagaagtcggaaaagtttgccttccaagccgaagttaacagaatgatgaaacttatcatcaattcattgtataaaaataaagagattttcctgagagaactgatttcaaatgcttctgatgctttagataagataaggctaatatcactgactgatgaaaatgctctttctggaaatgaggaactaacagtcaaaattaagtgtgataaggagaagaacctgctgcatgtcacagacaccggtgtaggaa

SEQ ID NO: 23679 - DNA, 338 bp, Homo sapiens
  misc_feature (1)...(338): n = A,T,C or G
taacaggancaccangcccggctttcctacacccagctctctttttctaatgtaaatgttgtgtacaatagttttatttgattaagcttcaggactgttttgtaaagcgaggtgggaccgatgtggcacacgccagctgcggtttcccggagcgtgggaggcagtgctgctgctcccgcccgaggctcatgacaactcaataaagcactgcttttattttttgcagtcttcaatttgagaaaggtgagaaataatgttttcaataaatgagattcataccattaaaaaaaaaaaaaaaaaaaaaaaaaccctgaggggggccccggtccccctttccg

SEQ ID NO: 23680 - DNA, 500 bp, Homo sapiens
  misc_feature (1)...(500): n = A,T,C or G
ngtggtnnnnacctgaggactgaggacatgcggaaanacgnnnaangaagnctgaaaggtaagcgccatcgtggtcagagatacggaggcccggtcagactctccctctgcacctcaatggaaacgatgtggtgtccgggtaccatggccaggcccagcacacggggctccccggcagagaaggaatcaggcgggtgtgcattccccgggcactgacccgacggcttgaggaactcctgcgccgagcccaggatgacattgcagtcacggtcagtgcagagaaagcagccgaccagtgtccgtccatctgtcatgcgaatgcgcatagtcttgttgagcagcgcctctagctgctgtcgggcgcgctcagccgccgagtcctcgcgctctccgtccgaatccccggcactggagctgctctgacgccgactgcaacagccattctcttctcgtagcagcatggtcggtccagctccggccatttgcccggaggcctcctt

SEQ ID NO: 23681 - DNA, 483 bp, Homo sapiens
  misc_feature (1)...(483): n = A,T,C or G
natttgcaccgccctgcaggaattggcacttgtatatcacttccttatcaaattttctctctcccagatattggggttcattaagcattgcctcacaggtagtaattgtcattgtacttctgagagaagtaatgtaaattttgcatcacaaccaaaatttgttgaatccatggatacctgggagatcaatttggggatgattgattaccggggtcattttgaatgaataaatgaaatatagctcagctacatttcatagtaagatacagcattaaaagtgccaactgttggtgcttagttatgggtaggttccagaaaggtgcatttccatggaccatgccgactgttcattggaagtgaggtggattatttttttattctcttctgaaaaatcaccaggatatttatgcacagtttanagacatttagtaggacacctaattnttttttccatctttaatgagattcagaattcaactgggg

SEQ ID NO: 23682 - DNA, 462 bp, Homo sapiens
  misc_feature (1)...(462): n = A,T,C or G
nttgacccgcctgcaggaattcggcacgagcccatgtatcctatcctaagatacatgtgggggacagatacctatcgggagagcattaaggatttggctgactatgcctctaagaatttagaagccatgaatcccccacttttcctccgctttcttaacctgctaatgaatgatgccatcttccttttggatgaagccatacagtatttgagcaagataaagattcagcaaattgagaaggatcgaggtgaatgggatagtctgactccagaagcccgccgagaaaaggaggctggcctacagatgtttggacagctggcacgtttccataacatcatgtccaatgaaacaatcggtacccttgcctttctcacatcagagatcaagtcactctttgtgcatcccttcctggctgagcgcatcatctccatgttgaactacttcctgcaacacctggttggc

SEQ ID NO: 23683 - DNA, 504 bp, Homo sapiens
  misc_feature (1)...(504): n = A,T,C or G
tgcgnnntnnnaattgacgactgtcgtgtagcgacggcagncattaaatgattgttatgcacaatgggcacttgattataattatttaactggcaatcagctattgcagcaatttggtggtgtaattaaaagggagcatgtttgtacctgccagcatctttgagatcttcggctctggatgaagcaggagaggcagaacataaactaatggacggaagaatcaagcacttctgtgaatggaatcttttattcctcgcccatctgattcttggctgctttgttccataagatctgggacatgagcgatgatgagaccatctgagatggccccgctgtggggctgacttctccccggccgcctgctgaggagctctccatcgccagagcaggactgctgaccccaggcctggtgattctgggcccctcctccataccccgaggtctgggattcccccctctgctgcccangagtggccagtgttcggcgttgctcgggattcagan

SEQ ID NO: 23684 - DNA, 437 bp, Homo sapiens
  misc_feature (1)...(437): n = A,T,C or G
gactgatcgcctgcggaattcctgatagccgtcgntacatcatgcacaagctggatgacgtgaccccgctgctgctgtgtggagagggaggctgctgaacccgagctggtgtgagcttctcttgccgtaagtccacgggtggccaggagcacgtgttagtctggttaagagctctgctcagaagtagccgctgcagctgaaggttttcaggcgggctgaaggctgggccgcttcttcattcatttcagaaacttgaacagtgggccttctacacacgctgtctttgtcagcctcaggcagttcctccatggatgagacacaggggcctctggccatgactgtccatcttcttgccaactctgggcacggctcccttctgcagaggactctggaccagctcctggattgcatttgcccagaggtccggctctttcagg

SEQ ID NO: 23685 - DNA, 500 bp, Homo sapiens
  misc_feature (1)...(500): n = A,T,C or G
agcgttnctcatagtcgcctgaggaacntgccacgaggcttctactaagatatttctttccctaaccatcatacacttggcatgtttcattcccatctcctttcccctcaccttaaaggagactacccctttgccccatattgtcaacctaattttctctcgtactctctctagtgaatgatgtgctaccaagtatatgccaggctgtgagaggattatactgagtagtagaaagaagctaatttgaaataaaaattatttgtataattaagaaagcagattagatgcacatggtcaacaggaagttgactgtatgtctgctagttagattcaaaacatcataaagatgatagcatgtcaatatattagcctagccattatgttagcctttgttaggtgggcagcttttctgctttttcccttcctctgtggtgacaacggaggaaatatccaacagaaatacgtctaacaggggaaatgggatcatagtttatatgcat

SEQ ID NO: 23686 - DNA, 475 bp, Homo sapiens
  misc_feature (1)...(475): n = A,T,C or G
ntttgacctttcgcaccgcctgcaggaattcggcacgagctttaaaagcttcctccaaatgctcagtactgggaccaactaataggtagattttaatatggtggttttgttttggttttgtttttactacggtgctgatgtatatgtaatgtctaaaaaaagttatttgtacataagtttttacaatactgcagatatcactgggtctactatctgtaaaaaatatacatataaatatatatatactgtttgtttaaaatagagtatttttatttcattccttaactcatcatcacagcagtggtattgcacttcagatgacatctaattactaatttgtactgtatgacctctggcaacttgctccattttattcagatttttctagttttctgtttttactttgtacattgagcattgcttatttccttttaagaaatgtacagaacgctgaaatgtagaaatgaagtgatgn

SEQ ID NO: 23687 - DNA, 501 bp, Homo sapiens
  misc_feature (1)...(501): n = A,T,C or G
cttcgcccccctgcggatttcgcaccgcactaccactaagcaaccgagaatcgcccccatcctacaacatcctgtttttggactggcttgaagatataaccacaatgtacaatgtcatttccatggaaaatatcttctgactctcagcaaaagccttcacgaggttagaaactgtgtctgtgttgtttcccgttatccatctagtccttccacaaatattcctcgaaggctgaataaaggatgataatcttctagaagagactaactttgatatttctgaaagaaggcatatgcattgatggaaaattggagaattgaaatagcttggattaaaaattaaaggcagaaaaaaagcacctatcacgcaacacctaaagttctttttttgtttttaattgtaatcaattgtaagattaaatctgtctttacgagacattgtcctaagagtagtgatttttactggccttcatagactgtcagaatctatcnntctaaaatgtg

SEQ ID NO: 23688 - DNA, 486 bp, Homo sapiens
  misc_feature (1)...(486): n = A,T,C or G
attagacagcttgcagcggntgcaggaattcggcacgagctggagagataccctacgcataaccgagaggaatgtggggcagcctttacctggtgcacaagcgttactaagcataggagcattcatgctggagagaaacccctcatgtgaagagcgtggcagaaacgctagctgatccttaagctttgacaaacattagagaattcatactggagagaaaccctacacgtgaagaatgtgggggggccttgacacaatccacagttctgaatgaacataacaaaattcatactggagcgaaaccctacaaatgtgaagaaagaggccaagcttttacacagtccagaagcctgtatgaacatatgaatatgcatactggagagaaaccctacacgcgtgaagaatgcgtcaagcttttgaccactgctcaagccttattatacacaggagcattcattctgaacaagaactttacatatgtgaaga

SEQ ID NO: 23689 - DNA, 480 bp, Homo sapiens
  misc_feature (1)...(480): n = A,T,C or G
nattgacngactganngacntccgagaanatganngaattctactccttggcgggcagcatcccggacaccaaggcggagatcaccgtgtcctgcttgaacctactggacaaagacatgttttccaagtccgacccactgtgcgtcatgtatacccaagggatggagaacaagcagtggcgggagtttgggcgcaccgaagtcatcgacaacacgctcaatcctgacttcgtgcgcaagttcattgtggattactttttcgaggagaagcagaacctccgttttgatctatactacgttgactctaagagttctgatttatccaaacacgatttcctgggccaggccttctgcacccttggagagattgtggggtcccctgggagccgcctggaaaagcccctcacgataggcgcattcagcctgaattccaggacgggcaaacccatgccaactgtgtccaacggaagtggtctatggt

SEQ ID NO: 23690 - DNA, 496 bp, Homo sapiens
  misc_feature (1)...(496): n = A,T,C or G
aaaagaaaagaattttcgcncgcctgcaggaactcggcacgagaagaatcccgaagcagcaattgagtggtacgccaagggcgccctggagacggaggatcctgcgttaatctatgactatgccattgtgctattcaagggtcaaggagtaaaaaagaacagacggcttgccttagagctgatgaagaaagcagcttccaagggattgcatcaggcctccccagacactgccacgtccactgcaagtccagctgtgactccagctgcagatgcctctgaccaagaccagcccacagtaactaataacccggagccacgtgggtgaactgtgcactccagttctctccagatgagagagaatcttttcaacagctggtattgggaagctggggccagggcatgatcctgataaacaccttaaatgtcttgtcaactggaaaaaaaaaaaaaaaaaaaaaaaacctcgggggggggccgggacccaatttcccctttt

SEQ ID NO: 23691 - DNA, 494 bp, Homo sapiens
  misc_feature (1)...(494): n = A,T,C or G
gacggccgngaantttaaaccttgatggcctgagaacttgcacgagccgcatgtggaccatgagccggctgccagcactaggtcctgggcagctttgtttgtcccacttttctttgtttcttctcactaaaatgatcacgaagacctttgacaagaggagagatatgcactgtgatattaaattagaaataatttatcaaaatcagacctctcctaaaagaataagaaattcattgtttggcccatcctgaaaggtgaggtggcgagacagtggggtgcctccgtgccgcttcgtgcagcagcaagttcagcctgagatgctggctgtactcagcctttgcaatttttgtagatgtagcttaggacgtgagttatttttccgcagactggccaagagccaggttctaagcttggacctaaggtagaaagctgcccatcgggggccctagctcagccccaccaggccctctgttgggcctgcacacagctctgtg

SEQ ID NO: 23692 - DNA, 487 bp, Homo sapiens
  misc_feature (1)...(487): n = A,T,C or G
gggggggnattgantttcgcaccggctgcaggaattcggcacgaggtccccgtgcgcagaggctactgggggaacaagatcggcaagccccacactgtcccttgcaaggtgacaggccgctgcggctctgtgctggtacgcctcatccctgcacccaggggcactggcatcgtctccgcacctgtgcctaagaagctgctcatgatggctggtatcgatgactgctacacctcagcccggggctgcactgccaccctgggcaacttcgccaaggccacctttgatgccatttctaagacctacagctacctgacccccgacctctggaaggagactgtattcaccaagtctccctatcaggagttcactgaccacctcgtcaagacccacaccagagtctccgtgcagcggactcaggctccagctgtggctacaacatanggtttttatacaagaaaaataaagtgaattaagcgtgaaaaaaaaa

SEQ ID NO: 23693 - DNA, 498 bp, Homo sapiens
  misc_feature (1)...(498): n = A,T,C or G
ctcgccccccctnccnncatatgacccgcgctgcaggaattcggcacgagatgacatgtattttgtatttaaaactagaatagccagtatttatgttttttataaaactgtgcaatacgaattatgcaatcacaatacatttgtagctcccgagtgtcctaaagggagtgcacttctttgaagctggtgtgttaatactatgtaataaatggttaactttcaaatgatgctgctgccaaaattatattaatagtgagtttcaggcccctgggcattttgtaccatgtaattatcctctggtgatgctgtttctcgttagtggcagtagtgcctccgtctcctagtgataatgctccaagtctatgaactgttaaatcagcattcattttaagaaaagcaactttagtttcaaagatacttttaagcttctaaattgatcatttanactatttctttaaataagagagccaaattagaggctcatactttagcttgtga

SEQ ID NO: 23694 - DNA, 501 bp, Homo sapiens
  misc_feature (1)...(501): n = A,T,C or G
agaaggcaggggggnnngnnnaattgatngatagatcgaccttaggaattcggcacgagtagggttaccagcccaatttcgacagatggaatggcagaggagcttacgatggacggtgttgcaggcgagcattcccaaatcccaaatggctccagaagtcatgaacctctgtctgtggattctgtgagcaacaaccttgcagcagacgctgtaggacatggtggtgtgatacccatgcatgggaatggcctggagctccctgtggtcatggagacagaccacattgcaagtcgggtcaatggcatgtctgacagtgccctcagtgactccattcacactgtggccatgagcaccaactctgtaagcgtggcactctctacctcacacaaccttgcctccctagaatctgtttccctccatgaagttggcctcagcctagaacctgtggctgtctcctccatcacccaagaggttgctatggggacaggtcatgtagatgtn

SEQ ID NO: 23695 - DNA, 482 bp, Homo sapiens
  misc_feature (1)...(482): n = A,T,C or G
ccttgaccngccnntgaggattttgacccgcgctgcgagaattcggcacgaggtgaaaccatacatagacgaggtgattatagagcagtttgttgaatctcatcccaatggccttcaggtcatgtataataaactcctggagtttgttcctcaccattgccgccttcttcgagaagtcacaggaggtgccatctccagtgaaaaaggcaatactgttcctggatatgactttttggtgaattctgtttggccacaaatagtacaaggattagaagaaaagttaccctcgctttttaatcctgggaatcccgatgcatttcatgagaaatataccataagtatggattttgtcagaagattggaacggcagtgtggatcacaggctagtgtaaagagattaagagcccatcctgcctatcacagcttcaataagaagtggaacttgcctgtttattttcaaataagatttagagaaatagcgg

SEQ ID NO: 23696 - DNA, 440 bp, Homo sapiens
ggctgatcgcctgcggaattcctgagaggcgtgagagagagagagagagagagagagagagagagagagagagagagagccctaccccccctcacacatttacactgacaggaatagacactgaatgcgccacgaggaaagaacgctgtttctgtggggtagtggggaggtcagagacgcggcgccatgggtgtcccacattcccaacaccgctctgtgatcaccgtgggaatcttttgactcaagacagggacaggcgcggggctctcccttctctcctcttgtgtaccccctccccctggagggcatggtgtctgcgggtggcactgatctatgaccctccgtgatggtgatgtacgccacagacagagcctccctatgagtgagtatagtgctggtgagtgtgtcatatacccacacgccatgtgtgtctaagatac

SEQ ID NO: 23697 - DNA, 506 bp, Homo sapiens
  misc_feature (1)...(506): n = A,T,C or G
ggagacccganggnggntgnaaccttggaagaattgaccggccgtacgcaaatcggcacgagcgcggtcgtaagggctgaggatttttggtccgcacgctcctgctcctgactcaccgctgttcgctctcgccgaggaacaagtcggtcaggaagcccgcgcgcaacagccatggcttttaaggataccggaaaaacacccgtggagccggaggtggcaattcaccgaattcgaatcaccctaacaagccgcaacgtaaaatccttggaaaaggtgtgtgctgacttgataagaggcgcaaaagaaaagaatctcaaagtgaaaggaccagttcgaatgcctaccaagactttgagaatcactacaagaaaaactccttgtggtgaaggttctaagacgtgggatcgtttccagatgagaattcacaagcgactcattgacttgcacagtccttctgagattgttaagcagattacttccatcagtattgagccaggagatgaggt

SEQ ID NO: 23698 - DNA, 499 bp, Homo sapiens
  misc_feature (1)...(499): n = A,T,C or G
ngacgtannnnnaatgatgcatgaggacttgcgagagagcccagaataccttgaccaatgatgtaccaggccacattctgctgtggtcctcatgtaatacccagctgccctcattcactcaccaagggcaacatgcagtgccagcagaagcccctgggccatctgcacaaaggtcaaaagtttctcaatgggtgtatctcgctattccgcaaacctaaacaccatgtgtcccactgatgctatctctgcagtgccattttatattttacttcctctgtaccccgaggcctttggcaaatgaatgacaccaacccaacctcaagccctgccacctcttgcctctgctagtccctcctagcctgattcctccatattgtcagggtgtcttaaatgccaccagatttgtcttcccacaggcatggaggttcacaagtaactaacttggtttccacatctgccagctcagatgactgttagcacctgtgaaaattcattntga

SEQ ID NO: 23699 - DNA, 506 bp, Homo sapiens
  misc_feature (1)...(506): n = A,T,C or G
ggagcgtnnnnnaactgaggactgcagcgcttgtccgagtncggcacgagatcgctttttgtgagtagggtcctgttttatccaggaaccaatttctgccctagcctatcatgccctgcttttgagagtaccaggtatctttgggattgggaagctggctgtttcagaagtatatgtctcatagtgtgcagaacttggtgaccaagtgagaagcgggaccaatgggagactcacaatggactgagtcttgggattatcttttccaaattcttccatgttagaatcacttcagaaaataagactttgatgctttgtctctgagcatcatttttctcctcataaaaacacttccttattgtatgtagcctgcctcctacagaggcctggtaggtgttactgcattctaaaagaaaaatgtcatctctgtaggagcgactatcaggcctagtgtgaaatattagggatcctaggcagaagagctattagtcctggccttcatatcttca

SEQ ID NO: 23700 - DNA, 506 bp, Homo sapiens
  misc_feature (1)...(506): n = A,T,C or G
cgcgggggnnnnntttgannaaatgagngctctccganccaacggttcattcgtgccttgaccaggatcctgagcagagacctactgcagatgaacttctagatcgccctcttctcaggaaacgcaggagagagatggaggaaaaagtcactctgcttaatgcacctacaaagagaccaaggtcaagcactgtgactgaagcacccattgctgtagtaacatcacgaaccagtgaagtctatgtttggggtggtggaaaatccaccccccagaaactggatgttatcaagagtggctgtagtgcccggcaggtctgtgcagggaatacccactttgctgtggtcacagtggagaaggaactgtacacttgggtgctctttttttctactggttttcttcatatgaagntccattaaagatcagcttttggcatgaaaaattaaaacttcataagacctctcagccggggaatgtggttcatgtctacaatcccagcactttgggaa

SEQ ID NO: 23701 - DNA, 495 bp, Homo sapiens
  misc_feature (1)...(495): n = A,T,C or G
ggaggcaggggnnngnnnaattgangatagatcgcctgtagaattcggcacgagaagggcagcttctgggacagttcacgtatgatcaggatggggagtcgctccagatgttccaggccctgaaaagacccgacgacacagctttccaaatagtggaacttcggattttttctaactggggccatcctgagtatacctgtctgtatcggttcagagttcatggcgaacctgtcaagtgaagacactactcattatttttgtacatttttgtatatactgggacagcgtgaaacactggaatccttcatggacgagggcatatacaatgatgggacagtgccacactccttcaataaacgtggctgctggccagaggacgtgagcgtgtgacgggcgccttggcgccacctgttgggtgctcactgcctctgcaggtgcagaggggtcagcagcaggagaagcgtgttgaacacgtggctctcagacactccttgt

SEQ ID NO: 23702 - DNA, 499 bp, Homo sapiens
  misc_feature (1)...(499): n = A,T,C or G
aggggnntnnnnttttatgaccgcctgcagaattcggcacgagatgggtcgggggctgctcaggggcctgtggccgctgcacatcgtcctgtggacgcgtatcgccagcacgatcccaccgcacgttcagaagtcggcacttccccactgactacagtaaggatgtaagaaacaccccatagagttgatacaatcaagtttccttctgccggaatgtcagcatctggaatggcaccaaaggatttgagaagaatgatgccaggacaccagattttcaaacaagcatctatcagccatggtatttttcagttaaacaatatatgtgtaagaggctttagctatcaaaaaatttaaacattttctggaactcaatagcttttatcgccagaaaatcggtaccaacacagacctatttcacagtgtgctgcacacaaaaaacattcaataaatataatattgttcaataaaaaaaaaaaaaaaaaaaaaaactccagggggg

SEQ ID NO: 23703 - DNA, 473 bp, Homo sapiens
  misc_feature (1)...(473): n = A,T,C or G
aaactgancgccctgcgtagtacggcacgagctcggaggcgttcagctgcttcaagatgaagctgaacatctccttcccagccactggctgccagaaactcattgaagtggacgatgaacgcaaacttcgtactttctatgagaagcgtatggccacagaagttgctgctgacgctctgggtgaagaatggaagggttatgtggtccgaatcagtggtgggaacgacaaacaaggtttccccatgaagcagggtgtcttgacccatggccgtgtccgcctgctactgagtaaggggcattcctgttacagaccaaggagaactggagaaagaaagagaaaatcagaaacctactcaacacagcactctaggcagccactatcaatcaattgaagttgacactctgcattaaatctatttgccattaaaaaaaaaaaaaaaaaaaaaactcgggggggggcccggtacccattt

SEQ ID NO: 23704 - DNA, 510 bp, Homo sapiens
  misc_feature (1)...(510): n = A,T,C or G
gagaggggggnnnnatggancgccctttgcaccggctgcaggaattcggcacgagtggagatgccactttgaagaacccaatcctctggaatgtggctgatgtggtcatcaagttccctgaggaagaagctccctcgactgtcttgtcccagaaccttttcactccaaaacaggaaattcagcacctgttccgcgagcctgagaagaggccccccaccgtggtgtccaatacattcactgccctgatcctctcgccgttgcttctgctcttcgctctgtggatccggattggtgccaatgtctccaacttcacttttgctcctagcacgattatatttcacctgggacatgctgctatgctgggactcatgtatgtctactggactcagctcaacatgttccagaccttgaagtacctggccatcttgngcagtgtgacgtttctggctggcaatcggatgctggcccagcaggcagtcaagagaacagcacattagttccagaagaaag

SEQ ID NO: 23705 - DNA, 477 bp, Homo sapiens
  misc_feature (1)...(477): n = A,T,C or G
ntttgacnttcngtccgcgctgcaggaattcggcacgagccaggatgaagacatttgaggaattccccatgaccccaacgacctacaaaggctctgtggacaaccagacagacagtgggatggtgctggcctcggaggagtttgagcagatagagagcaggcatagacaagaaagcggcttcaggtagctgaagcagagagagagaaggcagcatacgtcagcattttcttctctgcacttataagaaagatcagagactttaagactttcgctatttcttctactgctatctactacaaacttcaaagaggaaccaggaggacaagaggagcatgaaagtggactaggagtgtgaccactgaagcaccacagggaggggttaggcctccggatgactgcgggcaggcctggataatatccagcctcccacaagaagctggtggagcagagtgttccctgactcctcaaggaaaggg

SEQ ID NO: 23706 - DNA, 448 bp, Homo sapiens
  misc_feature (1)...(448): n = A,T,C or G
aatttgcactcggctgcacgaattcggcacgagggcaggcgtaccagactgcaagaccccccagtacctcaccgtgccaaataggaagaggtggccttggtgtatccaaatggatctttttaacagtgtgcctttggggagggacccatgtccatggcttcgttgagggccatccatatgccagctgggggccagcccacagtggccatattggctgcagcaggaatggtgcccacctcggcgaattgaagggctaagagtcccagatagctaggccagagctggaagcagacagtaaggggaagagctgctcccacaggagagggagagattccagctcactgcgcagcctgggaggaggcgtggatcctggcacgctgagcctcaggcaccagcctccctgtgctcgacagcaaagtcttgactccttcctgtgagcactgtgctn

SEQ ID NO: 23707 - DNA, 483 bp, Homo sapiens
attgaccgcctatggaattccgtacgagccaggatccatgagcttaaacaggccaaagtgagcacagtcatggataccgttggccggaggcttcgggactccctgggccgaactgtggacctggggctgacaggcaaccatggagttgtgcaccctagtcttgcggacagtgccaacaagtttgaggagaacacctactgcttcggccggaccgtggagacactgctgctccgctttggcaagaccatcatggaggagcagctggtactgaagcgggtggccaacatcctcatcaacctgtatggcatgacggccgtgctgtcgcgggccagccgctccatccgcattgggctccgcaaccacgaccacgaggttctcttggccaacaccttctgcgtggaagcttacttgcagaatctcttcagcctctctcagctggacaagtatgctccagaaaacctagatgagcagattaagagagtg

SEQ ID NO: 23708 - DNA, 543 bp, Homo sapiens
  misc_feature (1)...(543): n = A,T,C or G
aggtgttcgcgccgtnattcgacggctgcggtggagggcgagctgagccctggccgccgccacaatgggccgcgagtttgggaatctgacgcggatgcggcatgtgatcagctacagcttgtcaccgttcgagcagcgcgcctatccgcacgtcttcactaaaggaatccccaatgttctgcgccgcattcgggagtctttctttcgcgtggtgccgcagcttgtagtgttttatcttatctacacatgggggactgaagagttcgagagatccaagaggaagaatccagctgcctatgaaaatgacaaatgagcaacgcatccggatgacggatccctgtctctgaaagacctttctctggaagaggagtctgcattgtagtgtctcacagacacaataaacttcctatggtctgcaaaaaaaaaaaaaaaaaaaaaaaatcctggggggggcccggggcccacatcccccctattggggggggtttacaatatctttgccggcggtttaaacacngcggcgaatgggggagaactggnncc

SEQ ID NO: 23709 - DNA, 481 bp, Homo sapiens
  misc_feature (1)...(481): n = A,T,C or G
cctagacccgcgntgnaagaatttgacccgcgctgcaggaattcggcacgagggaatattttccgtgattcccaactcaacatggcgtagccaagtgtgtttagtgaaggaaggcacaatctttggttgcctccattagtgggacgagtttaaatactgggtggttgccagggcctgctgatggaagcatggtctgtggctttcaaggctccccacatgtgcatgccagttatttgggaaatcttaaaaataccaataccagaaaataaatcgggtgacatcagattcttgtaggcaggcaggttttatgagaaccctggtatcaaattcccaaagtaaagagcacacacctttcagcttaccactgcacatccccactgcccagcacagtgcctgccacatagttagtgctcaaatatttattccatgtttttgcatgtgctgggactgggcatatttattacaataattggatttgtaa

SEQ ID NO: 23710 - DNA, 473 bp, Homo sapiens
  misc_feature (1)...(473): n = A,T,C or G
attggaacgctgcgaacggctgcaggaattcggcacgagcccaccccccaccctgtaaactaggcggctgcagcaagcagaccttcgcatcaacacagcagacaccaaaaaccagtgagagccccgctctctaccgcccggccccagcactcgctagctttcctgacacctggaactgtgcacctggcaccaagcggaaaataaactccaagcagccagtagccccgatggtgtgtgcctgagctgtgtggcccgaggttccaaaaaaaaaaaaaaaaaactcgggggggggccgggaccccaattccccctatagggaggcgaataacaattcacgggccggcgtttaacaacgtcgggacgggagaaaannnnnnnntnnnnntttntnnnnngngngggnncggnctcnattttggcttttgtgagtgggtttttgattgggttgggcgttttttttngggtgggggagg

SEQ ID NO: 23711 - DNA, 481 bp, Homo sapiens
  misc_feature (1)...(481): n = A,T,C or G
naattgaacgtccgtaggacttcggcacgagcacatatgcaacacctgtggacatgtggagtgttggctgtatctttgcagagatgtttcgtcgaaagcctctcttctgtggaaactctgaagccgaccagttgggcaaaatctttgacctgattgggctgcctccagaggatgactggcctcgagatgtatccctgccccgtggagcctttccccccagagggccccgcccagtgcagtcggtggtacctgagatggaggagtcgggagcacagctgctgctggaaatgctgacttttaacccacacaagcgaatctctgcctttcgagctctgcagcactcttatctacataaggatgaaggtaatccggagtgagcaatggagtggctgccatggaaggaagaaaagctgccatttcccttctggacactgagagggcaatctttgcctttatctctgaggctatggagggtcctccn

SEQ ID NO: 23712 - DNA, 460 bp, Homo sapiens
  misc_feature (1)...(460): n = A,T,C or G
agcgggcnnattgaaattgactcgctctgcaggtggaagcaattttggaggtggtggaagctacaatgattttgggaattacaacaatcagtcttcaaattttggacccatgaagggaggaaattttggaggcagaagctctggcccctatggcggtggaggccaatactttgcaaaaccacgaaaccaaggtggctatggcggttccagcagcagcagtagctatggcagtggcagaagattttaattaggaaacaaagcttagcaggagaggagagccagagaagtgacagggaagctacaggttacaacagatttgtgaactcagccaagcacagtggtggcagggcctagctgctacaaagaagacatgttttagacaaatactcatgtgtatgggcaaaaaactcgaggactgtatttgtgactaattgtataacaggttattttagtttctgtt

SEQ ID NO: 23713 - DNA, 334 bp, Homo sapiens
  misc_feature (1)...(334): n = A,T,C or G
ngggcctgactcttacattggccgagccggtatgaaaagaaagacagcgtacaacactgctcttctggctgctacagacttactaaaaaggctctattctaccagtgcctccccgcttgtgttgctcaggacgtggggcttgcaggccacaaatgcagtgtctccactcaaagaacagattatggcctttgcaagcaaatgagtactcctctcctaaagaaagattacgttgatgaaaaagaacatcctgcccaggacccatcatacatattttcaagatcttatttaatttaataaacttactttacattaaaaaaaaaaaaaaaaaaaaaaa

SEQ ID NO: 23714 - DNA, 540 bp, Homo sapiens
  misc_feature (1)...(540): n = A,T,C or G
nagagttcgcggctgagatttcggcacgagccggcactcgcagccccatggctgggggttatggagtgatgggtgacgatggttctattgattatactgttcacgaagcctggaatgaagccaccaatgtttacttgatagttatccttgttagcttcggtctcttcatgtatgccaaaaggaacaaaaggagaattatgaggatattcagtgtgccacctacagaggaaactttgtcagagcccaacttttatgacacgataagcaagattcgtttaagacaacaactggaaatgtattccatttcaagaaagtacgactatcagcagccacaaaaccaagctgacagtgtgcaactctcattggaatgaaacctcagaaaaagagcaacagaagtaattggttcaagctcctgattctttctactaaatcatgaacagctntaaaaacatttctgtctgcataaaattattttacttggtaacttttccccattggtctgtgcatttggttgccttttaattacatcttcaagtgccc

SEQ ID NO: 23715 - DNA, 458 bp, Homo sapiens
  misc_feature (1)...(458): n = A,T,C or G
agctggggacattgacctgcgctgcacgaattcggcacgagggtatctgagactcacacagtgtggttggaagatagcacagtgacctcccaggcacagccctctgccagccctccactggctgccctaggatgctggccttcctccgatgggagtcgggcccagtctgctgtgagccaggagaagccagcaagctccctgcgaggcctggaggagcccttctcactcagcttggtgttcgatgccagtgcccccgcccattgtggggtgagggtgggactctcagcacagccctgtccaaataaatcctctaaagccctcttcaaaaaaaaaaaaaaaaaaaaaaaaacccctgggggggggcccgggccccaattcccccttaagggggggggaataaaattccaggggcggggttttaaaaagggggggggtgaaaaacannnnnnnnnnnnnnn

SEQ ID NO: 23716 - DNA, 488 bp, Homo sapiens
  misc_feature (1)...(488): n = A,T,C or G
ggcggggcnnccnaaaagcccgcctgcggaattctgcacgagcggaaatgttcatttttagattgttaatagaaattggggagcaacttttgagtatctttagtttcctgaaggacaccgaattctccattagataaaccaccaagactgttcacatcatctctctaacattgcacgcttcctttgtgtacttaagtgattctcgaaatatacagaaccaatgtatgctaaccagatgcattgtttgcttcagatccatggggttaataccatgtatattttataaagataatttggctgtgttaaaagagaattacctgagtccaagaatgtggaaatgtatctgacaaaaaacatcaaaatcattagcaaaacataggacttagaatgttaatgtacaagttaagactaaagtttaaggactaaggttccttggattatatgacttgttaagattgccacagttccgatctcaacagtgtggggtg

SEQ ID NO: 23717 - DNA, 352 bp, Homo sapiens
  misc_feature (1)...(352): n = A,T,C or G
taccacctcttgngcctgtcaccccttggatgggttcctagcttgtctacattttcctgaaccctcctgagcgcccgttcttggtctaatccccagtcctgatgattccacacttcctcagccgcatgttgtcttgcctcattcatgagctggacacgtttcgtctctttaactgacatgttcccccgcgctctttgcactgttgactttccgttgctcgctgagtgcgttttgtacttcacgcaaccttcgctggtaaacctaagcccatgcgattgccaccagcggatgaatgctggaccgagagccctaccttctggatccaggactacgcccttcatctgctgctctg

SEQ ID NO: 23718 - DNA, 483 bp, Homo sapiens
attgcccgcctgttggaattccgtacgagccagctcaggtacaggctgccgcagctgctacagttaaggcgcaccatcatcagcactcgcatcatccacagcagcagctggatattgagccggatagacctattggatatggagcctttggtgttgtctggttgagaatctgtagtactgagaagtttctccactatcagccgagattaacagccacagctggattctttgggggctctgctttgtgaaaagagctttgaagaagcagagcctgcaccataaaaaggaaacggttgctcttctagacataacaaagcatccgtatgaaactagaaatgtggaaatctgtattgttaattttaactacaaacgaacttacttttggaaattacaggttcatgatcataaagtagataaagagtagagaataaaagtaacaatctgatgattctgcacccacttcttggtggttgaactccatag

SEQ ID NO: 23719 - DNA, 472 bp, Homo sapiens
cattgactgcgctggcgaattcggcacgagctgcctggaactcctgaccaacccctgagcctggactgcggccacagcttctgccaagcatgcctcactgcaaaccacaagaagtccatgctagacaaaggagagagtagctgccctgtgtgccggatcagttaccagcctgagaacatacggcctaatcggcatgtagccaacatagtggagaagctcagggaggtcaagttgagcccagaggggcagaaagttgatcattgtgcacgccatggagagaaacttctactcttctgtcaggaggacgggaaggtcatttgctggctttgtgagcggtctcaggagcaccgtggtcaccacacgttcctcacagaggaggttgcccgggagtaccaagtgaagctccaggcagctctggagatgctgaggcagaagcagcaggaagctgaagagttggaagctgacatcagag

SEQ ID NO: 23720 - DNA, 445 bp, Homo sapiens
attgacttcactgcaggaattcggcacgagctgcgccatgagagccaagtggaggaagaagcgaatgcgcaggctgaagcgcaaaagaagaaagatgaggcagaggtccaagtaaaccgctagcttgttgcaccgtggaggccacaggagcagaaacatggaatgccagacgctggggatgctggtacaagttgtgggactgcatgctactgtctagagcttgtctcaatggatctagaacttcatcgccctctgatcgccgatcacctctgagacccaccttgctcataaacaaaatgcccatgttggtcctctgccctggacctgtgacattctggactatttctgtgtttatttgtggccgagtgtaacaaccatataataaatcacctcttccgctgttttagctgaagaattaaaaaaaaaaaaaaaaaactcgaggtcg

SEQ ID NO: 23721 - DNA, 487 bp, Homo sapiens
  misc_feature (1)...(487): n = A,T,C or G
cgcgggggtnnnttatgatctgctgcagcaattcggcacgagaagactcagtctcttaatcactggaatgccttcatcttcaagattttcctgttatagtgttcagtcatttctttgccttgcaggtttggtcccaagcagtaaatctccaaaaaggcaattggaaccgactctaaagccattgtaggaccctcaagtgaaggaccctcatgtaaaagagagaccaggcctgctgggtgtgtacatagttatttaaacaagaaactctcaaaatgtgtttggaagaggagaaaggagaaccactgattttatctggatgctactacttactacaggacagatagaatttctggaagcgatgctccaaaggcttgctcccagctgtatcatggacctgccttctcatctttatagtgccacgatttatacagtcctgtgtgtgacctgtcatttcatagcctgcagntcttgccattggcacacttaa

SEQ ID NO: 23722 - DNA, 553 bp, Homo sapiens
  misc_feature (1)...(553): n = A,T,C or G
nagatgttcgacgcctgtngttacgccgcgctgcangaattcggcacgagaaggaactgcctcctcacttggcttctctccccctgccctgcccccagagagggattccggggaccctctggtggacgagagcctgaagagacagggctttcaagaaaattatgacgcgaggctctcacggatcgacatcgccaacacactaagggagcaggtccaggaccttttcaataagaaatacggggaagccttgggcatcaagtacccggtccaggtcccctacaagcggatcaagagtaaccccggctccgtgatcatcgaggggctgcccccaggaatcccgttccgaaagccctgtaccttcggctcccagaacctggagaggattcttgctgtggctgacaagatcaagttcacagtcaccaggcctttccaaggactcatcccaaagcctgatgaagatgacgccaacagactcggggagaaggtgatcctgcgggagcaggtgaaggaactcttcaacgagaaatacggtgagggccctggggcctgaccn

SEQ ID NO: 23723 - DNA, 493 bp, Homo sapiens
cattgcacccgcctcattgcaactcgctgcgagactttattactagcataaaggtctcagttccagaagctatacctttattttgagctgtgtataggtagaataaaaaattcctttcatatcgttattgtacaaaaagtaaagagtatcctaaagattgtattcattgtaatcaagtaatgcaatcatctctcctctcttgaaatcttgctggacctcttaggctacaataaactgtaccaaactaaactgacagtccttcgataatatgaaacattaatttacaaggacccgttagggcttcaatgatgctgagtctggaaaaggggaggagacccttgggaggactccaggcagctgtgctcccagggctcatgttctctactggattagggataggcacctctgaaatctccaccctgatgattggaatgaaacggagtgaacatgagcccagctgagagaggagcaggaatgtgtgaaaaacagctgg

SEQ ID NO: 23724 - DNA, 451 bp, Homo sapiens
  misc_feature (1)...(451): n = A,T,C or G
gagccacactgaattcatgacgattgncggacgcganaaagacgaactattggaggtggtggccaatgatgcatttactgtttgcaggatagttaaaggtgtttaaagggtaaggcttttggtgtaaatgctggatggggtgtgtgtgtgtgtggatatagggacctccctctgtactgtgtactgtgtaatcggcattaatacctagactcatatgtatggaattataaattctcttatcctactgattggcttggatgagcacaccagctgcaggtgtgtgctgaattgcaagatggtatttttttttttaaccaagggatgtctcttgtaatactaaccgcgtgataatgggttttcagacatgatgaaaaaaaaaaacttttccaaaggaatacttaccttagaaatattcaccttaggaaaaaaagactttgctctgcccttttan

SEQ ID NO: 23725 - DNA, 457 bp, Homo sapiens
  misc_feature (1)...(457): n = A,T,C or G
ggcggggncattgaccttgattcgcgctgcaggaattcggcacgagcttcctcctactacctcttatactcatctccccaaattatttgcctcccttaaataagttttcctagaaggtaagctggtcaggcaatttgaaaaatattagatcccaagaaatctattccgtttgcattggacttctcggattccatgtgtttgcagcaggactacatcgaactctgatgtgccggattgtggcatgtctgcatgtctcatccatctattgtttttggtaactcagtttggaatttcagtgtctgtcttccctgggttgacattggaatcagcctctcctttgagcttattttaactcttgagcaacataacatagatttaatgtgaacagtttataccaaagggcagcctgtgcctgtttatggatcctctctgcctttgtacttgaagagcgcatttt

SEQ ID NO: 23726 - DNA, 539 bp, Homo sapiens
aagagctctcggctgagattcggcacgagaaaagttaaggtaagacaaatgaggtaaaaataaaaaagagcacttagctgctctgagacattttagtctcctgactggtaaacagcagctggggcaccaaggggctcccaggagtttgtcgagcttttattggagtgaactgaaaggaaaatggaaggaatgctataagactgaaaagaagttaaagccctaggaaggaagctgataacacaagttacagacgtatatgtgacattgatttgggagaatgaacctacaacaaatgacccaaaagcacctaaataagagtgacgagagtttaacagacattcattatggacttcagagaaaatgatgctaaactggtcttagaatcttctttaattttgttaactaggtaaataatctggacattttagtcaaagcattagacagacagagaagttggtaactgaccactaactaacaaactataaattcacccattggtggttgacctggtaagttcccccagggctgtgtccttgccc

SEQ ID NO: 23727 - DNA, 486 bp, Homo sapiens
  misc_feature (1)...(486): n = A,T,C or G
gaagttgaggggnannnnacctgacngcaatcgagnncgtacgagccncgngaagaaggctacatttaaggcgactctgaatggtggggttctagcttggtcactttcattacttgccatcataaacactagtaggctgcggagtgcgcttcctgtttgtgtcatctggtcgtagaaccttttccaaacagaagcatctgcctttggctgttctgtgacctttgaagccagtctcagtggtttaggcagctttgcagatctaactctagctagaggccaagctgtgtgcagagctaaagcacacatgagcagtacatcagcatgggcagagaaaatacaggactccagatgggaaggttttaagagtcacactggcatggaaggcttatctgccattctatttatagcctgaaatgattctggcctaccctgtcctgtctgtatgatctaaaaaccagccttttccccagaaggctctgagcacan

SEQ ID NO: 23728 - DNA, 457 bp, Homo sapiens
  misc_feature (1)...(457): n = A,T,C or G
cctttgccccgcgctgtatgaattcggcacgaggagaaaagaatgccttctaaatgcaaaatcacctccaaaccagaccacttttcttgacttgcctgttttggccattaactgccttaaacgttaacagcacatttgaatgccttattctacaatgcagcgtgatttcctttgccttttttgcactttggtgaattacctgcctccataacctgaactgtgccgactccacaaaacgattatgtactcttctgagatagaacatgctgctcttctgagagatacgttactctctccttggaatctggggatttgaagatggctcctgccttctcacgtgggaatcagtgaagcgtttagaaactgctgcaagacaaacaagactccagtggggtggtcagcangagagcacgttcagagggaagagccatctcggcagaatcgcaccatactatac

SEQ ID NO: 23729 - DNA, 448 bp, Homo sapiens
  misc_feature (1)...(448): n = A,T,C or G
attgatttgcanctccgctgcaggaattcggcacgagagttgggatatgggaggaactaaagcatcctgttttgtatctgtccagatcattatttctgtctcttgttttttcttcctggttcaggatacttttttaaggggttgagaattgaagattttccaaaagcgttcatgaatttagagcattccacccaatataataaaacctgttaagaatgtcagtctttgttcaaacatctgtttgttctatctccagtcattaaatcagtgctgctgcatgacactcttaactcctgactttttatatccagtcataaagttgactttcagcacaaaagatacttataaacaaataaaaaatttttatttttctctcttactgatgtaagctttggcactcttttgactggtgccattagacatcttgattattgtgacaactctagac

SEQ ID NO: 23730 - DNA, 473 bp, Homo sapiens
  misc_feature (1)...(473): n = A,T,C or G
nattgacttgcctgcacgaattcggcacgagcacgaagtaccttctatgtcctgaaccctcacaataacctgtcaagcacagaggagcaatttcgagccaatttcagcagtgaagctggctggagaggagtggttggggaggtgccaagacctgaacaggtgcaggaagccctgacaaagcatgatttgtatatctatgcagggcatggggctggtgcccgcttccttgatgggcaggctgtcctgcggctgagctgtcgggcagtggccctgctgtttggctgtagcagtgcggccctggctgtgcatggaaacctggagggggctggcatcgtgctcaagtacatcatggctggttgccccttgtttctgggtaatctctgggatgtgactgaccgcgacattgaccgctacacggaagctctgctgcaaggctggcttggagcangcccaggggccccccttctctactt

SEQ ID NO: 23731 - DNA, 329 bp, Homo sapiens
aattgacttcgctgcaggaattcggcacgagcaaagttctttagagcactgaaagaaacacaaagccagccaggaggaacagtaactcttccttcgggtggaagctttcatcgagttgaacaggacttaaacgaatcatcagggaccggatatttcttatttctcatttggattcttaaccttgaatccaaagtgtctgcaatggacaacaattgaaggagtggcaaacttacttgtattgagagcacacgcaattcctactggtgaaattactgtttctgtttctaataaaatagaagggattccaaataaaaaaaaaaaaaaaaaaa

SEQ ID NO: 23732 - DNA, 475 bp, Homo sapiens
  misc_feature (1)...(475): n = A,T,C or G
attgacactgctcngcatgcaggaattccgcacgaggaggagctggcttaccagatgtctaaactaggagtttctcttgtgctgtcagccagaagagtgcatgagctggaaagggtgaaaagaagatgcctagagaatggcaatttaaaagaaaaagatatacttgttttgccccttgacctgaccgacactggttcccatgaagcggctaccaaagctgttctccaggagtttggtagaatcgacattctggtcaacaatggtggaatgtcccagcgttctctgtgcatggataccagcttggatgtctacagaaagctaatagagcttaactacttatggacggtgtccttgacaaaatgtgttctgcctcacatgatcgagaggaagcaaggaaagattgttactgtgaatagcatcctgggtatcatatctgtacctctttccattggatactgtgctagcaagcatgctn

SEQ ID NO: 23733 - DNA, 472 bp, Homo sapiens
  misc_feature (1)...(472): n = A,T,C or G
nattgatcgtctgcggaattcggcacgaganaagatccagcctgaagaaagtggatagcctcaagaaagcattttctcgccagaacatcgagaaaaagatgaacaagctggggacaaagatcgtatctgtagagaggagagagaagattaagaaatctctcacgtcaaatcaccagaaaatatcctcaggaaaaagctcccccttcaaggtttctcccctcactttcgggcggaagaaagtccgagagggagaaagccatgcagaaaatgagaccaagtcagaagacctgcctagcagtgagcagatgccaaatgaccaggaagaggagtcctttgcagagggtcattccgaagcgtccctcgccagcgctctggtggaaggggaaattgcagaggaggctgctgagaaggcgacctccagggggagtaactcggggatggacagcaacatcgacttgactattgtggaaga

SEQ ID NO: 23734 - DNA, 471 bp, Homo sapiens
  misc_feature (1)...(471): n = A,T,C or G
gagatgttcaccgctgttgaattcggcacgagctggtcactcaacagagtatttcccttggccgagatggaagttttgtcccaatagatgagctgctgagcatcaacaaggtgacatttttctgctgcccatttgtgtcctggagacggtggtaccctgaaggcagaggccagctgccgcaagacagcaatgacagtccacctgccgacctgattcctgcatcatggaataaccacatggctaccttctatcctctgttcccaaatggtggtggcacttatcctgaagtcgtcaatgatttccctttgaaactactttattttactaatttaaactattttgtactgatgtagccctgaggtagttcatgaaaatgctgtgcactcattccatggaataaatgttggaaagctgatcttttctgatataaaatgttgaatgataaaacnnaccacnnncactaaaaaaaaa

SEQ ID NO: 23735 - DNA, 452 bp, Homo sapiens
agaggggatatgactgcctgacgattcggcacgagccacctcattgggtgaaagttccagggctcaatccaggaccacactcttattggccaggcaggggctcccacagagctttgagtaacttcttggttgtgcagtctgcaggcaatgttggcattgtaaattcctcccttgcagcctccttcatgtggtgaggggatcacttcagctgcctgctgtggacaaagaacatcaaattacagcatcacgagtgctattgttgcctgtggtggtctccctgtccaagcgggaccgctttgcagagaccagaggcatatcgcggcttgagctgaaaatgcatttgttgcagcttaggttgaattatttttcgtttgctctttcttctacacgcgcctgatggatagtgaacctattcatcaaaaaagtgcactgctcttctgtctattgtaccc

SEQ ID NO: 23736 - DNA, 502 bp, Homo sapiens
  misc_feature (1)...(502): n = A,T,C or G
tggtgntnnnttctgtcncgcctgcatgaattcggcacgagccaagatgacaaagaatagaaggaacaatggtcgtgccaaaaagggccgcggccacgtgcagcctattcgctgcactaactgtgcccgatgcgtgcccaaggacaaggccattaagaaattcgtcattcgaaacatagtggaggccgcagcagtcagggacatttctgaagcgagcgtcttcgatgcctatgtgcttcccaagctgtatgtgaagctacattactgtgtgagttgtgcaattcacagcaaagtagtcaggaatcgatctcgtgaagcccgcaaggaccgaacacccccaccccgatttagacctgcgggtgctgccccacgtcccccaccaaagcccatgtaaggagctgagttcttaaagactgaagacaggctattctctggagaaaaataaaatggaaattggtacttaaaaaaaaaataaaaaaactcgagggggggcccggtaccc

SEQ ID NO: 23737 - DNA, 466 bp, Homo sapiens
  misc_feature (1)...(466): n = A,T,C or G
nattgagcgccatgcggaattcggcacgagaagatgctactaagggtaatttcaagtaaaatacaaagtattgaaatactgaactttgcattcttcctctttccaaagaagtgctgtagtctcaaaatttgtgtattttagaactatgggtcaaaaccctgtgtggtaggctaaacttaaccaagggcaactggagtggacagctcctcttcctcaggcagaggtaaatcggcttacaggacacccgggcatctcaccagggggcaacacagtttcatgcaggcaccaaaaagccacacgtggtgggtgacccaaaggtgcctgctctgggaactttcacatctgaataggtgtcatccttcaatggcatattcttgggtagccatccagcctaggagtccaaagatgctgccttctcccttgggcccactttaagagttacctctttaagaactcaatcgtcaca

SEQ ID NO: 23738 - DNA, 468 bp, Homo sapiens
  misc_feature (1)...(468): n = A,T,C or G
catccgaccnncaattgcaccgcgctgcaggaattcggcacgagctgggccactggcctggcgcctgttcccccaggctctcagtgccaccacccccggcaggccttccctgacccagccaggaacaaacaagggaccaagtgcacacattgctgagagccgtctcctgtgcctcccccgccccatccccggtcttcgtgttgtgtctgccaggctcaggcagaggcgcctgtccctgcttcttttctgaccgggaaataaatgcccctgaaggagcanaaaaaaaaaaaaaaaaaaaatttgggggggggcccgggccccaatttccccttatggggggcggaataaaaattactggcccgggttttaaaaacgcggggatggggaagaaaannnnnnnntnntnnnngnnntngncttttttttttatttntnncttgtttctcnngtgaatnnntgcttttgttg

SEQ ID NO: 23739 - DNA, 322 bp, Homo sapiens
  misc_feature (1)...(322): n = A,T,C or G
tacaacnnntnnnnnnnannncnnntnncnnnnnacancnntgacantccacctgccgacctgattcctgcatcatggaataaccacatggctaccttctatcctctgttcccaaatggtggtggcacttatcctgaagtcgtcaatgatttccctttgaaactactttattttactaatttaaactattttgtactgatgtatccctgaggtaactcatgaaaatgctgtgcactcattccctggaatcaatgttggaaagctgctcttttctgttattaaatggtgaatgactacgccttcccccttgcccttttagcgc

SEQ ID NO: 23740 - DNA, 476 bp, Homo sapiens
  misc_feature (1)...(476): n = A,T,C or G
ntttgaccttttgtacncgcctgcagcgaattcggcacgagggtctcagggggccgaagtgtgcggttctctgaggcagagcagcgctgtgtatctcgtggcttcacacccgcccagttccaggcggctctggatgaatatgaggagctcaatgtctggcaggtcaatgcttcccggacacggatcacttttgtctgattccagcctgcttgcaaccctggggtcctcttgttccctgctggcctgccccttgggaaggggcagtgatgcctttgaggggaaggaggagcccctctttctcccatgctgcacttactccttttgctaataaaagtgtttgtagattgtcaaaaaaaaaaaaaaaaaactcgggggggggccggagcccaaattgcccttaaagggggtgagataacaatcccctggcgggggttttacaaggtggggacggggagacantgactattgtggaagat

SEQ ID NO: 23741 - DNA, 465 bp, Homo sapiens
  misc_feature (1)...(465): n = A,T,C or G
nattgcccgccctgaggaattcggcacgaggactgcttcatctttttatttttaatgaaaggggtaccacggttgtaaagcaataagaattgagaagaacactattgaaacttcgctttttgctaaaaaatagcaagttgaatagtaatcaaaaaacatagaaagattttagttcaaaatgattgctcctttctctacctggacttttaaaaaatcaattgtcatctaatatgagtttatttgtctatagacacaagtatcaatgtctaaaaaaaatcatgactttaaacttccaccgatgaggcaggtaggagataaagatgaattctgaactgttactaaaagtactcattttttaccttgtagggagggtgggcaatggggttacctgaccttatttgagggtatgggctttcttttttatttcatcacttggtatctcaaagagactcggagccagtgatc

SEQ ID NO: 23742 - DNA, 459 bp, Homo sapiens
  misc_feature (1)...(459): n = A,T,C or G
atttgacctcgactgacgattcggcacgagccatgctggacatgatgcatacagaacggaaggtggacgtgtatggctttgtgagccggatccgggcacagcgctgccagatggtgcaaaccgatatgcagtatgtcttcatataccaagcccttctggagcattatctctatggagatacagaactggaagtgacctctctagaaacccacctgcagaaaatttacaacaaaatcccagggaccagcaacaatggattagaggaggagtttaagaagttaacatcaatcaaaatccagaatgacaagatgcggactggaaaccttccagccaacatgaagaagaaccgtgttttacagatcattccatatgaattcaacagagtgatcattccagttaagcggggcgaagagaatacagactatgtgaacgcatcctttattgatggctaccggcaan

SEQ ID NO: 23743 - DNA, 485 bp, Homo sapiens
  misc_feature (1)...(485): n = A,T,C or G
ggagtcccnnnagaaggggnntttgatncccctcatgatcacgctgcagaattcggcacgagacgaaatgaagatgatgaggttccagtgggggtggagatggcagagaatactgacaatccactaagatgcccagtccgactttatgagttttacctgtcaaaatgttctgaaagtgtgaagcaaaggaatgatgtgttttaccttcaacctgagcgctcctgtgtcccgaatagccccatgtggtactccacattcccgatagaccctggaaccctggacaccatgttaacacgtattctcatggtgagggaggtacatgaagaacttgccaaagccaaatctgaagactctgatgttgaattatcagattaaaacggaagtgaggttcttattttcatacatattggtatgcaccaaactgtgaatgcatccagctgttggaaaatgatgtataagtctaagtcctcttgacttgaccataa

SEQ ID NO: 23744 - DNA, 474 bp, Homo sapiens
  misc_feature (1)...(474): n = A,T,C or G
ngagcgccccaacggctgcttgaattcggcacgaggctgtccagagccctgccggagggtgctgggggctgtccctctgcaggcactgtgttttcctcaggggctgtcctcagaacacccctcctgctccctggggctcctcagggagccatttcagctggagtctcaggtctcaaaaacaacttctccaggaggccaaaaaaagactgggttggcttctggtcctcatgatggcttttatcctcctgggacactttgggtatattcatgggcattgtttccatctgtcttttctacctgtgccacccctgccctgattccacggctgcctcaggcaggcaggcaaggagctaggccggtgcctggccctggcagcaaggggtctttgtgcagttggagatgctgccgttgtggcagagcgtcctgcagccccgcttccatcagcaggctctggggtgggggctntgcagggga

SEQ ID NO: 23745 - DNA, 540 bp, Homo sapiens
aggagatttcggcggctgtggaattcggcacgagggaatttccatccatttgcggagctgcctgagccacaacagacagctttgagtgacatcttccaggcggtcctatttgatgatgaactactcatggtcctggaaccagtgtgcgatgacctggtcagcggcctctcgcccacagtggcggtgctgggggagctgaagccccggcagcagcaggaccttgtggccttcctgcagctggtggggtgcagcttacagggtgggtgtccgggccccgaggatgcaggcagcaagcagctgtttatgacagcctacttcttggtcagtgccctcgcagaaatgccagatagcgcagcagctctgctgggcacttgctgcaaactccagatcattcccacactgtgccacttgcttcgtgctctgtctgatgatggagtatctgatcttgaagacccaaccttgactcccctggaagatacagaaaggtttgggattgtgcagcgcttgtttgcctcagctgacattagtctggagagactg

SEQ ID NO: 23746 - DNA, 378 bp, Homo sapiens
  misc_feature (1)...(378): n = A,T,C or G
atttgaccacaatgaaaaanntttggaccccgctgcaggaattcggcacgagcctgacttaccactaatttactaggctacctactttcatgagtaacctctcacagctacccagcacatgccacaatcctatgctcttgccttcttttatctgcactgtgtgaagggactcttttaaataaatgagcaagtgtcctaagctatgtcatccaaagattgtcctttccattctcaaatcctgtgactgggatcactcaacagcactgtgatgtattattttcaatgaggtgcctttcttaactgaccaaatgctgccttgtttggcccctaaatcaataaaatatgttaaaatttgtaaaaaaaaaaaaaaaaaaaaaa

SEQ ID NO: 23747 - DNA, 544 bp, Homo sapiens
  misc_feature (1)...(544): n = A,T,C or G
aggagaatcgacnnctttcgaccggctgcangaattcggcacgagagacaatccaggaaaagtggaacatacagaagaactttctagtataacagaagtggtgactactgaagaaaatattcctgacgtggtcccgggcagccatctgactccaatagagagagagagttcttcacctttaagtagtaaccagtctgaacctggcagcatcgctttaaactcgtatcactccagaaattgttctgagagtgatcactccagaaatggttttgatactgattccagctgtctggaatcacatagctccttatctgactcagaatttcccccaaataataaaggtgaaataaaaacagaaggacaagagctcataaccgtaataaaagcccccacctcctttggttatgataaaccacatgtgctagtggatctacttgtggatgatagcggtaaagagtccttgattggttatagaccaacagaagattccaaagaattttcatgagatcagctaagttgcaccaactttgaagtctgattctct

SEQ ID NO: 23748 - DNA, 498 bp, Homo sapiens
  misc_feature (1)...(498): n = A,T,C or G
gggggaanaancttgaccgcctgtggaattcgtacgagcctcttcaccctggtgacctctgttccgtattctgtcactgagagacgccctgggacatctgtggtggcttttgtcgcgctgggacctaccctgactacgggagttgggaggacccgggacaccgcacagccgggaaatggccctgtgttatggaactttctggggctaccctaagatgctggaagctgccaatctcatggagggcctagtggatatcggcccttgggtcactcttcccagaggacagcctgaggtgttggagtggggcctcccaaaggatcaggctggagaacttgggacagtggataagtctgggctgttcctgttatctggacttggcagattaatgcaacattctgtgggactttgcactagctaaagaacttaatatcctttgttactanaggctcattattatggagaaaaaagggggggcccggacccaaatcgcctataggg

SEQ ID NO: 23749 - DNA, 473 bp, Homo sapiens
gagtgattcgccgctgctgaattcggcacgagcgcaaacatgcagatctttgtgaagaccctcactggcaaaaccatcacccttgaggtcgagcccagtgacaccattgagaatgtcaaagccaaaattcaagacaaggagggtatcccacctgaccagcagcgtctgatatttgccggcaaacagctggaggatggccgcactctctcagactacaacatccagaaagagtccaccctgcacctggtgttgcgcctgcgaggtggcattattgagccttctctccgccagcttgcccagaaatacaactgcgacaagatgatctgccgcaagtgctatgctcgccttcaccctcgtgctgtcaactgccgcaagaagaagtgtggtcacaccaacaacctgcgtcccaagaagaaggtcaaataaggttgttctttccttgaagggcagcctcctgcccaggccccgtggcc

SEQ ID NO: 23750 - DNA, 505 bp, Homo sapiens
  misc_feature (1)...(505): n = A,T,C or G
cgcccccgcccccccatttgacncgccatttgcgccgcgctgcaggaatccggcacgaggagaagctggactgggcccgcgagaggcttgagcagcaggtacctgtgaaccaagtgtttgggcaggatgagatgatcgacgtcatcggggtgaccaagggcaaaggctacaaaggggtcaccagtcgttggcacaccaagaagctgccccgcaagacccaccgaggcctgcgcaaggtggcctgtattggggcatggcatcctgctcgtgtagccttctctgtggcacgcgctgggcagaaaggctaccatcaccgcactgagatcaacaagaagatttataagattggccagggctaccttatcaaggacggcaagctgatcaagaacaatgcctccactgactatgacctatctgacaagagcatcaaccctctgggtggctttgtccactatggtgaagtgaccaatgactttgtcatgctgaaaggctgtgtggtgggaan

SEQ ID NO: 23751 - DNA, 509 bp, Homo sapiens
  misc_feature (1)...(509): n = A,T,C or G
ggggtaaganananttttgcaccccccattgacccgcgctgcaggaattcggcacgagccggtgtctggcggatgcggtcgcgaagataggtactggttttggattatgaattgttttctcacttaccttctttaaaagaagaatgtggccattagccttcggttctggcatgggattaggaatggcttattccaactgtcagcatgatttccaggctccatatcttctacatggaaaatatgtcaaagagcacgagcagtgacttcacctgagaacatcccagcgggaggactagagaaatcatgtttattcctcaagaatactgaagtgccctggagtaagctgccattcttctgtgacaatgttatcagtaatgctttaaactccagcgcctggatatgcatttgaaaccaagtctcgttcttggctgtgattttctctctggaagctgtacgaggtgtcgtcactgaattaacgaagtcggantagacccatgagatgctcgtgg

SEQ ID NO: 23752 - DNA, 396 bp, Homo sapiens
  misc_feature (1)...(396): n = A,T,C or G
aaaaaaacttgaccacattgagaantttgacccgcgctgcaggaattcggcacgagctggagagagagagaactgtttacagttaatctgtgtctaattatctgattttttttattggtcttgtggtctttttaccccccctttcccctccctccttgaaggctaccccttgggaaggctggtgccccatgccccattacaggctcacacccagtctgatcaggctgagttttgtatgtatctatctgttaatgcttgttacttttaactaatcagatctttttacagtatccatttattatgtaatgcttcttagaaaagaatcttatagtacatgttaatatatgcaaccaattaaaatgtataaattagtgtaaaaaaaaaaaaaaaaaaaaa

SEQ ID NO: 23753 - DNA, 471 bp, Homo sapiens
  misc_feature (1)...(471): n = A,T,C or G
ngggtgttcggcgctgctgaattcggcacgagcaaagttcccctgaagacatgccatctctagaaccttttttctccccgactctacccccacctctgttcctagagccctctgctggcgagtccagaaacattattgcccagaaggattatgtgtttatggattattttgccccgcctcaggagcgcaggaagtcactaccatttatattctaaaacagacctatctatgttcataggacttctgatgtgttcagataggaatcctcatgagagatcattatgctttgtgccctggaccactgctgctctgggttctcaggaggaacaggcaagagcagcttcattctaagcctttccagtgacctcagccttgcttctcttctacaacactaaggctcctctgtcagaggaggtcgtcttggttttgcttcattgcatgacataacccttcccctcaagctgttcctat

SEQ ID NO: 23754 - DNA, 476 bp, Homo sapiens
  misc_feature (1)...(476): n = A,T,C or G
nggtgattcgacgctgttcgcccggctgcaggaattcggcacgagatcttccgtaattcgccaaaatgacgaacacaaagggaaagaggagaggcacccgatatatgttctctaggccttttagaaaacatggagttgttcctttggccacatatatgcgaatctataataaaggcgatattgtagacatcaagggaatgggtactgttcaaaaaggaatgccccacaagtgttaccatggcaaaactggaagagtctacaatgttacccagcatgctgttggcatttgttgtaaacaaacaagttaagggcaagattcttgccaagagaattaatgtgcgtattgagcacattaagcactctaagagcctagatagcttcctgaaacgtgtgaacgaaaatgatcacaatacgaaagaagccatagagacaggtacctgggttcaactaaagcgccagcctgctccacccagaga

SEQ ID NO: 23755 - DNA, 466 bp, Homo sapiens
  misc_feature (1)...(466): n = A,T,C or G
gtgtccatgatngctgagggcattgcgcacgaggagcaacaagcccaagttgtattgagactactgcgatacatacctcacccatgactcttcatctgtgagaaagacacactgcactggaaggaaacactcagagaacgcgaaagactattatcagaaacggatggaatatctggctcagagcctgattgacaaaacaacggctgcatttcagcaaggaaagatacctcctactccattctctgctcctcctcctgcaagggcgatgataccacctccccccagccttccgggtcctcctcgccctggtatgatgccagcaccccatatggggggccctcccatgatgccaatgatgggccctcctcctcctgggatgatgccagagggacctgctcctggaatgaggccgcccatgggaggccatatgccaaagatgcctgtgcccccaatgatgagaactcct

SEQ ID NO: 23756 - DNA, 473 bp, Homo sapiens
  misc_feature (1)...(473): n = A,T,C or G
nagtgattccctgctgttgaattcggcacgagctgtgctgctgaccctgcacaccacagctgccaccagtacaacagcaacgggcaccgtgtatgccccacccacttgtatgcagccccacaaggcaaggcacctgccaacagtatcccggcagggcaactcagagaatgttctgctggcatgtactatgaacatgtacccgcatggactcaatgggcgaacggcgcaagagatctgggatgatttctccatgagcttcacgcccgctgtgcgggaggtggtagagtttgccaaacacatcccgggcttgcgtgacctttctcagcatgaccaagtcaccctgcttaaggctggcacccttgaggtgctgatggtgcgctttgcttcgttgttcaacgtgaaggaccagacagtgatgttcctaagccgcaccacctacagcctgcaggagcttggtgccatgggcatgggag

SEQ ID NO: 23757 - DNA, 482 bp, Homo sapiens
  misc_feature (1)...(482): n = A,T,C or G
nattgatnccctttnnnnnnnnnnnnnnaagtacccgcgctgcaggatcatgtacaagggcaggaacctttgactgcttccatgttggcatctgcccctcctcaagagcaaaagcaaatgttgggtgaacggctgtttcctcttattcaagccatgcaccctactcttgctggtaaaatcactggcatgttgttggagattgataattcagaacttcttcatatgctcgagtctccagagtcactccgttctaaggttgatgaagctgtagctgtactacaagcccaccaagctaaagaggctgcccagaaagcagttaacagtgccaccggtgttccaactgtttaaaattgatcagggaccatgaaaagaaacttgtgcttcaccgaagaaaaatatctaaacatcgaaaaacttacatattatggaaaaaaaacattgcnccattttattttttgggccattaccccataccccttata

SEQ ID NO: 23758 - DNA, 479 bp, Homo sapiens
  misc_feature (1)...(479): n = A,T,C or G
aggttagaccccccttngnnnnnnncccttgatccgcgctgcaggaattcggcacgagcggtggtggtttattcttccgtggagttaagggctccgtggacatctcaggtcttcagggtcttccatctggaactatataaagttcagaaaacatgtctcgaagatatgactccaggaccactatattttctccagaaggtcgcttataccaagttgaatatgccatggaagctattggacatgcaggcacctgtttgggaattttagcaaatgatggtgttttgcttgcagcagagagacgcaacatccacaagcttcttgatgaagtctttttttctgaaaaaatttataaactcaatgaggacatggcttgcagtgtggcaggcataacttctgatgctaatgttctgactaatgaactaaggctcattgctcaaaggtatttattacagtatcaggagccaataccttgtgagcag

SEQ ID NO: 23759 - DNA, 500 bp, Homo sapiens
  misc_feature (1)...(500): n = A,T,C or G
aattagaacacggctgtcggaattcggtacgagcagccgcgagaagcacgccctgctggaggggcggaccaaggagctgggctacacggtgaagaagcatctgcaggacctgtccggcaggatctccagagctcggcacaacgaactctgaaggcactggggagcccagcccggcagggaagaggccagcgtgaaggacctgggctcttggccgtggcatttccgtggacagcccgccgtcagggtggctggggctggcacgggtgtcgaggcaggaaggattgtttctggtgactgcagccgctgccgtcgcgacacagggcttggtggtggtagcatttgggtctgagatcggcccagctctgactgaaggggcttggcttccactcagcatcagcgtggcagtcaccaccccagtgaggacctcgatgtccagctgctggcaggtctgatagtcctctgctaanacaacacgatttacataanaaatcttacacatc

SEQ ID NO: 23760 - DNA, 490 bp, Homo sapiens
  misc_feature (1)...(490): n = A,T,C or G
tgggggcnnnaattgacggttgaggactttgcacgagaggcagtatgggcttattttgccaaagaaaacacagcagttgcaccctgttttgcaaaaaccatcagtgtttgggaatgattctgatgatgatgatgagacctctgtgagtgaaagccttcagagggaagctgctaagaagcaggccatgaaacagaccaaactggaaatccagaaggcccttgcagaagatgctactgtgtatgaatatgacagtatttatgatgaaatgcngaanaaaaaaaaaaaaaaaaaaaaaaaaaaaaaaaaaccttggggggggggccgggcccccatttccccttttgggggggggtttaaaaattccggggcgggggtttaaaacggggggggggggggaacnnnnnnnnnnnnnnnnnnnnnnnnnnttntnnncnnnnttttntntnnttttttnncctncnnnttttctcccnccccttcttccttggag

SEQ ID NO: 23761 - DNA, 473 bp, Homo sapiens
  misc_feature (1)...(473): n = A,T,C or G
nttgacncctgatcgccttccgaattcggcacgaggtacattgagctccatagagacagcgccggggcaagtgagagccggacgggcactgggcgactctgtgcctcgctgaggaaaaataactaaacatgggcaaaggagatcctaagaagccgagaggcaaaatgtcatcatatgcattttttgtgcaaacttgtcgggaggagcataagaagaagcacccagatgcttcagtcaacttctcagagttttctaagaagtgctcagagaggtggaagaccatgtctgctaaagagaaaggaaaatttgaagatatggcaaaagcggacaaggcccgttatgaaagagaaatgaaaacctatatccctcccaaaggggagacaaaaaagaagttcaaggatcccaatgcacccaagaggcctccttcggccttcttcctcttctgctctgagtatcgcccaaaaatcaaagga

SEQ ID NO: 23762 - DNA, 484 bp, Homo sapiens
  misc_feature (1)...(484): n = A,T,C or G
ggggnnnaagggggnnnnttttgatactgcccggctgcacgaattcggcacgagtataactcagatttttgcagttgacaatagagaagatcttcagaagtggatggaagccttctggcagcatttctttgatcttagccaatggaagcactgttgtgaagaacttatgaaaattgagattatgtcaccacggaaaccacctttgttcttgacaaaagaggcaacctcagtctaccatgatatgagcattgattcacctatgaaacttgaaagtttaacggatataatacaaaaaaaaattgaagagacaaatgggcagttccttattggtcagcgtgaagaatccttaccacctccttgggccacactctttgatggtaaccatcaaatggtcatccagaaaaaggtactgtatcctgcaagtgagccattacatgatgaaaaagggaaaaagagacaagctccccttcctccttctgataaa

SEQ ID NO: 23763 - DNA, 502 bp, Homo sapiens
  misc_feature (1)...(502): n = A,T,C or G
agtagacnaacnttttgacnccgcgctgcaggaattcggcacgagcagccgcgagaagcacgccctgctggaggggcggaccaaggagctgggctacacggtgaagaagcatctgcaggacctgtccggcaggatctccagagctcggcacaacgaactctgaaggcactggggagcccagcccggcagggaagaggccagcgtgaaggacctgggctcttggccgtggcatttccgtggacagcccgccgtcagggtggctggggctggcacgggtgtcgaggcaggaaggattgtttctggtgactgcagccgctgccgtcgcgacacagggcttggtggtggtagcatttgggtctgagatcggcccagctctgactgaaggggcttggcttccactcagcatcagcgtggcagtcaccaccccagtgaggacctcgatgtccagctgctggcaggtctgatagtcctctgctaaacaacacgatntacataananatg

SEQ ID NO: 23764 - DNA, 540 bp, Homo sapiens
  misc_feature (1)...(540): n = A,T,C or G
aggagatttcgacggctgtggaattcggcacgagggacatcatacactctgttgttgatgagcgtgaattttttgagatcatgcccaattatgccaagaacatcattgttggttttgcaagaatgaatgggaggactgttggaattgttggcaaccaacctaaggtggcctcaggatgcttggatattaattcatctgtgaaaggggctcgttttgtcagattctgtgatgcattcaatattccactcatcacttttgttgatgtccctggctttctacctggcacagcacaggaatacgggggcatcatccggcatggtgccaagcttctctacgcatttgctgaggcaactgtacccaaagtcacagtcatcaccaggaaggcctatggaggtgcctatgatgtcatgagctctaagcacctttgtggtgataccaactatgcctggcccaccgcagagattgcaatcatgaaacctgggaatccaaatagttggataacttagaataactaagtttattanattctagaaagataaa

SEQ ID NO: 23765 - DNA, 474 bp, Homo sapiens
  misc_feature (1)...(474): n = A,T,C or G
natttgaccggtctgtaagacctctgcacgaggggtgagggcccctagacttcggctttcgccgctgttggtggtaggctggagttgggggtccctggatacggttttggctttacaccccctttccagcaagcttcccgtgggaatctgttccttttcaggacagctgtgatccactggccagtgttcgggctgtggaaaaaccatagagtctattcagctgagtccagaagaatatgaatgtcttaagggaaaaatcatgagggatgtgatagatggaggtgaccagtacagaaagacaacacctcaggaacttaagagatttgagaacttcataaaatctcgtcctccttttgatgttgtcattgatggtctcaatgttgccaaaatgtttcctaaagttcgtgaatctcaacttcaacagctgtcanaggtagaactgaagccaaggcagcaccaatggagcaggctgct

SEQ ID NO: 23766 - DNA, 481 bp, Homo sapiens
  misc_feature (1)...(481): n = A,T,C or G
aaattgatnngccctnnggnnnnncnactggattcgcnctgcaggaattccgcacgagcaggcacggtccgtgcggagcaggcgagcgagcgggaagacgcatccacctttctcaccagccagcccacagcggtgtgttccccttctcgggagtgcgccaatgcctgggccgacccaaaccctgtccccaaatggcgagaacaacaacgacatcatccaggataataacgggaccatcattcctttccggaagcacacagtgcgcggggagcgttcctacagttggggaatggcggtcaatgtgtattctacctcgataacccaagagactatgagcagacatgacatcattgcatgggttaatgacatagtatctttaaactacacaaaagtggaacagctttgttcaggagcggcctattgccaattcatggacatgctcttccctggctgcattagtttgaagaaagtaaaatttcan

SEQ ID NO: 23767 - DNA, 445 bp, Homo sapiens
  misc_feature (1)...(445): n = A,T,C or G
nattgacctcgctgagcgattcggcacgagcatacccatctataaattaccagagggatcaccaacatggctgggaatatcctgcagtagttatgaaaggagtagcaatgcccgggaacctcatttaaaaatccccaaatgtgctgccaccacctgtgtgcagagcttgggacaggggaagtcagatgtggttgggagcctagcactgcagagtgttggtgagtccagactctggcaaggccaccatgccactgagagcgagcacagcctctccccagcagacctgggctcccccgcgtccccaaaggagagcagtgaggcgctggatgctgctgctgcgctctctgtggctgagtgtgtggagcggatggcccccacactgccaaaaagtgacttgaatgaagtgaaagagctgctaaaaaccaacaagaagttggccaaaatg

SEQ ID NO: 23768 - DNA, 480 bp, Homo sapiens
  misc_feature (1)...(480): n = A,T,C or G
aatcgancggctgtattagaacggctcgagcaaaaaaaacgagaattcagattacttttaaaaacataaatattctagtctttgatactgtgaggtggttcatttctagctttcttgaaagtgaaatttccccacatttgaaaatgttttagttcctaagtttaagttcttaaatgactcccgcgggcatccctaccccttagttttactctactttgtgaccctgggcaagtgatttacctctgtgtgcctcgattttccctcccgaaattggcaaaaataatacctaatttctccctacctcacagggatgttgtgaggataaatgtgttcgtgtaagaaagaaattatataaaacctcaaggtattatttttgtggtgttgttactaaacaaatataaaaattcaacaaaaatagtgctttggattttgttacatttgttaaaaataactttgggcatttggttaggatatgaatta

SEQ ID NO: 23769 - DNA, 491 bp, Homo sapiens
  misc_feature (1)...(491): n = A,T,C or G
cgccgccccccatcgacggcctcatagacggcctcggcaaacggcacgagactggaattaaggaattcaagatgaatattgaagctcttcgggagaatctttattttcagtccatagagaacctttctgtgacattggaagtcatcttggagcgtatggaggactttactgattctgcctacaccagccatgagcacagagaacgcatcttggaactgtcaactcaggcgagaatggaactgcagcagataatttctgtgtggattcaagctcaaagcaagaaaacaaaaagcatcgctgaagaactggaactcagtattttgaaaatcagtcacagtcttaatgaacttaagaaagaacttcatagtacagcgacacagctggcagcagatctattaaaataccatgctgatcatgtggttctaaaagcattaaaacttactggagtagaaggaaatttagaagctttggctgaatatgcctgtaaactn

SEQ ID NO: 23770 - DNA, 472 bp, Homo sapiens
  misc_feature (1)...(472): n = A,T,C or G
nattgatgcgcactgcggaattcggcctttgatggacgatacttcccctcaccagaagccacaataactttgtagccatcctggatctgccggaaggagagcatcagtacaagttctttgtggatggtcagtggacgcacgacccttccgagcccatagtaaccagccagcttggcacagttaacaacatcattcaagtgaagaaaactgactttgaagtatttgatgctttaatggtggattcccaaaagtgctccgatgtgtctgagctgtccagatctcccccaggaccctaccatcaggagccctacgtctgcaaacccgaagagcgctttcgggcaccccctattctccccccacatctcctccaggtcatcctgaacaaggacacggngatttcctgtgatccagctttgcttcctgagcccaatcacgtcatgctgaaccacctatacgcgctgtctatcaagga

SEQ ID NO: 23771 - DNA, 538 bp, Homo sapiens
aggagattgacgccttcgacggctgcacgaattcggcacgagcagggcctctcctgtgggatctttgttttgtgtttaaccataatggttgtgtactgaaccacttcatatttgttatatataatatatatatatataatctccttaagactcagcctcctggtttacccccccggcctgggcatctgacctcccccaccccagtgtgatttaacatccaggaactgaggcctgaaccattttgcatttccccctcctccagcctctgtagggccatggctgtatgtactgtcgctgtgtttttttgtttttttagaactgggtttgggggctgatttttatttctttgggggctttttttcttggcaaatactaaaaatctcgtcaatgtaatttctgtggtttctattcagcttgggtttcatgttttaaaataaattttaaaaagcaaaaaaaaaaaaaaaaaaaaaaaaaactggggggggggccgcggcccaattcccccttatagggagttattaacaatcaacggccgggg

SEQ ID NO: 23772 - DNA, 473 bp, Homo sapiens
  misc_feature (1)...(473): n = A,T,C or G
nttggcccggctgcaggaattcgtcgcgaggcaatctccaaattgagggcaggagagagagtggtctcacaacggaagggcaccagccactgagaagtcctaaggccgtgtttgagttctggctcatcttttttgctaatttgctcttatgcatatcacccaacctcgctaagccagtttcatcatcagcgagaacagcacactgacatgcagggccagctcaggcgctaccacgagctacacatccgtccattcgtttaatcttcacagcagccctggaggtcacccaggcatggaatgcacagctctgccagacagaaagcgctttggatgcctgagaaacaacagcttgtccgggctactgatgcgaagagaggccatggtttcctttttctctgctctgaatggcagccttgacgtcacaacagctaggaaccactggagggacaaataacaaggcgcaagccagaagc

SEQ ID NO: 23773 - DNA, 472 bp, Homo sapiens
  misc_feature (1)...(472): n = A,T,C or G
gtgggcannnnnaattgacatcgagcgcgctgccgaatacggcacgagttctgacgagccacacgtttgcttcttccctgtgttcccagctggagggacatgagtgtccctgggccgtcgtatccggacggggccctgacacggccaccctactgcctggaggccggggagccgacgcctggtttaagtgacacttctccacatgaagggttaatagaggacttgactatacaagacaaagcagtggagcaactggcacaaggattgctttctcattatttgccagatctgcagagatcaaaacaagccctccaggaactcacacagaaccaagttgtattgttagacacactggaacaacagatttcaaaatttaaagaatgacattctatgttggatattaatgctttgtttgctgaggctaaacactatcatgccaagttggtgaatataagaaaagagatgctgatgg

SEQ ID NO: 23774 - DNA, 516 bp, Homo sapiens
  misc_feature (1)...(516): n = A,T,C or G
aggggnnntnccnnggnnnnnnagggttatanngccgtngaatatgaccgcctgcggttctgagccgtctgtcctgcgccaagatgcttcaaagtattattaaaaacatatggatccccatgaagccctactacaccaaagtttaccaggagatttggataggaatggggctgatgggcttcatcgtttataaaatccgggctgctgataaaagaagtaaggctttgaaagcttcagcgcctgctcctggtcatcactaaccagatttacttggagtacatgtgaaagaaaacgtcagtctgcctgtaaatttcagcaagccgtgttagatggggagcgtggaacgtcactgtacacttgtataagtaccgtttacttcatggcatgaataaatggatctgtgagatgcattgctacctggtactgctttcagtgtgttccccctcagcccctccggcgtgtcaggcatactctgagtagataatttgtcatgcagcgcatgcaatcagaatctca

SEQ ID NO: 23775 - DNA, 475 bp, Homo sapiens
  misc_feature (1)...(475): n = A,T,C or G
nttttgacngcttgtatcgccttaggaattcggcacgagagaagtgcccgtccacgcacagcgaggagcttcatgattgtatccaaaaaaccttgaatgaatggagttcccaaatcaacccacatttggtcagggagtttccagatgtcttggaatgcactgtatctcatgcagtagaaaagataaatcctgatgaaagagaagaaatgaaagtttctgcaaaactgttcattgtagaatcaaactcttcatcatcaactagaagtgcagttgacatggcctgttcagtccttggagttgcacagctggattctgtgatcattgcttcacctcctattgaagatggagttaatctttccttggagcatttacagccttactgggaggaattagaaaacttagttcagagcaaaaagattgttgccataggtacctctgatctagacaaaacacagttggaacagctgtatcagtg

SEQ ID NO: 23776 - DNA, 495 bp, Homo sapiens
  misc_feature (1)...(495): n = A,T,C or G
agggggannaaattgacgattgttcgacttgcgagagagcaaacgtccctggtgtgttcaggcaaagagccacaggagagtgacctcgtggagtgggaagagattgtttcccattcccttgccagggattggttgaggaatggacaaggcttgcagttcacgcaagccagtgaaatgcgaggggaagtcttgggagtggggtggaggaggtcatctgggaagggtgtccttggtcttaaaaagaggcacaagaggccgggcgcggtggctcttgcctattatcctagcactttgggaggccaaggcagggggatcacttgaggtcaggagttcgagaccagcctggccaacatggtgaaaccccgtctctactaaaaatacaaaaaattagccagacgtggtgccaagcacctgtaatcccagctactcaggaggctgaggcaggagaatcacttgaacccaggaggcagaagttgcagtgagccaagatcgcgc

SEQ ID NO: 23777 - DNA, 479 bp, Homo sapiens
  misc_feature (1)...(479): n = A,T,C or G
ncgtggggcaattgacgtctgtangacttcggcacgagggaacattgaaataaaggaagtgttccttagttcccgtgtgaaagcagaggaacccatgacatccaagggcgtgaaaggatcagagctgactggacatagtgagctgccttcttgcgttcgggtgcacccctgttaaacctgatctgtgtcataagtgactccggatgcatcagtgtccaccagttggaagcaatgacaaggatggctggctggtgtttttcagccttccggtttatagactgtatttatctagtggattcctgcaggccccatactgagcctggactgaaagtatccactcggaccatctgttatctctctacactgaaaataaaacctcttccacccaccccattcggttcttctgcctgaccttcaaatgcccatgttggccttttacagcagtgccacggcaccaagcgaagctgcacatctcacac

SEQ ID NO: 23778 - DNA, 449 bp, Homo sapiens
  misc_feature (1)...(449): n = A,T,C or G
nattgannatcgatccgcgctgcaggaattcggcacgagacccagtcctccaaccttattgtacataagagaattcatactggagagaaaccctacaagtgtgaagaatgtggcagagtcttcatgtggttctcagacattaccaaacataagaaaacccatactggagagaaaccctacaaatgtgacgaatgtggaaaaaactttacccagtcctcaaaccttattgtacataagagaattcatactggagagaaaccctacaagtgtgaaaagtgtggcaaagccttcacccagttctcacacctgactgtacatgaaagcattcatacttgagaaaaaaataaacaaatataaaaataggcaaagccgttagtatctgctcgcatcccactttacatcagagatcagacttaataaagttatcataaatgtgaaaaaaaaaaaaa

SEQ ID NO: 23779 - DNA, 470 bp, Homo sapiens
  misc_feature (1)...(470): n = A,T,C or G
nattgcccggctgcggacctcggcacgaggcgatgtatgtctacctcctggacaccccgatgccattaattttgatgattcaggtgtttttgatacatttaaaagctatgacttcacacctatggattcttctgcagtttatgtgttaagtagtatggctcgccagcgtcgtgcatctttgtcttgtggaggacctggtggtcaagactttgcaagatctggattcagtaaaaactgtggctcacctggatcatcacagctctcttccaattctttgtatgctaaagctgtcaaaaaccacagctcagggactgtgagtgccacttctcctaataagtgcaaaagaccaatgaatgccttcatgctttttgccaaaaaatacagagttgaatatactcagatgtatccagggaaagataacagagccataagtgtgatccttggtgacaggtggaagaaaatgaagaatg

SEQ ID NO: 23780 - DNA, 476 bp, Homo sapiens
  misc_feature (1)...(476): n = A,T,C or G
attgatngccttnggntttgcccgcctgcagaattcggcacgagcccaggcggngatgctgcggctccgcagcgggctgaggcaccttcgggcaacacccaatactcggggctccgctcggcttctttgcgccgagatgcctaagaaggctggtgcgacgaccaagggtaaaagccagagcaaggaaccagagagaccacttcctcccttaggtcctgtggcagttgatcctaaaggatgcgtcaccatagccatccatgcaaaacctggctccaaacaaaatgctgtaacagatttgacagcagaggctgtaaatgtagctattgcagcacctccatcagagggagaggctaatgctgagctctgtcggtatctttccaaggtcctagaactcaggaagagtgatgtggttttggataagggtggtaaatctcgtgaaaaggtggtgaagctcttggcttctacaactccagaag

SEQ ID NO: 23781 - DNA, 454 bp, Homo sapiens
  misc_feature (1)...(454): n = A,T,C or G
gggttcacncnaattgacccccttttgacccccgctgcaagaattcggcacgagggtccctggcccgtgccgattctgccacctcccagccacacacatttgcagacccacaagaagaactgtagccttgataatttcagttcaggctggaaaaatgccatgcaataatctggtttgctttcagtaagtaggcaacaagtgaaaactgtataattttcatcacctattctgctgttctatctaaaatgagtgtacctgtggtttgtgaactgggcccttgtttgtgccagatccttcaaagatgttccctgtcaggacacctgtggccctgcccctcctcagacacctttccactggcattcacgttccttatatgcagtgttagccatctttggcctacgtggactttttttgtaaattacaccatttccagacattaaactttttatattat

SEQ ID NO: 23782 - DNA, 432 bp, Homo sapiens
attgaccgccatggggaactctcacgagctcgtgccgctgacttctgccttttattggacaggaacaagctgaaagctggatacctaatgtcagtggagtcttctgagtgtttcctggaagaagtcgggtcccaggctctagttgctggttcttacatgccaccatccacagtccttcagcagattgattcagtggctaatgctgatatcataaatgcagcaaagaagtttgtttctggccagaagtcaatggcagcaagtggaaatttgggacatacaccttttgttgatgagttgtaatactgatgcacacattacaggagagagctgaacgttctctcagcccagagcagcaaacacatgaaagtcagaagtctctaatatatcatttgtcttttttccagtgaggtaaaataaggcataaatgcaggt

SEQ ID NO: 23783 - DNA, 507 bp, Homo sapiens
  misc_feature (1)...(507): n = A,T,C or G
agggtgtgccnggggnnnncgcnattgcngcctgcggaattggccgcagaaaagggccgttctgccatcaacgaagtggtaacccgagaatacaccatcaacattcacaagcgcatccatggagtgggcttcaagaagcgtgcacctcgggcactcaaagagattcggaaatttgccatgaaggagatgggaactccagatgtgcgcattgacaccaggctcaacaaagctgtctgggccaaaggaataaggaatgtgccataccgaatccgtgtgcggctgtccagaaaacgtaatgaagatgaagattcaccaaataagctatatactttggttacctatgtacctgttaccactttcaaaaatctacagacagtcaatgtggatgagaactaatcgctgatcgtcagatcaaataaagttataaaattgcaaaaaaaaaaaaaaaaaaaacctggggggggggccgggcccccatttccccttatgggggggcgattaacaatc

SEQ ID NO: 23784 - DNA, 494 bp, Homo sapiens
  misc_feature (1)...(494): n = A,T,C or G
agggggnnnnttctgncgtatgaggacttcgcgcgagcagcaagagcacagaaactagggccagtgcccggttgtgtgaccttgagtaagttctttttcccttgaacagggagagagacacaatggatcagagtgtctctgccagttctaacttggggattctagtgggttgaaccgaacggtagtccgtttccaaaagaggaagccaagaccagagggggagtggttccttcaagtttgcagaaccagtaagtggcagagcaggactcatatctagttagtggttcagagcatgggctccggagctagactgcctggatttgaaccctggctttgccacttgcctgttgggtgactttggacaagctgcttaaattatgtctccatttcctaatccacagaacaagtgtaatactagttatctgtttcatggagtgattgtgaggattaaataaagttaatataacacaaagcaaaaaaaaaaaaaaaaaagt

SEQ ID NO: 23785 - DNA, 483 bp, Homo sapiens
  misc_feature (1)...(483): n = A,T,C or G
nattgaaccgccnntngggaananncaattgaccccgcgctgcaggaattcggcacgagggcaagcgctgtctcctcatcatcatggaatgcatggaaggtggtgagttgttcagcaggattcaggagcgtggcgaccaggctttcactgagagagaagctgcagagataatgcgggatattggcactgccatccagtttctgcacagccataacattgcccaccgagatgtcaagcctgaaaacctactctacacatctaaggagaaagacgcagtgcttaagctcaccgattttggctttgctaaggagaccacccaaaatgccctgcagacaccctgctatactccctattatgtggcccctgaggtcctgggtccagagaagtatgacaagtcatgtgacatgtggtccctgggtgtcatcatgtacatcctccaagcagctgatccgcctcctgttgaagacagaccccacagagagg

SEQ ID NO: 23786 - DNA, 499 bp, Homo sapiens
  misc_feature (1)...(499): n = A,T,C or G
tggggcncccnccaatcgccttggctgcacgaattcggcacgagaaggaatggcagctggttactttctccaaattttaggaagccagccccaaggacatggggctgtagttccatgtggcatctggaagcaatggtgggaccaaggggagaagcttcaggtagccagatttgggctggacaaagcttcccgcccctggaaggattcacaggatatcangcctggatggggctgagagttcggctggccccgctgcctcgggctcaggagggaacctgcccaaggcagcagattgagcctgaaggtgtgccaggacccacatatctgagtccctgtccagtgctccatggctgtgaccctgggcagattccggctctgccactccctggctgaatgaccatgggccaagtcctttgaccgccctgagccctgggctccaagggagatgacagtgacattggcctctcaggataatcaggaataaataataatgttgggc

SEQ ID NO: 23787 - DNA, 499 bp, Homo sapiens
  misc_feature (1)...(499): n = A,T,C or G
agggcngnnncccnattcaattggctcgcgtgcaggaattcggcacgagaatgtacttcagccacaacagtaaaaactggaagagatggatttaaagaagaaatatctattgatatttcctatactctcaatgaagaggtatttcctaataggagaccttaaattgaacaaacctaaagtttacacttctaagagtacagttaaaagtatgtggacctgcagttcttgtaactctccactctgtgttaatgatatatttgtactaggatcttttacttgaatctaaatttactgggtgatttccttctccagcctatcccctacagggaaaagctgatacttcccctatagtacaataaataattatttaaaagtcatagctccagtcactactgaaaacataattttggtgataaacataatttgagaaattaatttctgaatgtttttatagaaaattactgaaaatctattactcatggaagacttttaaagagta

SEQ ID NO: 23788 - DNA, 478 bp, Homo sapiens
  misc_feature (1)...(478): n = A,T,C or G
atgggggnattgacctcgtcggctgcaggtggagatgaactcggacctcaaggctcagctcagggagctgaatattacggcagctaaggaaattgaagttggtggtggtcggaaagctatcataatctttgttcccgttcctcaactgaaatctttccagaaaatccaagtccggctagtacgcgaattggagaaaaagttcagtgggaagcatgtcgtctttatcgctcagaggagaattctgcctaagccaactcgaaaaagccgtacaaaaaataagcaaaagcgtcccaggagccgtactctgacagctgtgcacgatgccatccttgaggacttggtcttcccaagcgaaattgtgggcaagagaatccgcgtcaaactagatggcagccggctcataaaggttcatttggacaaagcacagcagaacaatgtggaacacaaggttgaaactttttctggtgtctataagaag

SEQ ID NO: 23789 - DNA, 476 bp, Homo sapiens
  misc_feature (1)...(476): n = A,T,C or G
cgtggggtattgacgtctgtangacattcggcacgaggtgattctcccacctccaaaaggtaggggtgggactggaggcgtccctaggtcaggccgttgagttcgagctccgatgggccaccttgaatccaggactgaccgcccgtgtgtgcacagtttgttcttggacgaggactcgtgaggatcgagggctggggaccccggtgtgagcaggatggggccctgccctcccgtgggagttgtggactcgagcccaggggctgcccgtcacagcggtgtcccaggtccctgccatccgattttacctgggatgtcttctctggagtttggaattgcttgaggaaccctgcgtgtgcttggagaggccagagggcttgctgagaaccccatggacagtggagagcgggattcgaaccaagggctggactcccacacctctggcctggcgtcgccagttctttgtggctctgaagaat

SEQ ID NO: 23790 - DNA, 539 bp, Homo sapiens
  misc_feature (1)...(539): n = A,T,C or G
aggagattcacggcttggaattcggcacgagggccatcttagcggctgctgttggttgggggccgtcccgctcctaaggcaggaagatggtggccgcaaagaagacggtgagtgaggcgggccaggcccggaagacgattcacgtggagagatgtcttggccagggcgggcagatgtgagcccacgggggtgacagcatgcctgctggcatttggagggccccagaaggaatcccagtggccctctcaatgacttggggtcctcgacttcggaagtttaaggggctcggcttcaaaaagctgggtccggttttgaggcggttgcaggcgaggcccttaggtccgtatttaatgtttgctttgtagaaaaagtcgctggagtcgatcaactctaggctccaactcgttatgaaaagtgggaagtacgtcctggggtacaagcagactctgaagatgatcagacaaggcaaagcgaaattggtcattctcgctaacaactgcccagctttgaggaaatctgagatagagtactatgctatn

SEQ ID NO: 23791 - DNA, 506 bp, Homo sapiens
  misc_feature (1)...(506): n = A,T,C or G
agagggtnnaattgacgncctttttacaccggctgcangaattcggcacgagcggcctctctggcctcccacccgatgctgctttcccctgtggggatctcaggggctgtttgaggatatattttcactttgtgattatttcactttagatgctgatgatttgtttttgtatttttaatgggggtagcagctggactacccacgttctcacacccaccgtccgccctgctcctccctggctgccctggccctgaggtgtgggggctgcagcatgttgctgaggagtgaggaatagttgagccccaagtcctgaagaggcgggccagccaggcgggctcaaggaaagggggtcccagtgggaggggcaggctgacatctgtgtttcaagtggggctcgccatgcncggggttcataggtcactggctctccaagtgccagaggtgggcaggtggtggcactgagcccccccaacactgtgccctggtggagaaagcactgacctgtc

SEQ ID NO: 23792 - DNA, 457 bp, Homo sapiens
  misc_feature (1)...(457): n = A,T,C or G
aatttgcaccgctctgcaggaattcggcacgaggagaattgcttgaacctgagaggtggaggttgcagtgagctgagatcgtgccactgcactccagcctgggtgacagagcaagactctgtctcaaaaaaataaaataaacattaaaaataggtgggtaaaataaaatagattttccagccaggagttctgtgaaaaaatctttgtaaacccagaaaaagaaatggagaaaatggatcattaactgtcctctttccctccacagtttttgggccatcctcatcataacacacttctgtttttctcctttccattgtcggatgagaatgatgtttttgacaagctaagtgtcattgcagaagactctgagagcggcaagcagaatcctggggaagctgcagcctcgggaccccgcctgggcaggggccccaaagctaggctctgagaaggaaacacn

SEQ ID NO: 23793 - DNA, 474 bp, Homo sapiens
  misc_feature (1)...(474): n = A,T,C or G
cgcgccccccnnnaattgccatgcgctgcaggaattcggcacgagggcttccggcagcttgaccttctctgtgacatccccctggtgggttttatcaacagcctcaagttctccagctctggggacttcctggtggctggggtagggcaggagcacaggtatgtgtggccctcgagggttcaggtaaggtggtgcaggctggacagctcggtggaaatggggtggagactgggccgagtctcagctgcgtcttgcactccctgcaggcttggccgatggtggagaatcaaagaggctcggaattctgtctgcatcatcccactccgcagggtccctgtacccccagctgctggttcctgacactcttatcctccttatttaagtccttcccaggctatgccccaccctctttgtattaaaagcctcctcttttggagccgacaaggactctctcattgaaaacatcgggggggg

SEQ ID NO: 23794 - DNA, 500 bp, Homo sapiens
  misc_feature (1)...(500): n = A,T,C or G
aggagncaattgatncccctngnattgatcgcctgcggcttttttaaagaaacttgtgtattgagtcttaactgtatttcagtattttccagccttatgtgttacattattccaatgatacccaacagtttatttttattatttttttaaacaaaatttcacagttctgtaatgtaggcacttttattttcattgtgatttatatataaggtaatgtagggttatatttgggagtgactgcaagcatttttccatctgtgtgcaactaactgactctgttattgatcccttctcctgccctttcccaggtaatttaaattggtcatggtagatttttttcatagatttgaaaaacttttaggttgttaccaagtatgaagtataaatctggggaagaggttttatttacattttagggtgggtaagaaagccaccttgttacaaattttttaatttccaaaataatctatattaaatgagggtttctgatctgtactttg

SEQ ID NO: 23795 - DNA, 502 bp, Homo sapiens
  misc_feature (1)...(502): n = A,T,C or G
ngatgttnnaattgacggctgtggtatctcgcacgagcagtgcttagcaacattggtgatagcatgtggctgggacccagggcccttccccactcttcagccccgagtcatgtgtctgaggtgacggactgagacgcatctggtcctgtaattcagagagtgggcacatcaccaaagaactgcattgctgtggtcactgtttcttcaagtacacactgactctgctactttaggataaatatattttactcagaactctgaatttcacagtatacttactaaactaagtaaaaatgatacttaaaatacttattttactttctagacctaggctagatgttttaagctacagctctagttcattgtgatatttataatttgaaagctatgagaatagatgtgtgggtgaagccatagaacatatttgcttgaaattcttgagcagggatcttataaagggccagaaataagatgtgtggttcacatnagatagtagcgtaan

SEQ ID NO: 23796 - DNA, 511 bp, Homo sapiens
  misc_feature (1)...(511): n = A,T,C or G
agacgaggggnncctggacggctgtattagcaccggctgcaggaattcggcacgagggcatttgtatatacacactgcagcagagcttgtagctggacagagtcaaaaagaagaaaatacggtttcaggctttcttgcagatatgaagtattcttggaatgcaataagtatgtattgaactgtactgtaaagtagctccaaaacttaattactctcctgttttaggggttatacatttggactgtgcattctccaagagatgaagcggtgaagttgggatttacattggaagtgctgtagacttctttatgtggctcagtggagagagggaaagaatgttgcacctgctctagtaccataggtcaagaggcttctggatcacaaagtcataactagacaggtttgttcttgtagttttctatccccagtctttgctccccagatggcagtagtttttagtaggaaagtgccattcctgtccttaaggcacagtctcatcagaagtctaata

SEQ ID NO: 23797 - DNA, 471 bp, Homo sapiens
  misc_feature (1)...(471): n = A,T,C or G
atcgancgcctgcggattgcggcacgagcctcggcccacctctggctatggtaaccacactgggggcttcctccaagccccgctcttccagcacttccaccggcagagtcccagagccacttcaccctgggggtgggctgtggcccccagtcagctctgctcaggacctgctctatttcagggaagaagatttatgtattatatgtggctatatttcctagagcacctgtgttttcctctttctaagccagggtcctgtctggatgacttatgcggtgggggagtgtaaaccggaacttttcatctatttgaaggcgattaaactgtgtctaatgccccnnaaaaaaaaaaaaaaaaaaaaaaaaaaaaaaaaaaaaaaatttttggggggggggccccgccccccttttcccttttgggggggggttaaaaaatttccggggccggttttaaaaacgggggggggggaaa

SEQ ID NO: 23798 - DNA, 504 bp, Homo sapiens
  misc_feature (1)...(504): n = A,T,C or G
agcgcgtnnnattcccggctctagtagccgcccgcgcgatcggacgacgtggtcccggcccactacctttggtttcacagaagatctctgccaggcaaggccatcttagagattggagctggagtgagccttccaggaattttggctgccaaatgtggcgcagaagtaatactgtcagacagctcagaactgcctcactgtctggaagtctgtcggcaaagctgccaaatgaataacctgccacatctgcaggtggtaggactaacatggggtcatatatcttgggatcttctggctctaccaccacaagatattatccttgcatctgatgtgttctttgaaccagaagattttgaagacattttggctacaatatattttttgatgcacaagaatcccaaggtccaattgtggtctacttatcaagttaggagtgctgactggtcacttgaagctttactctacaaatgggatatgaaatgtgtccacattcctcttgagtct

SEQ ID NO: 23799 - DNA, 347 bp, Homo sapiens
  misc_feature (1)...(347): n = A,T,C or G
acttgctaccaacaactgctgtgcaattctgctgagcaggaatatcatgagctgttcaataatgacggacgcattggttgagatgaagtttccagtaaggaagtgacagtgcaatgtggatatttatggctgtaaaataggaagagtttagttcccaggctgaacctgccactgctggagccatttcaacaaggcatcctcacaacaaagaagagatgtgatttggtaccatttcacaccagcaggtgtctggacgaaaacatcaatgtgaataagggccaagtgcagtcctgtcttgattaaattacttaataatattattaaataataataggtctgggcagttn

SEQ ID NO: 23800 - DNA, 503 bp, Homo sapiens
agagtggggttttgacggctgcggtattcggcacgagcagcaatgtcaccttgtagcctatgcgctcaatggcccggaggggcagcaaccccccgcacacgtcagccaacagcagtgcctctgcaggcaccaagagagcgatgatggacttgagcgccgtgttcttcagcctcagctggaaggggaaaagtcagggccttcccggcgggggggaaggaggtgggcatcgggggcatggggcctggcctctggccgtgcatcctcactcccacccgcctccagcagccctctgtcggcctcctcccgacttgactcaccgtcacctggaagcagggcaccagctgctggggtgggacttgggtcttcagatcataaactacgtattccctcttgacactcacaatctcgttcaccacgtgggcctggaactctaactccatcgcttgagggtgggaatgagaactatgaaccaggaaggagagatcccagctgccaagtctggg

SEQ ID NO: 23801 - DNA, 498 bp, Homo sapiens
  misc_feature (1)...(498): n = A,T,C or G
agtngggtggccnggggnggggnnacctgatnnccctgnactgagtcgcctgcgaacaanaccaaangggatgtacgcagagntttcatcatggataactgcgaggagctaatccctgaatatctgaacttcattagaggggtggtagactcggaggatctccctctaaacatatcccgtgagatgttgcaacaaagcaaaattttgaaagttatcaggaagaatttggtcaaaaaatgcttagaactctttactgaactggccgaagataaagacaactacaagaaattctatgagcagttctctaaaaacataaagcttggaatacacgaagactctcaaaatcggaagaagctttcagagctgttaatgtactacacatctgcctctggtgatgagatggtttctctcaaggactactgcaccagaatgaaggagaaccagacacatatctattatatcacaggtgagaccaaggaccaggtagctaactcagcg

SEQ ID NO: 23802 - DNA, 450 bp, Homo sapiens
attagaacacctcgctccgcgctgcaggaattcggcacgagcactttcggaggccgaggtgggaggattgcttgaggccaggagttcaagaccagcctgggcaacacagcaagatcctgtctttgtaaaaaaactaaccaaacaggaaaaactgggagattttctgcagaaattgagttccagcctctctcgaacctgggaagacctggcaggagggggctgggctctcggctacagacttctccccaccccgtaggagctgaacgccaaccatcctgacccgccagtgctcttggtctcctgagtgtacccaggtcctcccaggtgcggtgtgcaccgagcgcgcctggcctgatgccctggcctgtgagctggggactcctgggccctgtgagcccctatgcggcaggcccaggaatggctgggtaggacagggaacacctttgcccc

SEQ ID NO: 23803 - DNA, 503 bp, Homo sapiens
  misc_feature (1)...(503): n = A,T,C or G
aggtggaaattgatggctgtggattgatacgccttacgtacngncctaagncagatttaaagagggtcttcctgttaattcgaagcttactgtgcctcttgtttccgagggaataaggactgattaagtcatctaagtggatgaaatactgaattacaggtcagaagatactgaagattactacacattactgggatgtgatgaactatcttcggttgaacaaatcctggcagaatttaaagtcagagctctggaatgtcacccagacaagcatcctgaaaaccccaaagctgtggagacttttcagaaactgcagaaggcaaaggagattctgaccaatgaagagagtcgagcccgctatgaccactggcgaaggagccagatgtcgatgccattccagcagtgggaagctttgaatgactcagtgaagacgtcaatgcactgggttgtcagaggtaaaaaagacctgatgctggaagaatctgacaagactcataccacca

SEQ ID NO: 23804 - DNA, 484 bp, Homo sapiens
  misc_feature (1)...(484): n = A,T,C or G
atttgccccgcctgcaggaattcggcacgagagacagcagcagctctgttctggagttcatgtcgatgaagtcctatcccgacgtttctgtggatatctccatgctcagctctctggggaaggtgaagaaggagctggaccctgacgacagccatttgaacttggatgagacgacgaagctcctgcaggacctgcacgaagcacaggcggagcgcggcggctctcggccgtcgtccaacctcagctccctgtccaacgcctccgagagggaccagcaccacctgggaagcccttctcgcctgagtgtcggggagcagccagacgtcacccacgacccctatgagtttcttcagtctccagagcctgcggcctctgccaagacctaactctagaccaccttcagctcttttattttatttttttagttntattttggacgtgtagagtttttgtcatcagacaaggactttgatcctgtcccctt

SEQ ID NO: 23805 - DNA, 473 bp, Homo sapiens
attgaccgccttagatcgaccgcctgcagaattcggacgagggccccgcaatctcggctcactgcaacctctacctcccaggttcaagctattctactgcctcagcctcccaagtagctggggttacaggcatttgccaccgggccctgatgatttttgtatttttagtagagacagggcttcaccatgttggctaggagggtctcaaactcctgacctcaggcgatccacccccacctcggctttccaaagtgctgagattacaggtgtgagccaccgcacccggccaactttctgaaatttcaaaactgaattgatccttctccaaattagtatatactattggaaacttgtctttccctgcagtaaggctggtttccccaccccagaaacatgtaacggttggtaccatgctaagcccttgccatgctaagccctttacattcatatgctataatccccatatcaacctt

SEQ ID NO: 23806 - DNA, 470 bp, Homo sapiens
  misc_feature (1)...(470): n = A,T,C or G
naagcccggctgcggtattcggcacgaggtttatagatgctgctgctcttttccctgaagcatagtcaagtaagaactgctctacagaaggacatatttccttggatgtgagaccctattttgaaatagagtcctgactcagaacaccaacttaagaatttgggggattaaagatgtgaagaccacagtcttgggttttcatatctggagaagactatttgccatgacgttttgttgccctggtatttggacactcctcagctttaatgggtgtggcccctttagggttagtcctcagactaatgatagtgtctgctttctgcatgaacggcaatatgggactccctccaagctagcgtttggcaagtctgccctagagtcatttactctcctctgcctccatttgttaatacagaatcaacatttagtcttcattatctttttttttttttttttgagacagagtttcg

SEQ ID NO: 23807 - DNA, 435 bp, Homo sapiens
  misc_feature (1)...(435): n = A,T,C or G
agtggcnnnnattgacctcgatcgcatgcaggaattcggcacgagggtaattatgctgtaattgattttcccagtgaacatatcagcaggcatcagaggccccaatctcctgctggtacttttcaagtcaaggctgttgtgaaatgaaggagcatctttggagagagacaaatccatgctgtgtcccaagccactcgggggaggtcactctgaacaggacatgggggagggagcatccaggcctggaatgttgtattcatgattatctggaatattttctttcatttcattattttcatttcaatattttttttcttttcattttctcctacccctaccccatcctcctttccctgtgaaagtcattggctctttctttaacttttcattcttgaaataattttagacttataaaaaggtacaaaaatagtacaa

SEQ ID NO: 23808 - DNA, 449 bp, Homo sapiens
  misc_feature (1)...(449): n = A,T,C or G
cgcggtacnnnaccttgaccttcatgcacgaattcggcacgaggatggaccccgcggatatgggaggagagaacacgaagggccgctgtgccatcatccactggcgatcccgagatgcaccatcaacctgacctacgcctccttggagaggacttacaaaaacgtcacctacggcacttctaaatactcagaaccttgcattaaggagagtggtaactccagaggttcgcatggacaccaggctcaacaaagctgtctgggccaaaggaataaggaatgtgccataccgaatccgtgtgcggctgtccagaaaacgtaatgaggatgaagattcaccaaataagctatatactttggttacctatgtacctgttaccactttcaaaaatctacagacagtcaatgtggatgagaactaatcgctgatcgtcagatcaaataaagcggca

SEQ ID NO: 23809 - DNA, 481 bp, Homo sapiens
  misc_feature (1)...(481): n = A,T,C or G
aganagggcccgggntaannnaaaactgatcgccataggaagncgcaggcaggcagccctgtacttaccctgtactcacctcatccgacagacgctgtggatgaggaggggcttggcggaagcgtgagcaccgatgtccctttgataacctgcactcaccaagatgaactatttgccgccctgtcttttcctgggttggggggtggcatctgatggtggcagagtgcctgttggttcgcccgtgggtctcatggttcagacagagggaggtggacggcagggatcatggagccaggagcgcgcctcagacttgcagcaaccattgtgatttgggttgttcggaatatttaaattactgatcagaagatgaaagtagcttttctcttgggaagtcttgcagcccgtgggagtgataccaggagcaacacagagctcagcagcggcgccaaggtgttccctgtttcctcagcacgtgagcctt

SEQ ID NO: 23810 - DNA, 441 bp, Homo sapiens
  misc_feature (1)...(441): n = A,T,C or G
nttttgccccgcgctgcaggaattcggcacgaggaacgacaccgtaactatccgcactagaaagttcatgaccaaccgactacttcagaggaaacaaatggtcattgatgtccttcaccccgggaaggcgacagtgcctaagacagaaattcgggaaaaactagccaaaatgtacaagaccacaccggatgtcatctttgtatttggattcagaactcattttggtggtggcaagacaactggctttggcatgatttatgattccctggattatgcatagaaaaatgaacccaaacatagacttgcaagacatggcctgtatgagaagaaaaagacctcaagaaagcaacgaaaggaacgcaagaacagaatgaagaaagtcagggggactgcaaaggccaatgttggtgctggcaaaaagtgagctggagattggatcac

SEQ ID NO: 23811 - DNA, 490 bp, Homo sapiens
caggcccgcctgcagcattcgaaacgtctagctgtgcagttttagcgggtacaagatctaccccggacacgggaggcgctacgccaggaccgacgggaaggttttccagtttcttaatgcgaaatgcgagtcggctttcctttccaagaggaatcctcggcagataaactggactgtcctctacagaaggaagcacaaaaagggacagtcggaagaaattcaaaagaaaagaacccgccgagcagtcaaattccagagggccattactggtgcatctcttgctgatataatggccaagaggaatcagaaacctgaagttagaaaggctcaacgagaacaagctatcagggctgctaaggaagcaaaaaaggctaagcaagcatctaaaaagactgcaatggctgctgctaaggcacctacaaaggcagcacctaagcaaaagattgtgaagcctgtgaaagtttcagctccccgagttggtggaaaacgc

SEQ ID NO: 23812 - DNA, 438 bp, Homo sapiens
  misc_feature (1)...(438): n = A,T,C or G
ntttagcccggctgcaagaattcggcacgagatttcactgagaaagccccctccctgctctaagaaggggctccgtgaagttcttcccagagccgcgctgcctgcagtgcgctctgaccttctcttcatgtgtgtaaatctgtaatataccattctctgtggcctgtttttcctggaagaagaaaaaaaaaggtttggcaggccatctttttttgtacttaaaagtagccttaagaacaataataaagtgctcttaaaccaaaaaaaaaaaaaaaaaaaacttggggggggggcccggcccccatttccccttatagtgggacattttacaatacccgggccgggtttttacaccgtgaaaacgggagaacccncnngggggggtccgtgccccaattcgcctttgattggaccggtgtatcattgaaggccgggggg

SEQ ID NO: 23813 - DNA, 446 bp, Homo sapiens
  misc_feature (1)...(446): n = A,T,C or G
gcgggtnnnaatcgatttctttaggcattcggcacgagtaatcccggcactttgggaggccaaggtgggtggatcacaacgtcaggagatcgagaccatcctggctaacatggtgaaaccctgtctctactaaaaatataaataaattagccggacaggcgcctgtcctcccagctactcaggaggctgaggcaggagaatggtgtgaacctgggaggcggagcttgcggtgagctgagatcacgccactgcactccagcctgggcaacagagcaagactccgtctcaaaaaaaaaaaaaaaaaactcgggggggggccgggaccccaatcccccctatagggagcgttataacaataaattggcggcggtttaacaacgtggggactggggaaaacnnnanacttatnaaaaggtacaaaaatagtacaaagggggggcccggga

SEQ ID NO: 23814 - DNA, 504 bp, Homo sapiens
  misc_feature (1)...(504): n = A,T,C or G
ngatgggggnnnnaattgaccgattgaggatcttgcgagagaggatcgagtgaacgtctatggagtcactgtgccagggcatgaaggcagggctggaatggcagccctagttctgcgtcccccccacgctttggaccttatgcagctctacacccacgtgtctgagaacttgccaccttatgcccggccccgattcctcaggctccaggagtctttggccaccacagagaccttcaaacagcagaaagttctgatggcaaatgagggcttcgaccccagcaccctgtctgacccactgtacgttctggaccaggctgtaggtgcctacctgcccctcacaactgcccggtacagcgccctcctggcaggaaaccttcgaatctgagaacttccacacctgaggcacctgagagaggaactctgtggggtggnggcccgttgaggtgtactgggctgtcagggatcttttctataccagaactgcggtcactatttttgtaataa

SEQ ID NO: 23815 - DNA, 488 bp, Homo sapiens
  misc_feature (1)...(488): n = A,T,C or G
tgggacgannacaccaattgcccgcctgcaattgcaccgcctgcaggaattcggcacgagctgaggcagtttgcacgctgatggcccaaggtccgcgacccaggttcgcttgagtctctatcagagggcaagagacggggttttaccgtgtaagccaggatggtcttgatctcctgacctcgtgatccgcccgcctcggcctcccaaagtgctgggattacaggtgtgagccacagcgccgggtctcaaagtcttaactcttttcagcattaacccaaaagtccacagttcaaagcctcatctgagacaagccaggcgtgctttatggacaatgcgctcctcaggccttgaccgcgtacttccccagcgggtacagccgctccttccgctgctgcttcttggtcttcgggatctcctcatgcttgatgagccggcggcgcatggcgcgtgtcttcttaggccgcaggtccaggggcttgtagttcctg

SEQ ID NO: 23816 - DNA, 458 bp, Homo sapiens
  misc_feature (1)...(458): n = A,T,C or G
natagaccgccttgaggacttccgcacgaggtctctagtaaatgcagctagattcaaatgggctgataaccaaattttaacacatcagcattcaccaccaggtttacttttattttcagattggctcattgtgtgcagaccttagagcaaagtttcctttatggtatctgtgtacgtatccaaacttcttttaattgttcacagattttaaaagcggtagcaccacatggttgtgtagatcagacctgtgtatttagatcagacctgtgtatcacgtaagtgtgtgagtgcagtgcagatgagcaccatttagttatatgtgctaggcaaatctccaacacagttgatgtgtagtcttgtggtagatttgtgcatactgtaagcaaattgcttagcttctctagacatcagtttccacatctgaaaaataagaagatgagagtacacggttgttatgn

SEQ ID NO: 23817 - DNA, 460 bp, Homo sapiens
  misc_feature (1)...(460): n = A,T,C or G
ntactgcccgctctgaggacttcggcacgagaaaaaaaacaacaaaaaaagctaaccttctattagaaaaggggacaggggaatgagtaaacttcttttattgcggacaaatgtgcacatagccgctagtaaaactagcctcaaacaggatgctcatagcttaataataaaagctgtgcaaaggccatgaatgaatgaattttctgtttatttcactgatgcacacattacctcattgacaattcagaagtaaatccaacgtgtgttgactcttggaaagcagcaaaaacaggagctgaagaaaagaaattcttggaaccagccgtaacccagtaaggaattgtgaagttgtgtttttattttgtttcattttttgcagagtattaagaacattattctggaacatcagaacgtttcccttagaccgatcccagcaggtggcagctcagattgctgcagt

SEQ ID NO: 23818 - DNA, 482 bp, Homo sapiens
aatgatcgccttgagaattagtagagaggcattctgagcgcactcagagcagcatcgttcctgaggaagaacaagcagctaacaaaggcgaggagaagaaagacgactagaacattccgatggagacagaggagacacaccttgaagaaacaacagagagccaacagaatggtgaagaaggcacgtctactcctgaggacaaggagagtgggcaggagggggtcgacagtatggcagaggaaggaaccagtgatagtaacactggctcggagagcaacagtgcaacagtggaggagccaccaacagatcccataccagaagatgagaaaaaagaataagtgttgccttgttttgtgtgttctaaatactttttttaatgaaaaaatgttttttggttttaaaaaaaacaaaaaaaaccaaaataaaaaaatttttggggggggggccggggccccatttccccttaaggggggggtaataac

SEQ ID NO: 23819 - DNA, 464 bp, Homo sapiens
  misc_feature (1)...(464): n = A,T,C or G
ntttagaanngcttganccgcgctgcaggaattcggcacgagtagtgaggcaattccagggccacacagacggagccagctgtattgacatttctaatgatggcaccaagctctggacgggtggtttggacaacacagtcaggtcctgggacctgcgcgaggggcggcagctgcagcagcacgacttcacctcccagatcttctccctggggtactgccccaccggggagtggctggcagtgggcatggagagcagcaatgtggaggtgctgcacgtgaacaagcctgacaagtaccagctgcacctgcatgagagctgcgtgctgtccctgaaatttgcttactgtggtaaatgggttgtgagtactggaaaagataacctcctcaatgcttggcggaccccctatggagccagcatattccagtccaaagagtcctcgtcagtgcttagctgtgacatctct

SEQ ID NO: 23820 - DNA, 462 bp, Homo sapiens
  misc_feature (1)...(462): n = A,T,C or G
nttaganngctcganccgcgctgcaggaattcggcacgagcaaactagcaacactagtcaagggagtgactggagttatttctggtagcagtagccactggcatcctagaaacacatggacatttgtagcatgaattgacctattggtagtgcaatagctatacatgatttttattcttggcaaaagaaaatgcttcaaaaaaaaagtgatcaaacctgcacattgatcctgtaatagcaaatggaaggctatttctctgtactagcatttcagctttatgtgggaaagttacccgttctcctgcaagtacaatcaacccttgatgacttaagtattaattattctgggtgtagctcacccaagttttcttcctacatcttttggctaattccaccacacctcagcatcacagtcagatgggaaaaggggcaggtggattctcatgtcatgccttcttgtac

SEQ ID NO: 23821 - DNA, 324 bp, Homo sapiens
  misc_feature (1)...(324): n = A,T,C or G
catggacccccccnnnaatttcccccgcgctgcaggaattcggcacgaggagccattgaggaccctatcctggcctacacagctgaaggagagatcaacaatgtgcagtgggcatcaactcagcccgactggatcgccatctgctacaacaactgcctggagatactcagagtgtagtgttggtggcgctgtgcccacgaggcaggggcttttgtatttcctgcctctgccccacccccaaacctcctgtataagaagtaccgtattttctgcccatcatactttgtaataaaacttgaacatgtaaaaaaaaaaaaaaaaaaa

SEQ ID NO: 23822 - DNA, 471 bp, Homo sapiens
  misc_feature (1)...(471): n = A,T,C or G
ngggtccaattgacatcgtgcggcattcggcacgagccgcggcgagggaacggatcggagacgctgcgcctgctcataaggaaatgcctcaggccataagaagcagtggcagcctctcacctgcagtgggatctgtctcaactcccattccgtctccagagccaaagtttggagggaacgtgagctcgggtcaggacacaccaggacagcctcatccaccacaccacaggctccagacaggtgctgcagccacggagttgaaaccctaacctacagaaaagtcatcgttaacaggaagctcgtgaaagatttttacatttccctctcagcccaacagcaatattgctgccagcatcccactgggggtcctaagctcaaaggttcttcatggttggttgtataggagttcttcctgtcccctgaaaccccaccctccaacctcctgagagccttcaaagttggaaaaaatat

SEQ ID NO: 23823 - DNA, 360 bp, Homo sapiens
  misc_feature (1)...(360): n = A,T,C or G
ntttgaccngcttganccgcgctgcaggaattcggcacgagggttcactgagctccccagatctcccactgcggggagacagaagcctggactctgccccacgctgtggccctggagggtcccggtttgtcagttcttggtgctctgtgttcccagaggcaggcggaggttgaagaaaggaacctgggatgaggggtgctgggtataagcagagagggatgggttcctgctccaagggaccctttgcctttcttctgccctttcctaggcccaggcctgggtttgtacttccacctccaccacatctgccagaccttaataaaggcccccacttctcccaaaaaaaaaaaaaaaaaaaaa

SEQ ID NO: 23824 - DNA, 493 bp, Homo sapiens
  misc_feature (1)...(493): n = A,T,C or G
nattggaccgcccttcggttagactcgccgtgcangaattcgccacgagcagcaacatgcctgctaaattttatcgaccgtcttcagactgttaaggattgtggtagagaactgtgacagccactctcagcatcaccctgaaccaaaggcccctatcaagtaacaatatagccaagcaaaattccagtcaatagagacattgactggttggctggcttcccaagggatagcaccagacaagaaatgcaaggatgaggaaaccaggcacgggagagagaggggcaacagaggtccagggtttgggtatctttttatttttcactgggaggtggtaagttagccctgttgcccatgtatgcagatgggagaagtgatttaaaaactccaaagcaattggtaatccccaaaatgggtgtatctggtttgaaatgaaaccttattttattggaaatggttggtttcccaattctgtttgccattggccaatataatg

SEQ ID NO: 23825 - DNA, 481 bp, Homo sapiens
  misc_feature (1)...(481): n = A,T,C or G
nattgaccgcctgagtagaccgcctagctcanaanatctacaattgtcacgtgctgctgaacagcaaaggggcagtagtggccacttacaggaagacacatctgtgtgacgtagagattccagggcaggggcctatgtgtgaaagcaactctaccatgcctgggcccagtcttgagtcacctgtcagcacaccagcaggcaagattggtctagctgtctgctatgacatgcggttccctgaactctctctggcattggctcaagctggagcagagatacttacctatccttcagcttttggatccattacaggcccagcccactgggaggtgttgctgcgggcccgtgctatcgaaacccagtgctatgtagtggcagcagcacagtgtggacgccaccatgagaagagagcaagttatggccacagcatggtggtagacccctggggaacagtggtggcccgctgctctgaggggccagg

SEQ ID NO: 23826 - DNA, 475 bp, Homo sapiens
  misc_feature (1)...(475): n = A,T,C or G
nattgacccgctctgcaggaattccgcacgagaatatgcagtaacaaaataggaaaagattatatggaatccctactaaagatagaatgttatccaatctgaagaacaaagagaaaaaagattgaagaaaaatgagcagtctcagagacctacgagacagcatcaagcataacaactgtggaagaggagtttcaaaatgagagaagaggaaaagggcaggaaaataaaattgaacaaatagtactcacatcctcccaaatttgaggaaaaacattaactatagatctaggaaccccactgtaccccaagtaggaaaatcacagagatcttcacttagtcacatcacactgttgaaatcaaaaagcanagagattatcctggaggcagcaagaggaanactaatcatctataagagaacaatagtacaaatcatgggtaaatcctcattagtaacagtggaggccgggaagcagtn

SEQ ID NO: 23827 - DNA, 481 bp, Homo sapiens
  misc_feature (1)...(481): n = A,T,C or G
attgaccgccttangannnatagaccgcgtgcggaantccgccgagccggtggctccggaacgagatcgggaagtaaacagtccactaaccctgccgataactatcatctggcccggaggagaaccctgcacgtggttgtgagctccttgctgacagaggcagggtttgagagtgccgagaaagcatccgtggaaacgctgacagagatgctgcagagctacatttcagaaattgggagaagtgccaagtcttactgtgagcacacagccaggacccagcccacactgtccgatatcgtggtcacacttgttgagatgggtttcaatgtggacactctccctgcttatgcaaaacggtctcagaggatggtcatcactgctcctccggtgaccaatcagccagtgacccccaaggccctcactgcagggcagaaccgaccccacccgccgcacatccccagccattttcctgagttccctg

SEQ ID NO: 23828 - DNA, 475 bp, Homo sapiens
  misc_feature (1)...(475): n = A,T,C or G
ctttgctttcgctcgccctgcaggaattcggcacgagcaaaaatgtgcagttaatacttggcgcttgaaaatgcagtagtgaatgtggaaccaagcctgtctgtatatctggtagctcttttcttgctttgttttttcttaccagtattctgcctaacgtttgcttctgtgatggttatattgcctagcaagcacacccgtggttgtgaaaatagtatagcaaaaaagaaaaatccccggttattgatgtactagatttgtgtatgtcttttaaacagttctagtttcaccttacacagaataatcaggaaaagtgtaaaaattcaaaagtgaaataaaaattttatcagttaagaaaaaaaaaagaaaaaaaaaaaaaaaaaaaaaaaaaaanattttggggggggggccgggcccccattcccccttaaggggggggtattaaaaatccgggggccgggttttaaaaccgggg

SEQ ID NO: 23829 - DNA, 458 bp, Homo sapiens
agatgggcaatgacctgcgctgacgaattcgagacgagaggctctcaccctgctctcctgcaggtgcagctctgtgctctgcctctgatgagaccatggcccagaatctgagtacgctgctgctcctgctggccaccctagctgtggccctggcctggagccccaaggaggaggataggataatcccgggtggcatctataacgcagacctcaatgatgagtgggtacagcgtgcccttcacttcgccatcagcgagtataacaaggccaccaaagatgactactacagacgtccgctgcgggtactaagagccaggcaacagaccgttgggggggtgaattacttcttcgacgtagaggtgggccgaaccatatgtaccaagtcccagcccaacttggacacctgtgccttccatgaacagccagaactgcagaagaaacagttgtgctctttcgag

SEQ ID NO: 23830 - DNA, 371 bp, Homo sapiens
  misc_feature (1)...(371): n = A,T,C or G
cgcggggaattgacttctctgncggatttcggcacgagctggaacagtgaccaagtgtaatttcactggtgatggaaagacaggggcatcctggacagacaacatcatggcccaaaagtgttcgaagggggctgcagcggagatccgagagcagggggatggggcagaggacgaggagtgggatgactgagggacgtggctgcctctgggggcaccagcaccttctgtagcattgtggaacatttcttccatgaacttctactctggagctggagagaacagtctgccaagtcttacctggttcttccccatagccaccttggaatactctttgaacaagctctgctaaaaccaaaaaaaaaaaaaaaaaa

SEQ ID NO: 23831 - DNA, 495 bp, Homo sapiens
  misc_feature (1)...(495): n = A,T,C or G
cggccccnnnattgacgatcgagcgtctgccgagagaggctcgagtgaacggcgatcgctacacagctgagaagaaggacatctcatttgttttaactatgcagtttcctgtctatctatctatctatcccatcagtctatcaatcaatctatcaatctatctgtctatccctatctatctatccatctatctatctatatctgtctatatctatctaacatttatctatcatctattcatctatcagctatcatctgtctatcaatatttcaatcaatctctctatccctatcaattaatctatctacctacctatcaactatccatctatctctatcatctatcatctattcatctatcatttatcatctgtcaatccatcttcctactatctatcagaagcaacacattntcttcctgactgtaaaaatatttaagtgggccgggaggatggctcacgcctgtaatcccagcactttgtgaggcctaggcgg

SEQ ID NO: 23832 - DNA, 507 bp, Homo sapiens
  misc_feature (1)...(507): n = A,T,C or G
gggggacaaaagggaannaatttgancgcctgagtagtatcgcactagcaggcccctcgcagcataaggatgttttgcaactttccagaatctggcccagaaattagggctcaatttcctgattgtagtagaggttaagattgctgtgagctttatcagataagagaccgagagaagtaagctgggtcttgttattccttgggtgttggtggaataagcagtggaatttgaacaaggaagaggagaaaagggaattttgtctttatggggtggggtgattttctcctagggttatgtccagttggggtttttaaggcagcacagactgccaagtactgttttttttaaccgactgaaatcactttgggatattttttcctgcaacactggaaagttttagttttttaagaagtactcatgcagatatatatatatatatttttcccagtcctttttttaagagacggtctttattgggtctgcacctccatccttgatcttggtagn

SEQ ID NO: 23833 - DNA, 460 bp, Homo sapiens
cctttgccccgcgctgtatgaattcggcacgaggagagagagagagagagagagagagagattttgaagcttctctgcgttcacacacagcagcctggtttcctggaagggcattttccacattgtgcgttatggatgatcatcccaggcatcaggtgtgaagccctgcatccacatccaggggctatcaaatctctctgcaaaaggagaagctggactcagggtatgcacagatgtggaaacaggaactgatgtgtccattacaccactaggacagaggccagaacaatgaagaaaccaaatacttggaagagggtagagataatgaatggagtccaagagccctgattgtgccataaatgtccagataattccatacctgaggattatgtggtttgtaaacttggcacttagaagaaccaataaaatcatgttatagtttcaaaaaaaaaaaaaaaaa

SEQ ID NO: 23834 - DNA, 470 bp, Homo sapiens
  misc_feature (1)...(470): n = A,T,C or G
nttgccctcctgcagcactgaggaattacgcacgatgttggaggatgtagtgagcatgaatagcgccgatgcagacaagacagggtgacagagcgagactctgtctccaaaacaaaacacaaagcgcacacacatacagaaataatgagaaataatcatctaaaaggagaacatgacttggatcacgcagagagagcgtcacagaggcgagggagaatgaagcctcttgttatcctgatcgcctatgacaacgacatttctaactcttctttgaagcgcagttcttactcttaaatctggtcatacaagctttggcttggaatcctgtctgtctttgaaacagctgaagttagtgttttcctgtgttacccagtgttacatagtctcatctttgaacttttctgcgtcagccttctctctttgggaatgctgcctgtttctgtctaacttattctccctggtgtggtgtg

SEQ ID NO: 23835 - DNA, 492 bp, Homo sapiens
  misc_feature (1)...(492): n = A,T,C or G
agcgggtananaaaattgatcgcctgtcggcaatacttttgcttcctattaacacctttgttataaaaagcaacaaaggggggaaatggaacaggaattaaaagaaattaaagaatgcataagcaaaaactcaattgtatgtagggaaacccaattcctcctgaggaagagaaagaggtggagtcctttaaaaattcactgcctgtttttccgtctgtagctagtgagccttatctctccctttcccaggcattgtgaagaccctgtttctccagctgtgcagctgcatggtcactagacagataaactcaagttgtaaaacatgtttttccttgaaaagtaagaaatgatgtaatacatgtctcaactgaataactgtctttgtttctcacttctgtagtaagcttccccctgcacagatctcccctctcaccccatgaaatgcttaaaaggtaacctgactctttgttcagggctcagtcctttggatgn

SEQ ID NO: 23836 - DNA, 458 bp, Homo sapiens
  misc_feature (1)...(458): n = A,T,C or G
cctttgccccgcgctgcaagaattcggcacgaggaaataactaggtcagacaatgaaaccttagacttttgattggggctgtttggacttgatccaatgataaggtaataaggttgttgcaatttctcaaagcatcttaattctcaaactgaaacatttagcaaatacatggtgaatctggtgtaaacttacaatctaacaaataattttctttcaactcttctctttttctgcctaacaatctatacgaaattgccaatatctaagcaatcaaaagtttctgaaatctctgtttccttagtagaaatgaccttgacaacttattttctgagataccactaggcctactgtctttcatgccattttatataaacattttgatagatactctgtcttttgttttttatctcttctcttttcaagagtcacttgactttttcaaatattcttaaaagatn

SEQ ID NO: 23837 - DNA, 474 bp, Homo sapiens
  misc_feature (1)...(474): n = A,T,C or G
ntttgacccgcgctgcaggaattcggcacgagggagttcctgcccattgttgggcatgtgcaggtggcacaggtcccaggccgaggggagcccagcagccccggagagctgaatttcccctatctgtttcaactgctggaagatgaaggctacaaaggcttcgtgggctgagacacagtagagggcttgagttggctacgttcatactgggataggcggggccacccagaggctggccagtgagggcccgcacaccacccacgtgcctccagacagcgagtgacatcccatctcctcctctgcattaaagatgacctgctgagnaaaaaaaaaaaaaaaaaaaaaaaaaaaaaaaccttggcccgggggggggcccgggcccccatttcccctttagggggggggataaaaattcgggggcgggtttttaaacggggggagggggagaaaaannnnntnnttntttgtgcgctg

SEQ ID NO: 23838 - DNA, 470 bp, Homo sapiens
  misc_feature (1)...(470): n = A,T,C or G
ngggggcaattgccctcctgcaggaattcggcacgagggtcccagcctcctctgggagcgggcagttggcgaccctgcactgacccgcgtccctccgtcccgagcccgcgcgccctcagagggtgcccggacagactgaagccatggcgattctttttgctgttgttgccagggggaccactatccttgccaaacatgcttggtgtggaggaaacttcctggaggtgacagagcagattctggctaagataccttctgaaaataacaaactaacgtactcacatggcaattatttgtttcattacatctgccaagacaggattgtatatctttgtatcactgatgatgattttgaacgttcccgagcctttaattttctgaatgagataaagaagaggttccagactacttacggttcaagagcacagacagcacttccatatgccatgaatagcgagttctcaagtgtn

SEQ ID NO: 23839 - DNA, 469 bp, Homo sapiens
  misc_feature (1)...(469): n = A,T,C or G
cgggggccgggatggaaactggaactgacagctatcgcacgagacganttaaaagntgnggaaaatgttatagctaagtcattattgattaaatccaatgaaggcagctatggctttggattagaagacaaaaataaagttccgataataaagttggtagaaaagggatctaatgctgagatggctggcatggaagtcgcgaaaaagatttttgctattaatggtgacctagtttttatgagacctttcaatgaagtggattgcttcctgaaatcgtgtttaaacagcataaaacctctaagagttcttgtgagcacaaagccaagagagagaagactgtcctgcttgcccacctcctgacactttgagggcatttaaaaggaagaagacagactggaaaggaataagggagtagtattgaaagcaatcattacgtcctccctagggccccctgatttaaccctacaaa

SEQ ID NO: 23840 - DNA, 459 bp, Homo sapiens
cctatgccccgcgctgtatgaattcggcacgagaagaattctttatatagcataaaataaatgtggttttctaaaacacaagatcagataaaatgttctagaaatggagtactgacccagaatcagcctgttagttgttcatctgaggggggctgaatgctccccatgcacaatctgtattgattttatttcaaatgttcaaagtctaaaggtgctgggaatgattgtttatttgccgtcacagtcataagagaacacagccaacacacagggaaaaaaaccgaatgcttttgttccgtggagatgcactaacccagctggatgtgttgaatccagcacctatcacgataattgcattgtatgcaaatgaatcggtatgttatacaacactaattagtggctgtaatttgggtgtaatttttacttacgttgcatagctcatccccctggacaatatgg

SEQ ID NO: 23841 - DNA, 492 bp, Homo sapiens
ggggcaactgaccgcctgcggatttcggcacgcggaaaccctgaccatcacccaggcagtcatcttcatcaacacccggaggaaggtggactggctcaccgagaagatgcatgctcgagatttcactgtatccgccatgcatggagatatggaccaaaaggaacgagacgtgattatgagggagtttcgttctggctctagcagagttttgattaccactgacctgctggccagaggcattgatgtgcagcaggtttctttagtcatcaactatgaccttcccaccaacagggaaaactatatccacagaatcggtcgaggtggacggtttggccgtaaaggtgtggctattaacatggtgacagaagaagacaagaggactcttcgagacattgagaccttctacaacacctccattgaggaaatgcccctcaatgttgctgacctcatctgaggggctgtcctgccacccagccccagccagggctcaat

SEQ ID NO: 23842 - DNA, 449 bp, Homo sapiens
aattgcctggctgcggaattcggcacgagctcccttccaccccaacccggatcgccagccctcgagagctctgtgctccacgccgaggatgcaccgtctctggattggtccggccttcttcctaatgacatcgctcagcgtctctggagccgtcatcccgcggaatgggggcccagggggtgtcagctcggggccttgcctcttgcagctactctgtggtcaggccgggtcctccaccatcaggaagatcccatcctgagctctgtctcctgcccctcctgctgtgggatgctgagcacagagcccacagcccatctgcctcttcacctccctgaatccgtgtccatctgcaataaacgacagcctcggctgcaaaaaaaaaaaaaaaaaaaaaaacctggggggggggcccgggcccaatttccccttatggggggcggtataacaac

SEQ ID NO: 23843 - DNA, 476 bp, Homo sapiens
  misc_feature (1)...(476): n = A,T,C or G
nggcttgcaccgcctgcaggaattcgttgcgaggctatataaagaagagtgttggtgaattccagcctgggagaaaagcacaaagaactcaaaatggaattagccacacaacactgtgaaaaacagcctaactcaaattcagggctcatatttggtaagtgctgggtgttagggttagactgccagtatggagccaaattccggaaggcaatacaaaccagtcagagtagataggactttattctggatatgattgaaagccagtgaagatatttgagaagggaagtcaaatatgattatataaaaatattaatatagtggacatgtataatgtggatacgatgggggaaatagtgccgtcacataggagtctgttgtagtaattccggagtgttgtgatgaaggcttggactgaagtggtgacgagaagagacagagatataggtgatgtgtcctaattgaggaaatgaatatan

SEQ ID NO: 23844 - DNA, 483 bp, Homo sapiens
  misc_feature (1)...(483): n = A,T,C or G
aggttggancgcctgaggaannnaattgacacgcgctgcaggaattcagcacgagcatggggacaccatctacagtggggccgaccgctatcgcctgcacacagctgctggtggcaccgtgcacctggagatcggcctgctgctccgcaacttcgaccgctacggcgtggagtgctgagggactctgcctccaacatcaccaccatccacaccccggacacccagtgatgggggaggatggcacagtggtcaagagcacagactctagagactgtcagagctgaccccagctaaggcatggcaccgcttctgtcctttctaggacctcggggtccctctgggcccagtttccctatctgtaaattggggacagtaaatgtatggggtcgcanggtgttgagtgacaggaggctgcttanccacatgggaggtgctcagtaaaggagagcaattcttaaaaaaaaaaaaaaaaaactcgagggg

SEQ ID NO: 23845 - DNA, 444 bp, Homo sapiens
  misc_feature (1)...(444): n = A,T,C or G
aatagacccgtctgcangacttcggcacgaggtaagtgcgggcagagcactgcgccgtttgggaacgcaactttgaggagacagtgcggcggacttcagtgaagttccttatgacttcccctgaaattgcttgcttatcatgggggcaaatgaaagtaaaaggctctaatacaacctataaggactgcaaagtatggccagggggcagtcggacttgggattggagagaaacaggaactgagcattctcctggtgtgcagcctgcacatgtgaaggaagttgttgagaaaggagtacagactcttgtgattggccgatggatgagtgaggccttgaaagtgccttcatcaactgtggagtacctcaagaaacatggcattgatatgcgggtcctccacacagagcaggcagtgaaggagtataatgccttggttgcccaagggg

SEQ ID NO: 23846 - DNA, 463 bp, Homo sapiens
cttcgacccccgccgtttgccccgcgctgcaggaattcggcacgagaaataagcacatgatggctgggcaccgtggctcacgcctgtaatcccagcactttgggaggctgaggcgggtggatcacctgaggtcgggagtttgagaccagcctggccaacatggtgaaaccccatcgctactaaaaatataaaaaattagctgggcatggtggcgcacgcctgtagttccagctactcaggaggctgaggcaggagaatcgcttgaacccgggaggtggaggttgcagtgagctgagatcgcaccattgcactccagcctgggcaacaagagcgaaactctgtctcaaaaaaaaaaaaaaaagggggggggattacttggggccagggttggaaatcaccctgaccaacagggggaacccttatctttactaaaaatataaaataacccgggcggggtggcgca

SEQ ID NO: 23847 - DNA, 490 bp, Homo sapiens
aatttgaaacgcctgcattagttcggcacgagcagaggcaggacaggcctcctggtaagcccgcaaagttgctgacctcctgacttcgtctgccttttattaatatctgtattgctgataaccgtgctcttgactatgtgtcccaggtcatgtcccaggtcatggagaagcccgtgccacagtgaccctccccatactcctgggggggctgctctccatcctggatcgtaaggaggcatcatcaggctgtgttcctggaaccccaataaccctgggcccccagggccagcctgttgtagagggaggctatctgaccgccggtctggcagaggagatgggtgggcagctcccagacaccccaaaggacccggttctcttcccagagcgtcctaaggttactcttggaacctgatctttgttccctcatcccagggaaatgacacactctgtatttctggtttatttagaaatgatttaaaaaacattatac

SEQ ID NO: 23848 - DNA, 452 bp, Homo sapiens
aatttaccctcggctgcaggaattcggcacgagcgccgcttgggcgccttgtccggagctgcggccttaggcttcgcttcctacggggcgcacggcgcccaattcccagatgcctacgggaaggagctgtttgacaaggccaacaaacaccacttcttacacagcctggccctgttaggggtgccccattgcagaaagccactctgggctgggttattgctagcttccggaacgaccttattctgcaccagcttttactaccaggctctgagtggagaccccagcatccagactttggcccctgcgggagggaccctgctactcttgggctggcttgccttggctctttgagctcccttttgcttaattactgggttttctgggcagttttttttttaaagagttggagtaagaagaggattaaaaaggaaaggcaaataaaaaaaaaaaaa

SEQ ID NO: 23849 - DNA, 421 bp, Homo sapiens
atgtgcctttgctccgcgctgcaggaattcggcacgaggagcaataaaaataagaagaaaggaaaagccagaaaaatagagaagaaaggaaccatgaagaaacaggccaacaaaactgcctcctcaggcagttcagacaaagacagttcagctgagagctcagcccctgaggaaggtgaagtgtcagactctgacagcaacagctcctcttccagttcagattcagactcttcctcagaagatgaagagttccatgatggctatggagaagacctcatgggagatgaggaagacagggcccgtctggaacagatgacagagaaagagagagagcaagaactgttcaatcgcatagagaagagggaggtgttgaaaagaagatttgaaatcaagaaaaaactaaaaacagccaaaaaaaaaa

SEQ ID NO: 23850 - DNA, 508 bp, Homo sapiens
  misc_feature (1)...(508): n = A,T,C or G
aggggncgannnnnaattgcttcgcccgcctgcaggaattcggcacgagtgaggattgactttatataaggtgccctgtagaactctgttacacatatttttgacccatattatttacaatgtcttgataattctacctttttagagcaagaatagtatctgctaatgtaagggacatctgtatttaactcctttgtagacatgaatttctatcaaaatgttctttgcactgtaacagagattccttttttcaataatcttaattcaaaagcattattagacttgaaagggtttgataatctcccagtccttagtaaagattgagagaggctggagcagttttcagttttaaatgagtctgcagttaatatcaaatgtgagtttgggactgcctggcaacatttatatttcttattcagaacccttgatgagactatttttaaacatactagtctgctgatagaaagcactatacatcctattggttctttctttccaaaatcagcct

SEQ ID NO: 23851 - DNA, 472 bp, Homo sapiens
  misc_feature (1)...(472): n = A,T,C or G
ggggccatcccctctgccgactgcggactacggcacgagcagtcctgggacacgtgaagcacaaacttgtatgttcccctgattttgaatccctcttggatcacaaacaccggtaaaatgagcaggtggaggaggacggcgcctgtgcccacggctgctgcctgctccagacattttgttcttgaatctgtgagacccagaaggggcccactgagcccactcactccagcctttggcaaccattgttccaggtcccccagggcttcctcccacagcagctgtgaatggcacagtgaccttcctgcagcgtggagatggcacatccttgctgctggggacttggccctgctatttatttttgtatttatgtcttaatctcttccactgatgcatcctccaagggtagatggggagggtctgtgtgaaggggctggcttctcttgtgcctgctgggtgcangggcaggaagcgc

SEQ ID NO: 23852 - DNA, 478 bp, Homo sapiens
  misc_feature (1)...(478): n = A,T,C or G
attagatcgccctaggcatttcgcatcggctgcacgaattcggcacgaggttccatcttcatttctgccacagttggaacttcccgaggaaggaaggaggcctgaggttttgcacaatctgtttcagagcctgtttagactcaaacctatgcttcccttggcagcagaatacacttaacctaaagcagtatttggagttgagaaaaacctggtggggtaagtgaatatgtactgtttggtagggtaggtagagaagctgtgctttgaccctgtgattccatctttttctaccttctatgatggtgatgaagctagatacccctagggaagaaagaaggactgggtttagcaaaaatgatttggtaattaaagtttatttgaacaccccnnaaaaaaaaaaaaaaaaaaaaaaaaaatctctggggggggggcccgggccccaattcccctttagggggggggttaaaaaaccccgggg

SEQ ID NO: 23853 - DNA, 501 bp, Homo sapiens
  misc_feature (1)...(501): n = A,T,C or G
aagttnnnnnnnaattgacgtctgtagacttcggcacgagagatgcagtcacctggaaagaacagagattaccctttcacctacctcagcaaaacaaactttcaagtcttgatagacttagcctagtaattttatagtgagagtttcaaactatatatcagtgtctatagcatcaaaaacttctgggggcgtgggggaagtagaataccaagtataatagttacattcactttcaaagagcatctatgaatttgccttttgtaacttactgtggctttaaacatattcagaacagatgcttgaaatatgcacttagcactttggttccacatctgtctgggtaaaccatgaagaaaatgaagctgctgcctcaatcgacccagacagcagccataggcagataaagatttggtttcaccctggtggtggtaggcattcggtgtgactttttttcctctaatatcaattttacagtacggaaatagtattttaaaatagtat

SEQ ID NO: 23854 - DNA, 479 bp, Homo sapiens
  misc_feature (1)...(479): n = A,T,C or G
cgggggccattgccattctgcangaattcggcacgagggcgcgtggtctactccgagtgacagagacgctcaggctgtgttctcaggatgaccgagtgggagacagcagcaccagcggtggcagagaccccagacatcaagctctttgggaagtggagcaccgatgatgtgcagatcaatgacatttccctgcaggattacattgcagtgaaggagaagtatgccaagtacctgcctcacagtgcagggcggtatgccgccaaacgcttccgcaaagctcagtgtgccattgtggagcgcctcactaactccatgatgatgcacggccgcaacaacggcaagaagctcatgactgtgcgcatcgtcaagcatgccttcgagatcatacacctgctcacaggcgagaaccctctgcaggtcctggtgaacgccatcatcaacagtggtccccgggaggactccacacgcattgggcgcgc

SEQ ID NO: 23855 - DNA, 464 bp, Homo sapiens
  misc_feature (1)...(464): n = A,T,C or G
actcgcccgcctgcangaattcggctcgaggaagatatgggaaatcgcactgaggacttacagaagaacgcccctgacttattggcgcttgctggcattgagaattctattacagaacaaaagctgaagacctaactgcatgatgtctgtatttggagatggcgcctctacagatgtcattaaggatacatccgtcctgaaggggtggcccttatcccgcaggattcgtctttctgagaagagacgcaaggggctcgcctgctctccccccgtgcctgcaccagagaaggaggccatcggcaagccaaggagagccctccccagaaatcacacggaccagcaccttgatctggggacttcagaaaacagaactgtgaaaagacaagtttctgttgtttaaaccacccaatctgaagtattttgttatggcagtcctgggcagactaatacaatatgcaacacat

SEQ ID NO: 23856 - DNA, 479 bp, Homo sapiens
  misc_feature (1)...(479): n = A,T,C or G
acgccccattgccctcctgcacgaattcggcacgagcaaaggcagaccccgtggagaaggcagaagagttgtttcttctgaaagtttgaactccactcccatgggaaatacccaacagaatcagacaggaaaccccaaagtgccactgaaaagcaattgagagccccactttggtacacctgatgggagcggagagttagagaggcaggaaataacctccactccagggtagaagtagacaggagatgggatggaaggtttctgcatgctgggactagctcaggtcaaagtccagaactccagaaaacaaggcctgcccccagctcagagcagctaccacagcacaaaatggtgtggaatccaggagccaggatgaagcgtangggtagacggtggttggatagctaactggcctttccactgctctagcctggaactggttgggctggggcaggggacatgttggtctgagtatagaa

SEQ ID NO: 23857 - DNA, 467 bp, Homo sapiens
  misc_feature (1)...(467): n = A,T,C or G
gtggcgnnnnaattgaaatcgatgcccgtttcggaacgacgccaacaggagttctacagcctggacagtcagctgcccatctggcgggtgaggcaggtagcactgtggctccgagatcctgagggcgacgctgtactgcagttttgatagctatgaaaacgccatcagactctacgagatgatcctgcagagagaagcgaccttgcaaaagagcaatttttgtttcttcgcgctctatgcctccaagagctttgctctgcagctctccctgaagcagctgcccccgggaatgtcagtggaccccaaagagtcttcggcgctgcagtgtaaggttcaagagatcggccagttagtgcctctgctacccaatccatgcatgcctatcagcagcaccaggtggcagactcaggactacgatggcgacgagattctgcttcacagatgggagtcttcctctgttgcccaga

SEQ ID NO: 23858 - DNA, 504 bp, Homo sapiens
  misc_feature (1)...(504): n = A,T,C or G
ngcgtggtggaaattgaagcctgcttgacttgcctgtcggaattctgcacgaggaagggctgaacatgcgccacttgtggagacctggtgtgaaagcgctgctgcggatcatcgaggtggtggaggccaactaccctgagacactgggccgccttctcatcctgcgggcgcccagggtatttcctgtgctctggacgctggttagtccgttcattgatgacaacaccagatggaagctcctcatttatgcaggaaatgactaccagggtcctggaggcctgctggattacatcgacaaagagattattccagatttcctgagtggggagtgcatgtgcgaagtgccagaggggggactggtccccaaatctctgtaccggactgcagaggagctggagaacgaagacctgaagctctggactgagaccatctaccagtctgcaagcgtcttcaaaggagccccacatgagattctcattcagattgtggatgcctcgtcagtct

SEQ ID NO: 23859 - DNA, 548 bp, Homo sapiens
  misc_feature (1)...(548): n = A,T,C or G
ggggcgattcgncgcccgangatttcgccgcgctgcaggaattcggcacgaggaagattcagcagtactctctcaaaggcttgacagtactcttgtgggaaatcaccaaatgctgtcatagttttgttttaactgtctccttgagggcagagggaagggtgagagaaaatctgttttcatgggtatttgtagtacagcctttttttctttcaagtggctgtatcaaattcactggtcttactaatcactgtctttaccagtgagtacaaaaagttaaggcaactaggacaggtactgctctataccaagaagagaatgattctttggaaattgttatttttaagcttctgttaatttttccagaagtttagtgcgtttcttttccatactttctcccctaattcttttatttgaagaagagaacttaatggcaaataaacaacaaaccaggacatgcattttaataccctaaggaaaaatggaaccctcaaatataactcctcccacaaccaccctaatgtgcctcagtctagggcagcaggtggacn

SEQ ID NO: 23860 - DNA, 507 bp, Homo sapiens
  misc_feature (1)...(507): n = A,T,C or G
naagtgattgccggctactgattcggcacgagactttcctctagaactttccaagtttttacttatgtggaaccgaaatctttatttctcccgtgaaactttactactatcagataattgaagacagatgtctttgtattctcttcaagcccaaaccaattctgttccttcaatctaaatagtggtaatatgaatgtttaagaaatgaaataagaaacatgtgcaggcactttggaaggtgctaagtgactgccctaaggaatgaacagcaagggccacgtgggagtatcccaccgaaagcacttgggctgtcaggaacaggaggcgtgggaaactctggcttacgaaaacatgaacacaggggcaacagaggcaaactgttgttcgagtgaaatataaatctcatgctctttacaggtaaaaggattaaggataatccatttggaagaggagaagactgaggctgaaagtacagccacatgacaagcatatggaaaaaaatgcgga

SEQ ID NO: 23861 - DNA, 495 bp, Homo sapiens
cttgcccgcctgcagattggaacgccagtgaggtccccaggatggagtggccagaagctcttgctatggagactgcagaagtgaagatgatgaagcaacagaatggattacattccaggtcaaacgtgtaaagaaacccaaaggagatcataagaaaactcctgggaaaaaagtagaaacaggtcagatagaaaatggacatcgttaccaagcaaacctagagatcactggccccaaggtggcatctcctgggccacaaggaaaaaaacgtgactaccagcgtctgggatggcccagcccggacgaatgcctcaaactccgctgggtagagctgactgccatcgtgagtacctggcttgcagtttcttcaaaaaacattgacatcacagaacacatagattttgccacccctatacagcagccagcaatggagcctctttgcaatggcaatctccccacgagtatgcataccctggaccacttgcatggagtttc

SEQ ID NO: 23862 - DNA, 500 bp, Homo sapiens
  misc_feature (1)...(500): n = A,T,C or G
aggggcnnnnnnttttccttcgctcggctgcaggaattcggcacgagaagaagatggagaagaaatagttacctatgatcatttgtgtaagaattgtcatcatgtaatagccagacatgagtatacattcagtatcatggatgaatttcaggagtataccatgctgtgtctgttatgcggcaaagccgaagatactatcagtattctccctgatgacccccgacaaatgactctcttattctaaggatccttctacagatctgttataactatattgtgttggtttacaatacagcaagcctgatggtttgtcttatttcaaaaaaaaaaaaaaaaacctcgggggggggcccggcccccaatcccccttatggggagtcgttttacattgccctgggccgccgttttacaccgtcgggacatcgggaggaatccccttcngcccngccgcatttactcatttttttaaaaacccnatgtgggctgagatcacaggctca

SEQ ID NO: 23863 - DNA, 492 bp, Homo sapiens
agcggctggaattgacgctatagaattcccccgagaatctgcgttggcaaagaatgtctggaacatggacttggcggtcagtaacctgtcacagagctacaactaggaaaattagagtggcagtagtcacttatttaagaattcattcaggtaaacagctgcaccctctgtaccccttaagtggcaaagaagctgatatagtcttctgaaaattatcactatgagtgctataattctgaatataatgtctcttaattagaattcatacaagaaccacgtgtgagtgttgctgttgttgttcttttttttaatcaaatgctggtgtgactataaaggagcgcggctgatttttacttgattcttttgaccatgaaaacccgacagagaacttttttatccaaatgaaggcccccccatggaaagtgcttggcctggtaggacaacgtttctacaacggagaggctgcttgcacaaacttgctagaggactttt

SEQ ID NO: 23864 - DNA, 467 bp, Homo sapiens
  misc_feature (1)...(467): n = A,T,C or G
nattgaccgcctgcagactgggacgcagggctcatgggtggttgctgaatgaagaacagaatcttggtgctttgtggctcaccacagccatctgtggggcaggcacacacacctcccgccagctccaattttgcactttttccctgcttgattccaagagtaggtgctgcctagcagcccttcgtggccactctttactcaggagggccttgcagagtcctgcaccaggcctgggtgagtggatgcgcctcttaccatatgacacgtgtcaagatgcccttccgccccctctgaaagtggggcccggccagcactgctcgttactgtctgccttcagtggtctgaggtcccagtatgaactgccgtgaagtcaaaactcttatgtgttcattaagggctcaataaatggtagctgaatgaatgaatagcaanaaaaaaaaaaaaaaacttggagggggggcccggcc

SEQ ID NO: 23865 - DNA, 490 bp, Homo sapiens
  misc_feature (1)...(490): n = A,T,C or G
naaatatgacgccttagganaacggcacgacggaatgtcagctgagtacagttttcccatatggaagaccagccacactgtcaagtgggaaggcgtatggcgagaactgggctgcctctcaaggacggcgtcatttgctgttcgaaaagaaagcggacattcactgaaatcatctctttcgcacgccatggtcatcgattctcggaattcttccatcttaccaaggagaggtgctttgctgaaagttaaccaggaactggcaggctacactggcggggatgtgagcttcatcaaagaagattttgaacttcagttgaacaagcaactcatatttgattcagttttttcagcgtctttctggggcggaatgttggtacccattggtgataagccgtcaagcattgctgataggttttacctcgggggacccacaagcgtccgcggattcagcatgcacagcatcgggccacagagcgaaggagactacctn

SEQ ID NO: 23866 - DNA, 488 bp, Homo sapiens
  misc_feature (1)...(488): n = A,T,C or G
cgtgggccataggcgctgaagacttcgccgagccctagttggcttttgctgtgtctcctgcctcaggcagtgtcatttctgggagcaggtggttgtagtccaggcccctccccagcagggtctgcccaggctccttcgagcccctttccccgcctcctctcagcctgtccggatgacagtgttcgcctcctgtttagactgtacactcttcaggggtaggggtgccgtcagttcttcaatcagctggcacacacttgtatagtgaaatgtttacatgtgggaaaactccgccttagacaaactaccaaagtacaatcgtgtctctctctagccggaatgctacagagagaaatggaaccttagatttgcaacaaaagtctggtaactggtctgtttgccaaagtgaacactggatgactnaaggagctgagaaggcccncagaagcggatttgtggtgggtattttattttgctgtgccaatcttctg

SEQ ID NO: 23867 - DNA, 201 bp, Homo sapiens
cccccccccatgcccgcctgcggtacttttcctggaggaggccttccagcatgtgggcaaagccttcaatcagggcaagatcttcaagtgaacatctcttgccatcacctagctgcctgcacctgcccttcagggagatgggggtcattaaaggaaactgaacattgaaaaaaaaaaaaaaaaaaactgaaactaccggcc

SEQ ID NO: 23868 - DNA, 474 bp, Homo sapiens
cttcgaccgccctgttggaccgccctgcaggaattcggcacgagcctccacacatctccctaagtcagagtggctgctggccctggtagatttgacttgctcttgcctcactcgacctccaaagtgggactgaagacagtggtcaagagacttgagttcgggacagtaagccaggggttaaggttctttcctttttttgaaagccaaagacccagtttgcattgtgctgctgcattcatggttagaagctttccatgcctaggttctagggaatttatttttctatgtgtatatattttcaaactttgtttcctgggtactgggcatgtgcctgtctgagccccaggtctgtctacaccccaccattcattctgtctgtctgttccctggacactgcctaaaagggtctcaagacagtgccctgggggttcctaggactagggcccatcactgttctcttctgctgggaaatgg

SEQ ID NO: 23869 - DNA, 467 bp, Homo sapiens
  misc_feature (1)...(467): n = A,T,C or G
cttgaccgcctgtagattngcatgaggagctccgtaacacacattctcctctgcgctatgtggacattgccatcccatgcaacaacaagggagctcactcactgggtttgatgtggtggatgctggctcgggaagttctgcgcatgcgtggcaccatttcccgtgaacacccatgggaggtcatgcctgatctgtacttctacagagatcctgaagagattgaaaaagaagagcaggctgctgctgagaaggcagtgaccaaggaggaatttcagggtgaatggactgctcccgctcctgagttcactgctactcagcctgaggttgcagactggtctgaaggtgtacaggtgccctctgtgcctattcagcaattccctactgaagactggagcgctcagcctgccacggaagactggtctgcagctcccactgctcangccactgaatgggtaggagcaaccacn

SEQ ID NO: 23870 - DNA, 498 bp, Homo sapiens
  misc_feature (1)...(498): n = A,T,C or G
agatgggggngggattgannccccctcgaccggctgtangaattcggcacgagagatcgcgcgcctgccgccgccggagcctgcgagccgagaccgagccatgtggctagaaatcctcctcacttcagtgctgggctttgccatctactggttcatctcccgggacaaagaggaaactttgccacttgaagatgggtggtgggggccaggcacgaggtccgcagccagggaggacgacagcatccgccctttcaaggtggaaacgtcagatgaggagatccacgacttacaccagaggatcgataagttccgtttcaccccacctttggaggacagctgcttccactatggcttcaactccaactacctgaagaaagtcatctcctactggcggaatgaatttgactggaagaagcaggtggaggttgcggtgagctgagatcacaccactgtattccagcctgggtgactgagactctaactaaaaaaaaaaaaaaa

SEQ ID NO: 23871 - DNA, 512 bp, Homo sapiens
  misc_feature (1)...(512): n = A,T,C or G
ggtgtgtctgcngcgtatcancggctgcaggaattcggcacgagctcaatctgnggtcggtggttaaggagagctgcgagcccagctgctgagcaggggtgggacatgaaccagcggatggagtccaccaggggagtgggaaagtgggcttgtgctgctgcctagacagtacggatgtaaaggcctgggagctagaccctccccaagcccatccatgcacattacttagctaacaattatggagactcgtaaggccaggccctgtgctgggcacatagctgagatcacaagcacacagggtcgctgccctgatggcgcttacattccagggggtctaatgaccatatcttaagacacagatgtgcccagggaggtggtgtcactgcacaggaagtatgacgactttagtgtcctgagttcaaatcctgattcaggagctcacaaagctatgtgaccttacaccagtcacttaacttgttagccatccattatcgcatctgcaaaatggggaa

SEQ ID NO: 23872 - DNA, 494 bp, Homo sapiens
agtggctgggcctcgatgccattgagacaccctaagaaggaacaatggtcgtgccataaagggccgcggccacgtgcagcctattcgctgcactaactgtgcccgatgcgtgcccaaggacaaggccattaagaaattcgtcattcgaaacatagtggaggccgcagcagtcagggacatttctgaagcgagcgtcttcgatgcctatgtgcttcccaagctgtatgtgaagctacattactgtgtgagttgtgcaattcacagcagagtagtcaggaatcgatctcgtgaagcccgcaaggaccgaacacccccaccccgatttagacctgcgggtgctgccccacgtgccccaccaaagcccatgtaaggagctgagttcttaaagactgaagacaggctattctctggagaaaaataaaatggaaattgtacttaaaaaaaaaaaaaaaaaaactcgacgcgcgccgattcaatattacgcttatcgaacg

SEQ ID NO: 23873 - DNA, 483 bp, Homo sapiens
  misc_feature (1)...(483): n = A,T,C or G
gaaggaaaaannnttgcccgcctgctggaattccgctcgagatctcaagctgacagagactcagagaaggccgagaaagagaaactttctccctggcctgcggaccttgaaaagcagccttcccaccatcctttgcggatcaagaagcagttgttcccagatctctatagcaaagaatggaacaaggcagtgcctttctgtgagtctcaaaagagggtgactatgttgacggccccactgggattttcagtgcacttaaggtctacagatgaggagtttatttctcaaaacaccagggaggaaatgggtttagggtcccccttggtacccatgggagatgatgatggaggtccagaagccacagggaatcagagtgcctggatgggccatggttctcccctgtcccacagcagcaagggcacccctcttctagctactaattcagggtctagcactcanatatcttctgactccagtgaactt

SEQ ID NO: 23874 - DNA, 494 bp, Homo sapiens
  misc_feature (1)...(494): n = A,T,C or G
tgatggtntnaggcttgacggctgtggagacgcccatgccttaagtgaaagaagtggaaacacccctaactctcccaggttagctgctgaatcaaagcttcaaacagaagttaaagaaggaaaagaaacttcaagcaaattggaaaaagaaacttgtaagaaatcacaccctattctatatgtgtcttctaaatctactccagagacccagtgccctcaacagtaaagacttttctttaataagagtacggtgccacttgcctcaaaagttactatggtgcttaagattgtcttgatctgacatatatcaccttctggggtatttactcattgtgccaggacctggcattttcatgtgcctttgaccaagtgttcagaatttgcttgactctaacctggagagcttcttaagtgatgccccttcatggagcttctatgacagtgaataaactattaattgaaggaaaatgttataattaatgtatctatttgcc

SEQ ID NO: 23875 - DNA, 368 bp, Homo sapiens
  misc_feature (1)...(368): n = A,T,C or G
ngacggggtnggaattganngcccgctcgcatcgcctgtcggaattcggcacgagcttacacagacctgagctggaagctcaactggttttgttccctgtttgaaatattgtgatctccctcccatgaaagaaaaaccaagaaccagaggcgtagactgactgaagacacaactcctggctttctgaagctatggacttggattggattgctgggggtttgtagagaaaggtgacaaatttcagtacctctggcatgctgtcccaggaaactagggctcccactaacttatgaggtttttaaacacattgaaaatgacatgacattaaaataaatttggatttgctcataaaaaaaaaaaaaaaaaaa

SEQ ID NO: 23876 - DNA, 503 bp, Homo sapiens
gggtgatcgcgctctggatgcccctagccgtctcgaagagcgaacttgtagttgaagttaagtcagataagctcccagaagagatgggcctcctgcagggcagcagcggtgacaagagggctccgggagaccagggagagaaatacatcgatctgaggcattagccccgaatcacttcagctcccttccctgcctggaccattcccagctccctgctcactcttctctcagccaaagcctccaaagggactagagagaagcctcctgctcccctcgcctgcacaccccctttcagagggccactgggttaggacctgaggacctcacttggccctgcaaggcccgcttttcagggaccagtccaccaccatctccacgttgagtgaagctcatcccaagcaaggagccccagtctcccgagcgggtaggagagtttcttgtagaacgtgtgttttctttacacacattatggctgtaaatacctggctcctgccagcagctga

SEQ ID NO: 23877 - DNA, 508 bp, Homo sapiens
  misc_feature (1)...(508): n = A,T,C or G
gggtgattgccgctgtggcccggctgcangaattcggcacgagtggagacgacgtgcagaaatggcacctcgaaaggggaaggaaaagaaggaagaacaggtcatcagcctcggacctcaggtggctgaaggagagaatgtatttggtgtctgccatatctttgcatccttcaatgacacttttgtccatgtcactgatctttctggcaaagaaaccatctgccgtgtgactggtgggatgaaggtaaaggcagaccgagatgaatcctcaccatatgctgctatgttggctgcccaggatgtggcccagaggtgcaaggagctgggtatcaccgccctacacatcaaactccgggccacaggaggaaataggaccaagacccctggacctggggcccagtcggccctcagagcccttgcccgctcgggtatgaagatcgggcggagttgagatgtcacccccatcccctctgacagcactcgcangaaagggggtcgccgtggtcgc

SEQ ID NO: 23878 - DNA, 546 bp, Homo sapiens
  misc_feature (1)...(546): n = A,T,C or G
agagagactcgannnctttcgccggctgcaggaattcggcacgagcacagaatgtgggaagctactggaggacatcaaatgcgcactttgctctccacattctcaaagcctgttccactcacctgagagagaagtcttggaaagagacctagtacttcctctgctctgcaaagactattgcaaagaattcttttacacttgccgaggccatattccaggtttccttcaaacaactgcggatgagttttgcttttactatgcaagaaaagatggtgggttgagctttccagattttccaagaaaacaagtcagaggaccagcatctaactacttggaccagatggaagaatatgacaaagtggaagagatcagcagaaagcacaaacacaactgcttctgtattcaggaggttgtgagtgggctgcggcagccccgtggtgccctgcatagtggggatggctcgcaacgtctcttcattctggaaaaagaaggttatgtgaagatacttacccctgaaggagaaattctcaaggagccttatttggn

SEQ ID NO: 23879 - DNA, 500 bp, Homo sapiens
  misc_feature (1)...(500): n = A,T,C or G
ttggcaggaaatagggggggaatatggggggaaaagggannntttgacnctcctgcggcattcggcacgagagtacatcttggaagtttgactttacagaagaacgtcttacctcctggcctgtacgaggctttgtttaagaactgtttattaagataaattgtcaagtaaagcacctcaattcattgactttctagccatcttcctttgattagctaacaaactgtcaggcagcattatttcatgctgcttccagagccctctgggagctatatacattgtaaatgcaggccctagctttggaacgaggaattgggagattccaggagtcagggtagagaatttctgagcaaatcggagatattttangggtgtggaggaggggaagggaggaatgggccaccatatttggccttacaggaattaaggagacttcctgtaatatttctttccaataaatattgctttttacaattaaaaaaaaaaaaaaaaaaaaactg

SEQ ID NO: 23880 - DNA, 468 bp, Homo sapiens
attgcccgcctgcttgaattccgcacgaggaaaggacgaagagacctgaagtcagtcaagactcagtggcctttgaggatgtggctgtgaacttcacccaggaggagtgggctttgctgagtccttcccagaagaatctctacagagatgtgacgctggaaaccttcaggaacctggcctcggtcggaatccaatggaaagaccaggacattgagaatctgtaccagaacctggggattaagctaagaagtctggtggagagactctgtggacgtaaagaagggaatgaacacagagaaactttcagccagattcctgattgtcacctgaacaagaaaagtcaaactggagtgaaaccatgcaaatgcagcgtgtgtgggaaagacttcctccgtcattcattcctggacaggcacatgagagctcatgctggacacaaacgatctgagtgtggtggggaatggagag

SEQ ID NO: 23881 - DNA, 503 bp, Homo sapiens
  misc_feature (1)...(503): n = A,T,C or G
aggggtgccnccctttccattggctgcaggaattcggcacgagcagccatggccctacgctaccctatggccgtgggcctcaacaagggccacaaagtgaccaagaacgtgagcaagcccaggcacagccgacgccgcgggcgtctgaccaaacacaccaagttcgtgcgggacatgattcgggaggtgtgtggctttgccccgtacgagcggcgcgccatggagttactgaaggtctccaaggacaaacgggccctcaaatttatcaagaaaagggtggggacgcacatccgcgccaagaggaagcgggaggagctgagcaacgtactggccgccatgaggaaagctgctgccaagaaagactgagcccctcccctgccctctccctgaaataaagaacagcttggcngannaaaaaaaaaaaaaaaaaaaaaaaannnaannnnnnnnnnnnnnnnnnanggggggggggggggggggggnnnnaaaaaaaatgggggggc

SEQ ID NO: 23882 - DNA, 491 bp, Homo sapiens
  misc_feature (1)...(491): n = A,T,C or G
ngtggatcnggcctcgacgcctgttgtattccgtcgaggttgtagcttagtatccataagggaaacttagactatagacataactacaaagccagtgcagcttttgttttctgtatgttgttgggggatcaactttcacacatagcaagcacatggcctccctgatgtcaggatgcctttgttaggatctgtatttgcccttaattttgttgaaatcttttttccttcttcctcttgaaaagttccaaaatatagtttattgtatctttcatcactaaaaatttgttcctttttcactatgggcagttcacacaaggcaaaaactattgaacagttggttttagtgtgttgtataactttgctgtatatcaaactaattttgacaagttttcatcctaagcctcaaatcatgtaattaataatttgcctgtttatttatgacctaattgtgattcttttattaataaaagctaatgggaaaaggatccctg

SEQ ID NO: 23883 - DNA, 494 bp, Homo sapiens
  misc_feature (1)...(494): n = A,T,C or G
gcggattnnnnnnaattgatcgccttaggaattcggcacgagctccactggagcggaagggctgtgtgtcaaaagaaggaagccaggctgtgaagggccgtgttgctttcagtgggtgggcagaggtttagaaaggtggttctgaaatggcacctggtactcttgtgggacctggggaatataaggaactctgtgcatgaggtttcaaaaataaaaattgagtccactctccccgtacacacacactcgggcacttcaggaggtcagttctcaccccttcctcgatggggctttaaagctctggggagaagagctgctccccactcatgccccagagggactgtgaaaaggcttcctgtgacctccgatggcggcccctcattggccaagggcactgtggatgttttgtgggaggcagcatggcaccgtggaaagggcagtagacgtggagccggcacctctggtctggattccacttaaaaccagttgagtgn

SEQ ID NO: 23884 - DNA, 440 bp, Homo sapiens
  misc_feature (1)...(440): n = A,T,C or G
ntttgaanaattcgaccgcctgtangaattcggcacgaggagcactgcctccgggcctcccctgagaccacactcagcagtggcttcttcgttgctgtaattgaacgggtcgaggtgccaagctcagcctcacaggccaaagcatcagcaccagaacgcacacccagcccagccccaaagagaaagaagagacagcaaagagccgcagccggtgcttgcacaccgccttgcacatagcagaggctccgggctgactccttcctggtgggaaaggaagatgcctgtcctctccgtggaggaccctgggccctcaccgcaggaagcagtttgggttttgaaaggttattgggtcccttccttgggctgtgttcttgctggtgagcaaagtgttgcctgcaaaaataaaatgcagaacgtactctaaaaaaaaaaaaaaaaaa

SEQ ID NO: 23885 - DNA, 507 bp, Homo sapiens
  misc_feature (1)...(507): n = A,T,C or G
gagcagtngncccattgancgcctgcgatagacggccgtagggccctcacttcatccggcgactagcaccgcgtgcggcagcgccagccctacactcgcccgcgccatggcctctgtctccgagctcgcctgcatctactcggccctcattctgcacgacgatgaggtgacagtcacggaggataagatcaatgccctcattaaagcagccggtgtaaatgttgagcctttttggcctggcttgtttgcaaaggccctggccaacgtcaacattgggagcctcatctgcaatgtangggccggtggacctgctccagcagctggtgctgcaccagcaggagggcctgccccctccactgctgctgctccagctgaggagaagaaaaggggaagcanagaaagacgaatccgaggagtctgatgatgacatgggctttggtctttttgactaaacctcttttataacatggttcatanannagctgactttttacanaaaaaaaaaaa

SEQ ID NO: 23886 - DNA, 460 bp, Homo sapiens
  misc_feature (1)...(460): n = A,T,C or G
cttgggcccccttttgccccgcgctgcaggaattcggcacgaggggtggaggtgctgaacgacgaggactgccgggagttcccctggcaccccaagcccgtgctggagctctccgactccaacgccgcgcagcttaacgagggcccctgcctcgtcctttttgtagattctgaggatgacggagagtccgaggcggccaagcagctgattcagccgatagctgagaaaatcattgccaagtacaaagccaaagaggaggaggcaccccttctgttcttcgtagccggggaggatgacatgactgactccctgcgagattacaccaacctgcctgaggctgcccctttgctcaccatcctggacatgtcagcccgggccaagtacgtgatggacgtggaggagatcacccccgccatcgtggaggccttttgtgatgacttcctagcagagaagctcanac

SEQ ID NO: 23887 - DNA, 496 bp, Homo sapiens
  misc_feature (1)...(496): n = A,T,C or G
attgcccgcctgcggttatagctctccatgaggtcaggagtcctttaaaaaagcctatgtcttggtctttaactgtccccttctgcaagatgtgactctatacacatggagacagattgaagaaagacttcacccatcttctaggaaataaaatcctgctcttgtcttctcccagtcactcccttatgcactgaaaggagaatttgactcccttgcacttcaaggccaggtgcctctccactagacagtcagacaaaggcaaataatggaggatagagagacaggtgttcattangctggccatagggagaggaagggggtgacagcaggggaaaagaaactgtagtatcagttgtcacaagtagagctcggcccagctttccctcccttcccagccaccctagaattgagagtcccagtgcccctagtgtcgactttctatgtacatcctangggtgagggagtgcggnngcatgggtangatatanagcgtaan

SEQ ID NO: 23888 - DNA, 455 bp, Homo sapiens
  misc_feature (1)...(455): n = A,T,C or G
aatgtgcccgctctgangaattcggcacgaggacccacagaggcatcccaacacgctgtcttttcgctgctcgctggcggacttccagatcgaaaagaagataggccgaggacagttcagcgaggtgtacaaggccacctgcctgctggacaggaagacagtggctctgaagaaggtgcagatctttgagatgatggacgccaaggcgaggcaggactgtgtcaaggagatcggcctcttgaagcaactgaaccacccaaatatcatcaagtatttggactcgtttatcgaagacaacgagctgaacattgtgctggagttggctgacgcangggacctctcgcagatgatcaagtactttaagaagcagaagcggctcatcccggagaggacagtaatgaagtactttgtgcagctgtgcagcgccgtggagcacatgcattcacgccgggtgg

SEQ ID NO: 23889 - DNA, 456 bp, Homo sapiens
  misc_feature (1)...(456): n = A,T,C or G
cttttccccccttttgccccgcgctgcaggaattcggcacgagccgattcctgcttgggctgtttgctgttggctggtaataatatatttgatttaaatgctgttgactgtgctattaactgctgccgtcagtaaactccaaagatctttttgttttggctttagtatcatatgtgctttttctgtatcctgagcgctctatatgatcatgttaatttaaagctttatacacattgttgtttttgctggtctcatctttggtaatatgctataccccactgctgcccgacactgccctttagctgcagagctggattagctgttgaccatttgatgctggtgtctgtctggcanggactgaatgacctgatgtcagatttagattcttccttgggattacacagctatgaaatgaatttgcttctaaaccctccaaagtgaatctatctttaaact

SEQ ID NO: 23890 - DNA, 521 bp, Homo sapiens
  misc_feature (1)...(521): n = A,T,C or G
agtttgtttnccncggggnnnagnnnaaattgatcgccntcggaaattgcaancgcctgcaggaattcggcacgagctgagccaggccttgggtttccccagcacagcctcctgtcgctgcatgcgacgtgttgggatttttggatgaaagactctcccacgctctgttggtggacttagctgcctcactggaagtgatgtgggtggaaggtggttgtatgttaccttttccacctctcattgttttccccagaacattgtagatgggggttggcagagggagaaataagccagccacggcagtcgcttggtttcccaggtggaatgggctaacacaggagatgatgggaacctgtcccgcagtccctgcatgaccattggccctgctggcctggcgatgtgggcatcctggggttcttatggtcccagaacaagccccaggcaagctggaacttgggtggggaggggacatgaggaggataaacagctgactgtggcttcaaggacatcagggccacccc

SEQ ID NO: 23891 - DNA, 456 bp, Homo sapiens
  misc_feature (1)...(456): n = A,T,C or G
aatttgccccgctctgcaggaattcggcacgagagacaccttgagttccttggtttggtccacgtcccatgaacatgcagcagagctagttagcatggatgaggaaaaatttgtggatgccgttaactctgccttttggagtgatgctgaccacacggacttcatcgacacagctggtgccatgctgcagtatgctgtcagccttctgaagcccactaaggtctcggctcgccagctgcccccaagcgtagccagggtggatgccaaaagccgagttctgtttcctcttgggttgggacatgctgctgagtacgtcaggcctcgggtggcgctcattgnggatgcagcccacagagtccatccgcttgcaggacagggtgtcaacatgggctttggggatatctccagcttgggccatcacctcagtacggcagccttcaatgggaaggacttang

SEQ ID NO: 23892 - DNA, 505 bp, Homo sapiens
  misc_feature (1)...(505): n = A,T,C or G
tcggtataaattttttnttaggggnaatttgagcggaaaagggaaaggcggcccctcctgcagcattcggcacgaggagattgaggcggatctggagcgacaggagaaggaggtcgacgaggacacgacagtcacaatcccctcggccgtgtacgtggctcaactttaccaccaagttagtaaaattgagtgggattatgagtgtgagccagggatggtcaaaggcagggtatgtttgagtgccacggtgtgcccagactctgctaggcaccagagagacaagatacgagtgacgtggttctcctcccactgctgacggaggaattaacacaaaagcagacaacactctagaactggagagaggtccagattgcgacaggagccacaccagagtgtgcaggcttcatggaggacagaagcgacttttgtgccgggacttaaaaagataaggaggccgggtgtggtggctcatgcctgcaatcccagcactgtagaaggcagaggc

SEQ ID NO: 23893 - DNA, 488 bp, Homo sapiens
  misc_feature (1)...(488): n = A,T,C or G
tgggaaaaagggacgaaaaagggaaaagtggaatttcgcccgcctgcaggaattcggcacgagcaaggacagaccacagtagctaccactgttgagttttcctgacttggaaaaggaaatgtaatgaacttatggaaagcccatttgtgtacacagtcagctttggggatccttttattagtgctttgccataggctgatgtcaagcaccacaccccaaccccagcgtctcgtgagtgcgacccagacatccgaactaaaaggaagtcatccagtctattcacagaagcgttaacttttctaacagaaagcatgattttgattgcttacctacatacgtgttgctagatattatacatgtgtaaacaattttatataatcgatcatttctattagatgagcacgtttttgtaaaaaaaacaaagaaaaacacttggggggggcccggcgcccaattgggcctattgtgatccgaattacaattaacgn

SEQ ID NO: 23894 - DNA, 498 bp, Homo sapiens
  misc_feature (1)...(498): n = A,T,C or G
tgaggggtnnnnnnnnaattgcccggctgtcggattcgcgccgaggtgtttttcccagtttctgaatacaaaggaattcttcagttggataaagtggacgtcatacctgtgacagctatcaacttatatccagatggtccagagaaaagagctgaaaaccttgaagataaaacatgtatttaaaacgccatctcatatcatggactccgaagtagcctgttgcctccaaatttgccacttgaatataattttctttaaatcgttaagaatcagtttatacactagagaaattgctaaactctaagactgcctgaaaattgacctttacagtgccaagttaaagtttaccttattctcggccgggtgcagtggctcatgcctgtaatcccaggactttgggaggccaatgcgggcggatcacgaggtcagatcaagaccatcctgccaacatggtgaaaccctgtctctactaaaaaaaataaaaaaattagctgggtg

SEQ ID NO: 23895 - DNA, 479 bp, Homo sapiens
  misc_feature (1)...(479): n = A,T,C or G
attgaccngcgnctgaggaattcggtatgagancaacccaagggaggattatctggatgtctatgtgtttggggtcgggcctttggtgaaccaagtgaacatcaatgctttggcttccaagaaagacaatgagcaacatgtgttcaaagtcaaggatatggaaaacctggaagatgttttctaccaaatgatcgatgaaagccagtctctgagtctctgtggcatggtttgggaacacaggaagggtaccgattaccacaagcaaccatggcaggccaagatctcagtcattcgcccttcaaagggacacgagagctgtatgggggctgtggtgtctgagtacnttgtgctgacagcagcacattgtttcactgtggatgacaaggaacactcaatcaaggtcagcgtangaggggagaagcgggacctggagatagaagtagtcctatttcaccccaacttacacattaatgggaaan

SEQ ID NO: 23896 - DNA, 483 bp, Homo sapiens
  misc_feature (1)...(483): n = A,T,C or G
tataaaataaacgaaaagggaaaagttgatnctcgaccgccttcggattcggcacgagaaacagaagtatttgtcaaagaagactaccaaaaggaagcgtggctacattaaaaataagctggtttttaagaaaggcaagaaaatatctaagaagactgtttaaatgcactgttctggttcctaacttgaagcagttgtccttgtgagaaccggtctttgcctttagctcatgtcgtgtttcacagcaaagagggtacagaaccatcactggtccaggttaatgtacaaaattttctggcaatgcctgattaaaaaaataaaattggcttgttgagaacagctgttttcgatttctaatgtgaagcaagacagagcactgctgtaaatgtctagcagcagattttttttttattggtacatattatccttcaaatctgagaatttggactaactgcaccaaagaaccctctaatttggtccctg

SEQ ID NO: 23897 - DNA, 501 bp, Homo sapiens
  misc_feature (1)...(501): n = A,T,C or G
cgcgggggannnnnnnaattganngcctttcgancgcctgtaggaattcggcacgagtgaaatcagagggaggcttcatctgggcctgtaaaaactatgatggtgacgtgcagtcggactctgtggcccaagggtatggctctctcggcatgatgaccagcgtgctggtttgtccagatggcaagacagtagaagcagaggctgcccacgggactgtaacccgtcactaccgcatgtaccagaaaggacaggagacgtccaccaatcccattgcttccatttttgcctggaccagagggttagcccacagagcaaagcttgataacaataaagagcttgccttctttgcaaatgctttggaagaagtctctattgagacaattgaggctggcttcatgaccaaggacttggctgcttgcattaaaggtttacccaatgtgcaacgttctgactacttgaatacatttgagttcatggataaacttggagaaaacttgaaga

SEQ ID NO: 23898 - DNA, 495 bp, Homo sapiens
  misc_feature (1)...(495): n = A,T,C or G
ggggggtnnnnnnnaattgaccgcctgtggaattcggcacgaggttctaactcctagactagtgctttacctttattaatgaactgtgacaggaagcccaaggcagtgttcctcaccaataacttcagagaagtcagttggagaaaatgaagaaaaaggctggctgaaaatcactataaccatcagttactggtttcagttgacaaaatatataatggtttactgctgtcattgtccatgcctacagataatttattttgtatttttgaataaaaaacatttgtacattcctgatactgggtacaagagccatgtaccagtgtactgctttcaacttaaatcactgaggcatttttactactattctgttaaaatcaggattttagtgcttgccaccaccagatgagaagttaagcagcctttctgtggagagtgagaataattgtgtacaaagtagagaagtatccaattatgtgacaacctttgtgtaataan

SEQ ID NO: 23899 - DNA, 498 bp, Homo sapiens
  misc_feature (1)...(498): n = A,T,C or G
ggaggttcccaggttcccccaatgagtgccttcagagnaccgtacgaggnggcacttcncctagttgcagtcaggcttcatacgctattgtcctgcccgttagagcagccagcgggtacagaatggattttggaagagggagtcaccactggacctccaaggaagccacgtgcagacatctacaaccttcgatctcctgacgaaaactggcgatggaatatgagaggagccctctggaaagaaaaggacagaccctgtgctttcatgaaagtgaagatctggctgaaccagttccacaaggttactgtatacatagcctgagtttaaaaggctgtgcccacttcaagaatgtcattgttagactttgaaatttctaactgcctacctgcataaagaaaataaaatcttttaaatcaaaaaaaaaaaaaaaaaaaaaactcggggggggccgggcccccatttccccttatagggagccgaataacaatccacggcccg

SEQ ID NO: 23900 - DNA, 465 bp, Homo sapiens
aggcaatcggcggctgaatagattcggctgtaggaatacagcacgagcagcacccagcttagtgctgggactagcccagaaacttgaatgggaccctgagagagccaggggtcccctgaggcccccctaggggctttctgtctgccccagggagctccatggatctccctgtggcagcaggcatggagagtcagggctgccttcatggcagtaggctctaagtgggtgactggccacaggccgagaaaagggtacagcctctaggtggggttcccaaagacgccttcaggctggactgagctgctctcccacagggtttctgtgcagctggattttctctgttgcatacatgcctggcatctgtctccccttgttcctgagtggccccacatggggctctgagcaggctgtatctggattctggcaataaaagtactctggatgctgtaaaaaaaaaaaaaaaaa

SEQ ID NO: 23901 - DNA, 458 bp, Homo sapiens
  misc_feature (1)...(458): n = A,T,C or G
atttgccncctttgacccngcgctgcaggaattcggcacgagaatttatgaggtccgcagccttgtgatacccacatttacagcggagaagactgaggtccaaaaaggaaaaagtctccatgaggtcagggaccttgtttgtcttaaatatcactacatccctgctgtatggtctggcaaacagtagatgctcaacacatattgttgaatgaattgctaatgtaagttactaattaggtcattatttcctatttgtgagtgattttgcctccaggaacatttggcagtgcctggagacatttttggtggtcacaagtaggggagacgggtgccaccagtatccagtgggtgaggccagagatgctgctgaacgttctataatgcggtaatgcacggaacatcccccacaacacaaaatgatccagcccaaaatgtgagtagcgccgaggcggagaaat

SEQ ID NO: 23902 - DNA, 455 bp, Homo sapiens
  misc_feature (1)...(455): n = A,T,C or G
ntttagccccgctgtaccccgcgctgcaggaattcggcacgaggtagctgggactacaggtgcgtgccaccacgcccagctaaattttgtatttttagtggagacggggtttcaccatgttggccaggatggtctcaatctcctgaccctgcgatctgcccacctcagcctcccaaagtgctgggattacaggcgtaagccaccgggcctggcctgttttatgattcttaatagttacttggtttaaatcacatttgatactatccttctgaaaagtctgagacagatctacaaactacagtcaaaattatagattaagaggaatgaatgcacctatttggctttaagttgaagatgaattatttctcatgctcattttcttgcggcagttatcttaaaaagacccccaaaggctttgtgattgtaagcactgtcatgatcacagaatgcaagcn

SEQ ID NO: 23903 - DNA, 454 bp, Homo sapiens
  misc_feature (1)...(454): n = A,T,C or G
atttgacccgctctgangacttcggcacgagaatttangaggtccgcagccttgtgatacccacatttacagcggagaagactgaggtccaaaaaggaaaaagtctccatgaggtcagggaccttgtttgtcttaaatatcactacatccctgctgtatggtctggcaaacagtagatgctcaacacatattgttgaatgaattgctaatgtaagttactaattaggtcattatttcctatttgtgagtgattttgcctccaggaacatttggcagtgcctggagacatttttggtggtcacaagtaggggagacgggtgccaccagtatccagtgggtgaggccagagatgctgctgaacgttctataatgcggtaatgcacggaacatcccccacaacacaaaatgatccagcccaaaatgtgagtagcgccgaggcggagaaatcctgact

SEQ ID NO: 23904 - DNA, 346 bp, Homo sapiens
  misc_feature (1)...(346): n = A,T,C or G
agcgggtnnttatgaccgcctgcgcaattcggcacgagtgagagcaagatgggtcaccagcagctgtactggagccacccgcgaaaattcggccagggttctcgctcttgtcgtgtctgttcaaaccggcacggtctgatccggaaatatggcctcaatatgtgccgccagtgtttccgtcagtacgcgaaggatatcggtttcattaagttggactaaatgctcttccttcagaggattatccggggcatctactcaatgaaaaaccatgataattctttgtatataaaataaacatttgaaaaaacacaaaaaaaaaaaaaaaacctcgggggggggcccggac

SEQ ID NO: 23905 - DNA, 477 bp, Homo sapiens
cttcgatttgccccgcgctgcaggaattcggcacgagaaagaagataaccatagctgatggagccatgactctctacaatgataactcaattcaaatgtgttgcctaaagctctggaactggtattccaaccagctgaccgaactcactgaccagtacaggcatggttatttcaacattaatagcatgtcaactggactcctatttgtaaatgttatcaatctaagcaatccagctcatcagtctactagtttgcttctttccgagagatgtcaagtcctcaagaatttgatggcttcttctgcagctataaccacaaggaacctacacattgtaactcaagtccactgctggctcatgaaatgtgtaaagtagaaccctccttcccgagaaataagacaggacaataaaaggtggcgtttttgtactttaaaaaaaaaaaaaaaaaaaaaactcgagggggggcccggtccccatt

SEQ ID NO: 23906 - DNA, 452 bp, Homo sapiens
  misc_feature (1)...(452): n = A,T,C or G
ntttgcnccgcgctgcaggaattcggcacgaggcaaaaggggacaagaaaatccctcttcctccatgggatggatttaagctcttgctgtgtgttctacaaatgctgctattgcgggaggaaatgctaggtttttgtgtgtggactgtccagacctcacccaggtcttctggagatgacatttgaggactgatggcccacgagcatggggaactgaagccctggctgcctcatcgctctgtctcccaacaccaactggtgttgcatagggaggtcaacgtgagtttggatctcttgtacgcagatgtaatcattcacatgtaaaaataacccctcctccccaccccataaagggcattagctgtggagcatgattgccaaatgacatggctggttagagcatgactttttctagagcatacttcatatattctcttaagattacatcaagct

SEQ ID NO: 23907 - DNA, 456 bp, Homo sapiens
ctagaccgcctggagaactctgcacgagccacaaccccactggacgtttgcaaaacactgctcaacacccaggagtccttggctttgaactcacacattacaggacatatcacaggcatggctagtgccttcaggacggtatatcaagtaggtggggtgaccgcctatttccgaggggtgcaggccagagtaatttaccagatcccctccacagccatcgcatggtctgtgtatgagttcttcaaatacctaatcactaaaaggcaagaagagtggagggctggcaagtgaagtagcactgaacgaagccaggggttcagatgacactgctgcatcctggtcacattctctgtctcctggaatgctcccacctcaagtggagttagaaggaaggtagaggggctctcccccaggattttggtgttttgactaacaccagttcctgccaacctctgt

SEQ ID NO: 23908 - DNA, 459 bp, Homo sapiens
ctgcgcccccatttcccccgcgctgcaggcaaaattctagctaaatccttttgtgatggtagaagagctcttggtctaataatacagaacttaagaattaggttggtgtagtgctagtggttcagcaaatgcaacctgtctgcaagtctctttcctgtagacttcctgggagtgtagtgtttatgaacaggtgccatgggaccacagttaaacacaggacaaacgatgacttgtctccatcaaatgtgattgttgtatactgtactatatgctagggaggactgaatcatcaactctatgctctaagatatctcttccaggagcttgaaaacaccaactttagagtaactagtttgacaagaaatagcaaagagatggggatggggtaggggccatttggtgattcctttcctcttccctccctccattaacatgcatggaactttttacatgccagaa

SEQ ID NO: 23909 - DNA, 453 bp, Homo sapiens
ttttccccctctgccgtcttgttttcattttggggtgaagattcactttcagtcttttggatataggtttccaattaagtacatggtcaagtattaacagcacaagtggtaggttaacattagaataggaattggtgttggggggggggtttccaacaatattttattttaattttttggatgaaatttttatctattatatattaaacattcttgctgctgccctgcaaacccatatcacatttgaggcgctgttgaggactgaattactctccaagttgagagatgtctttgggttaaattaaaagccctacctaaaactgaggtggggatggggagagcctttgcctccaccattcccacccaccctccccttaaaccctctgcctttgaaagtagatcatgttcactgcaatgctggacactacaagtatctgtccctgggccagcggg

SEQ ID NO: 23910 - DNA, 453 bp, Homo sapiens
  misc_feature (1)...(453): n = A,T,C or G
nttttgcnccgcgctgcaggaattcggcacgaggaaagaattgcaactcagaagatcctgtctgtgttaggagagtgccttgaccactttggccctggctgtgtgggtgtgcaaaaaatattaaatgcccggtgtccgctcgtgaggttctcacaccaggcctccggatttcagtgtgatttgactacgaacaataggattgccttgacaagttccgaactcctttatatatatggtgccctagactcaagagtgagagccttggtgttcagtgtacggtgctgggctcgagcacattcactaacaagtagtattcctggtgcatggattacaaatttctcccttacaatgatggtcatcttttttctccagagaagatcaccccctattcttccaacactagattccttaaaaaccctagcagatgcagaagataaatgtgtaatagaaggc

SEQ ID NO: 23911 - DNA, 460 bp, Homo sapiens
  misc_feature (1)...(460): n = A,T,C or G
nttcgacccccattgaccccgcgctgcaggaattcggcacgagttctcaactcgttcgatatgtcttgtcgttcaagacttgcaacactaaacgagaaattgacagcccttgaacggagaatagagtacattgaagctcgggtgacaaaaggtgagacactcacctagaacagtgccgtgctgctgctgggaagttgctttacacaacacaggccacatgggaaaggccccagcagccttcagctccttcctttctccttaaagagcaacagggcttattcttgtttttcttttttcaaaagtgtggcctttgggctctgccatctggggtgtggtgtggtatgtggggaagagttcanaggaaccgttggaaacgacgttaggcattttaccttttcagtaacattttatacatctacttgtcaatgtatttgagacattcacagccaaaagcctggga

SEQ ID NO: 23912 - DNA, 504 bp, Homo sapiens
  misc_feature (1)...(504): n = A,T,C or G
ngtgcgatnnnnnnnattatgatcgctctgaggaactcggcacgagcttgcttgccgctgcagcagcagcagtttcagatgatcaagacctcctacactcgtctcggtttttcccgtatacctcctcacagatgtttcttgatcagttaagtgcaggaggcagtacttctctgccaaccaccaatggaagcagtagtggcagtaacagcagcctggtttcttccaacagcctaagggaaagccatagccacaccgtcacaaacaggagcagcacggacacggcatccatctttggcatcataccagacattatttcattggactgattcccaggccctgctgctcccatccccaccccagatcgaatgaacttggcagaaagaagagaactttgtgctctgttttaccttactctgtttagagaagtatacaagcgtgttttttttcctttttttagggaaaaaattaaaagagatgtacagagaacaaaaaaaaaaaaaaaaa

SEQ ID NO: 23913 - DNA, 454 bp, Homo sapiens
  misc_feature (1)...(454): n = A,T,C or G
attgacnngcgctggacaccgctgcacgaattcggcacgagcaggagtctatattctgatcggagccggcgccctcatgatgctggtgggctccctgggctgctgcggggctgtgcaagagtcccagcgcatgctgggactgatcttctgcttcctcttggtgatattcgccattgaaatagctgccgccatctggggatattcccacaaggatgaggtgactaaggaagtccaggagttttacatggacacctacaacaagctgagaaccaaggatgagccccagcgggaaacgctgaaagccatccactatgcgttgaactgctgtggataggctggtggcgtggaacagtttatctcagacatctgccccaagaaggacgtactcgaaaccttcaccgtgaagtcctgtcctgatgccatcaaacaggtcttcgactataaattccacatc

SEQ ID NO: 23914 - DNA, 455 bp, Homo sapiens
  misc_feature (1)...(455): n = A,T,C or G
nttttcccccgcgctgcaggaattcggcacgagaggtggcggatgccctggtggacctgaccggcggcctggcagaaagatggaacctgaagggcgtagcaggaagcggaggccagcaggacaggccaggccgctgggagcacaggacttgtcggcagctgctccacctgaaggaccagtgtctgatcagctgctgcgtgctcagccccagagcaggtgaggcacgtggccagcatgggagggctgcagccagcgtgccccccactgccaggcctcaggcacactgtagctttttatgtgactggctacacagccctgtcaggactaagtgggaagaagtaagcttgttctcaagggtggtgtcctcagtttgtgaccttcccctgctgtcctcttccagagggacgtggcccttctctcccctgaccagtcctttccactagtgcgaggcaggg

SEQ ID NO: 23915 - DNA, 484 bp, Homo sapiens
atttgacccgcgctgcaggaatttgccctcgcgctgcaggttcctagtcacgttctccctgtagtgctaagcccagagacctgagctgttaacctagaacagtgtgcttcctaagccttaatgtgcatacccatcgcctggagctcgccttaagatgtaggttctgcctgaagcccaagttcatttagtatgtcatggttaattcagagtaaaatcaagagttagtacttgatttatgcttgttatataaagaaagagacaacttcactgtatgatcattttgtcacttttcaaaagcatttaattcccattcaattgaaaatgtttcaagaacaaacctgtttggtcattttattgatattgcacatttgtatatgaataaatttttgcaaattaaaaaaaaaaaagatgtaggttctgaaacagggtgagggccaggatcctgcctttctaaggagctcccatgttgtgcagttgctgctgg

SEQ ID NO: 23916 - DNA, 506 bp, Homo sapiens
  misc_feature (1)...(506): n = A,T,C or G
agggcggnnnnnaattgacaatcgatcggctgtangcctggagttactgtaaaagacgtgaaccagcaggagttcgtcagagctctggcagccttcctcaaaaagtccgggaagctgaaagtccccgaatgggtggataccgtcaagctggccaagcacaaagagcttgctccctacgatgagaactggttctacacgcgagctgcttccacagcgcggcacctgtacctccggggtggcgctggggttggctccatgaccaagatctatgggggacgtcagagaaacggcgtcatgcccagccacttcagccgaggctccaagagtgtggcccgccgggtcctccaagccctggaggggctgaaaatggtggaaaaggaccaagatggcggccgcaaactgacacctcagggacaaagagatctggacagaatcgccggacaggtggcagctgccaacaagaagcattagaacaaaccatgctgggttaataaattgcctcattn

SEQ ID NO: 23917 - DNA, 478 bp, Homo sapiens
  misc_feature (1)...(478): n = A,T,C or G
ctagcccgcctgcggaattctgcacgagccgtgaagggaggcctcggactcggcgggaagacgtcgcagttcgtcgaagagtccgaagcccagcaaatctgcccgctccccgcggggccgccgctctcgctcgcactcttgctctcggtccggggaccggaatggactcacccatcagctgggtggcctcagccaaggctcccgaaaccagtcctaccgctcacgctcgcggtcgcgttctagagagcggccctctgcgccccggggcatccccttcgcttctgcctcctcgtcagtctattacggcagctactcgcgcccctacgggagcgacaagccttggcctagcctcctcgacaaggagagggaggagagcctgcggcagaagagattaagcgagagagagagaattggagaattgggagctcctgaagtatggggactttctccaaagaatcctgaaccagattctgatgan

SEQ ID NO: 23918 - DNA, 488 bp, Homo sapiens
  misc_feature (1)...(488): n = A,T,C or G
agcggnganntttgattatcatcgcatgcaggaattcggcacgagcatgacgaccgcgttcaccttgcaggcgcgccagaactaccaccgggactcagaggccggcatcaaccgtcagatcaacctggagctctacgcctgctacgtttacctgaccatgtcttactactttggccgcgacgatgtggctttgaagaactttgccaaatactctctttaccaatctcatgaggagagggagcatgctgagaaactgatgaagctgcataaccaacgaggcggccgtatttttcttcaggatatcaagaaaccagactgtgatgactgggagagcgggctgaatgctttggagtgtgcattacatttggaaaaaaatgtgaatcgggcactactggaactgcncagactggccactgacaaaaatgacccccatttgttgacttcattgagacacattacctgaatgatcaagtgaaagccatcacagt

SEQ ID NO: 23919 - DNA, 414 bp, Homo sapiens
attgcacgctgcagcttatggacctcatactctgttgcggatttagagtttctctctgaggcttgtcttagaagttcctctacttcaactggtgccaggccatcggtgccattgtatgctgcactgtgattagaacttactgcatacactgacttttgcccatcatcataaacatcatcttcaggaagcaagtccataacatgacatatctggattttgtgcttagaaccttaaattggaagcattcttaattatgcatctaaatttaaaagaagataatttcaaaacagtgctttctttcccttggtttcatcattttcatatcttaaaccaaattacttcggtatctgacaacagcatcatctacctcagtcattaggatttcttaataaaaaagagattgtaaaaaaaaaa

SEQ ID NO: 23920 - DNA, 389 bp, Homo sapiens
  misc_feature (1)...(389): n = A,T,C or G
nattgcaccgttctgaggtctgtgaggccctgcccagctgaggcaaaaagtatgttggccatagtaccgaaggggaggaaggccaaagccttatatgatttccgaggggagaatgaagatgaactttccttcaaggctggagatataataacagagctggaatctgtagatgatgactggatgagtggagaacttatgggaaaatctggaatatttcccaaaaactacatacagtttctacagatcagctagaggagaagcttgtctgtgttccttggcacaagaactcacttgaactatcaccttgactatcagatatgtttttgcactattttttttaactgaaaaagaaatatctaagctgacatggtacactagaattttctgaa

SEQ ID NO: 23921 - DNA, 520 bp, Homo sapiens
  misc_feature (1)...(520): n = A,T,C or G
gtgggntnnnnnnnnntttcgccggctgcaggttntactatacactacagcatatggagatagaatagaaagaatgcttcgcctcagtttgaacattgaccctgatgcaaaggtggaagaagagcctgaagaagaacctgaagagacagcagaagacacaacagaagacacagagcaagacgaagatgaagaaatggatgtgggaacagatgaagaagaagaaacagcaaaggaatctacagctgaaaaagatgaattgtaaattatactctcaccatttggatcctgtgtggagagggaatgtgaaatttacatcatttctttttgggagagacttgttttggatgccccctaatccccttctcccctgcactgtaaaatgtgggattatgggtcacaggaaaaagtgggttttttagttgaattttttttaacattcctcatgaatgtaaatttgtactatttaactgactattcttgatgtaaatcttgtcatgtgtataaaaataaaaaagatccc

SEQ ID NO: 23922 - DNA, 489 bp, Homo sapiens
cgccccttgcccgcctgcaggattttgcaccagcctgcaagaattcggcacgagggcgatggaaccagcggagcagccgagcgagttagtgtcagccgagggccgaaaccggaaggcggtgctgtgccagcgttgcggctcccgggtgctgcagccagggaccgctctcttctctcgccgacagcttttccttccctccatgagaaagaagccagctctgtctgacggcagcaatcctgacggcgatctcctccaggaacactggctggttgaggacatgttcatttttgagaatgtgggcttcaccaaggacgtgggcaacatcaagtttctggtctgcgcagactgtgaaattggaccaattggctggcattgcctagatgacaagaacagtttctatgtggccttggaacgagtttcccatgagtaactgaggggaggggtactcagctccatctccaaagataaacctactccccacaagaactg

SEQ ID NO: 23923 - DNA, 455 bp, Homo sapiens
  misc_feature (1)...(455): n = A,T,C or G
aggtggcttgcctcgatactctgcagaatgcgncgggacagcgagcagaccctgcagaaccaccagcagcccaacggcggcgagcccttccttataggcgtcagcgggggaacagctagcggcaagtcttccgtgtgtgctaagatcgtgcagctcctggggcagaatgaggtggactatcgccagaagcaggtggtcatcctgagccaggatagcttctaccgtgtccttacctcggagcagaaggccaaagccctgaagggccagttcaactttgaccacccggatgcctttgacaatgaactcattctcaaaacactcaaagaaatcactgaagggaaaacagtccagatccccgtgtatgactttgtctcccattcccggaaggaggagacagttactgtctatcccgcagacgtggtgctctttgaagggatcctggccttctactccca

SEQ ID NO: 23924 - DNA, 490 bp, Homo sapiens
  misc_feature (1)...(490): n = A,T,C or G
gccgccaccattgacaatcgaccgccatgtcgctaatatgataatcacgtattaagacaagaaaaccagaaaagctaatgtaatagttttgtaatcttacaaattaggtaatgtatgtaaaatcgctttgggagttccaaaggatttacaaacgtgagctagtgttaccaggtaaacaaattcaagggatatcatagctatataacaggatctattgaccacacacttaattatagttttatggaaataaaaacttacagtaaaaatagttgcacttgtacagcatttctcattctttttaaaaaagttatacatgtacaagaaaaaattcaaatactgcaatagtacaagctgtgcaaagtattcttgaaacaggtcctcaactcttatcctcagaagcaaccagacttcctagnttttagtatatccatatgttttaatgattttatgtcaatatatctgttcacattttttttttgagatagagtct

SEQ ID NO: 23925 - DNA, 486 bp, Homo sapiens
  misc_feature (1)...(486): n = A,T,C or G
gcgcgccccattcgacgtctgtangacttcggcacgaggggacccgggacacctgaatgcccccggccccggctcctccgacgcgatggggaaggtgctatccaaaatcttcgggaacaaggaaatgcggatcctcatgttgggcctggacgcggccggcaagacaacaatcctgtacaagttgaagctgggccagtcggtgaccaccattcccactgtgggtttcaacgtggagacggtgacttacaaaaatgtcaagttcaacgtatgggatgtgggcggccaggacaagatccggccgctctggcggcattactacactgggacccaaggtctcatcttcgtagtggactgcgccgaccgcgaccgcatcgatgaggctcgccaggagctgcaccgcattatcaatgaccgggagatgagggacgccataatcctcatcttcgccaacaagcaggacctggccgatgccatgaaaccccacga

SEQ ID NO: 23926 - DNA, 476 bp, Homo sapiens
attgaccgccttcggaattcctcgcgagactgatgaaaatgcagaagaagggaatgaagaagaggatttggaagaggatattcccaagcgaaagaacaggactagaggacgggctcgcggctctgcagggggcaggaggaggcacgacgccgcctctcaggaagaccacgacaaaccttacgtctgtgacatctgtggcaagcgctacaagaaccgaccggggctcagctaccactatgctcacactcacctggccagcgaggagggggatgaagctcaagaccaggagactcggtccccacccaaccacagaaatgagaaccacaggccccagaaaggaccggatggaacagtcattcccaataactactgtgacttctgcttggggggctccaacatgaacaagaagagtgggcggcctgaagagctggtgtcctgcgcagactgtggacgctctgctcatttgggaggagaag

SEQ ID NO: 23927 - DNA, 459 bp, Homo sapiens
cttggcaccctttgaccccgcgctgcaggaattcggcacgagcggagctgccgcgccagtcgcctagcaggtcctctaccggcttattcctgtgccggatcttcatcggcacaggggccactgagacgtttctgcctccctctttcttcctccgctctttctcttccctctcgtttagtttgcctgggagcttgaaaggagaaagcacggggtcgccccaaaccccttctgcttctgcccatcacaagtgccactaccgccatgggcctcactatctcctccctcttctcccgactatttggcaagaagcagatgcgcattttgatggttggattggatgctgctggcaagacaaccattctgtataaactgaagttaggggagatagtcaccaccattcctaccattggttttaatgtggaaacagtagaatataagaacatttggttcacagtatgg

SEQ ID NO: 23928 - DNA, 485 bp, Homo sapiens
cgccccccattgaccgcctgcattaagtccgcacgaggacagaacaaagatggaagtggcctgggcccctgggggtgggtcctctctgttgtttttaatctgcaccttatagactgatgtctctttggccggagccagatctgcccctcagtgcattcgtgtgctcgcacgcgcagacatcccttctcccccatacacacatatacactcacagcctctctggcctcttcccttggggaggggccacctgtagtatttgccttgatttggtggggtacagaggatgtgaatactgtaaatagcttgtgctcagactcctctgcgtggagagggtgggtgcaggaggcagaccctccccccaaagccccctggggagatcttcctctctctatttaactgtaactgagggggatcccaggtctggggatgggggacaccttgggccacaggatactgggtgcttcaggggtacccatgccccctgg

SEQ ID NO: 23929 - DNA, 530 bp, Homo sapiens
  misc_feature (1)...(530): n = A,T,C or G
agtgggctnnnnnnagggaatcgaccgcccgtnngnnnanattgcaccgcctgtaagaattcggcacgagctctctcctgccaggtggcagaggagatcagtggtcccttgacttcagccaataagatcacactggtgtccagcggcagtgggaccatgggggcagccaaagtgactggggaagtactggacattctaactcgcctgccagagagtgtggaaagactcacaggcgtgagcatctcccaggtgaggtctcaggttggagctgaggagaattgctaggttcctgtgttgtgtgacacagtatgcctagcatttaaccagcatccaggcctgggagtcattgatgtttattaatcactttctgtgtgccagacacagtgctaagcttctacataaatgagttgttttaaatcaaactaccattagggtatataggattttacaaagtccagaaactcaacatccagcatgttcctactcattctgctagtgcagctggagtgaaatccaggtcgactgtctct

SEQ ID NO: 23930 - DNA, 470 bp, Homo sapiens
  misc_feature (1)...(470): n = A,T,C or G
atgacgcctggaannattgacgcctgcgagaacggagctgnccccacaataggcctttgatttatcttggtctcaaaatgtttgctcgctttggaatctgtgaattcttacactgctccgagtcaacgctaagagcatggttacaaattatcgaagccaattatcattcctccaatccctaccacaattctacacattctgctgatgtgcttcatgccactgcctattttctctccaaggagaggataaaggaaactttagatccaattgatgaggtcgctgcactcatcgcagccaccattcatgatgtggatcaccctgggagaaccaactccttcctgtgtaatgctggaagtgagctggccattttgtacaatgacactgctgtgctggagagccaccatgcggccttggccttccagctgaccactggagatgataaatgcaatatatttaaaaacatggagagg

SEQ ID NO: 23931 - DNA, 229 bp, Homo sapiens
aatcgcaccgcctgcaggaactcggcacgagatcaacttcaattccttgtataacccacagtataaaagggcttttataccattctatcctattgcatgtaagccttgggtctgggaggtaacagtgtgggattccaccatctcatctccctgccacccaaacatgcctgctcttctttaagcaatattaaatgtttgtacttcagaaaaaaaaaaaaaaaaaaaaaaa

SEQ ID NO: 23932 - DNA, 475 bp, Homo sapiens
  misc_feature (1)...(475): n = A,T,C or G
nattgatcgccttcggaannggtagaagccctctttaccaactattattttcccttgtttatctacttagatatctgtttaatcttactaagaaaactttcgcctcattacattaaaaaggaattttagagattgattgttttaaaaaaaaatacgcacattgtccaatccagtgattttaatcatacagtttgactgggcaaactttacagctgatagtgaatattttgctttatacaggaattgacactgatttggatttgtgcactctaatttttaacttattgatgctctattgtgcagtagcatttcatttaagataaggctcatatagtattacccaactagttggtaatgtgattatgtggtaccttggctttaggttttcattcgcacggaacaccttttggcatgcttaacttcctggtaacaccttcacctgcattnggtttctttttcttttttctttcttttn

SEQ ID NO: 23933 - DNA, 466 bp, Homo sapiens
  misc_feature (1)...(466): n = A,T,C or G
catggccccgnctgcatggaccccgcgctgcaggaattcggcacgaggacgctctcagctctcggcgcacggcccagcttccttcaaaatgtctactgttcacgaaatcctgtgcaagctcagcttggagggtgatcactctacacccccaagtgcatatgggtctgtcaaagcctatactaactttgatgctgagcgggatgctttgaacattgaaacagccatcaagaccaaaggtgtggatgaggtcaccattgtcaacattttgaccaaccgcagcaatgcacagagacaggatattgccttcgcctaccagagaaggaccaaaaaggaacttgcatcagcactgaagtcagccttatctggccacctggagacggtgattttgggcctattgaagacacctgctcagtatgacgcttctgagctaaaagcttccatgaaggggctgggaaccgacgaggac

SEQ ID NO: 23934 - DNA, 490 bp, Homo sapiens
  misc_feature (1)...(490): n = A,T,C or G
cgtgggttnnaanaatttgatcgccttcggaattccgttgagagacgttaaggcacgactgcgtttttctcgattatctaacaaccatagtacttaaattgaacagttgcaaagatgtcttaattgtgtaacgaattggtgtatgcatgactttagctgatactcttatgtacgagatctgtctctgctgtttaacttcattggattaatcagctggtttcaactctactgcgaaacaaaaatagctccttaaaagtactgttctccttcagtggcatgtagctatctaatcaagacacctcattcaaacaaaacctgccttaggaaaatttaatatattttaaattattttaaaagaaatacaacatcttattctttagctttcttaatcggtgctttatggaggccagtgtaacgttacatgactcgttgagaaagttgaggaatttcctctaccacctttgttgcttgaagaataacatgtcttttc

SEQ ID NO: 23935 - DNA, 465 bp, Homo sapiens
  misc_feature (1)...(465): n = A,T,C or G
ggcncggccnattgacccgccctgaattgtcccccgctgcaggaattcggcacgagaaagaaagaaagaccaagctccaatatgaaaaacagatggaggaaagacagagaaagctgaaggagcgaaaagagaaagaagaacaacggagaatagctgcagaagaaaaaagacaccagaaggatgaagcacaaaaggaaaaatttacagccattctttatcgtactttggaacggaggagacttgctgatgattatcagcaaaaaagatggtcatggggaggctctgcaatggcgaattctgagagcaaaactgccaataaacgatctgcatctactgaaaaacttgaacagggtacttctgctttaatcagacaaatgcctttgtcatctgcaggccttcaaaattccgttgccaaaaggaaaacagacaaggagagaagctcatctttaaatagaagagatagta

SEQ ID NO: 23936 - DNA, 453 bp, Homo sapiens
  misc_feature (1)...(453): n = A,T,C or G
cgcncgcccattgacccgctgattgattccgccgagcggcgttcttggccaatggatacaaagataaagaaaatgttgcctttttctaggaactgtcagaaatcctcatgcctttcaagacttctgtgaatgacttgaattttttattccctgcctagggtctgtgaacgaggcctgtctcttccctggggtttctttccatggcctttatttctcctcttccagtgggagttttgcaggctcttctctgtggaaacttcacgagcgttggctgggcctcggcttcgctggagtgtactccagggtgaaggcagagtgggatttgagacccaggttaggcacgacccaggctgagaagggacgtttccatcattcacagtgccctccccatagcactacctcaccccgacccccaccctcactcctaccccaccccgcgatcgtcaggggtgg

SEQ ID NO: 23937 - DNA, 463 bp, Homo sapiens
  misc_feature (1)...(463): n = A,T,C or G
gggcgtcccattgacccgccctgaattgaccnccgctgcaggaattcggcacgaggtcgcggcgacatggccaaacgtaccaagaaagtcgggatcgtcggtaaatacgggacccgctatggggcctccctccggaaaatggtgaagaaaattgaaatcagccagcacgccaagtacacttgctctttctgtggcaaaaccaagatgaagagacgagctgtggggatctggcactgtggttcctgcatgaagacagtggctggcggtgcctggacgtacaataccacttccgctgtcacggtaaagtccgccatcagaagactgaaggagttgaaagaccagtagacgctcctctactctttgagacatcactggcctataataaatgggttaatttatgtaacaaaaaaaaaaaaaaaaaccttgaaactcacgtgggcataggaaaacaaaacttttgtct

SEQ ID NO: 23938 - DNA, 470 bp, Homo sapiens
  misc_feature (1)...(470): n = A,T,C or G
ngggggccatagccctcctgcagaattcggcacgagcttcaactttggttcctcggggcgtctgagcagcctacgctttccggataaaaatggcggaatgaaagaattatgagtggaactagagaatacgaaagacgtgaaccaacgcccataatgagaaagaaggacatattacgaaaatgacagatacgagtgaaaaaaatacactaatggattaacgtccctgtcgtgtgacattttctgactatggaaatgatattagacaaaaagcaacttcaagtggttttcttatttgagttcaaaatgggtcataacgcaccagagataacttgaaacatgaacagcgcatttggcccaagaactactaacgaacatacagggcagctgtgattcaagaagttttgcgaagcacactaaagccttgaatatgaggaacacagtggccagccattggatgctgcacttcttga

SEQ ID NO: 23939 - DNA, 475 bp, Homo sapiens
atttgatcgcctgtggattcagtcgtgtgtctttaagatgaaaagtctacatggaaggttactccggcaaagtgcttatcacgtttgcttttttgcagtgctactgttgagttcacaagttcaagtccagaaaaaaaaagtggataatccactctgctgactttcaagattattatattattcaattctcaggaatgttgcagagtggttgtccaatccatgagaatttacatccttattaggtggaatatttggataagaaccagacattgctgatctattatagaaactctcctcctgccccttaatttacagaaagaataaagcaggatccatagaaataattaggaaaacgatgaacctgcaggaaagtgaatgatggtttgttgttcttctttcctaaattagtgatcccttcaaaggggctgatctggccaaagtattcaataaaacgtaagatttcttcattattgag

SEQ ID NO: 23940 - DNA, 477 bp, Homo sapiens
  misc_feature (1)...(477): n = A,T,C or G
natgggancgcttgtangactttgcacgagagatggcggacaaaacgccacgcggatctcagaagggcagctcaaagacgagatcatcagatgttcattcatatggatcttcagatgcacatatggatgcatctggaccctcaaatagtgatatgccaagtcggacacgacctaagagcccaagaaaacataattataggaatgaaagtgcccgtgaaagcctttgtgattctcctcatcagaatctctcaagacctcttctggaaaacagacttaaagcattcagtattggaaaaatgagtacagctaagcgaactttaagtcaaaaggaacaggaagaattatagaaaaaggaggatgaaaaggcagctgctgagatttatgaggagtctcttgctgcttttgaaggaagcgatggtaataaagtgaaaacatttgtgcgaggaggtgttggtaatgcagctaaagatgaacatg

SEQ ID NO: 23941 - DNA, 472 bp, Homo sapiens
  misc_feature (1)...(472): n = A,T,C or G
cgcgggccgggagggaattgagattgatgcctntaggcaanggcacgagaggatgaggacctcagggttcactttgaggaatccagcaagctagaagacctgttgcggaaggttcgcgccaaggagaccaggaagcgagcactcagcaggttaaagctgaagctcaacaaagatatagtgatctctgtgggcatttataatctggtccagaaggctctcaagcctcctccaataaagctctatcgggaaacaaatgaaccagtgaaaaccaagacccggacctttaatacaagtacaggcggtttgcttctgcctagcgataccaagaggtctcagatctatgggagtcgtcagattatactggagaaagaggaaacagaagagctaaaacggtttgatgatccaggtttgatgctcatgggtttcaagccgttggtactgctgaagaaacaccattacctgaggccctccg

SEQ ID NO: 23942 - DNA, 470 bp, Homo sapiens
cgcgggcggaatttaaattgagcttagcggcattcggcacgagacaatgtccggccccgcgacctgggacaggaagtgatggagcacggacttagtttgcctttcagttcttgtataaatagttttgagggttgtctctgaattttcactcagttgtctaccaagatgttgaatggacccagagccaaggacgtggtcttttatcagtggcacctgagactttcttccctgtggacgcaaatccattattcagcactctgggcacagctacagatctgatcagctatccattctccaaactatctcatcctctgtcccatttttctgtctctcttgtccacaaggcatatacctgagagttttcaaattcctcagagaaatttagatattctgtggctttggcattcacctaatgtgttaatctacaaaccttttttacagtgtggattttttttcatgatgtgaattcg

SEQ ID NO: 23943 - DNA, 498 bp, Homo sapiens
  misc_feature (1)...(498): n = A,T,C or G
ggaggccagggggnngnnnttttgcacgctcgagaacctgcacgaggagaagccgtcaagcaagagtagaaattggtatgcttagaagcagattctaaaagcagtttctcttcagaacatcttttttcataccacttgataagcatcttgaaacaccatggctgtagctgcagtaaaatgggtgatgtcaaagagaactatcttgaaacatttatttccagtccaaaatggagctttatattgtgtttgtcataaatctacgtattctcctctaccagatgactataattgcaacgtagagcttgctctgacttctgatggcaggacaatagtatgctaccacccttctgtggacattccatatgaacacacaaaacctatccctcggccagatcctgtgcataataatgaagaaacacatgatcaagtgctgaaaaccagattggaagaaaaagttgaacaccttgaggaaggacctatgatagaacaacttagcaa

SEQ ID NO: 23944 - DNA, 464 bp, Homo sapiens
atttgacccgcgctgcaggaattcggcacgagatacactctggcattgacttcaaacagcttaacttcctgacgaagctcaacgagaatcactctggagagctatggaagggccgctggcagggcaatgacattgtcgtgaaggtgctgaaggttcgagactggagtacaaggaagagcagggacttcaatgaagagtgtccccggctcaggattttctcgcatccaaatgtgctcccagtgctaggtgcctgccagtctccacctgctcctcatcctactctcatcacacactggatgccgtatggatccctctacaatgtactacatgaaggcaccaatttcgtcgtggaccagagccaggctgtgaagtttgctttggacatggcaaggggcatggctttcctacacacactagagcccctcatcccacgacatgcactcaatagccgtagtggaatgatt

SEQ ID NO: 23945 - DNA, 475 bp, Homo sapiens
  misc_feature (1)...(475): n = A,T,C or G
agggcnccattgccctcctgcangaattcggcacgagcaggagtggaagagactaggagtcgagcagctgcggctcagcacagtagacatgactgggatccccaccttggacaacctccagaagggagtccaatttgctctcaagtaccagtcgctgggccagtgtgtttacgtgcattgtaaggctgggcgctccaggagtgccactatggtggcagcatacctgattcaggtgcacaaatggagtccagaggaggctgtaagagccatcgccaagatccggtcatacatccacatcaggcctggccagctggatgttcttaaagagttccacaagcagattactgcacgggcaacaaaggatgggacttttgtcatttcaaagacatgatgtatggngattagaaagaactcaagacactcctgcttgatacagaacaaaaagagcttaacaggaccaacagggcttaagccc

SEQ ID NO: 23946 - DNA, 474 bp, Homo sapiens
  misc_feature (1)...(474): n = A,T,C or G
aatcngacngccnttnnggnnnnctcgatccgcgctgcaggaattcggcacgagcagggaccagaggcccacaaagagcccccagctcccagccagggcccaggagggaaacagaatgaagacctccaggtgaaggtacaagacattacaatgcagtggtaccagcagctgcaggatgcttccatgcagtgtgtgttgacctttgagggcctgaccaacagcaaggacagtcaggccaaaaagataaagatggacctccagaaggctgctaccatcccagtgagccaaatctctaccattgcaggctcaaaactgaaggagatctttgacaagatccacagcctgctctctggaaaacctgttcaatctggtgggcgctctgtgtctgtcacacttaacccacaggggctggactttgttcaatacaaactggcagagaaatttgtgaaacaaggcgaggaggaagtggcctct

SEQ ID NO: 23947 - DNA, 455 bp, Homo sapiens
  misc_feature (1)...(455): n = A,T,C or G
cattgaccgcgctgnattgaccnccgctgcaggaattcggcacgagtgagaggcagaggtaggtggatcgcctgaggtcaggagttcaagaccagcctggccttggcagccatggcaaaaccccgtctctactaaaaaaaatagaaaattagccaggcgtggcggcacacacctgtaatcccagccacttgagaggctgagactggagaatcacttgacctgggaggtggaggttgcagtgagccgagattgcgccagtgcacttcagcctgagtgacagagtaagactctgtcccccaaaaaaaaaaaaaaaaaggttggcggttttatccccccttataggcaatcatgtgggcccttttttttcccataaaaggagggtctttaaaattcccagggaagttttatttctttttttccccccacttttgtttagcagttttgcaagaaaaaac

SEQ ID NO: 23948 - DNA, 471 bp, Homo sapiens
  misc_feature (1)...(471): n = A,T,C or G
ntttgcttcgcactgcgngaattcggcacgagctgtgaatagcatcctgggtatcatatctgtacctctttccattggatactgtgctagcaagcatgctctccggggtttttttaatggccttcgaacagaacttgccacatacccaggtataatagtttctaacatttgcccaggacctgtgcaatcaaatattgtggagaattccctagctggagaagtcacaaagactataggcaataatggagaccagtcccacaagatgacaaccagtcgttgtgtgcggctgatgttaatcagcatggccaatgatttgaaagaagtttggatctcagaacaacctttcttgttagtaacatatttgtggcaatacatgccaacctgggcctggtggataaccaacaagatggggaagaaaaggattgagaactttaagagtggtgtggatgcagactcttcttattttaaaat

SEQ ID NO: 23949 - DNA, 499 bp, Homo sapiens
  misc_feature (1)...(499): n = A,T,C or G
gagaggcnnccntttgaccgccttntttagcaccgcctgcaggaattcggcacgagcttcctcatcctcatcatcgtcttcctcatcccgatctcggtccaggtccctctcccccccacacaagaggtggcgaaggtccagctgtagttcctctggacgttctcgaagatgctcttcctcttcttcgtcatcatcttcctcttcgtcttcctcatcctcatcatccagttctcgaagccgctcacgatccccatccccccgccggagaagtgacaggaggcggcggtacagctcttatcgttcacatgaccattaccaaaggcaaagagtgctacaaaaggagcgtgcaatagaagaaagaagggtggtcttcattggaaagatacctggccgcatgactcgatcagagctgaaacagaggttctccgtttttggagagattgaggagtgcaccatccacttccgtgtccaaggggacaactacggcttcgtcacttat

SEQ ID NO: 23950 - DNA, 471 bp, Homo sapiens
  misc_feature (1)...(471): n = A,T,C or G
agagtnaacatgaattcctgacgaattcggacgagcgccgcttgtgctgcagccatgtctctagtgatccctgaaaagttccagcatattttgcgagtactcaacaccaacatcgatgggcggcggaaaatagcctttgccatcactgccattaagggtgtgggccgaagatatgctcatgtggtgttgaggaaagcagacattgacctcaccaagagggcgggagaactcactgaggatgaggtggaacgtgtgatcaccattatgcagaatccacgccagtacaagatcccagactggttcttgaacagacagaaggatgtaaaggatggaaaatacagccaggtcctatccaatggtctggacaacaagctccgtgaagacctggagcgactgaagaagattcgggcccatagagggctgcgtcacttctggggccttcgtgtccgaggccagcacaccaagaccacn

SEQ ID NO: 23951 - DNA, 404 bp, Homo sapiens
  misc_feature (1)...(404): n = A,T,C or G
agcgggcnnattgaccttgantcgcgctgcaggaattcggcacgagcagagctgagccacagggcatgtctgaggtcagccccgagcaaaatggaatagggactcagggtgggtcaggtaactggaaagcgggcactgtgcacgcagcccttgaggggagccagggtgggtggggatcccccactgtgtgcagaaggcagcagccttggaagcagggtgtgctcctcggtgtggtcgctcgataccagaaaatgactctaaaaactgaagagtgtttgagtttcattcacacaaaacatggacatcatctgtgaggctctgtcccagagagacagggccatccctcatgtctgttattgggttgtagataaacaaaagtataaatcaaaaaaaaaaaaaaaaaa

SEQ ID NO: 23952 - DNA, 463 bp, Homo sapiens
  misc_feature (1)...(463): n = A,T,C or G
ttgccccctgaggatttggccgcgctacggattttcttttcgagattagaagagcacctgtgggtaactccgtactagttgtggggaggattttcccacctttgcttcttgacacttaatctactgagtcctttattgctgagtttatggtgagaacagtgattctcaacaggtgattctcaaaagggaagactgggcagtttcaataatgataatcagtattctaatatttcacattaaggaaaagaaagtctattcattccaccacacacactatagcaggaaaaactaggccaaactcttcttgaccaatatagatatggtagatatggaaaagaactggtgtgggggcaggaatgaagatgggaacacccccacaagaagccagtaacagaatgtccttaggaagaatgagattcttgtccatcaaaaagaagtaggaactaaacaaggtcaagaacan

SEQ ID NO: 23953 - DNA, 517 bp, Homo sapiens
  misc_feature (1)...(517): n = A,T,C or G
agggttgccnnnattgaacncccaactgagagacccgtcggaattcggcacgaagganaaagggttgcagaaaacgaagacaaaacagtcgaatagagcaaagtgtttggccaaaagaaaaattgcacagatgacagaagaagaacagtttgctctggctctcaaaatgagtgagcaggaagctagggaggtgaacagccaggaggaggaagaagaggagctcttgaggaaagccattgctgaaagcctgaatagttgccggccttctgatgcttccgctaccagatctcgacctctggccactggaccgtcttcccagtcccatcaagagaaaaccacagactctgggctcactgaaggcatatggcagctggtacctccatcactgtttaaaggctcacatatcagtcagggaaacgaggctgaggaaagagaggagccttgggaccacactgaaaaaactgaagaggagccggtctctggcagctcaggaagctgggaccagtcaagccagccc

SEQ ID NO: 23954 - DNA, 500 bp, Homo sapiens
  misc_feature (1)...(500): n = A,T,C or G
aggggnnnnncccctttgcctcggctgcacgaattcggcacgaggaggaacaggcctccaggtgtcattcgagtgagtggcccccacagcaccagcttcaccaacacatggtcccggcaccgcaagaacaagtgaaggctcttgctctcagggagctccgaaatgtttcatttattcacaggaactgttgagaaagcagtgaaaaaacaatgccccttttctctgtaaaaaacgactgtaaggaaacatgacacaggcctgtctacaatgtgtgtcctctgtacctcaagcacagccctggtcagctatgtggttttcatggtggcaaaggctcaccaggagtctcagcttgaaggatggtgacaatctcaacacccttcccctccaaacataagaggccttccaaaggctcctatagttttcaaaatagatgcccacaaagttttaggatgcaaggcagagttgaccactttgtggaaatgtctcaaggccagcactgt

SEQ ID NO: 23955 - DNA, 322 bp, Homo sapiens
  misc_feature (1)...(322): n = A,T,C or G
tgtgaggtnnccggccaatagancgccctgnggtttgacccgcgctgcaggaactagcacaggtctcccgctgttccactggctcacccacatgattagcagagtgcacgaaaaaataaaacttctattaaagaatcatgctgagcacaagatcagagaggttgtgacattgcaaactcgatagatgcagggggcctgggagactggcgttctccaaagggctcccaacaccatctctcctctgatttctgtgacaaatgtggaaagctacttgcttggaggtactgggggaactgatgggggaactttcatcctgttagga

SEQ ID NO: 23956 - DNA, 497 bp, Homo sapiens
  misc_feature (1)...(497): n = A,T,C or G
catcgcccgcgctgcaggtagtcggcacgagctgcaccatccggatcccttagtttctcctgtgtcaccttctcctgttcaaatgatgaagcgttctgtcagccaccctggttcttgcagttcagagaggagtagccactctataaaagaaccagtatctacacttcaccgactctcccagcgacgccgaagaacctactcagatacagattcttgtagtgatattcctcttgaagacccagatagacctgttcactgttcaaaaaatacacttaatggagatttggcatcagcaaccattcctgaagaaagcagacttatggccaaaaaacaatctgaatcagaagatactcttccatccttctcttcctgaagaaactgaagtgtccaacttcctctaagtattgctatgcaaaagctgctggaattaaactattgttatagggagtagttntttcccttacgactctgcactntatagaatggtgtanacagac

SEQ ID NO: 23957 - DNA, 370 bp, Homo sapiens
  misc_feature (1)...(370): n = A,T,C or G
ntttgacttcgcactgcgngaattcggcacgagcagcaatgtgtgatcccagctctctgccagactgagagggcaagccgtcttgtttgctgcaaggatgcttttgaggttggacaggaggttctggtcctgcctttggggccaacgctggctctgaagtgtctttttcagaggaattggactggagtgaatgggcacaggggtggagcgcagggcagccccagtcaccacgagctgtttcatttgtgtaaatacgatgctgaattttatgaggctgagttaagagtgggcactgacgggcccctaatatgtgacatgacgatttggcatagatagggatgtgagagtggagtaccttcctttctcaagt

SEQ ID NO: 23958 - DNA, 468 bp, Homo sapiens
agtgggaatgactgcctgacgatttcgcacgagcccccaagcccttccttaagcctgtgggtctaagaacatccagagcatattagcacatcactccaagcaacaacctccgccagaagaaagcaaatgctgttttacttcaaatgatggatgctgcaatcatatgatatttgctaagctgccaaacatgtttatttagcagatactgtatggaattttctgaacacctctttaacgtatgaggaaggttgtactgctacggatgcaattcaattcttccttttttattactatttcaaacacacacacatatatatatatattaaacttacatgataatcaaaatcaaaaagtcaacgtaaaaactggtttcttggtttggttgggtcttatttgagttagattgtttctcagtttctcgtatggattctttggggtactttggtagcctgagtggtctttatcatt

SEQ ID NO: 23959 - DNA, 463 bp, Homo sapiens
  misc_feature (1)...(463): n = A,T,C or G
attggacccgcgctgcaggaattcggcacgagcgcctctggcactgtgtcgtccgcccgccacgcagactggcgcgtccaggtggccgtgaagcacctgcacatccacactccgctgctcgacagaaaactgaatatcctgatgttgcttggccattgagatttcgcatcctgcatgaaattgcccttggtgtaaattacctgcacaatatgactcctcctttacttcatcatgacttgaagactcagaatatcttattggacaatgaatttcatgttaagattgcagattttggtttatcaaagtggcgcatgatgtccctctcacagtcacgaagtagcaaatctgcaccagaaggagggacaattatctatatgccacctgaaaactatgaacctggacaaaaatcaaggggcagtatcaagcacgatatatatagctatgcagntatcacatgggaagn

SEQ ID NO: 23960 - DNA, 483 bp, Homo sapiens
  misc_feature (1)...(483): n = A,T,C or G
tgggggntttaaactgatggcgtagtgaagncctcgagaatnntgacttgcagtaggatttggtttgattttcctacgatctgggtggatgccttgcctgtgacagttgcagttcctattcgccaaatgaagggcagtgccccgcacgtaagttggaatgatggacctgtgttcagagacttaacagaaccaacaagcaaaacaagtgagaacaggaaaaaggaagaggacactggaatcaattcttgagagttgcactacttggtttttcttccattccaagtttcgtgggacccagagccttttttcttttaaaagctaaaaaacaagtgtttaattcctctttttgttatctgttagataattgagatcacctagaaatgcgtttaatctgttcactcactgtaaattttgaggacccagaattgtcttgtttaatttatactttcacccctgttgcagttaacaccagagaaggaacgn

SEQ ID NO: 23961 - DNA, 356 bp, Homo sapiens
gaaaaaaaaaatttgatcgccttgcccgccctgcaggaattcggcacgaggtaaaaggcagcctggcctttgctactgaggagaaagatggagcctgggtctcaagcccaccttcgctgtacctttgccacatggtactgtatgcttgccagctagaaggagggtcagggatttttttacagtctgagaatgagtgtgtgtgagtgaggcggtatccacattctcaacttcaagtcattgcagtttctttttcccagaaaacaaggggttagatgttgcatttcataaaactaaccgaagttctgtctactgatgcagcacaagagatgtaaaaaaaaaaaaaaaaaaaaacccag

SEQ ID NO: 23962 - DNA, 447 bp, Homo sapiens
atagacagtgtgaggacatgcggacgagcgcccacctacaagtttgataggaactccaacgactatgacaccagtgagaaaaaacgcatgcctgcatggaccgatcgcatcctgtggaggctgaagcggcagccctgtgctggccccgacactcccataccgccggcgtcacacttctccttgtctctgaggggctacagcagccacatgacgtacggcatcagcgaccacaagcctgtctccggcacagttcgacttggagctgaagccattggtgtctgctccgctgatcgtcctgatgcccgaggacctgtggaccgtggaaaatgacatgatggtcagctactcttcaacctcggacttccccagcagcccgtgggactggattggactgtacaaggtggggctgcgggacgttaatgactacgtgtcctatgcctgggtcgg

SEQ ID NO: 23963 - DNA, 492 bp, Homo sapiens
  misc_feature (1)...(492): n = A,T,C or G
cggcggtgccncntttcgaccgcccattgcaacgcctgcaggaattcggcacgaggttggtgctgccctgtggcatggaggggtgggaggggctgagatggctgctggcctggcctccaagagttctggacaggaggcagacactgcccagatgctcggtggagggacagtgatggcctttgactcatgaggcctagagaaaagtatcaaaggtctcaccatgtaagagtgatttccgatttctctcctttcagttgtgtgaaaaaacagctggcctgggttccattagcaaattaaatcatcttcaatcttaaattagagaccagaatgatcttcaggataaaaagaacttctgaatctctgcaataggaaatgtttcgatcatgcaagtgctttcccagccaaatgtctgtgctctctgtgtcactgagggccacaggttcctctaacatctgtcactgtcacttcaccaggcaggccttggagttccat

SEQ ID NO: 23964 - DNA, 340 bp, Homo sapiens
  misc_feature (1)...(340): n = A,T,C or G
aggggnnnccncnattgccttggctgcacgaattcggcacgagatccagcgaaccaaggatgccacaagtgctgtgttggcttctaatgtgtgactatatttaccttgctgggttcatttaacttctgacactaaaatcctggggagcaacatttttcatcaacttagattaattgtggtctctacttacaggaacactgacagcttaattgactttattcgatagatacagttttttgacccaatgttgaaattgtcggaaatttttcctgtgtggtggactagtccaatacgcacctgctctgcattaaagcaaaaccagaaaaaaaaaaaaaaaaaa

SEQ ID NO: 23965 - DNA, 499 bp, Homo sapiens
  misc_feature (1)...(499): n = A,T,C or G
gaggcccnnnaattgacgtctgtagacttcggcacgaggtgaaagctgctctgtaaaagctgacacagccctcccaagtgagcaggactgttcttcccactgcaatctgacagtttactgcatgcctggagagaacacagcagtaaaaaccaggtttgctactggaaaaagaggaaagagaagactttcattgacggacccagccatggcagcgtagcagccctgcgtttcagacggcagcagctcgggactctggacgtgtgtttgccctcaagtttgctaagctgctggtttattactgaagaaagaatgtggcagattgttttctttactctgagctgtgatcttgtcttggccgcagcctataacaactttcggaagagcatggacagcataggaaagaagcaatatcaggtccagcatgggtcctgcagctacactttcctcctgccagagatggacaactggcgtcattcttcagcccctacgtgtccaatgc

SEQ ID NO: 23966 - DNA, 406 bp, Homo sapiens
  misc_feature (1)...(406): n = A,T,C or G
aggcgcacnattgaccttgatccgcgctgcagtgcgctaganaatgacaaaacaattaaactgtggaagagtgactgctaagtccctttgctcctgcccgcgagagactgtcgggaagttgacccggattggcaagaaacagggtgtcttggaggtggtcccccagatctgcgcctgggggtcaggacagggcctgatttgagcctcctctctgaagatgatttggccgagcggaaggtgtggaccaccggaaagttcttaaaagttgctggtgacatttcttgccaattctaacactgtctagggaagagttcctagtctattgtgttcaaacagagtcaacaaaagtttttaattttttattacagaagggtgaagttcaatttaaaaaaaaaaaaaaaaaaaa

SEQ ID NO: 23967 - DNA, 470 bp, Homo sapiens
  misc_feature (1)...(470): n = A,T,C or G
gccgccctttaaattgacgccgtagcagccactgcagttagcctcctgctggtgttctctcttgttgcttggtgaaggtggccctggtcagcttctccactgcccagtgaacgacccctttgtaatgaatgagtggggaggtagtgtgaagcgatgccaatatcccatccctgtcaaactgcctttactttttccttccttccttgctcccacctgtgtggatcctggtcccttcttgtattcagggctgtggtctgttatgacatttactctcaggctcaggtcctgcttgtttggcccgtgggagccccttcttctgccttttgtgtttttttgttatgtacctacagttctttagctgtttctttactttctggngcaaaaagatgttcaagccttattttatacttgcctgcccctttctctttcatttattggagtgagctgcagctctaagaagacctagtctt

SEQ ID NO: 23968 - DNA, 445 bp, Homo sapiens
aattgactgcactgcggaattcggcacgagggcggtggagccatggtcggccagctgagcgagggggccattgcggccatcatgcagaagggggatacaaacataaagcccatcctccaagtcatcaacatccgtcccattactacggggaatagtccgccgcgttatcgactgctcatgagtgatggattgaacactctatcctctttcatgttggcgacacagttgaaccctctcgtggaggaagaacaattgtccagcaactgtgtatgccagattcacagatttattgtgaacactctgaaagacggaaggagagtagttatcttgatggaattagaagttttgaagtcagctgaagcagttggagtgaagattggcaatccagtgccctataatgaaggactcgggcagccgcaagtagctcctccagcgccagcagcca

SEQ ID NO: 23969 - DNA, 476 bp, Homo sapiens
  misc_feature (1)...(476): n = A,T,C or G
nattgaccgattgattcgcctgcacgaattcggcacgaggcaaaatccgctgctgtgaaggagctggtaggcggacgctctgtagatagagaatccctgatctgcctgggcatcatcttgctctttatgacctgcttggctgccactgtgtagggcctgcttaaagtcctttgcactctcagcattgccctcaagttcaaggacaagcttctcattatggcaggcataaaactctttataattcgtcctccactctcccagctcagggctccagctgttgtctcacacttccttgaagttccctctgctgagtcgcccttgtgcctgaccaacttacttactaaaataaaaatcccaatttctttccaaaaaaaaaaaaaaaaaaactggggggggggcccggaccccaattccccttatagggagtcgaattacaattcattggccgcggtttaacaacgtcgggacgtggggaa

SEQ ID NO: 23970 - DNA, 434 bp, Homo sapiens
attgcccgccttgggaatccggcacgaggagtcaaccagcttccttgaaaaaaaagtgaagaagaaatttgattggacatttgaacagacagtggaaactgcaattacatgcctgtctactgttctatcaattgatttcaaaccttcagaaatagaagttggagtagtgacagatgaaaatcctaaattcaggattcttacagaagcagagattgatgctcaccttgttgctctagcagagagagactaaacattgtcgttagtttaccagatccgtgatgccacttacctgtgtgtttggtaacaacaaaccaacatcatggaggtccctggattgaaaaaggagcctctaccactcctcctaccaccgaagtggctaggactctatataaataaaaacaaggcttttggaaaaaaaaaaaaaaaaaaaaaaa

SEQ ID NO: 23971 - DNA, 476 bp, Homo sapiens
agcgggcacatgagcggcatcgcgctgcagcaattcggcacgagaaaattactccacaaaagctcccaagtcttaaaggactggtaaatttacagtctggagcccccaaaccagaagagaatccgagcctcaacatacagtttaagatccagcagcttgctatttcaggcttaaaagtaaaccgtttggacatgtatggggagaaatataagccatttaaaggagtcaaatacgtcacgaaagctggaaagttccaagtgaggacatgagaagaggccaaaattcctcaggaccagtttgttttccaagtgtcattacgatgtatcactattaggtaccaagtgagtgggaatacatattctagttaaagcatttgtgtctagctacacaccgctaacaaagttacttagttatcaatgtaggattcttaaggagctttaagctaaggaaaccttttagtgacttagcttattttg

SEQ ID NO: 23972 - DNA, 493 bp, Homo sapiens
  misc_feature (1)...(493): n = A,T,C or G
cttagaaccgccccgnnngannnttttgccccgcgctgcaggaattcggcacgagcccctgccccctcctggaaggctctgcagagatgactgggctgccgaagcagatgctcgctggccatggagcctcattgcaagttgttcttgaacacctgaggccttcctggtgcccaccaggcactacggcttcctctccagaatgtggctttgcctgagcacagacagagtcagcatggaatgctcttggccaagggtactgggggccctctggcacttttgcagctgatccagaggaacccagagccaacttaccccaacctcaccctatggaacagtcacctgtgcacaggttgtcctcaaaccctctcctcacaggaaaaggcggattgaggctgctgggtcagccttgatcgcacagacagagcttgtgccggatttggccctgtcaaggggactggtgccttgttttcatcactccttcctagatctactg

SEQ ID NO: 23973 - DNA, 499 bp, Homo sapiens
  misc_feature (1)...(499): n = A,T,C or G
ggggncgcncccctttccctcggctgcacgaattcggcacgaggtcaaactgatcccctggccgttggaggagcagttcatccctaaagggtttgaagccaaaagccgaagtagcaaaaatgagacgaaagggcggggcagcccaaaagagaagacgctggactgtggtcagattgtctgggggctggccttcagcccgtggccttccccacccagcaggaagctctgggcacgccaccacccccaagtgcccgatgtctcttgcctggttcttgctacgggactcaacgatgggcagatcaagatctgggaggtgcagacagggctcctgcttttgaatctttccggccaccaagatgtcgtgagagatctgagcttcacacccagtggcagtttgatntttggtctcgcgtcacgggataagactcttcgcatctgggacctgaataaacacggtaaacagaattcagtgttatcgggccaccctgcagtggtttac

SEQ ID NO: 23974 - DNA, 501 bp, Homo sapiens
  misc_feature (1)...(501): n = A,T,C or G
aagccncccnccnatcgactttcgatcggctgtagaattcggcacgagccaccctgagcaacttatcacaggcaaagaagatgctgccaataactatgcccgagggcactacaccattggcaaggagatcattgacctcgtgttggaccgaattcgcaagctggccgaccagtgcacgggtctccagggcttcttggttttccacagctttggtgggggaactggttctgggttcacctcgctgctcatggaacgtctctcagttgattatggcaagaagtccaagctggagttctctatttacccggcgccccaggtttccacagctgtagttgagccctacaactccatcctcacccccacaaaaaaaaaaaaaaaaaaaaactcgggggggggccgggcccccaattccccttatggggaggggtattacaattccttggccgcggttttacaacggggggaggggggggaaagttctcncccctnccngtcccttgg

SEQ ID NO: 23975 - DNA, 323 bp, Homo sapiens
atttgcaccgcgctgcaggaattcggcacgaggttggacagtagattcaagcacattagaagaggtcttatggagaagcataaaatgaaataatttttctgtgttggctgtaactcctcctccatgacagctatacttcagttgtgtcaccaacgaaaacagaggctgtatctcattcatctttgtcttcccaaggcctcctgtgtgcctggcacagaacaggcactagtgtgtgtgtttgctgaatgaaagggtatttgagagtttctgtgctgtacgctgctatatggaaatacatgccagataaaaaaaaaaaaaaaaaa

SEQ ID NO: 23976 - DNA, 466 bp, Homo sapiens
  misc_feature (1)...(466): n = A,T,C or G
tggcgaaacnggganaaantttgacttgcctngcgctgcaggaattcggcacgagtggttctattgctaaatatattgactagctttcttataacaattttactttgaaattcaaagttccaaagctaaatgtctaaaagaagtaactgcagcttgttctgctgattttggaaaatagtattaaccatgtaagatctttggggttggagtgaaggtcttatctgcattaattttgttaatgcacattgtagatgtggagaacatcttgacctgcataaggattgcgtctcattttattgtgtagtgctttttcgaaatatttacatttctttggttcccatgttcatgtattctggagaagtaaaatttcttgattactgggcagaccctaaaactactaagagaaacataacatgtagttagctgtctgctcatggtttgttcaaatctaagctaaccttaatgg

SEQ ID NO: 23977 - DNA, 473 bp, Homo sapiens
cgcccgccccattgcccccgctgatttagccccgctgcaggaattcggcacgagggctctctgaccagcaccatggcggttggcaagaacaagcgccttacgaaaggcggcaaaaagggagccaagaagaaagtggttgatccattttctaagaaagattggtatgatgtgaaagcacctgctatgttcaatataagaaatattggaaagacgctcgtcaccaggacccaaggaaccaaaattgcatctgatggtctcaagggtcgtgtgtttgaagtgagtcttgctgatttgcagaatgatgaagttgcatttagaaaattcaagctgattactgaagatgttcagggtaaaaactgcctgactaacttccatggcatggatcttacccgtgacaaaatgtgttccatggtcaaaaaatggcagacaatgattgaagctcacgttgatgtcaagactaccgatggttactt

SEQ ID NO: 23978 - DNA, 483 bp, Homo sapiens
gcctagcccccaatgaccggcataggaaggcgtccgaggaccacggtcagaaggtattgggagcctcataggcgggacgcaaaccacgtccaaattcaacgtcctcttagattcttggacaccaaaggcccagggaaatgttatctggaggcaggtctggggtgaaggcacgaccctggagccgatctgcaggatggcttgaaaccgtgagcctgtctcacgtggctgggaccccatcccagaaagcactcactaccctccaaaagattctagtatcacaagaaatcccactgtctcaggtttggaaatttccaaacctgagaaaactgagaaatacccacataagtacttcctaccaccaaactgccgggatgccagcaaaaggctccatatcgtccccatcggggtccacagcctgcgcgtcagccgtgagattggaagaagctggggttgataagcagccctgtgggaaccagctataaa

SEQ ID NO: 23979 - DNA, 493 bp, Homo sapiens
  misc_feature (1)...(493): n = A,T,C or G
gagggattgatttcgaccgcctgcangaattcggcacgagctgccctacctggccgctgggccccgtgactttcccttcctgcccaggaaagtgagggtcggctggccccaccttccctgtcctgatgccgacagcttagggaagggcagtgaacttgcatatggggcttagccttctagtcacagcctctatatttgatgctagaaaacacatatttttaaatggaagaaaaataaaaaggcattcccccttcatccccctaccttaaacatataatattttaaaggtcaaaaaagcaatccaacccactgcagaagctctttttgagcacttggtggcatcagagcaggaggagccccagagccacctctggtgtccccccaggctacctgctcaggaaccccttctgttctctgagaagtcaagagaggacattggctcacgcactgtgagattttgtttttatacttggaagtggtgaattattttatt

SEQ ID NO: 23980 - DNA, 501 bp, Homo sapiens
  misc_feature (1)...(501): n = A,T,C or G
aaggttcnnnnnaattgancgtctgtangacttcggcacgagattactaccaactcttcttaaagttaacacgtttaaataaggtatttctggacttcctagccttttagcaagcttagaggaactagccattagctagtgatgtaaaaatattttggggactgatgcccttaaaggttatgcccttgaaagttcttaccttttctctagtgatattaaggaacgagtgggtagtgttctcagggtgaccagctgccctaaagtgcctgggattgagggtttccctggatgcgggactttccctggatacaaaacttttagcagagttttgtatatatgtggatttttctgataagtagcacatcagaggccttaaccactgcccaaaagcgattctccattgagagtacatatcttgaacttaagaaattcatttgctctgatttttaatcttgtaaagtttttgctaanattaaacaagtcccaggcacaccagaagga

SEQ ID NO: 23981 - DNA, 448 bp, Homo sapiens
  misc_feature (1)...(448): n = A,T,C or G
nttgccctggctgccgttttctccacatacagtgcagagagctgtctggagtcacaatctgaacagattctcgggcgctccttctctccttccatcactacagtaagtaaaaggaccatagaggggaaccaggaatctgagaatcagctgtgctcaatagccaacctccctgtccagatgcagctattttggtatctcctatcacatgcactctgaatcagggtttttctataagaaatctttcagaatcagcaaaagtggggatgacccaggcatcttgatttgcaaaatcacaaaactaagttgtcagttatcactgtagatgagcaactcatctttttaaagtatagttactgaactgattctgagaaatctttagagagaaaaaactcaacagtacaaattaactaattgggaaagttagaatgtcctttctgaatttttcatt

SEQ ID NO: 23982 - DNA, 488 bp, Homo sapiens
  misc_feature (1)...(488): n = A,T,C or G
atttgaccgccccganggannttttgcnccggctgcaggaattcggcacgaggggactgggccgcaatggacaagctgaagaaagtgctgagcgggcaggacacggaggaccggagcggcctgtccgaggttgttgaggcatcttcattaagctggagtaccaggataaaaggcttcattgcgtgttttgctataggaattctctgctcactgctgggtactgttctgctgtgggtgcccaggaagggactacacctcttcgcagtgttttatacctttggtaatatcgcatcaattgggagtaccatcttcctcatgggaccagtgaaacagctgaagcgaatgtttgagcctactcgtttgattgcaactatcatggtgctgttgtgttttgcacttaccctgtgttctgccttttggtggcataacaagggacttgcacttatcttctgcattttgcagtctttggcattgacgtggtacagccn

SEQ ID NO: 23983 - DNA, 475 bp, Homo sapiens
catcgaccgcctaatggaccgcactgcagaatcgccacgagcaggcagctcctggggcagtggatggataaatagaagaactgctatgagctggacctgatagctgtgcagaaagtgagagcaggggcaccttttctacgtaagacacaaaactcaagctgtaacagaaaggtcaatggacttgacccaactgagaaggaaaaacttctgtatggaggaaaagacagtaaacatgacagactgatagaaagtattggcagaccaggcgtggtggcgggcacttgtaatcccagctactcccaaggctgaggcaggagaattgcttgagcccaggagtttaaggttgtagtgcgctagacggcgcctgtgaatagccactgcactctagtctggggaacatatgagacccctgccatctcaaaaaaaaaaaaaattctcaataaactatgtgcccacgaaaattaaaaattaaaag

SEQ ID NO: 23984 - DNA, 493 bp, Homo sapiens
  misc_feature (1)...(493): n = A,T,C or G
ggaaggttgccngggnnnnnnnaactgaaagcctggactgagcgcactagngacagccncncctgctgggtccttcctctcttggactgagtgggtacggccagccactcatcccattggcagctgacaacgcagacacgctctacggaggcctgctgataaagggctcagccttgccgtgtgctgcttctcatcactgcacacaagtgccatgctttgccaccaccaccaagcacatctgtgatcctgaagggcggccgttagtcgttactgctgagtcctgggtcaccagcagacacactgggcatggacccctcaaagcaggcacacccaaaacacaagtctgtggctagaacctgatgtggtgtttaaaagagaagaaacactgaagatgtcctgaggagaaaagctggacatatactgggcttcacacttatcttatggcttggcagaatctttgtagtgtgtgggatctctgaaggccctatttaag

SEQ ID NO: 23985 - DNA, 468 bp, Homo sapiens
  misc_feature (1)...(468): n = A,T,C or G
ggtgcgtgaannaaaatgatggcgatttgtaanctacgcaagcngccaaaaaccttcacagaagaacaatgatggaaaggttgcatctttttccagatgagtatattccagaagatattcttaagaatttagtagaggagcttcctcaaccacgaaaaatacctaaacgtctagatgagtacacacaagaagaaatagacgccttcccaagattgtggactccacctgaagattatcggctataagagaataagaattgcagaaaataacagtgaagtgattgaaactttcttctgatgagtttctctaacctacaggatggagtaaaacaactgctacagttcagcacctgttttatgtgccgaatcactgtggggaaaggtcaggaaggtgtagtccttcaataggaaattgtaattaaaatataattttatagaaccatttttatgtaatctgatttgaatgtta

SEQ ID NO: 23986 - DNA, 507 bp, Homo sapiens
  misc_feature (1)...(507): n = A,T,C or G
atggaggaataaaaaatgggaaaaaaaagggaaaaaaaanggtttgatccgccctgctggaattccgcacgagtgacctctctgtagggacactgtgttatcaaccattaagaagaaagaaccacaagcctcccaagtatttgggttctatcttagggttgaaatctggtcattattccctctacccttggaatcagagcaatgtgtcttctttcctccaacctcttaccttagatgcatcctggttatctggaagcatgggaaagaaggctacttatctctttgtatgtggctccagtctgtgaggatacataacattttctctacaatgaatctgtgctaatattttgccttctttctttcttttcttttcacccttagagacagggtttcactatgttgcccaggctggtctcaaactcctgggctcaagcaatcctcctgcctcagcttcctgagtagctggaaccacaggtgtgtgctaccgtgcctggcacttttttgcct

SEQ ID NO: 23987 - DNA, 502 bp, Homo sapiens
  misc_feature (1)...(502): n = A,T,C or G
tggnnagannnancnncgncacccnncaattgcncgcatagctcgcctgcagcaattcgcacgagaagaaacctcaggacttgagtaacagcaacatgctcaccaagctcctgtatctactggaaaatggaagtccagccttaccaacttgtgaaccttgtctgaagggagccagggcctgccaatggaaccacctccaggagctgcaactgctgttgtcattaataccattgtgtctattttttgagagagataaacttttcatggtgttacattttggaaaaaaaaaaaaaaaactaggggaacagtcgggtgggaaagcaccaaaacagccctttaaattttgatcatgagggacatttttttttgccttggccctggaaaaatgcaccatgttccaaagcaaaagtcttaatggggggaactaaaccagggggacccaaaccaaggtcctggttaattgaggacccgttaaaaccaaatttttgggtgtggacgggct

SEQ ID NO: 23988 - DNA, 505 bp, Homo sapiens
  misc_feature (1)...(505): n = A,T,C or G
agagagaaaancggggnncnnnncncaaattgacccgccntgcaggaaatcggcacgacgtttcaataccatgtaccagcttgacttctctacatgtcctttggattgcccaaaagcaaaatctcagaggggccaaggaccttctagggctggctccctcagggcctcctatagagcagctccttgagtcgggccttatagccaccagaaagtcacctcgccgcaggaaagctataaagagctgctccagaggcgccgaaagagggtgagggctgcagccacagtgtttgtccccagcaccaccaggccccttaacctcgtcagctcctctagccctcggccagactctggcaacaccttggtttgcctggcaccgcaggcaatttcctggaaccccacccccacccaggaacggggaccacagcacctttaaaggaactgccagagcttcctcctacggcttgaaagcccaagctaatcagtaacccgtgagacaggggccaat

SEQ ID NO: 23989 - DNA, 485 bp, Homo sapiens
  misc_feature (1)...(485): n = A,T,C or G
ggggagtnnnnatttgagccccttgactgagcgtcctgcggaatnccgccgagggaaagtgagagctggatggaggcagacaagatgctcacagcgactattaaagaacgaaagcctctgctacggagcgcttctgtcctctgtcaggcccgagcgaagtgcctgacaccgggttggatcctcagatggccccatgaactagtgaagtgggtcaaaggaggcctggaaagatgttgcttcctcaaggccactcggccatcagaggcagaaatgaaacaggaacccaggcctagaatcacaaaggtcctagaaaccacttggctgtctggcctctcaggtgtcagggccatccagagtgagacagcattggagggacaagtgtgcatgcagatgtcctcagacgggaaggtttgagaagggtcagatggtatgcgggcctaacaagggctccgtgctagccactgtcccgcacacagacaggatcn

SEQ ID NO: 23990 - DNA, 490 bp, Homo sapiens
  misc_feature (1)...(490): n = A,T,C or G
cganagttccnggggnnnnnnacctgaaaccctcgctgagcgcctagcgccngccggangagattcagaatatgaaggaggaaatggctcgtcaccttcgtgaataccaagacctgctcaatgttaagatggcccttgacattgagattgccacctacaggaagctgctggaaggcgaggagagcaggatttctctgcctcttccaaacttttcctccctgaacctgagggaaactaatctggattcactccctctggttgatacccactcaaaaaggacacttctgattaagacggttgaaactagagatggacaggttatcaacgaaacttctcagcatcacgatgaccttgaataaaaattgcacacactcagtgcagcaatatattaccagcaagaataaaaaagaaatccatatcttagagaaacagctttcaagtgcctttctgcagtttttcaggagcgcaagatagatttggaataggaata

SEQ ID NO: 23991 - DNA, 499 bp, Homo sapiens
  misc_feature (1)...(499): n = A,T,C or G
attcgccggctgaggaattcggcacgacaacagaatgaggcacgaagtgtgagtgaggactgcaagatggaggaaggcgggaacctacgaggcctgattaagatggtccatctactggtcttgtcaggtgcctggggcatgcaaatgtgggtgaccttcgtctcaagcttcctgcttttccgaagccttccccgacataccttcggactagtgcagagcaaactcttccccttctacttgcacatctccatgggctgtgccttcatcaacctctgcatcttggcttcacagcatgcttgggctcagctcacattctgggaggccagccagctttacctgctgttcctgagccttacgctggccactgtcaacgcccgctggctggaaccccgcaccacagctgccatgtgggccctgcaaaccgtggagaaagagcgaggcctgggtggggaggtaccangcagccaccanggtcccgatacctaccgccagctgcgag

SEQ ID NO: 23992 - DNA, 472 bp, Homo sapiens
  misc_feature (1)...(472): n = A,T,C or G
ngagcgttggggnaaactgatcgcaactgataagcactcagagaanncgcacgagagggagcggatgtgtgatcgccatcttagggaatgttctcgtccgtggcgcacctggcgcgggcgaaccccttcaacacgccacatctgctgctggtgcacgagggtctcggggacctccgcagcagctccccagggcccacgggccagccccgccgccctcgcaacctggcagccgccgccgtggaagagtacagttgtgaatttggctccgcgaagtattatgcactgtgtggctttggtggggtcttaagttgtggtctgacacacactgctgtggttcccctggatttagtgaaatgccgtatgcaggtggacccccaaaagtacaagggcatatttaacggattctcagttacacttaaagaggatggtgttcgtggtttggctaaaggatgggctccgactttccttggct

SEQ ID NO: 23993 - DNA, 478 bp, Homo sapiens
ataaaattagatcggctttgagaatccggcacgagatagaactggatcaagattacaattccttatggcagaaagtatgacaaggcatggctcctgagcatgattcagagcaagtgcagtgtgcccttcacccctattgagtttgactatgagaatacacgggcccagttcttcgttgaagacgccagtactgcctctgcattgaaggctgtcaactataagattttggatcgggagaaccgaaggatatctatcatcatcaactcttctgctccaccccacactatactgaatgaactgaagccagaacaagtagaacagctaaagctgatcatgagcaaacgatacgatggctcccaacaagcccttgacctcaaaggcctccgttcagacccagatttggtggcccagaacattgacgttgtcctgaatcgcagaagctgtatggcagctaccctgaggatcattgaagagaaca

SEQ ID NO: 23994 - DNA, 478 bp, Homo sapiens
  misc_feature (1)...(478): n = A,T,C or G
cgcggggggnnnnnaagnccccnattgaccggcctgangaatttgccncgcctgcaagaatacagcacgagccaagacctgccaggcgtcaagctcaccgttgtgcgtggcaagtacgactgtggccacgtgcagaagaagtgacggctgggggcacagtgggctgggcgcccctgcagaacatgaaccttccgctcctggctgccacagggtcctccgatgctggcctttgcgcctctagaggcagccactcatggattcaagtcctggctccgcctcttccatcaggaccactattaagccataggagtcctgggggtgcaaagggtgcccctctgtcaacacccttggctcctgtgtttagaggggtggcctgaaggaccttttctgctgggacaagacactgtactgccctctgctgggaaggggttttaataaacagaccctggcgcttgtgatgtaaaaaaaaaaaaaaaaa

SEQ ID NO: 23995 - DNA, 446 bp, Homo sapiens
aattgacttcactgcggttttcctggagagccttccagagcctgtcatctgttacagcacctaccataactgcttggagtgttctggcaactacacagcaagcaaacaggtcatttctactctccccatattccacaaaaatgtcttccactacttgatggcgtttttgcgagaactgctgaaaaattcagcaaaaaatcatttggatgagaatattctagctagcatatttggcagcttattgcttcgaaacccagctggtcaccaaaagcttgatatgacagagaagaagaaggctcaagaatttattcaccagttcctctgcaacccactctgagcctctctctcctcctattttacttgaggctgccaattaccagccccacctgtttcagctcaagagatgccttaagataattatgtgaggccacttggtagcaagaatg

SEQ ID NO: 23996 - DNA, 469 bp, Homo sapiens
  misc_feature (1)...(469): n = A,T,C or G
cgagcgtagnnnnaccttgatcgccattgagaaccntgcacgaggggagaagaggaccagccagagtgcccggcgccctacctgcacagagtctaggtggaaatcanaagaggaagtggaaagtgatgacgagtatcttgccctccccgctcggctgacacaggtttctagcctggtttcgtatctaggatccatttctaccttggttaccctgcccactggggatatcaaagggcagagccccttggaagtgtcagacagtgatgggccagcttccttcccttcaagctccagccaaagccagcttccccctggagctgccctccaaggatctggggatcctgagggccagaatccctgtttcctgcgctccttcgtccgtgcccacgactccgcaggggaaggcagtctggggagcagccaggccctcggggtctcctctggactgctgaaaacacgcccctccttg

SEQ ID NO: 23997 - DNA, 462 bp, Homo sapiens
  misc_feature (1)...(462): n = A,T,C or G
tgggagannnntttgaaactgagatcgtcgcanacncnacnangaataaaaggaagggagagggaaagaaaaaaacctaataaaggagaaagtaaagaatcaatttctgacagcaaaagtctggaatccatcaaagaaatcccatatcaacgagaaaacagacagcagcacaaaaagcgaaaagtccaagataaacagaaatcggtatcagtcagcactgtacactagagggttccatgagattattgtagactcatgatgctgctatctcaaccagatgcccaggacaggtgctctatccattacgaccacaaatggacatgtcagttattgctctgtctaaacaacattcccagtagttgctatattcttcatacaagcatagttaacaacaaagagccaaaagatcaaagaagggatactttcagatggttgtcttgtgtgcttctctgcatttttaaa

SEQ ID NO: 23998 - DNA, 494 bp, Homo sapiens
  misc_feature (1)...(494): n = A,T,C or G
ngcggaattgaaattcgatggctttaggaattcggcacgagatccgtggggccatcatcctggccgagctctccatcgtccccgtgcgcagaggctactgggggaacaagatcggcaagccccacactgtcccttgcaaggtgacaggccgctgcggctctgtgctggtacgcctcatccctgcacccaggggcactggcatcgtctccgcacctgtgcctaagaagctgctcatgatggctggtatcgatgactgctacacctcatcccggggctgcactgccaccctgggcaacttcgccaaggccacctttgatgccatttctaagacctacagctacctgacccccgacctctggaaagagactgtattcaccaagtctccctatcaggagttcactgaccacctcgtcaagacccacaccaaagtctccgtgcagcggactcaggctccaactgtggctacaacaaagggtttttatacaagaaagaan

SEQ ID NO: 23999 - DNA, 471 bp, Homo sapiens
  misc_feature (1)...(471): n = A,T,C or G
ctttgcactcgctcgcctgcacgaattcggcacgagagacagcaggggaggaggaagagctgtggtttgtaacttgttcaactcaggcaataagcgattttagctttatttaaagtcttctgtccagctttaagcactttgtaagacatggctgaaagtagcttttctatcagaattgcagatagtcatgttgggctaacagtcaattggatatattcctttacctcacatgaccccagcaactgtggtggtatctagaggtgaaacaggcaagtgaaatggacacctctgctgtgaatgttttagagaaggaaattcaaaaaatgttgtaactgaaagcactgttgaatatgggtatcggctttctttttcactttgactcttaacattatcagtcaacttccacattaatganagttgaccatagttatttccannataaaagaaaccaactcttanaaaaaaaaaaaa

SEQ ID NO: 24000 - DNA, 502 bp, Homo sapiens
  misc_feature (1)...(502): n = A,T,C or G
catacgggcnccnntnnnnnnatagacccgcgctgcaggaattcggcacgaggacgaaccaaagcctttgttctttcttattgtggagcgtccccttccatcaagcagcctgccctcaagccaaggatcatcccctggaacccagtatgcacccagaggggactcagcttcaaagctgctccaccatgctgggtcccaggcagctttcctctgaaaagcaacctctcctgccacccagatcccatctcaagagctcgcccatgttacgagcatgtaaaggactgacttcctagtaactgttgcagtttacaacctgccctccagggacacgtctccatggtttttcctacacatgaatgcgagaaatggctgataagcacagtaatttaagattgcgtattcatgtagtgagatttagtcattaaccaacccggtctttgtgatgtgtgaagccttcccttcagttatgtcccattnttatgatgccaaaagctgccactgg

SEQ ID NO: 24001 - DNA, 501 bp, Homo sapiens
  misc_feature (1)...(501): n = A,T,C or G
aggggcggcgccggngaaaattgganncatcgaccggctgtacgaattcggcacgagcctggacccactcagacctgctgagtcagaatctgcatttaacacgaaccccgggtgattcgcatgcatttccaagtttgagaagtgctgggctacgaggctgggaaagttctagaatatttaggttagcaagcttcttaaaataggtccaagagagaagagaggagcagaaataggctgggagggatgatggcagccaagatagaagcagggtctccccagaatgccaggtccccggggacctccctggccttcctgcttcacagcagtgcaaactgagccctgcaggggacgggaccagcacctgagctctccagccgggagggtggcccagaggccctcagtcgtcctcggccttgatgaggtggccgctgaaggtgatgtangtgncgaagtcgttgctgtagatggcgttctcgcgctggcgctttgagagccgcaccc

SEQ ID NO: 24002 - DNA, 490 bp, Homo sapiens
  misc_feature (1)...(490): n = A,T,C or G
ggctgccggangtttaaaatgacggactgaggacntgnccgagctgaccagaaccatggcggttggcaagaacaagcgccttacgaaaggcggcaaaaagggagcctttatgaaagtggttgatccattttctaagaaagattggtatgaggtgaaagcacctgctatgttcaatataagaaatattggaaagacgctcgacaccaggacccaaggaaccaaaattgcatctgatggtctcaagggtcgtgtgtttgaagagagtcttgctgatttgcacaatgatgaagttgcatttagaaaattcaagctgattactgaagatgttcagggtaaaaactgactgactaacttccatggcatggatcttacccgagacaaaatgtgttgcatggtcaaaaaatggcaaacaatgattggagctcacgatgatgacaagactaccgatggttacttgcttcggaagaatgtgttgttttactaaaaaacg

SEQ ID NO: 24003 - DNA, 494 bp, Homo sapiens
  misc_feature (1)...(494): n = A,T,C or G
gggggtcnnnnnaattgacgatcgatcgtctgcggaattcggcacgagccagcccccaggagctaatccccggctgatggcgcagggcgcggggcttggccgtctagtgtgatgaaggaggcgacccccaaggtgggaaggcgcacgggttggggtttgagggtggatgattggtgacggagggtgtatcttcaggaggaggttcgagtgaagatcaaagacttgaatgaacacattgtttgctgcctatgcgccggctacttcgtggatgccaccaccatcacagagtgtcttcatactttctgcaagagttgtattgtgaagtacctccaaactagcaagtactgccccatgtgcaacattaagatccacgagacacagccactgctcaacctcaaactggaccgggtcatgcaggacatcgtgtataagctggtgcctggcttgcaagacagtgaagagaaacggattcgggaattctaccagtcccgagg

SEQ ID NO: 24004 - DNA, 479 bp, Homo sapiens
catcgaacgccctgccgatttgtacccccgtaatgagctacctggccagaagggaagtcatccacaaagacctggctgccaggaactgtgtcattgatgacacacttcaagttaagatcacagacaatgccctctccagagacttgttccccatggactatcactgtctgggggacaatgaaaacaggccagttcgttggatggctcttgaaagtctggttaataacgagttctctagcgctagtgatgtgtgggcctttggagtgacgctgtgggaactcatgactctgggccagactccctacgtggacattgaccccttcgagatggccgcatacctgaaagatggttaccgaatagcccagccaatcaactgtcctgatgaattatttgctgtgatggcctgttgctgggccttagatccagaggagaggcccaagtttcagcagctggtacagtgcctaacagagtttcatgca

SEQ ID NO: 24005 - DNA, 497 bp, Homo sapiens
  misc_feature (1)...(497): n = A,T,C or G
ncggccggggccgggtgaaaattganttattgacggctcgtcgaattcgcacgagccgctcccctgccttcttccgggctcccagagcaccgctatggagatgctctcccggcatttgaggaagaattgattgtcctcatcctgcaactgtacttgcccaaccgatatttattgatgcctgcagtgtcctgggtgcctaccaaggggcacagaactggatccgacgcagaccctgcctgccttcaggttgcttgaagatgaacagagagatcggacctctgcatgaagccagactgctcatcattccagacatcttcagctgctacacccagaacaagcattcgaaatatgaacaggatggtgagccagatctttccaatcatggtggagtggatgtgaacttcctccagagtatctccaaggagattccagtcccccatgtttatttagtcagccatcttagctctgatccacatcaaataagaggcagataaatt

SEQ ID NO: 24006 - DNA, 489 bp, Homo sapiens
  misc_feature (1)...(489): n = A,T,C or G
ggggggggcggggggnnnnnntttctgancgctactgcggaccctgcaagaattcggcacgaggacaaaggtcagctagccccttgaggacatcagctttggcctcagggtcctaatggcagcagaaccactgacagagctagaggagtccattgagaccgtggtcaccaccttcttcacctttgcaaggcaggagggccggaaggatagcctcagcgtcaacgagttcaaagagctggttacccagcagttgccccatctgctcaaggatgtgggctctcttgatgagaagatgaagagcttggatgtgaatcaggactcggagctcaagttcaatgagtactggagattgattggggagctggccaaggaaatcaggaagaagaaagacctgaagatcaggaagaagtaaagccgcctggctgagatggggtgggcagggcagagctgatcanggccgagcagaaccgcactcttcccaaataaagc

SEQ ID NO: 24007 - DNA, 491 bp, Homo sapiens
ggggaattgaattccattggctgtaggcctggagcactggcagggactggaagcagaggactggacagcagccctactgaacaggggtcgcagtcgccagcccctggtactaggggacaattgctttgctgacttggtgcacaactggatggagctgcctgagacagggagtgaagggggtgacggaggtgggcaccgtgcccgtgctcggccccctcagttcctgcttggcctctctgagcagcttcggcgccggctggccagggctcggcggacagctatggcaggaaagcggctgtcatgcccacctcgcccagaacctgaactgcctgcggatgtctcacgctttgcagctctcatgagctgtcgtagccgccagcccatcatctgcaatgatgtcagctacctctgaccctgccctccagcctgggacaataaaagccttttttctagacaaaaaaaaaaaaagaaaaaaaaaaacttgggggggg

SEQ ID NO: 24008 - DNA, 507 bp, Homo sapiens
  misc_feature (1)...(507): n = A,T,C or G
agggggnnnnnnaatcgcatggctgcagcttccgagattcggcacgaggaacacataaactgtagctgaacacaagctggctggtgggcttcctatgccagcccagcttgtatgggttctggctacaccagagcaccaagagcccacttgcctgggatggccccacactgtcactcagctgttctttgatcatttttttctagattgatagctcctttctcccatgcattgagctcccatctagcttcagcagggcagaacccttctccagatgtgtgtaacttatgtctgagtatctgggagtagttgaagaacagataattccttccaaacatcaagccttgggattcttggagcaagcagaaagccagtaacttcgctctgttagaggtggaggattgtcctatggatccccccatttcctgatttgtatttttagatggattaaatagtctcctgtgtttaatataaacaaacaaaaaactcgcgggggggggcccggtcccc

SEQ ID NO: 24009 - DNA, 496 bp, Homo sapiens
  misc_feature (1)...(496): n = A,T,C or G
gggaaagaaaaaaattttgaaaaccctttttngacccgcgctgcaggaattcggcacgagggaaaacctgaaaagactggtctcaaacgaaactttacgaacgttgcaggaaaagctagacttctggctgaaggagtacaacgtcctccaggagccggtctcccagccctgcccctcgcagccgtagctgcagccgcagcagatctgccagcccctccaccgctgtcaaggtcaggagaccgtccccaaaccgctccaagctgtccaatgtggcgcgcaaggctgccctcttgtcccggttcagcgattcctattcccaggcccgcctggacgcgcagtgcctgctgcggcgctgcatcgacaaggctgagaccgttcagcggatcatctacatcgccacagtggatgtgatccgagccatgaatgtcaatcccaagatttcattccctcctgtcgttgacttttgccttctcagtgacttcatccaggagatatg

SEQ ID NO: 24010 - DNA, 490 bp, Homo sapiens
gaggaattgattgccttaggcattggcggacttattacttttgggagaatggttcaggttcatgaacttggatgtgaaggcatttcaaaaagctatgtcttcagaggaacaaaagatatgtctgccaaacaactgcaggaaatgctgcggctctctaagggaccagctactcaagcaacacgtggtcctcaggtacagcagacacctccttccaacagattcttacaaccagtacagaaaatagacatgaatctcacagatcttctgggagaactccagcgagacccttggcctgtaccacagggaaagagacctttgcgttcctctggggtggcactttccataactgtaggactgctggagtgtactttttccaacactggtgctcgtatcatgatgttcattggtggtcctgctactcaagggcctggaatggtggttggagatgagctgaagacacctataagatcgtggcatgacattgacaaac

SEQ ID NO: 24011 - DNA, 484 bp, Homo sapiens
  misc_feature (1)...(484): n = A,T,C or G
atttgatngccctgggaannncntttgattcgcctgcaggaattccgcacgagccccctacagccaaggaaactgcccagagccacacaactcttgaggggcgaggagggcttgaacctgagtctgcccagctccagaactgagcttgcagccattagccacagctgtctcctgcatgtctgagcaaagaaaggcctttacacagcatcaccctgtgccatcccatgcaccgtgggactcagctaaaggactgtgcaaagagggggctcctgagttggatttaggcaaaaggggcagaattcgtttgatttttagagaaaatctctggagagtttcttttgattcatagaattccttttagatttctttccagcataccaactagctttagtagtgctgctacaaccagctcttataagtaagagtgaaaaagtattcttttcttctttaaaaaataagtttttcttgcttatagttaattctt

SEQ ID NO: 24012 - DNA, 489 bp, Homo sapiens
  misc_feature (1)...(489): n = A,T,C or G
aggagtccccnnnagaaagnnnnnattgacccgcgctgtctgattgcgctgcaagaattcggcacgagagaccatggagccttggcatgcccagggcaagtggggaggttctctgctccccaggcctgctcggtgactgaccccatcatacccaaagtgcaatctcacggccaggttctatgccctgtccaagcgtaaaccctcttggaaacttcttttggggcaattttcctgtggccttcctggcctctacttccatgtgcgcagccccacagacgttgctgagcaactcgccagcctcctgagctccatgcccatcaggactctagcctctgaccttgctgttgactctgaaatcaggatttggaagttttcgaattaggagtagagagatctgacctcttgccaggaatgcccatggatcatgtgattggcttttctacccatagagggccttgcagcctgataccacctgggagtgagggtcac

SEQ ID NO: 24013 - DNA, 483 bp, Homo sapiens
  misc_feature (1)...(483): n = A,T,C or G
gggggnaaggggggcnnnnnaatgatnccattgaggactntccgacgagcggcactggccaggggcccctgaggaccaagatgacaaggatggtggggacttcagtggcactggaggccttcccgactactcagccgccaaccccattaaagtgacacatcggtgctacatcctagagaacgacacagtccagtgtgacctggacctgtacaagtccctgcaggcctggaaagaccacaagctgcacatcgaccacgagattgaaaccctgcagaacaaaattaagaacctgagggaagtccgaggtcacctgaagaaaaagcggccagaagaatgtgactgtcacaaaatcagctaccacacccagcacaaaggccgcctcaagcacagaggctccagtctgcatcctttcaggaagggcctgcaagagaaggacaaggtgtggctgttgcgggagcagaagcgcaagaagaaactccgcaa

SEQ ID NO: 24014 - DNA, 486 bp, Homo sapiens
  misc_feature (1)...(486): n = A,T,C or G
ggaggnaaggggggcnnnnnttatgatnccactgcgggcgctgcaagaatgcggcacgagctcagctgatgaccctgaaggagaaagcaatacaggtttgggacatgccatcttactggagagaacaccatatcgtctccctggggcgcattgctctggctcttaatgagagtgagctggagcagctggacctcagctccatagacactgtggcttccctaagctggcaaacagaatggaccccgggacaggctgaatccattttgcaagggtacctggatgattcaggatacagtatccaggacctgaagagctttcatttggtaggacttggtgcaaccctgtgtgctataaacatcactgaaatcccacttataaagatctcanaattcanggtggtagtggccagaattgggaccctgctctgcagcacacatgtcttagccgagtttaagaggaaggctgaagttgtgtttggggatccca

SEQ ID NO: 24015 - DNA, 486 bp, Homo sapiens
  misc_feature (1)...(486): n = A,T,C or G
ggggggnnaaggaggncgcnnnnnttctgacccgaacgtccggtcctgaggaattccgcacgagatcagaaagagcatgctattggagcaatccgaaccctgcgcagcaaaagaacgcccttgccccggaagaggcagctgatgcactccttgtttggagactatagggctcagatggaagccgaatggcgtgaggccctgcgggctctcagagctgctgcttattcagcccaggtgcaacctgtagatggagccaccagaaagaagagccaaagggtctgcaggcctcgctctatatggagagccaaagccactctggacatgcctgatgaagagtttaggttcaatttcttttagcgtctccccgaacctgaaacaatccccctcccttggggtggtggaagggttgttttgagtgcagagcctttccaggacttctgttgtcagagaaccactgagttggctgtccctggctggtccaaggat

SEQ ID NO: 24016 - DNA, 495 bp, Homo sapiens
cgccccccccatcgaacgccttcggtagacccgcctgcaggaattccgcacgagccaccatcgaccctcggtggcttgtggagtttgccccagccttcttcaaggtctcagacccaactaagctaagcaaacagaagaagcaacagcgtcttgaacccttgtacaaccgctatgaggaacccaatgcctggagaatatctcgagctttccgacggcgctgaaaggcaagattgttcctttgcctctccagcagcagtagccagggcttggacttatcgatgacaggctggtcctgaggatacagctgtcccgtgactgactgtcttaactgagcattttctcaactcgactctcatttcttccctgctggtaaaatagaaacagggatttaaacctggctttggcaagagcctgcagcctccatcaccccaagtccttgggcccagttgggagctcatatctaacacagagacacattgcatcaacttcaagaag

SEQ ID NO: 24017 - DNA, 460 bp, Homo sapiens
  misc_feature (1)...(460): n = A,T,C or G
attgcccattctccggctgcagaattcggcacgaggtcttccgacaccccacctgaggggggcaccaggtttagtgctgctgctttcactgctgcacccgcgccctcggccggccccccgagcagcctttgtactctgcttgcggagggctgggagaccctccaggacattcccaccctcccccatgctgccaagttgtagctatagctacaaataaaaaaaaaccttgttttccagagnaaaaaaaaaaaaaaaaaaaaaaaaaccttcgggggggggcccggcccccaattccccttaagggggggggaataaaaattcctgggccggggtttaaaaacggggggagggggagacaaaannnnnnnnnnnnttnnntttttttttggttgggctttttttgaaggtntttttatnnnggnnnnnnggggggnttggttggntggtgtggggtttgtgt

SEQ ID NO: 24018 - DNA, 477 bp, Homo sapiens
  misc_feature (1)...(477): n = A,T,C or G
catcgaccgcccattgcaccggcgtgcagngaattcgccacgagctggaagtaggtggcagatgttaacgcccttcctcccttgcattgcgccccctgtgcctacctctagcattgtaacgaccacatagtattgaaatggccagtttacttgtctgccttcctttccaagaccgttggtgcctagaggactagaatcgtgtcctatttaactttgtgttcccaggtcctagctcaggagttggcaaataagaattaaatgtctgctacaccgaaccgacgtataaaaaacaaaaaaacttcggggggggccccggcccccatttccccttaggggggggcgattaaaaatcctctgccgcccttataccccgtccgaaggggaaaaacacccccatcactcaccacatcccgctcggcgttccgatgcatccctacacccacgcgagaatcaccaccgccaaccacccgactcctg

SEQ ID NO: 24019 - DNA, 530 bp, Homo sapiens
  misc_feature (1)...(530): n = A,T,C or G
cgcgcggggnnnaattgatcgccgtaggaannnnnnnnnattgcaccgcctgcaggaattcggcacgagatcacaggctgatttccacaggcttcttcctaggggcctcgtgatctgaggggtggtgcctacttccactgtaagaaagaatcttggtggatttgtgtctcaaatcagataagagaagcctgtttaaagagcagatgccatcttctggcttcctcaaggagccagttaaaaaaccagagcattcctttttattgaaaaataaaattaatttgttatcaggttgtttcagttgtattggatgccctatctatctgctaaagcaaaaagtactaggctactaagtgcattttcatcacagaaaagagttgcatttgtattaacaagaaatttgtatacccacgcttcagctactatctaatcatcacccgaagatttaagatacaccaaatttcagtttgtttgtaacattgttcatctttagtgcactttgttttatataataaagtatgcctgttatatta

SEQ ID NO: 24020 - DNA, 471 bp, Homo sapiens
agagagaaaaggggaaaaaatttgaattgacctgcgctgcaggaattcggcacgaggcgaaacctctttgtctctgcctcggcctgcggcccccagcccagcctccgcgctttccctccgccagtccttgtcaatcaaacctggtgccaaacgcggcagctgaagttttcagggacacatttgcttctccccttgaagaaccagttacaaagcgtgatgtcctctctggggtcccatcagaacaaagaaacaggctgtacaagaagcatgatgccagcatctgcttctggtgacaacctcaagaagtttacaattggccgcgtgcggtggctcatgcctgtaatgccagcacttcgggaggcggagacagatggatcatttgaggtcaggagttcgagaccaggctggccaacatggtgaaaccccatctctactaaaaatacaaaaattagctgggcatggtggcatgtg

SEQ ID NO: 24021 - DNA, 327 bp, Homo sapiens
aggctgtgcataggggagttgaacgatgatacaaggagtgactccaaatttgcatatactggaactgaaatgcgcacagttgctgaaaaggttgatgccgtcagaattgttcacattcattctgtcatcatcttacgacgttctgataagaggaaggaccgagtagaaatttctccagagcagctgtctgcagcttcaacagaggcagagaggttggctgaactgacaggccgccccatgagagttgtgggctggtatcattcccatcctcatataactgtttggccttcacatgttgatgttcgcacacaagccatgtaccagatg

SEQ ID NO: 24022 - DNA, 438 bp, Homo sapiens
  misc_feature (1)...(438): n = A,T,C or G
ggcccggccattcgccccgncngnatttcctcccgctgcaggaattcggcacgaggttgttggcaggcatctgtccctgggagcatccaagcagaaaagactaagactcccttgtagacagatcactggccgccactgaagtgtgtctgcatggcaccacagggctggaagacccttgaaggcaggaattcaaggaaatgtatgatgaattttggcattgccatcaaaagcagaacaggcatggaaaacttgggtgagtgggcgagacaacctcctcaccacagcagagttccatccatgcctggataatgatggagggatntgtgtccactgcagtggggaaccatgaaggacacatcaagggtgggttggcctgtggtgctctttggaggaatgaataaaaatgaatagaaatcctaaaaaaaaaaaaaaaaaaaa

SEQ ID NO: 24023 - DNA, 536 bp, Homo sapiens
  misc_feature (1)...(536): n = A,T,C or G
tgaagagcacnggggnaaaaaaanagaaaattttcatcggccttcnngaancctcgcaccggccttcaagaattcggcacgagcctcggcccacctctggctatggtaaccacactgggggcttcctccaagccccgctcttccagcacttccaccggcagagtcccagagccacttcaccctgggggtgggctgtggcccccagtcagctctgctcaggacctgctctatttcagggaagaagatttatgtattatatgtggctatatttcctagagcacctgtgttttcctctttctaagccagggtcctgtctggatgacttatgcggtgggggagtgtaaaccggaacttatcatctatttgaaggcgattaaactgtgtctaatgcccaanaaaaaaaaaaaaaaaaaaaaaaaaaaaaaaaaaaaaaaaaaaacggggggggggggccgggccccaatcccccctttgggggggggtttaaaaatttgggggggcggttttaaaaaagggggggggggggggaggggnnn

SEQ ID NO: 24024 - DNA, 484 bp, Homo sapiens
  misc_feature (1)...(484): n = A,T,C or G
aggagggaaggggngcnnnnttctgaccgctactgcagaccctggggcgagtggagactgggtttcaccgttggccaggcgggtctcaaactcctcgtctcaggtgatctgcttgcctcggcctcccaaagtgctgggattacaggcgtgagccactgcgcccagcctgagtttcattttttaagtcacatagcagtagtccttatttcagtgctagaccctttgaaatgcgatgaaagctatatggacccttcgctttgttatataacatatgcacacatacccagaattttgcacatatgttcagagattcctagacctgcagacctgcctctgtgtgttccactttaagaacctctgttctttcttcatgagtggatccgcccacccttgtgttattttgggacttaatttgtccctctttgggacatttccttatttattggcctcttcagagagtagatgtngaanataaagagaggaa

SEQ ID NO: 24025 - DNA, 468 bp, Homo sapiens
  misc_feature (1)...(468): n = A,T,C or G
gggagaacaggannaaaatttgatttgacctgcgctgcaggaattcggcacgagcaatcttgaactctaaccacataggccgaatggcagttgctgctcgggaaggggatgcgcatcctcttggggctctgcctgtggggaccctcatcaacaacgtggaaagtgagccaggccggggtgcccaatatatccgagctgcaggtgctggaaacgtgcgtagcaacagtaggccgagtatccaacgttgatcataacaaacgggtcattggcaaggcaggtcgcaaccgctggctgggcaagaggcctaacagtgggcggtggcaccgcaaggggggctgggctggccgaaagattcggccactaccccccatgaagagttacgtgaagctgccttctgcttctgcccaaagctgatatccctgtactctaataaaatgccccccccccccgttttaaaaaaaaaaaaaa

SEQ ID NO: 24026 - DNA, 534 bp, Homo sapiens
gagttcgcggctgagatttcgcaccagcagattgctgcaacctgacccctgctcagtaaagcacttgcaaccgtctgttatgctgtgacacatggcccctccccctgccaggagctttggacctaatccaagcatccctttgcccagaaagaagatgggggaggaggcagtaataaaaagattgaagtattttgctggaataagttcaaattcttctgaactcaaactgaggaatttcacctgtaaacctgagtcgtacagaaagctgcctggtatatccaaaagctttttattcctcctgctcatattgtgattctgcctttggggacttttcttaaaccttcagttatgatttttttttcatacacttattggaactctgcttgatttttgcctcttccagtcttcctgacactttaattaccaacctgttacctactttgactttttgcatttaaaacagacactggcatggatatagttttacttttaaactgtgtacataacttgaaatgtgctatactgcatactttg

SEQ ID NO: 24027 - DNA, 536 bp, Homo sapiens
  misc_feature (1)...(536): n = A,T,C or G
agagatggggnnnnaattcgatcggcttagngaancnncncnacctcgtcaccggctgcangaattcggcacgagatatctatgtgatgccggaatatcggggtactgggcagaagctgaggctggggtgggagcaaagcaccccacagaccccactgttatcccctgtccccagagcccagccggtgtcattttctgatccccttcagctcaaacaatagctattttttgcctctttctctccacaacaggtcaagggattggttccaaaataatcaaaaaggtggctgaggtggccttggataagggctgctcccaattccgcctggccgtcctggactggaaccagagggccatggacttgtacaaggccctaggagcccaagatctgacggaagctgagggctggcacttcttctgctttcaaggagaggcaacgagaaagttggcaggaaagtgacgccatccctaggaggatctctgtcttgagtttctccttccccatcagctgaagcactcttcagagactacgtcca

SEQ ID NO: 24028 - DNA, 519 bp, Homo sapiens
  misc_feature (1)...(519): n = A,T,C or G
gtgagtnnnnttatcccggctgcggattcggcacgagtaaccctgagggcgagagccctgcaggctcggccacgtaccgggagttcgtgcaccgcggctacctggacctcatgggggccagtcagcactcgctgcgggcgctcagctggcgccgcctctacctcagccgggccaagctcaaagcttccagccgcacgtctgccttgctctcgggcttcgccatgagataaggaaacaggcccaagaaggctgaagatcttgcccaaaaccacacagctagtccatgaaactgaacttggactatctacccctcacacgggaatctctctttgatttgagaaaaggaaccagtgcctttcaactggaacagaaaggaatctgatctcaacacctatgcctccacgtaaattatttttttcagccttatttccctcanaattgtagaggcctaatcttcttctatcttgtggtgtgagaccttggataagtctcccttccaccttttcctattacttanaa

SEQ ID NO: 24029 - DNA, 468 bp, Homo sapiens
  misc_feature (1)...(468): n = A,T,C or G
ggtcgaannnggaaaaanatttgactcgcgctgcaggaattcggcacgagagcggccaaaatgaagtttaatccctttgtgacttccgaccgaagcaagaatcgcaaaaggcatttcaatgcaccttcccacattcgaaggaagattatgtcttcccctctttccaaagagctgagacagaagtacaacgtgcgatccatgcccatccgaaaggatgatgaagttcagaccctgcactgatggatccgctggtgccacccagatcaataaactggctcatctgatcttgtggcccccatccaggaaccaactcagagcaagaagacagcttcaactccctatgccttcatctctgatacgacctgtcaacacgccccactccctggccccctacctgccaaattatccttaaaaaaactcccatccctaaattttccgggagaatgatttgagtagttaactctggtn

SEQ ID NO: 24030 - DNA, 468 bp, Homo sapiens
  misc_feature (1)...(468): n = A,T,C or G
cctcgaccnccntttgatccgcgctgcaggctgngatatccccgatggcaccgattgccaccgcaaagcctacagcaccaccagtattgccagcgtcgctggcctgaccgccgctgcctacagagtcagactcaatgctccgggcaccttccttgaaggagtggctaaggttggacaatacacgttcactgcagctgctgtcggggccgtgtttggcctcaccacctgcatcagcgcccatgtccgcgagaagcccgacgaccccctgaactacttcctcggtggctgcgccggaggcctgactctgggagcacgcacgcacaactacgggattggcgccgccgcctgcgtgtactttggcatagcggcctccctggtcaagatgggccggctggagggctgggaggtgtttgcaaaacccaaagagtgagccctgtgcctgccgggacctccagcctgcagaatgcg

SEQ ID NO: 24031 - DNA, 500 bp, Homo sapiens
  misc_feature (1)...(500): n = A,T,C or G
ggggcgggaagggggccnnnnnnnttttgaacgctcgacngccctgcaggaattcggcacgagccggtcctgacctgttacaatgaagactgacttgctatgtgggattacaccagaagcttgcagtggagtaatggtaaggaaatcaagcaaccttaaatatgtcggctgtataggagcatattctattgcagaacaccttcctatgaagatcatggaatcaaatacgggacattgaactaatacttggactttgatatgaatttctttaacaattttctctgcagtgcaagttattaaactaaagctactctattttcaaaatgcgttccaacagaaatccttcataactcctagcatggtatcttaataaagaataaagttcttttaaaaatctgctctaagtagatttttccccttttttaaattaaggatcccaacagtggattttgaagattctcttgaatttgtgcatttaaattttattgcagtggtataga

SEQ ID NO: 24032 - DNA, 458 bp, Homo sapiens
  misc_feature (1)...(458): n = A,T,C or G
nttgtgccccgcgctgtaggaattcggcacgagggggaccatgaggaagctcagaggaaagacccccgcctgctcctgtctcacggagcccacagggtcacggagggcaatggagggtcattcgctctgctggggttgccttttgcactgaagatagagaccacctttttgagtgacttgagcccaaaggcaagcgtatatcaaacgatcttctccacataacctctctgtgccatcataagaatagctgcttccgcccccggatttgctcaggcctgggaatccgctgactgaaggcctcttgttgagtgccagctctaaacaagtccctttatgcagagccacagctgtgcatgctcagccctgccgaggtcccaagccaggctttgttgcttccgttcatggaagcgcacaggatanggccgacgctgtgccggtcgtggggaaatctcactggg

SEQ ID NO: 24033 - DNA, 384 bp, Homo sapiens
  misc_feature (1)...(384): n = A,T,C or G
agaggggnntttcgcccgtcctgcangaattcggcacgagctgcatccgaggtgctggtggacagcgcggaggaggggtccctcgctgcggcggcggagctggccgctcagaagcgcgaacagagactgcgcaaattccgggagctgcacctgatgcggaatgaagctcgtaaattaaatcaccaggaagttgtggaagaagataaaagactaaaattacctgcaaattgggaagccaaaaaagctcgtttggagtgggaactaaaggaagaggaaaagaaaaaggaatgtgcggcaagaggagaagactatgagaaagtgaagttgctggagatcagtgcagaagatgcagaaagatgggagaggaaaaaaaaaaaaaaaaaa

SEQ ID NO: 24034 - DNA, 482 bp, Homo sapiens
  misc_feature (1)...(482): n = A,T,C or G
nggaggggggnntttgcccggctgcatgaattcggcacgagcagggttatatacttgttggccaggctggtctccaactcctggcctcaagtgatctgcctgccttggcctcccaaattgctggattacaggcctgagccactgtgcccagacatggatcagtttttattcctgttactagtgtttgaaagtacatttgctctatgtccttatcacttcttccactagtttttattgttagggtttggttttgttagccattctggtgagtatatagtgaatatacaggttgagtatcccttatcttaaatacttggggaccacagtgttttagatttcaggattttggtttttggtttttttctttttttaaaattttggaatatttgcattatacttactggttgagcatccctcattcaaaattccaaaatctgaaatgctgtcagtaagcattccccttgagtgtcatgcaaatgctt

SEQ ID NO: 24035 - DNA, 488 bp, Homo sapiens
  misc_feature (1)...(488): n = A,T,C or G
ggagtnccnnnnaggagnnnnacctgatnncctccttgatccgcgctgcaggaattcggcacgagggcgaacgaccctactcctgccctgactgtggcaagagctaccgctccttctccaacctctggaagcaccgcaagacccatcagcagcagcatcaggcagctgtgcggcagcagctggcagaggcggaggctgccgttggcctggccgtcatggagactgctgtggaggcgctacccctggtggaagccattgagatctaccctctggccgaggctgagggggtccagatcagtggctgactctgcccgacttcctctttggcacctccattccctgttgctgaaggccctccagcatccccttaagcatctgtacatactgtgtcccttcctcttcccatccccaccaccttgtaagttctaaattggatttattctctcgtgaggggggtgctctggggtccttgacacacataaaggtgc

SEQ ID NO: 24036 - DNA, 472 bp, Homo sapiens
  misc_feature (1)...(472): n = A,T,C or G
cctagccccgcccgtagacccgcgctgcaggaattcggcacgagccctgacccctttgtccctgcactcagccctgtggccccttcctgtcctgtctcaagccaggctaaatatgtgccttcctcagggctgtggggcaggcactaaggggcctttcccttcctttcctttctcaggccttgctcccccaggatgacccactcttaggggggtggnggcatctggacaaatgccaccacagcaagnggggtggcaaagctacctggaatggatttgtgtgctgatttttaaggattattacagataattaaacagaacggtcagccttgcctaaaagaaagaaaaaaaaaaaactaaacagaaaaaaaaaattttgggggggggggcggggccccccccccccccttaggggggggaagaaaaaaaccagggggccggctattaaaccgggggcggggggaaaaaaacgccg

SEQ ID NO: 24037 - DNA, 469 bp, Homo sapiens
cttcgacctttcgccccgcgctgcaggaattcggcacgaggacacttcttacattgtggcaagaaaaaatgaggaagaagcataagcagaaacccctgataaactgatcagatctcatgagacttattcactgtcacgagaatagcacgggaaagactggcccccatgattcaattacctccccctgggtctgtcccacaacacgtgggaattctgggagatacaattcaagttgagatttgtggggggacacaaccaaaccatatcagcatcctttcaagaatattagataattggagctgagtactcaggaacttgactgtagtagaatactgctagtttcttaattttaattcacatcacctgaaaagtaaaacaacaggctttgccaagtggatgcttttcagtaacagtgaagtggagtgaataccaaatgtttgccctggtggttcctatctcttcaggcaaa

SEQ ID NO: 24038 - DNA, 478 bp, Homo sapiens
catcgacccccctaattgaccgccatgcacgaattcgccacgagccatggtcaaccccaccgtgttcttcgacattgccgtccacagcgagcccttgggccgcgtctactttgagctgtttgcagacgaggtcccaaagacagcataaaattttcgtgctctgagcactggagagaaaggatttggttataagggttcctgctttcacagaattattccagggtttatgtgtcagggtggtgacttcacacgccataatggcactggtggcaagtccatctatggggagaaatttgaagatgagaacttcatcctaaagcatacgggtcctggcatcttgtccatggcaaatgctggacccaacacaaatggttcccagtttttcatctgcactgccaagactgagtggttggatggcaagcatgtggtgtttggcaaagtgaaagaaggcatgaatattgtggaggccatggagcgc

SEQ ID NO: 24039 - DNA, 482 bp, Homo sapiens
  misc_feature (1)...(482): n = A,T,C or G
atttgaccgcccttttggaaccgcctgcaggaattcggcacgagatttagtcatttttgttacaattgaaactctgggaattcaaaattaacatccttgcccgtgagcttcttatagacaccagaaaaagtttcaaccttgtgttccacattgttctgctgtgctttgtccaaatgaacctttatgagccggctgccatctagtttgacgcggattctcttgcccacaatttcgcttgggaagaccaagtcctcaaggatggcatcgtgcacagctgtcagagtacggctcctgggacgcttttgcttattttttgtacggctttttcgagttggcttaggcagaattctcctctgagcgataaagacgacatgcttcccactgaactttttctccaattcgcgtactagccggacttggattttctggaaagatttcagttgaggaacgggaacaaagattatgatagctttccgaccacn

SEQ ID NO: 24040 - DNA, 493 bp, Homo sapiens
  misc_feature (1)...(493): n = A,T,C or G
cggcgtggnnnnnnnaatagaancgcctttggaagaacctccacgagagtagccatagctggtgcttctctcaagataaactcggatgtaggaagtttcaccctgaaatgcaaacaaaaacaaaaagagtaaaggggaaaaaaatcagagccagaagaataagcaaaccaacatctaacaataatagttaagtattgagcacttactgtgtactctgtgcctggcatgaggctatctcattaaaccttcataacattatgaggtaggtactcttactatcccatttcaagaatgaagaaaattaagacttaagttatatcatttgcccaaggtaacacaataaatgccaatttgacatgttgatactcaattaactatgataaacaatatatctgaattactgccattgacccccctcaaagctaagaactggaaaggatctcangggtcatatagtttaattcccttgcacctcatgtatgcatctttggat

SEQ ID NO: 24041 - DNA, 471 bp, Homo sapiens
ggccccccattgcccgtctgcaggacttcggcacgagccaagcctgacctcacggctgccctgcgtgacgtacgtcagcaatatgaaagtgtggctgccaagaacctgcaggaggcagaagaatggtacaaatccaagtttgctgacctctctgaggctgccaaccggaacaatgacgccctgcgccaggcaaagcaggagtccactgagtaccggagacaggtgcagtccctcacctgtgaagtggatgcccttaaaggaaccaatgagtccctggaacgccagatgcgtgaaatggaagagaactttgccgttgaagctgctaactaccaagacactattggccgcctgcaggatgagattcagaatatgaaggaggaaatggctcgtcaccttcgtgaataccaagacctgctcaatgttaagatggcccttgacattgagattgccacctacaggaagctgctggaa

SEQ ID NO: 24042 - DNA, 472 bp, Homo sapiens
  misc_feature (1)...(472): n = A,T,C or G
agggttcctgtactgatcgcctgcagaatgcgcggngacagcgagcagaccctgcagaaccaccagcagcccaacggcggcgagcccttccttataggcgtcagcgggggaacagctagcggcaagtcttccgtgtgtgctaagatcgtgcagctcctggggcagaatgaggtggactatcgccagaagcaggtggtcatcctgagccaggatagcttctaccgtgtccttacctcggagcagaaggccaaagccctgaagggccagttcaactttgaccacccggatgcctttgacaatgaactcattctcaaaacactcaaagaaatcactgaagggaaaacagtccagatccccgtgtatgactttgtctcccattcccggaaggaggagacagttactgtctatcccgcagacgtggtgctctttgaagggatcctggccttctactcccaggaggtacgagacctgt

SEQ ID NO: 24043 - DNA, 473 bp, Homo sapiens
cggccccctttgccatagtcccggctgcaggaattccgcacgaggtttcacgctaggacgggctgagctgggaatcgatcccaaattccacagtcccagtcctctcctgggtcctgctctcctgactgcgtctcacgcccagaggtgatggggcacttagggttagggaatggcagacctggagaaaagggttccgctactaccctcggctttgccaaacttaacattttgaaattccattccacaaatgtgtactgcgtctctgggaacaagacagcgtaatgagcatcgtgagaaatctaagacgaatccctaaaccgtcgctgtctttaaagagattacaaccatgctataattacatacagagctgtatctctaataaggacccaaccacggttttatctggctagatcttttgtttgttttgagctctggttatttcccatagccaggcaaatcaaaatattaaaaac

SEQ ID NO: 24044 - DNA, 489 bp, Homo sapiens
  misc_feature (1)...(489): n = A,T,C or G
catccgacgnccntnaattgagcggctgtangaattcggcacgagccgggacccggtgtctgctcctgtcgccttcgcctcctaatccctagccactatgcgtgagtgcatctccatccacgttggccaggctggtgtccagattggcaatgcctgctgggagctctactgcctggaacacggcatccagcccgatggccagatgccaagtgacaagaccattgggggaggagatgactccttcaacaccttcttcagtgagacgggcgctggcaagcacgtgccccgggctgtgtttgtagacttggaacccacagtcattgatgaagttcgcactggcacctaccgccagctcttccaccctgagcagctcatcacaggcaaggaagatgctgccaataactatgcccgagggcactacaccattggcaaggagatcattgaccttgtgttggaccgaattcgcaagctggctgaccagtgcaccgg

SEQ ID NO: 24045 - DNA, 509 bp, Homo sapiens
  misc_feature (1)...(509): n = A,T,C or G
aggtttnccgggnnccncgcccattgctcggctgcagaatgcggcacgatgaagaacggaggtccttatgtgtcttttctttccttagatcttgcccggcctgaagaggccggaagttgcatctctggacaagtaaactctgagacctgggaatggcgggcgggacccgctcctcccttggggtctagaggagacccccggagatggtccctgatgagcaacgtgatggtggaaagctggactggtctcccgaaaggcgaagccgaggcttcttcctctgaacttttgggccagctgaggggcccacggacatagggcacccacaataggcgtgtgtctgctgtgtgtttgtgttcggccgtactgcttatctgtgtccacacgtacacatgcccctgcgttactttggggcatcttctgtactctggcaggattctgctggggagaacatctgggactgtgacaaagctgtccaggagtgcagtggataagaatttcttcgcaaggcc

SEQ ID NO: 24046 - DNA, 441 bp, Homo sapiens
  misc_feature (1)...(441): n = A,T,C or G
acttgatcgcctgcagaatttgaacgacacaaattggngtctggatacttccctgtacatgcataaatatgcatgcatgtacagaaagactgtatgtgtgtgccttgcacacacacccatacctctcagaaaaagtgggtatcttaaaaactcgaaaaacaatgataaatttctcagcttgtccagacctggaacaaaatttctggaataagaaatttgtattaaagtccttttttgcactaacagttggctcttgtagcctgcaggctgaggaagtctcttctctgtgcatcagcagagttactgaaagcctctgattgagaaaaaacctccgtctgcctaaatcacttttctcgcagaagccatgcgactcccacacgacacgggcagcttcacaagccatctctttcatttctgcttgaagcccccttggctgcagca

SEQ ID NO: 24047 - DNA, 472 bp, Homo sapiens
  misc_feature (1)...(472): n = A,T,C or G
ntttgaccgtctgcaggacttcggcacgagaacaagcggatttcggccaggcaggcctggctcaccctttcttccaggatgtgaccaagccagtaccccatcttcgactctgatagccttcttgaagcccccagccctaatctcaccctctcctccagtgtgggcttgaccaggcttggccttgggctatttggactcaggtgggccctctgaacttgccttaaacactcaccttctagtcttggccagccaactctgggaatacaggggtgaaaggggggaaccagtgaaaatgaaaggaagtttcagtattagatgcacttaagttagcctccaccaccctttcccccttctcttagttattgctgaagagggttggtataaaaataattttaaaaaagcattcctacacgttagatttgccgtaccaatctctgaatgccccataattattatttccagtgtttgggan

SEQ ID NO: 24048 - DNA, 468 bp, Homo sapiens
cggccccatcgccgtctgcggacttcggcacgaggtcacttggaaggatcctttaagcttccagaaatgacttaatctctaagatattgcaaattgttcttcactcagtgagttggttttgtttccaagtccgacttctgagtacagcaagtgaggtggcttcgggcagtcagctcctgaccccccctaaaaagaaagggcagggcctgcagtggacagcagccagacagggaggaagactcactgccaagtcagggttctctgccttgattccctcaggatgcacgttgactgagggccccaggggttgccctctccaaggcgtgtccagagctacgtacctttcctgggactcagcagtaactttaaacgcttgtgctcatgtgaagagcacattggcaggcaagtgcctgactaatgttattttcaggatgaccttttacccattcagatctaccatgtgtaaag

SEQ ID NO: 24049 - DNA, 449 bp, Homo sapiens
atagacctttgcatcccgctgcaggaattcggcacgagattacctagagatgatttaaagtatatgggaggatgtgcataggttatatgcaatttctgcaccattttatgtcaaggattttgaacatcctcagattttggtgttcgagggcatcctggaatcaattccccatgataccgagggatgactggatattaatcgatttccctcaagcctgcccttgctgtgaactagtgctacaagcacgggaaatccatctgctctctggcttaaaatatgtatctcatctaaaattgttcgttaaagtgtgaataaattgctaagtggttgttgcttagcaataatttttgcctgaccatcagcagagcttttatttacctttgtaattaaaatccaacatagcatgggctcttgggcaaaatatttcactgactattaagcatgtagaa

SEQ ID NO: 24050 - DNA, 482 bp, Homo sapiens
attgaacgcctgttgaaccgccctgcaggaattcggcacgagcaggtatctatgtgtaaatactctcatcaaggctatttttgagccactaatttgccttcactgaatacagagtttgggaagagatgcatgccatcagaacaaatgcaagccagcaccagcacaccactgcctcttcctgcaactcttgtccatacacaacctcatggctggctggctcacttcctgcaggtctctcctcaaatatcatctgatgagagacacattccctgactatgctttctaaaataggccatatgcccccacattcataccccatctgctgtcattctttattctttttataagtgcattattttcatagcacttatcactacctgttgtatattaatcaatgatcttttcccattagaatgtaagtttcatgaacaggtacttgttttaatactgtatctccagtcctaatgtgtaacaggagccca

SEQ ID NO: 24051 - DNA, 515 bp, Homo sapiens
  misc_feature (1)...(515): n = A,T,C or G
cggatttccnggggnnnnnagncccaattcaccggctgcangaatgcagcacgagcagcgctcgggtgaggagctggtggcgtcggcaggttcgaggcgattcgagctccagctaggatgatcgaggttgtttgcaacgaccgtctggggaagaaggtccgcgttaaatgcaacacggatgataccatcggggaccttaagaagctgattgcagcccaaactggtacccgttggaacaagattgtcctgaagaagtggtacacgatttttaaggaccacgtgtctctgggggactatgaaatccacgatgggatgaacctggagctttattatcaatagatgagaatcctcatcttcctgccccgctttactctcccatcctcatcccccacactgggatagatgcttgtttgtaaaaactcaccttaataaagacttagatgttaaaaaaaaaaaaaaaaaaaaaaattcgggggggggcccggaacccaattccccttatgggggggggtatt

SEQ ID NO: 24052 - DNA, 450 bp, Homo sapiens
  misc_feature (1)...(450): n = A,T,C or G
gggggnnnnnnnnaagggggggnnttctgatnnccccttacgaccacgcctgcaggaattcggcacgagattgtttcacattagtttgaataaagcacaagccaagatggtttaaatatcatttgcagatgtccaagcttctttacaattacaggtcatgggcatcatcaacctagtccttgacttgcagctaaaaaaggcaaaaggtctgtgtgaagtgacagaagagcacaccctactcatgtcatgagcaaggaatcaaagtcgaagaacagtaacagtcttgacatcagcactgtaagaattactctgcagtaaactccaacccagaatggggaagaatactgaattagctgagcacattctggacacaattctgaccaatttcagtctcatgatctctgttggagcaggtttcattctccaattctcttttacagaacagcagaa

SEQ ID NO: 24053 - DNA, 512 bp, Homo sapiens
  misc_feature (1)...(512): n = A,T,C or G
aggttntcnnnnnnnnagnnnaattgacggcttagaattgaccgcctgcaggaattcgcacgagaacaatacctgctcatttacactgaggattcagggcgggagacaggagccttggggtcctgttaaaccacagacagttatgaactgaaagtcataacggggagaggtgcctggcttctacctgggtgctcaggaatgttcctcgtcacccctgccactctgtggtcggagccctgcttcctcctccactcctggccgccttctccagcgccgcacacacagatgctcagtctcagagaggctggcacggcctggcagtctgagaaaagcgtcagttaagcacacctgctggcccctcggtgggacagcggcggccttggagttaagagccaccctgggagggtgtgccggtgccatgctcctccctgtgtcttgtatgaaaggggccactgtgtgtcttcctccccggcgggagccccacatgtgtgcactgtatgacagcggccccc

SEQ ID NO: 24054 - DNA, 367 bp, Homo sapiens
  misc_feature (1)...(367): n = A,T,C or G
attgacatcgatccgcctgcagtggaactgtgtttgggagcctcatcattggttatgccaggaacccttctctgaagcaacagctcttctcctacgccattctgggctttgccctctcggaggccatggggctcttttgtctgatggtagcctttctcatcctctttgccatgtgaaggagccgtctccacctcccatagttctcccgcgtctggttggccccgtgtgttccttttcctatacctccccaggcagcctggggaacgtggttggctcagggtttgacagagaaaagacaaataaatactgtattattnngaaaaaaaaaaaaaaaaaaaaaaaaaaaacctcgggggggggccgggac

SEQ ID NO: 24055 - DNA, 484 bp, Homo sapiens
agcggggttttaatcgacttgctgtggcattcggcacgagagatgatgaagttcggattttgatggcaaacggagctccctttactacagactggctgggaacttctccacttcatctagcagcacagtatggtcattattccaccacagaggtactgctgcgagctggtgtgagcagagatgccagaaccaaagtggaccgaacaccattacatatggcagcttgtgagggccatgccagcatagtagaggttttacttaagcatggtgctgatgtcaatgcaaaggacatgttaaagatgacagctgtccattgggccacagaacacagtcatcaagaggtggtggaacttttgatcaaatatggtgctgatgtacacacgcaaagtaaattttgtaaaactgcatttgatatttcaatagacaatggaaatgaagatttagcagagatattacagattgctatgcagaaccaaatcaacac

SEQ ID NO: 24056 - DNA, 472 bp, Homo sapiens
  misc_feature (1)...(472): n = A,T,C or G
cttcgcattcgctccgctgcaggaattcggcacgaggagcaattaaggacgcttcgctcctaactgttagcattttttcctaaggctctcggaggcggaatcagctggaaaggaacattgctaagtaggaatttcaggcacctgtgaactgagcccactcaataatcggccctttcccttaaccaaactcagcaaaggaagaaagaccaagttgctgcggatgcacagagccacgtgggtgcgggtcctctagaaacaggaattcagagtcagtagatatggaaatgttatggtttgcagtcttcggaccatgctgctttcatgctgttcacatgattctcctcggactgcgaggtaaagtccaagaaacaagtcgaatgtttgtattttcatagaaaaaacatctgtaagggtgcacaccgactgttaaccacggttacgcggggaggggaaacaagggagttacattntt

SEQ ID NO: 24057 - DNA, 502 bp, Homo sapiens
  misc_feature (1)...(502): n = A,T,C or G
tgtaaagnaaaggggaaaaaaatttgancgcctgttgacccgcctgcaggaattcggcacgagctggcatggacacccgtgggggcagggggctggctctgttggcaggaggctgtaaaggaaggctgccaggctgagcaggcagcagggtggggaccacggggcactagacctggcaaggtctggatggtgactgggccaccattgtagaggagaggcctctgtggacatcccctcctcctaccccaagctcactactgcccatcctgggtcactctcatgttgcccccatcctgatattccacacccctccccacatatgtgcgcttgtgtttacatacaagtccatgtccagctgcnnaaaaaaaaaaaaaaaaaaaaaaacctggggggggggccgggacccaattcccccttatgggggggggtttaaaaatccctggcccgtgttttaaaaagggggggagggggggagnnnnnnnntngggctccntnctggctn

SEQ ID NO: 24058 - DNA, 481 bp, Homo sapiens
  misc_feature (1)...(481): n = A,T,C or G
naattgcaccgcgctgcaggaattctgcacgagctttgatgggtcatgggccatgccataccccctgtggcaatggagtgtgtggatgctcacctgtgccatctgtcctcctgtctgtgccaggaggcacctgagttctctgctgttatcctgccccaagggcctgggccgagcctctacctgaagcaactctgctcttcctgtcagtctcaaagcacaaggaggttcagcccaggaggaagccagctgcaatgtggagacacgtcctcctccccaacccacctcatgccaccgccaaccccctgccccaggagcgggcctgagccacgtcccctaggagcagctggagatggccaaaagagtgagctcaggactactggatcccatgcccaggtgtccagcagacctcaaggcagaagggtcacctaacccaggagtccacagactgatgtgacctcaggttcccacatcagtggccacn

SEQ ID NO: 24059 - DNA, 491 bp, Homo sapiens
agggtaaaaaaaactcgcacgcctgctgaattcgccacgagctgcgagacccaaggctcactgcagcgcgctcctgacccctccctgcaggggctacgttagcagcccagcacatagcttgcctaatggctttcactttctcttttgttttaaatgactcataggtccctgacatttagttgattattttctgctacagacctggtacactctgattttagataaagtaagcctaggtgttgtcagcaggcaggctggggaggccagtgttgtgggcttcctgctgggactgagaaggctcacgaagggcatccgcaatgttggtttcactgagagctgcctcctggtctcttcaccactgtagttctctcatttccaaaccatcagctgcttttaaaataagatctctttgtagccatcctgttaaatttgtaaacaatctaattaaatggcatcagcactttaaccaataaaaaaaaaaaaaaaaaact

SEQ ID NO: 24060 - DNA, 459 bp, Homo sapiens
agaaaaattgacccgcctgcagaacctgacaccgcgctgcaggaattcggcacgagcctgcctgcccctccctcaaaaggcccctgaagttagtcacgctgttgggaggtggctcatcctctaaggacagactgcacacctgttgacctaaactcactggacagactccaggtggacaccaactcctcaacagacccatgacttcagctccacctggggcacccagcaccccaccacagggctagaggccctaagaccctgaaaaaggggcgggcagtagggaaggtggaggcacactcctcttctgttggacaggtgagctctgagggcaagccctgggcccagccacgcagagaccctggctgccctggctcttgtttgtttaggcccaagttctgcccagaccggggcccagcagagctctcatgaggctgagaaacctccagggcagacagaaag

SEQ ID NO: 24061 - DNA, 506 bp, Homo sapiens
  misc_feature (1)...(506): n = A,T,C or G
gagccnnnnnaattgaaaacgatcgcctgtagaattcggcacgagccccagcgcgggtccggngtcgaggtaaaatgtcggttccaggaccttaccaggcggccactgggccttcctcagcaccatccgcacctccatcctatgaagagacagtggctgttaacagttattaccccacacctccagctcccatgcctgggccaactacggggcttgtgacggggcctgatgggaagggcatgaatcctccttcgtattatacccagccagcgcccatccccaataacaatccaattaccgtgcagacggtctacgtgcagcaccccatcacctttttggaccgccctatccaaatgtgttgtccttcctgcaacaagatgatcgcgagtcagctgtcctataacgccggtgctctgacctggctgtcctgcgggagcctgtgcctgctagggtgcatagcgggctgctgcttcatccccttctgcgtggatgccctgcaagacgtg

SEQ ID NO: 24062 - DNA, 469 bp, Homo sapiens
  misc_feature (1)...(469): n = A,T,C or G
atttgccgcctggngggtttgtcagcatctcgggctcggaacgagactgcacggattgttttaagaaaatggcagacaaaccagacatgggggaaatcgccagcttcgataaggccaagctgaagaaaacggagacgcaggagaagaacaccctgccgaccaaagagaccattgagcaggagaagcggagtgaaatttcctaagatcctggaggatttcctacccccgtcctcttcgagaccccagtcgtgatgtggaggaagagccacctgcaagatggacacgagccacaagctgcactgtgaacctgggcactccgcgccgatgccaccggcctgtgggtctctgaagggacccccccccaatcggactgccaaattctccggtttgccccgggatattatagaaaattatttgtatgaataatgaaaataaaacacacctcgtggcaaaaaaaaaaaaaaaaaan

SEQ ID NO: 24063 - DNA, 448 bp, Homo sapiens
  misc_feature (1)...(448): n = A,T,C or G
ntttgccttgcctgcacgaattcggcacgaggagttgctgaccagtgcccaccccggcagcccgggaggaacacaggcagctcctttcccttcacgtggtctgcagagagcagggtgagctgccagctgcccctctccaccagggtaccctgtcttggtggttaggggccacttttcctttgaggctctagtggaggtggatgtccttctctgccaggcttggcacatgatgtgaagaataaatgcccaattcttactgttcaggtttgatgtggaatcacagctgcagtgatatatattttttatcagtgcttggttggttttaaataaagtgcacgctattttattatcttgttctgaataaaatgtatttactccaaaaaaaaaaaaaaaaaactcgggggggggccgcggccccaattccccctatagggagtcgaataacaat

SEQ ID NO: 24064 - DNA, 477 bp, Homo sapiens
  misc_feature (1)...(477): n = A,T,C or G
nattgaccgcctgaggacnctgacgagcaggagtttatgggagaagggactgggctcgctgcctcccagcgatgcacttgacctgacactccccatgtcctggtgcgcacagcccttgtcggtgccccggcccctcccgcagcgttactgcctgtgtatagtataaatatatatattttctatatataagatgtataatataaggctccacaaatatatctgtgtgtgtgtgtgcgtgtgtgtgcggtgaagggcggtccccatcctgggcccccactctagacccccccaccacctggttaagtctcgagtgaaatccagtggccccgtggcaccctcctttatgacatccatccatctgtggtgaaccaagtgaaggtggtgacttctggtgacatagtaataaagtgaagactcagaacccanaaaaaaaaaaaaaaaaaaaaaaactgggggggggggcccgggcccaatttc

SEQ ID NO: 24065 - DNA, 495 bp, Homo sapiens
  misc_feature (1)...(495): n = A,T,C or G
gggggaattgatcggctgcangaattcagcaccagatggaagggagtggggaagaaggggacctggagggcagcgacagtgaggcggcccagtgggctgaccaggagcagtggttcggcatgcagtgagggggcggcagctccatggccgcagtggcctgccctgctctgagcacttccgtggactgaaggaaccgtaggagcctgctctcagaaggacaatgattcagcatgtgattgcagcaggggtctctgccccctcgctcccaattcctagtcgtgacttcatttctaaaacagagcctgaccaaccttccatgtatctccatcctcccctgctccagccagggaggactgagggagtgccccgagacccacgcacatgttggggcttctgggccaagagtactttttatataactaatttctaaatccaaaagctcaaggaatagacagtggtctgtgacatggattggtttgaaggagttacccaccc

SEQ ID NO: 24066 - DNA, 476 bp, Homo sapiens
  misc_feature (1)...(476): n = A,T,C or G
natcgcccgcctgcangaattcggcacttggttctctataatagccagtggaaaggaagttggtttaggagcaagaactgtcttgctgaaataaatgatggctgcgcagggagcacattggaaggggtcttggggtggacagaatttccttttgctctaagggtgaaaccagtcaggtctctctctttctgagctctcctcccagagcacctggtcaggatatcccagtcatcacctccgggaagatgatgttccctggatagcccatacattttctcacctccatacctagctaacactgctgcatcagtcccaatgaccccacttcccatcctttactctctgagatctggatttgccttcaagatgcaccccccatgccactttcttaaggtagtcttctcaactccccccaaagaatgaactattatttttggggggcttccaaagcaaattgctttgaaattccaaaagat

SEQ ID NO: 24067 - DNA, 496 bp, Homo sapiens
  misc_feature (1)...(496): n = A,T,C or G
gcggccnnnnnnatttgacgctcgtccggctgcacgaattcggcacgagaacagattgggattttttcagaaagaacttgaacttagtgtgaagaagactagagatctggtagttcgtctcccaaggctgctaactggaagtctggaacccgtgaaagaaaatatgaaggtttatcgtcttgaacttggttttaaacataacgaaattcaacatatgatcaccagaatcccaaagatgttaactgcaaataaaatgaaacttaccgagacgtttgattttgtgcacaatgtgatgagcattccccaccacatcattgtcaagttcccacaggtatttaatacaaggctgtttaaggtcaaagaaagacacttgtttcttacctatttaggaagagcacagtatgatccagcaaaacctaactacatctctttggacaaactagtatctattcctgatgaaatattttgtgaagagattgccaaagcatcagtacag

SEQ ID NO: 24068 - DNA, 474 bp, Homo sapiens
cattcgaccttcgctcgcgctgcaggaatccgcaccaagccgcatgcatgctcccgggaagggcctgtcccactctgctttaccctatcgacgcagcgtccccacttggttgaagttgacatctgacgacgagaaggagcagatttacaaactggccaagaagggccttactccttcacagatcggtgtaatcctgagagattcacatggtgttgcacaagtacgttttgtgacaggcaataaaattttaagaattcttaagtctaagggacttgctcctgatcttcctgaagatctctaccatttaattaagaaagcagttgctgttcgaaagcatcttgagaggagcagaaaggataaggatgctaaattccgtctgagtctaatagagagccggattcaccgtttggctcgatattataagaccaagcgagtcctccctcccaattggaaatatgaatcatctacagcctc

SEQ ID NO: 24069 - DNA, 475 bp, Homo sapiens
  misc_feature (1)...(475): n = A,T,C or G
ggagggnntttnnaactgatctcctgtagctggccgcggctctgggaagtgcgcagtccgggtcgtgtagggataaaaagaactgtaaggtggtcttttcccagcaggaactgaggaagcggctaacacccctgcagtaccatgtcactcaggagaaagggaccgaaagtgcctttgaaggagaatacacacatcacaaagatcctggaatatataaatgtgttgtttgtggaactccattgtttaagtcagaaaccaaatttgactccggttcaggttggccttcattccacgatgtgatcaattctgaggcaatcacattcacagatgacttttcctatgggatgcacagggtggaaacaagctgctctcagtgtggtgctcaccttgggcacatttttgatgatgggcctcgtccaactgggaaaagatactgcataaattcggcttgcttgtcttttacacctgcggatag

SEQ ID NO: 24070 - DNA, 469 bp, Homo sapiens
  misc_feature (1)...(469): n = A,T,C or G
aattgacttgcatgcacgaattcggcatgaggtaatttaaggatattcatgtgggaatacaagtctaacccaagctacagctgccttcaagtcctcaatttacatgacccagttaacactgatttagagaggtctcttctgcatatcgtggtagagttaccaattgataattccagtgggacttcttagtcctctctaatgccccctcctagggaagtggggagttgttcctaatttctcaaaagaaaatttggaattcatttttccctatacaacataatttaatagtgtaagtagtaatgttgactcagtaccctagacacatgaattaaatagatgtttgggagctgtcctggaaattcagtaccatttatattgacttacagatgaacctttagaactcanaatagttgacaagttggggattatggtaccttttgattgggttcttaattaaaagagaatttcg

SEQ ID NO: 24071 - DNA, 497 bp, Homo sapiens
  misc_feature (1)...(497): n = A,T,C or G
aggggnagnnngncaggggnnnnnnaatcgaccgcttcgcaggacttcggcacgagctaaggactaaaatcaagctcggcccccctgatggccaggccatgcaggaaaggccaggggcctctgtcacaggaacccagagcaccaagtgagatgaacggagtgtcggctaggccacgggacagatggccaggaagggccctggcctctaaactggctcgagagcatcttggccccggccacctttcccagggaaacccctggtcaccccagaacctcactgagccttgacctccccctgcagcctgagccttcttactgtgaattataactcanggactgtggctcgtggcggtgctccctcctcagtctgccacccttgccccttgcctccttggtcgggcgccatacctgctcccctccaccccacaccctgtgtccatatcaagccaggtggagccttctcagtttccagaaatggagggactcaagctgccact

SEQ ID NO: 24072 - DNA, 446 bp, Homo sapiens
  misc_feature (1)...(446): n = A,T,C or G
ggcgccnnaatgannccaaattagaatcatgcaggaanncgaacgaaagattacttgggctgtctatctatgggggctacccggaacccaatgcgaattgtggagactctacacacgccctgacttacgtgaatgcactgcagcattaatgtcaaatttctggagtggaagaccacgtgaaaaactttaggccacagtgtcttgttatgacaggtgctccaaactcacgtccagctttacttcatcttgttcatgatttcacaaaaaatgttggtttgatgatctgtggccatgtacatatgggtcctcgaagacaagccatgaaagagatgtccatcgatcaagccaaatatcagcgatggcttattaagaacaaaatgaaggcattttatgctccagtacatgcagatgacttgagagaaggggcacagtatttgatgcacgcg

SEQ ID NO: 24073 - DNA, 460 bp, Homo sapiens
  misc_feature (1)...(460): n = A,T,C or G
ntgtccaccgcgctgtacgacgtcgtgccgagatagacgatagcgctggaaccccagtcgatgccggtggataaaggaggggacccagccctcatccgagagacgcaggagaagcgcttcaaggacccgggactagtggaccagctggtgaaggcagacagcgagtggcgacgatgatcaaaggcttctcctgagactgcgtcacttctgcaacacagtagattcattccttcggtatcggaagcatttcggggcgttggaggccgctcttggccaaaataaatgaccctgaagcttttcggaaggccatcccccgacctatgggcatacctttaagaattagaaaagtcttttccgtggtagatcaaacgcgaggggagtgaggaggcgagcaaaagattgtaatgactgaagctgtttaattgtgatttgtggacgttttcctttaaagacattggca

SEQ ID NO: 24074 - DNA, 482 bp, Homo sapiens
  misc_feature (1)...(482): n = A,T,C or G
atggcccgcctgcaggaanncccacattgcccccgctgcaggaattcggcacgagctttttaagctttaaatgaactcaaatttaaaagactggagaatagaaatccaaattccaagaaaacgttaactcatttcaaaggacagatacactgaagctataaaatgaaatatttcctgaattctgttttacataggagatgttattagattttctaggcaagagcaaagcccatacctgaatctatcttctttttaatgggtagctataagctcaaatgaaccttatccattttatagcgtaggttcacacaatttgtgtatctttctaaatagatataaatccatacatgccctagccaatgacttgtcatacagttgcattaaaattgatctaaacatagttggcatccagaagaggcttctaatttattgccccagtgttccatttatatcagatatatagaagctagactgttggaata

SEQ ID NO: 24075 - DNA, 500 bp, Homo sapiens
  misc_feature (1)...(500): n = A,T,C or G
catagaccgccatagaaagcgctcgagcctgcacgaactgatcatgcagttgttggaggaaacacctgaggagaaacaaaccaccattgcctgactggctcttatcagagttaatagcatctcagcttcctcagatcagttctatcactggcactacagaatccttctctttcttaaagcactttgcattgtaaaatgttcctggatgttcatatctagtgtttgaaggggaggagggatttaaactggtcctgtacatagaaggtttgtttgacagaggagaaaaattagccaaggaagattgttgtttaaattcatttgaaaccagaaagggactttttagttgtatgtgtaacacattcattgaattattatcactgttttcttgggacaacatcaagcctaaatactgaacaatatgaagattcttttcttggcctttctgtggattatgtcatatataataattatcagaatcattctacttggctttaanacat

SEQ ID NO: 24076 - DNA, 482 bp, Homo sapiens
  misc_feature (1)...(482): n = A,T,C or G
ntttgaaaaccccaantgccccgcgctgcaggaattcggcacgagccagggtggtgtggtgggggcaacaggggccagactcctctagagggagggtggctctggggccctggaaaacgtgagagactgccctgagctggtccagtgggccagcactttataccaactcagcatttaagggaagtatcttagattgcctccatctcaatgtgaatgcaccaggctgagggttccctagcgccttgagtcaaggccacttttcagcccatcgagccctgagttctacttggtgtttgttctctggagctgattgcacttgagctctgtggtgggcaggcgcactttagcctaagttgggtccccagggcaccccctcctctctgctccttggcagcttcattcactcccagcctctcgctgcctcactttgcaagggctcctcctcaacatttgcatgcacctgcaagaatngggaagaaaga

SEQ ID NO: 24077 - DNA, 485 bp, Homo sapiens
  misc_feature (1)...(485): n = A,T,C or G
cgcggggttttnnaattgactggctgtagcaattcggcacgagaagacacctgctcagtatgacgcttctgagctaaaagcttccatgaaggggctgggaaccgacgaggactctctcattgagatcatctgctccagaaccaaccaggagctgcaggaaattaacagagtctacaaggaaatgtacaagactgatctggagaaggacattatttcggacacatctggtgacttccgcaagctgatggttgccctggcaaagggtagaagagcagaggatggctctgtcattgattatgaactgattgaccaagatgctcgggatctctatgacgctggagtgaagaggaaaggaactgatgttcccaagtggatcagcatcatgaccgagcggagcgtgccccacctccagaaagtatttgataggtacaagagttacagcccttatgacatgttggaaagcatcaggaaagaggtaaaggaga

SEQ ID NO: 24078 - DNA, 466 bp, Homo sapiens
  misc_feature (1)...(466): n = A,T,C or G
nattgancggctgtcaggaattcgcacgaggatgacaaagaanagaaggaacaatggtcgtgccaaaagggccgcggccacgtgcagcctattcgctgcactaactgtgcccgatgcgtgcccaaggacaaggccattaagaaattcgtcattcgaaacatagtggaggccgcagcagtcagggacatttctgaagcgagcgtcttcgatgcctatgtgcttcccaagctgtatgtgaagctacattactgtgtgagttgtgcaattcacagcaaagtagtcaggaatcgatctcgtgaagcccgcaaggaccgaacacccccaccccgatttagacctgcgggtgctgccccacgtcccccaccaaagcccatgtaaggagctgagttcttaaagactgaagacaggctattctctggagaaaaataaaatggaaattgtacttaaaaaaaaaaaaaaaaaaaaa

SEQ ID NO: 24079 - DNA, 469 bp, Homo sapiens
cgcccccccccaattgacccgcgctgcatgaattcggcacgagcacacctcatgctagcctcacgaaactggaataagccttcgaaaagaaattgtccttgaagcttgtatctgatatcagcactggattgtagaacttgttgctgattttgaccttgtattgaagttaactgttccccttggtatttgtttaataccctgtacatatctttgagttcaacctttagtacgtgtggcttggtcacttcgtggctaaggtaagaacgtgcttgtggaagacaagtctgtggcttggtgagtctgtgtggccagcagcctctgatctgtgcagggtattaacgtgtcagggctgagtgttctgggatttctctagaggctggcaagaaccagttgttttgtcttgcgggtctgtcagggttggaaagtccaagccgtaggacccagtttcctttcttagctgatgtctttg

SEQ ID NO: 24080 - DNA, 441 bp, Homo sapiens
  misc_feature (1)...(441): n = A,T,C or G
aattgaccgcctgcggaattcctgcagagacgctctcacttaccttgcactgagaaagaagacaaaggccagtatgcacagctttcctccactgctgctgctgctgttctggggtgtggcgtctcacagcttcccagcgactctagaaacacagaatataatcttatttatacctcagtttgcatattttcttactatttagaatgcagccctttttgtactgatataatttagttccacaaatggtgggtacaaaaagtcaagtttgcggcttatggattcatataggccagagttgcgaagatcttttccagagtatgcaactatgacgttgatcccagagagcagattcagtgacaaacatatcctttcaagacataaagagacaggagacatgagtctttgccggatgaaaagcagctcaagaacacatgtgcagtn

SEQ ID NO: 24081 - DNA, 511 bp, Homo sapiens
  misc_feature (1)...(511): n = A,T,C or G
cggtagttgcncaggggnnnagncnaattgtcggctgtggaaanggcacgagcggatgccccttctttcctaaggctaaaacatttacaattctgaattggaggaaactgatttactgtggagacgctggtgtgtttcccaggaatgtcattatagggtcactgtgttcccattcagagcaccttttaccgggttgtgaagcccttgctcgagagcaggcacagctctgtttcttgcaggtggagtaagctctatagctcttctagatgaaaagccactgcctggacatttgtcaaaatgagacataagaaggcaggtttggattttttacacccatgaaggcccactgatggggccaattctgtcacttggtaactcactggggaagactaggcagccacagctacatggcaggtctgcagggccagcatgggagctgtccaacctgccaccaggtgaagaaagctacttgcaggaacagtagaatagatgcagcctccaagcacgcaan

SEQ ID NO: 24082 - DNA, 485 bp, Homo sapiens
  misc_feature (1)...(485): n = A,T,C or G
gcgggtnnnaattgaccttcatcaggcattcggcacgagctgnggcaccgggccctcctgtggctgcagccacctcagcctgtgtcctcccgcagtggcccccatgacgcataactcctggaggtagcatcagctcctgccccagagtggtgtcctctggcagcccagccccaggctctgtgacagcctagtgagggctgcaagaccatcctgcccggaccacagaaggagagttggcggtcacagagggctcctctgccaggcagtgggaagccctgggtttggcctcatgagctgggggtgcagtgggggactgccctagtccttgccaggtcgccagcaccctggagaagcatggggcgtagccagctcggaacttgccaggccccaaaggccacgactgcctgttggggacaggagatgcatggacagtgtgctcaagctgtgggcatgtgcttgcctgcgggagaggtccttcactgtgn

SEQ ID NO: 24083 - DNA, 491 bp, Homo sapiens
  misc_feature (1)...(491): n = A,T,C or G
agcgggnnnnnttttgaaaatcgatccgccctgtcggaattcggcacgagccgccgccatgccgtcgtccccgctgcgggtggcggtggtgtgctcgagcaaccagaaccggagcatggaggcgcacaacatcctcagcaaacggggattcagcgtccgatcctttggaacagggactcacgtgaagcttccaggaccagctcccgacaagcccaatgtttatgatttcaaaaccacatatgaccagatgtacaatgatcttcttaggaaagacaaagaactgtatcccagcgggttgccctttaaaaaccccccgtgtggtcctccctggaaggtgttacgtgtggctcgggcacaggaggcgtgtcaccctgtgcagtgcacacactggctcctctgtctttgcgagagcttggtttctattcctggtgcacgtcggatcgtccacgggttagttccagtgccacccatggcagtaggcgtggtgaggc

SEQ ID NO: 24084 - DNA, 449 bp, Homo sapiens
  misc_feature (1)...(449): n = A,T,C or G
gattgaccgcctgaggaanncattgacccgcgctgcaggaattcggcacgagagacaatggccttaatacactggaccataccaccgagatcagtgtgtcccgcctcgaaactgtcatctcctccatctactatcagttgaacaagcgccttccttctactcaccaaattagtgtggaacaatctatcagcctcctcctcaactttatgattgctgcatatgacagtgagggccgaggcaagttgacggtattttcagttaaagctatgttagcaaccatgtgtggtggaaaaatgctggacaaattgagatatgttttctcccagatgtcagattccaatggcttaatgatatttagcaagtttgaccagtttctgaaggaagttctgaagctcccaacagctgtctttgaagggccatcttttggttacacagagcactcagtccgn

SEQ ID NO: 24085 - DNA, 505 bp, Homo sapiens
  misc_feature (1)...(505): n = A,T,C or G
agcnnnnancnnnnccaggggnnnngnnnaattganncattgganccgcgctgcaggaattccgcacgagaaaagttctaggaaaagcactttccttaatccggttcccactgatgacaattgaggaatttgcagcaggtcctgctcaatctggaattttgtcagatcgtgaagtggtaaacctctttcttcattttactgtcaaccctaaaccccgagttgaatacattgaccgaccaagatgctgtctcaggggaaaggaatgctgcatcaatagattccagcaagtagaaagccgctggggttacagtgggacgagtgatcgaatcatattcacagttaatagaaggatctctatagttggatttggcttgtatggatctattcatggccctacagattatcaagtgaatatacagatcattgaatatgagaaaaagcaaaccctgggacagaatgataccggctttagttgtgatgggacagctaacacattcagggtcat

SEQ ID NO: 24086 - DNA, 497 bp, Homo sapiens
  misc_feature (1)...(497): n = A,T,C or G
aggagtncccnnnaggtatggggnnaattggatcgcgtnctcgatttccgctcgagaattcngcacgaggaacgttaaatataacattaagatcaagaaactatcttttaaaatcctgtaaataaaaaaagttacaatcaggatgggcagacaaataattggatcaatcacaatcacctcaatcaatgactaacaaatcaccagtaaaaacgaagtgctaaaaagcgagttatttaattttattttatcagacacttctctgaggagcccccatgtgctgtgcagggtcgaaaaacccaatcctaatgtacttaaaagggcagatgagagacatttgcctgaaattaaaacataaagtaattctgttctgggactttatttgaaaatccagaagaagcccttggccggaagcatcagcctccagggcctcttcaccctgacattcctgaggctgcagcacagtctccccatacccctggtgaggagccccctggaga

SEQ ID NO: 24087 - DNA, 469 bp, Homo sapiens
  misc_feature (1)...(469): n = A,T,C or G
natttcccccgcgctgcaggaattcggcacgagccgcagtgatggagcccatttccagaaaagctacaccctgacaacaggaatggatttggtggtgaagacagtgccagttcctgacacgggagacagtgtggaactcttcatttttgactctgctggcaaggagctgttttcggaaatgctggataaattgtgggagagtcccaatgtcttatgtctcgtctatgatgtgaccaatgaagaatccttcaacaactgcagcaagtggctggagaaggctcggtcacaggctccaggcatctctctcccaggtgttttagttgggaacaagacagacctggccggcagacgagcagtggactcagctgaggcccgggcatgggccgctgggccagggcctgaatgttttgaaacatccgtgaaagagatggaaaacttcgaagcccctttccactggcttggccagcag

SEQ ID NO: 24088 - DNA, 446 bp, Homo sapiens
gaacttgacccgcgctgcaggaattcgtcgcgagtcgatgcgtttgcctatcaggacccagaattacttacagacctgtttagggctaggcttggcctctttcttgagctcatctggaggggtgtggcaacactcattcttcatccttattctccctggctgtgggcaacactggtcctcagtgtcaccagatggtcctcctctgtgcccatgacccctcagcagccaaggctggccctgccagataaatgtgtgtgcccatgatcacacccaggggcacaggccacatacgtttccctgaaaccttgggctccagcctccatcccgtccatgtgggagggaacttgggtcccagcagtgtgtctttcagcaccgagtcatgtttaaaagaccatagagacaagcattttgccaagatcttccagggaagatgcatgtgtgacaca

SEQ ID NO: 24089 - DNA, 494 bp, Homo sapiens
  misc_feature (1)...(494): n = A,T,C or G
aggggagtncccnggggnnnnnnctactgatcgccttcgctagaggcgcgcgcggngccgcgatggatttccagcagctggcggacgttgcggagaaatggtgctccaacacgcccttcgagctcatcgccaccgaggagaccgaacgcaggatggatttctacgccgaccccggcgtctccttctatgtgctgtgtccggacaacggctgcggcgacaattttcacgtgtggagtgagagcgaggactgcctgcctttcttgcagctagcacaggattacatctcctcctgcggcaagaagacgctccacgaagtcctggaaaaagtcttcaagtctttcagacctttactggggcttccggatgcagatgacgatgcgtttgaagagtacagtgctgacgtggaagaagaggagccagaggcggaccacccccagatgggggtcagccagcagtaaatctgggggctcccctgagaaggagagtgagcccca

SEQ ID NO: 24090 - DNA, 443 bp, Homo sapiens
  misc_feature (1)...(443): n = A,T,C or G
nttttgcaccgcgctgcaggaattcggcacgagttcattgtacctaataactgaagtaaaaataactagttgttcaacttttcctaaactcaaatctatttttataaacaaatgtaaataatgtttatattagagttgaactggttttcatttttataactggtagactagaccttccttaaacttttagaaataaaatgaaggcttcactggatttgtgaggataaaatacattttctttaattgtcctagagcaaagtacattagtcaccatgtgttttttgtgccaatgtaaattgtaatttaccaaagaaaaatacatacattgcttggtcttgcagaaaagttcccttgaaagaacctttccaataaataaaacgtgccacattagcagtaccttgggctgtttttcatgagtaagaagattcaccatcccatgtgat

SEQ ID NO: 24091 - DNA, 460 bp, Homo sapiens
  misc_feature (1)...(460): n = A,T,C or G
cattgcccgcctgcatagttcgcactagatccgagaagctgccaccaacaacctcatgaaactagttcagaagtttggtacagagtgggcccaaaatactattgttcccaaagtgttagtaatggcaaatgatcctaattacttgcatagaatgaccactttattctgcattaatgcactgtctgaggcctgtggtcaggaaataactactaagcaaatgctgcccatcgtattaaaaatggcaggagaccaagtagcaaatgttcgcttcaatgtggccaaatctctacaaaagattggaccaattctagataccaatgctttacagggagaagtgaagccagtactacagaagttaggtcaagatgaagacatggatgtcaaatactttgcacaggaagctatangtgtggtggcacaaaggctgaggaagctagaatttcctgtgaaggacagtggn

SEQ ID NO: 24092 - DNA, 508 bp, Homo sapiens
  misc_feature (1)...(508): n = A,T,C or G
aattagacccagcctttttgacnccgcgctgcaggaattcggcacgagcctgccctctgtgcaccctgagagctcacagtaacactgtgtgtgtcaccatataactgcacctcacccccgcacgtgtgcatgactcgcagagaatattccagcaattgtgtacccctgggccagtctctttgaaccctgagggtggccaggatctggagctgcatctctaaggggccaggctttggggaccattgccaaaggtggactcaggaggaaagacacttaaagacacttttacatgtctagtaattcttgatgttcatcttcagcaccagtggaaacacatgaacttcgatgcaggtccagagaccatggacactcccacgaggctcagctctcaggcaccccctacacttcagttgagggaaaagctcaagtgccttatgcccgtggaccacagtcttggctgagatcanagggatgagcaacagggacttctgccacagtgacaatggan

SEQ ID NO: 24093 - DNA, 433 bp, Homo sapiens
  misc_feature (1)...(433): n = A,T,C or G
nttgaccctcgcccccgcgctgcaggcaaaattatagattaagaggaatgaatgcacctatttggctttaagttgaagatgaattatttctcatgctcattttcttgcggcagttatcttagaaagacccccaaaggctttgtgattgtaagcactgtcatgatcacagaatgcaagcttctggtaccatgatcctcaacttagagaggaagaaaccaagacagagagcttaactcacttctctcagggaaaattaggagttgagcacaggacaggaaatgggctttgccacttttagctccaggcttttctaaccagacttgatttcctcatgttctagaaagatcactaatggtcaagtggaacaagcactacacgactaacccctattggggtttttaacttaagggaggctaatttttaatttaaactg

SEQ ID NO: 24094 - DNA, 501 bp, Homo sapiens
cattgaccgccctgaggaattcggcacgaggattaggggggctaatgagggggactaacttgggggagccaacttcagagccttactgcccatgagcctcccacccgctctgttgtatgttttttaaaaatcagtttttgaataaggaatatatttacatattaaaccctaattgtataaacaggtgtttgtaatggagtggaggcccctccctagtcttctagttactcttctcaatttattctttaccttagccgggcacagtggcatgtgccaattgtctcagctacttgggaggctgaggtaggaggatcatttgagctgaggagttaaaatatagcctgggcaacacagcaagacccagaaaacaaactaaattagagaaagtacaggcccttagatatggggaaagcagtttgttccaaagctgcttgaacttgcaagactaccaggagtccattccctctaacctctaatgtaccccaaacacaaaaaaaaaaa

SEQ ID NO: 24095 - DNA, 454 bp, Homo sapiens
  misc_feature (1)...(454): n = A,T,C or G
aggtcgaacncctntnaggaannaattgtaccctcgctgcaggaattcggcacgaggcgaaaatggcggcttccaggtgggcgcgcaaggccgtggtcctgctttgtgcctctgacctgctgctgctgctgctactgctaccaccgcctgggtcctgcgcggccgaaggctcgcccgggacgcccgacgagtctaccccacctccccggaagaagaagaaggatattcgcgattacaatgatgcagacatggcgcgtcttctggagcaatgggagaaagatgatgacattgaagaaggagatcttccagagcacaagagaccttcagcacctgtcgacttctcaaagatagacccaagcaagcctgaaagcatattgaaaatgacgaaaaaagggaagactctcatgatgtttgtcactgtatcaggaagccctactgagaaggagacagagga

SEQ ID NO: 24096 - DNA, 496 bp, Homo sapiens
  misc_feature (1)...(496): n = A,T,C or G
atcgacccccctccnnnnattgatccgcgctgcacgaattcggcacgagaagagagagagagagagagagagagagagagagcagcagntatctgtacttaccctcttgacatggttagggtccgcctagcattccaggtgagaggggaacacagctatacaggaattattcatgctttcaaaacaatttatgcaaaggaaggtggtttctttggattttacagaggtctgatgcctactattttaggaatggctccatatgcaggtgtttcattttttacttttggcaccttgaagagtggggggctttcccatgctcctacccttcttggcagaccttcatcagacaatcctaatgtcttagttttgaaaactcatgtaaacttactttgtggtggtgttgctggagcaatagcgcacacaatatcctacccatttgatgtgactcgtcggcgaatgcaattaagaactgttctgccggaatttgaaaagtgcc

SEQ ID NO: 24097 - DNA, 479 bp, Homo sapiens
attagaaaggcttgcagagacctgcagagaattcggcacgagctggatcctgcacttggcctgtgacatactgtcttgtttctgagaatcctcccctacttctctagttaatctccagagacttctgtgactacttaatcacaaaggaaattttcaggaatattatcaaatactattttagaaaaaaaaagagaagggatttgaatgttttcagttcagtttagttatcttttttttttttttttccaaaacttaaaaatgggaccccccccatcctttaacccagctaaaaaattttgtgatgtttggggccaattacacaaacccccaaagaaaacgggggttaagcaccttggaaaattttccctaatttgggagggtgccctttaacgaaagaacgggttaccgggccctgaggaaggccacaaaaatggtccctgggcccccaaaagggaaaatgacgggaaaagctgttaaaa

SEQ ID NO: 24098 - DNA, 486 bp, Homo sapiens
atttgaccgcgctgatttgacccgcgctgcaggaattcggcacgaggatccaaagactcttgggagggagttactgaagtcttactacagaaatgaggaggatgctaaaaatgtcacgaatatggacatatcatctgtggactgaccttgtaaaagacagtgtatgtagaagcatgaagtcttaaggacaaagtgccaaagaaagtggtcttaagaaatgtataaactttagagtataggttggaatcccactaatgcaaactgggatgaaactaaagcgatagaaacaacacaagtttgacctaacataccggttataatgccattttaaggaaaactacctgtatttaaaaatagaaacatatccaaaacaagagaaaagacaccagagagactgtggcccatcaacagacggtgatatgccactgcatggcatgtgcttgtttggcttgaattcaaatacaattccgtttgatgacagctggg

SEQ ID NO: 24099 - DNA, 480 bp, Homo sapiens
atttgacccgcgctgcatgccagatcatgcctatggtgccactgggcacccaggcatcatcccaccacatgccactctcgtcttcgatgtggagcttctaaaactggaatgacaggaatggcctcctcccttagctccctgttcttggatctgccatggagggatctggtgcctccagacatgtgcacatgagtccatatggagcttttcctgatgttccactccactttgtatagacatctgccctgactgaatgtgttctgtcactcagctttgcttccgacacctctgctgatctcagtttcctggcttttcctccctcagccccttctcacccctttgctgtcctgtgtagtgatttggtgagaaatcgttgctgcacccttcccccagcaccatttatgagtctcaagttttattattgcaataaaagtgctttatgccggcttttctcaaaaaaaaaaaaaaaaacctcgaggg

SEQ ID NO: 24100 - DNA, 472 bp, Homo sapiens
  misc_feature (1)...(472): n = A,T,C or G
gggagggnaggccggaaatgagnnccattgnatgcactggggaattcggcacgagccaccactcctccagccagagggtctggaccatccagtgcctgtcctcgccacagggcctccagggagcattcgggtcaaatccatggacaccctgggctacaaaccaaggctgctgttcatcccacatcgtgtggggcagtgtccatcccctgcagctacttggtgacttaacaactccaggagccctgtcagctgccctcctccacctaaaccccttcgactcttctgctttgacaaagaaaatgacattggggaggggaggtgctccgcctcccagcttttctcaaaatagtcctatagatactggtaatctggaaatgaagaagtaattctgtctctgcacctacttttgcagaatgttcaaggaagtattctgtgttagtattaatgccaaaaagttgtttttaaaggtttt

SEQ ID NO: 24101 - DNA, 473 bp, Homo sapiens
  misc_feature (1)...(473): n = A,T,C or G
naattganctgcgctgcacgaattcggcacgagaaaacaccttagaaccagagatcgaccccctcaagcaatacatcaattcccttcacaagaaacgtcggggctacatgagtatctgtgttgaatgcggtctgaaatgatcctatggattttcccggctggttgccactactgtacaacattcagtgcccacatccatctgtgccattaagcttttttgagacatgagagatgcctcttccctgctgtatgacatgcatttgggaagttggaaagaaatgacaaaatcagggagaaaacatccaagcttcttacctgtagatagaatcagccctcacttggtgcttattaccagttattcaagaacaataacaacaacaaaattagtagacatccaagaagcacatattaggaccaaagatagcatcaactgtatttgaaggaactgtagtttgcgcattttatgacatttt

SEQ ID NO: 24102 - DNA, 469 bp, Homo sapiens
  misc_feature (1)...(469): n = A,T,C or G
nttgaccccgcttgaggacttctgcacgaggggaggggcctaggcctcagccagagaagctataaattcctctttgctttgctttctgctcagcttctcctgtgtgattgacagctttgctgctgaaggctcattttaatttattaattgctttgagcacaactttaagaggacgtaatggggtcctggccatcccacaagtggtggaaaccctggtggctgctgggttgctcccttctgctactggcaaaaggatctttgtggccaaggagctgctatagcctgtggtggggacatgccctcctctcccattgtccctctgccccatcctccaacagggaaaatgcagcagggatgccctggaggtggctgagcccctgtctagagagggaggcaagccctgttgacacatgtctttcctaaggctgcaaggcttaagctggtggcccaggaccatcatcctactgtg

SEQ ID NO: 24103 - DNA, 457 bp, Homo sapiens
  misc_feature (1)...(457): n = A,T,C or G
cggtgcnccnncnattgacccccccattgaccccgcgctgcaggttaacatgcatcttactggttctttatgaagagctttctcttggctcacaggcagaaggaattttccttgtcttggatgagacttttgacttggacttttgggttaaggatttacagaaagcgtggtgctggcatctgatcagcttctggggtggcctcaggaagcttacaatcgtggtggcatttgaagtggaagcgagagagagaagaggagatgcaacacacttttaaacaagatttcaggagaactcattcactatgttctggagaccagaaggccaaaatcaaaagtatgggcaggcttgatttctttagaagactccagcagagaactgtgtctccttgcttctgattctacatctccatccatgggccactgtttcagcaacctcagccagtgcaacacaacctcn

SEQ ID NO: 24104 - DNA, 454 bp, Homo sapiens
  misc_feature (1)...(454): n = A,T,C or G
ntttgaccggcgcttgacgacgcgctgcacgaattcngcacgagctgcgacacagcccatcccctcgaccgctcgcgtcgcatttggccggctccctaccgctccaagcccagccctcagccatggcatgccccctggatcaggccattggcctcctcgtggccatcttccacaagtactccggcagggagggtgacaagcacaccctgagcaagaaggagctgaaggagctgatccagaaggagctcaccattggctcgaagctgcaggatgctgaaattgcaaggctgatggaagacttggaccggaacaaggaccaagaggtgaacttccaggagtatgtcaccttcctgggggccttggctttgatctacaatgaagccctcaagggctgaaaataaatagggaagatggagacaccctctgggggtcctctctgagtcaaatccagtgg

SEQ ID NO: 24105 - DNA, 469 bp, Homo sapiens
gatagaccgcctgcagttcgcatgttcagcatgaagctgaacatctccttcccagccactggctgccagaaactcattgaagtggacgatgaacgcaaacttcgtactttctatgagaagcgtatggccacagaagttgctgctgacgctctgggtgaagaatggaagggttatgtggtccgaatcagtggtgggaacgacaaacaaggtttccccatgaagcagggtgtcttgacccatggccgtgtccgcctgctactgagtaaggggcattcctgttacagaccaaggagaactggagaaagaaagagaaaatcagttcgtggttgcattgtggatgcaaatctgagcgttctcaacttggttattgtaaaaaaaggagagaaggatattcctggactgactgatactacagtgcctcgccgcctgggccccaaaagagctagcagaatccgcaaacttttcaatt

SEQ ID NO: 24106 - DNA, 473 bp, Homo sapiens
  misc_feature (1)...(473): n = A,T,C or G
ggggaggggnanggcnggaaactgaaaggcatgagaagcatgcggaaanccgacgagctaacaaccgctttgagacagggaagaaaaaactgcagtatctgagcttcggtgactttgccttctgcgctgagctcatgatccaaaactggacccttggagccgtcggtgaggcccccactgacccagactcacagatggatgacatggacatggacttagacaaggaatttctccaggacttgaaggagctcaaggtgctagtggctgacaaggaccttctggacctgcacaagagcctggtgtgcactgctctccggggaaagctgggcgtcttctctgagatggaagccaacttcaagaacctgtcccgggggctggtgaacgtggccgccaagctgacccacaataaagatgtcagagacctgtttgtggacctcgtggagaagtttgtggaaccctgccgctccgaccac

SEQ ID NO: 24107 - DNA, 330 bp, Homo sapiens
  misc_feature (1)...(330): n = A,T,C or G
cggcggggnnnnnnnaattgcaccgcctgcaggaattctgcacgagggaacgtgggggaacctgtgtttcacgtgactcagcagtgcccgccgccgtcaccagctatgcattcactccgtttccagtgagcagatgtcttgcttggaaagtggacctgtgtctgtgtctgtcctgagaacttaccagcagaaatcctcatttctgtgctacggatttaccaaaaattgtcaagtctttttcagtttaacagttcctttacatgtgtagtatttgaggaaaaaaatcaataaacagttgatctcgtgaaaaaaaaaaaaaaaaaaactggg

SEQ ID NO: 24108 - DNA, 451 bp, Homo sapiens
  misc_feature (1)...(451): n = A,T,C or G
agatggactctgcattgactgcacgaattcggcacgagggggcccccacacctagactcagtaaggaagtcgggttggaccttaacatctgcattggacaactccaccccttccttggccttgcccctgcccgcctacactcctacgtgtccagggcttgggccgtgacttangcagaggagtgcagaggagggtctggcaggggctgctcaggccgcctagctgcccctttgccaggttaataaagcactgacttgtttctcanaaaaaaaaaaaaaaaaaaaaaaaaaaaaaaccctgggggggggcccgggccccaattcccccttaagggggggggtttaaaattccggggccggggttttaaaacggggggggggtgaaaacaannnnnnnnnnnnnnnnnnnnnnnnnnnnnnnnnnnnnnnnnnnnnnnnnnnnnnncncncnn

SEQ ID NO: 24109 - DNA, 490 bp, Homo sapiens
  misc_feature (1)...(490): n = A,T,C or G
ggcgccgggaaagtaaatttgacgattgtgaacntgcacgagcccgtcaccatgtcgtgcgagtcgtctatggatctcgggtactgggatattcgtgggctggcgcacgccatccgcctgctcctggagttcacggatacctcttatgaggagaaacggtacacgtgcggggaagctcctgactatgatcgaagccaatggctggatgtgaaattcaagctagacctggactttcctaatctgccctacctcctggatgggaagaacaagatcacccagagcaatgccatcttgcgctacatcgctcgcaagcacaacatgtgtggtgagactgaagaagaaaagattcgagtggacatcatagagaaccaagtaatggatttccgcacacaactgataaggctctgttacagctctgaccacgaaaaactgaagcctcagtacttggaagagctacctggacaactgaaacaattctccatgtttctgg

SEQ ID NO: 24110 - DNA, 472 bp, Homo sapiens
  misc_feature (1)...(472): n = A,T,C or G
attganngcattgaccacgctgcaggaattcggcacgagggacgagaaggagcagctcatcattccccaagtgccactcttcaacatcctggctaagttcaatggcatcactgagaaggaatataagacttacaaggagaactttctgaagcgcttccagcttaccaagttgcctccatatctaatcttttgtatcaagagaatcactaagaacaacttctttgctgagaagaatccgactattgtcaatttccctattacaaatgtggatctgagagaatacttgtctgaagaagtacaagcagtacacaagaataccacctatgacctcattgccaacatcgtgcatgacggcaagccctccgagggctgctaccggatccacgtgcttcatcatgggacaggcagatggcatgaattacaagacctccaggtgactgacatccttccccagatgatcacactgtcagag

SEQ ID NO: 24111 - DNA, 492 bp, Homo sapiens
  misc_feature (1)...(492): n = A,T,C or G
tggcggaannnnnnnnaattgatcgcantcggaattctgcacgaggcgtgtgccgccttacgtccaaatccgagatctccacgggatcctcaggacttacgccaacttctctataacaaaagaactcaaagataccatgagaacttcacacggcctgaggaggcacccgagtttcagtgcaaactgtggcctgcccagctcctggacaagcacttggcaggtggcagacgacctcacccagaacactttagacctggagtatctgcgttttgcacataaactaaaacagaccataaagaatggggattctcagcattctgcctcctctgccaatgtctttccaaaggagtcaccaacccagatctccattggtgctttcccttcgacaaaaatctctgaggccccatttctgcatcctgcacctaggagcagaagcccccttctggtaacagttgtggagtcagatcccagaccacaggggcagcccaggag

SEQ ID NO: 24112 - DNA, 539 bp, Homo sapiens
  misc_feature (1)...(539): n = A,T,C or G
aggagttcgcggctgagatttcggcacgagtttccatttanatagatgtcagtaaatgagagaacatctgttttaatgttgacatttcaccgatagcaatgaaatgtacactatgcgaacaccaaaaagatgctgaatttacagtagggagaaataatagggagaaaattatcagtagagaaaccttagatattttttttttgagtcttggtacatttttaatgtaaaggatgtttattaaaaatacatattacagctggtttcacttttcagccaccctgaataaagttaatttctaaatattttatttttggctgggtgcagtggcatacacctgtaatcccagtactctgggaggccaagcagacggatcactggagatcaggagttcaagaccagccaggccaatatggtgaaactccgtctctanctaaaacacaaaaattagccaggccatgtgggtcgtgcctgtattccagctactcaagaggctgaggcaggagaatcgcttgaccccggagggcaaagtgcgggagctg

SEQ ID NO: 24113 - DNA, 494 bp, Homo sapiens
  misc_feature (1)...(494): n = A,T,C or G
gccggccccccnnnnaattgagcgccntcggaaanattgagagcattgnggaattctgcacgagccctgagaatgtagcggggtgatctgcgtggcgagggtctgtgtcttgggaagagatgaatgggaagcggtcagcggagcccggcccagccctggtgggaaaaaagggaaagaaggaggtgatggcggagttttcggacgctgttacggaagaaaccttgaaaaagcaggtggctgacgcctggagccgcaggacgccgttcagtcacgaagtcattgtcatggacatggacccttttcttcactgtgtgatcccaaacttcatccaaagccaagacttcttagaagggcttcagaaggaactgatgaacttggacttccatgagaagtataatgatttatataagttccagcagtctgatgatttgaagaagagaagagagcctcacatctccactttaaggaaaattctgtttgaagatttccggccg

SEQ ID NO: 24114 - DNA, 469 bp, Homo sapiens
  misc_feature (1)...(469): n = A,T,C or G
nttggccctctgccccgcgctgcaggaattcggcacgaggagttctcagtaatttggaaagttaaggagttggttcctgtgtcacctttcagttagtgtgggaaaggaagacttctgttttcctgagatcagtgcagtctcaggcctttggcagggctcatggatcagagctgagactggagggagaggcatttcgggtagcctaggagggcgactggcggcagcagaaccgaggaaggcaaggttgtttcccccacgctgtgtcctgtgttcaggtgcgacacacaatcctcatgggaacaggatcacccatgcgctgcccttgatgatcaaggttggggcttaagtggataagggaggaagttctgggttccttgccttttcagagcatgaggtcaggctctgtatccctccttttcctagctgatattctaactagaagcatttgtcaattcctttgcctcccacn

SEQ ID NO: 24115 - DNA, 465 bp, Homo sapiens
  misc_feature (1)...(465): n = A,T,C or G
ntttgccccgtcctgangaattcggcacgagaaagcccagaccaaagaacaggcagattttgcagtagaagcattggcaaaagctacctatgagcggctctttcgctggctcgttcatcgcatcaataaagctctggataggaccaaacgtcagggagcatctttcattggaatcctggatattgctggatttgaaatttttgagctgaactcctttgaacaactttgcatcaactacaccaatgagaagctgcagcagctgttcaaccacaccatgtttatcctagaacaagaggaataccagcgcgaaggcatcgagtggaacttcatcgatttcgggctggatctgcagccatgcatcgacctaatagagagacctgcgaaccctcctgggtactggcccttttggatgaagaatgctggttccctaaagccacagataaaacctttgttgaaaaactggtt

SEQ ID NO: 24116 - DNA, 336 bp, Homo sapiens
cataactcagacaactatactctggatcatgacagagctattcacatccaagcagaaaatggcccccatctacttgtggaagcagagcaagccaaggtgttttcacacagaggtggcaatgttacactgccatgtaaattttatcgagaccctacagcatttggctcacgaatccataaaatccgaattaagtggaccaagctaacttcggattacctcaaggaagtggatgtttttgtttccatgggataccacaaaaaaacctatggaggctaccaaggtagagtgtttctgaagggaggcagcgatagtgatgcttctctggtcatcacagac

SEQ ID NO: 24117 - DNA, 490 bp, Homo sapiens
  misc_feature (1)...(490): n = A,T,C or G
gcgcgggcttttaaattgantgnccgtactgatcggccgtaggctgaaatctaaacagtaatgcaaaagtgtctgcattagaatttacggtgtctaaaattcatgtttttaaaagagcttgcctacagatggtttccacacttgaaattgtgccctgcgagttgcatagctggaagttcaatgctcagtcctaccttggctcccattaaacatttggtgctctgtggattgagttgaacgtgttgaggctttgcaatttcacttgtgttaaaggctctggcatttttccatttctatgcaaatttctttgaagcagaattgcttgcatatttcttctctgccgtcacagaaagcagagtttctttcaaacttcactgaggcatcagttgctctttggcaatgtcccttaaccatgattattaactaagtttgtggcttgagtttacaaatactacttgttgcattgatgttcccatgtagtaagtcattt

SEQ ID NO: 24118 - DNA, 448 bp, Homo sapiens
aattgacggcactgcgctgcaggaattcggcacgaggcgggtggtaggaacaatggcgctgtcttaagtggcacagtggagcagctctgaagatgcaaagatacacgaaaaaacttccagaacatctgggagaatatttaatggaaaatcgcttggttaaaacctgacacttttaacagtgaacagcgttctgagtgtggacgagtagccagtgaagataatgaatgtcgaatgtgactgactagcagcttcattttgaatgagggtcgctgtctgcccattgatagaggccagattgtcttggaagttccaaagttgcaacgatttctggctagtgccacgaggtttacttgactgttgtgtgaaaagctgataagaaaaccatccagaaaaaagctcttcgttttacaaacatgaaaaaaaaacatgtaattttgaaaaaaaaaag

SEQ ID NO: 24119 - DNA, 501 bp, Homo sapiens
  misc_feature (1)...(501): n = A,T,C or G
nccgccnnaggggngtgnaatactaanatactgacgaccgtacgaattcggcacgagtatctacatattggaagatttggtcctgatgtcctttgaggcttctttagctctagttctctgacacttcagcctatatcacagctaacttcctcagtctcatctattccttatgctccagcccctggcaatttgcctcaagatgggggtttgaaaataactttacctgactcaaggagtgtctggagcacctcctagtctaagtctgcaagctccagttcttgcctaaaaccatgccagtggccacccttgggctcagacagctctgggccttttgaccacaagccagcccctcgccctctctgtggcatagtcttctctgccccaggactgcagggcggcttcctccaaggcttccaaggcccaatggccagggagtgaaggaggtggcgttgctgagagcagtctgcacatgcttctgtctgagtgcaggaaggtgttcca

SEQ ID NO: 24120 - DNA, 492 bp, Homo sapiens
  misc_feature (1)...(492): n = A,T,C or G
ggggaacnagggaaatgcacgctgtggaanaaattgatccgcantgaggaattccgcacgagcccaccccaacctggggctgcctcccactccgtgagatgcttctgtctcctgttcactttgtgtggtagattcttattttcaaaatgcatctcatttgatcattactgtgaccttgggaagcagcaggacagggatttctttttagaggtgcaaactgctcagaggggacacacctcagcctctcactgtgggtacacgtggcgtgccatgagtggggaagagcaacaggcgagatgcctcattctactggaacatcactgtgggtgaacagagatttccaggttttccctcttaaaatatttgtcccacaccgacaagagtccagtcaccaggcctcaaaggaacttctgcttgtagcagccgcctcccctgtgccccagcctccttaatgtgtgcactctcagagggcacagctcgcgaggctgggtt

SEQ ID NO: 24121 - DNA, 446 bp, Homo sapiens
attgattgccctgcgctgcaggaattcggcacgagactccctaccccttagttaaatagggtttattttccactcatgcccttatgcctttttttcttatagttttttaacttattgactgtgcatgacccagtggtttgaattgtttttagttcaagtcattggtaaaaactaggtttaaggagatgagctactgtttaaagtgagctggcctgcctaattaattccttgtgaaaactaaatgattttttcagtttggggatcattctcacaacataactatgcatgtagaggacaagatttattttcttttctccctttgcccagtagccacatctggtttactcaggcagcatctactaagaaattcagcacctgcatatctctgtgacatggtcacttagagcttatcttccctatgaatctccagatctgtgagtcgagcg

SEQ ID NO: 24122 - DNA, 495 bp, Homo sapiens
  misc_feature (1)...(495): n = A,T,C or G
atagaccgcctttgagaaccgttccaaagtttgccggctgcaagtgagtgtggacgaccagtgtgaggggtccacagaaaagtatttctttaatctaagttccatgacatgtgaaaaattcttttccggtgggtgtcaccggaaccggattgagaacaggtttccagatgaagctacttgtatgggcttctgcgcaccaaagaaaattccatcattttgctacagtccaaaagatgagggactgtgctctgccaatgtgactcgctattattttaatccaagatacagaacctgtgatgctttcacctatactggctgtggagggaatgacaataactttgttagcagggaggattgcaaacgtgcatgtgcaaaagctttgaaaaagaaaaagaagatgccaaagcttcgctttgccagtagaatccgggaaattcggaagaangcaatttaaacattcttaatatgncatcttggttgggcttatggcttatn

SEQ ID NO: 24123 - DNA, 495 bp, Homo sapiens
  misc_feature (1)...(495): n = A,T,C or G
gatgccagnnnntttaaaactgangagctgagaacntgnccgaganactanaaaaaatgaatatgatcttattctgaactcagacataaacagcaatcattatcatcagtggttttactttgaagtcagtggaatgcgaccaggtgttgcttacaggtttaacatcattaactgtgaaaagtccaacagtcagtttaattatggtatgcaaccactcatgtattcggttcaggaagcattaaatgccagaccatggtggattcgtatggggactgacatttgttactataaaaatcatttctcaagaagttcagttgctgcaggtgggcaaaagggaaaatcctactatacaattacatttactgtcaattttccacataaagatgatgtttgctactttgcttatcactatccatatacgtattcaactttacagatgcatcttcaaaaattggaatcagcacacaatcctcagcaaatctattttcggaaaga

SEQ ID NO: 24124 - DNA, 502 bp, Homo sapiens
  misc_feature (1)...(502): n = A,T,C or G
ggtgtccannnagttagtaaattttagctacgctccgtatgattcactttgcganaannccgcacgaggaatagcagcatagactgacaacttttcactatcatcttatcgaaggcattttggaaactggggtcgtatgtcccacctaggcttgctttgttactgccacaaatacctccagttcttaccagtgatgttattatgcattcaacctaattcattcatctggaaagaaacagttttttaaaaagggaaacctcacacgtaaatggctcagggcagcctggccttggtggaatgagcatgagactggaagctgaaagaagcaagttttaatcttgtcactaaatgagtgttgtttgacacatcatagcctctctgggcctcggctcctcatctgaagagaagttgaacttaactgctaagttgctctggctctaatgtttcatgaggctgtggagcgtgatatagatgcggaagaggttagaagaccaggctgccg

SEQ ID NO: 24125 - DNA, 498 bp, Homo sapiens
  misc_feature (1)...(498): n = A,T,C or G
atagaaagcctttagaccccgctgcagtgctggccagtgtgtgctcctggctcagcagaaacatccatttgagttggcatccctgtagggatcccagagcgttgtaagccttcttgtgattggtagggatggctgtggggtggcttccaggagggggccaccattgccgcatctacttctagactcccaaaggagcccaggctcaggcaggcctggcccagagtcacgctggcaaccacgagtttgggaagcagtcgtattctctctctctctctctctctctcagtatccatgacaggtatgaaacatattgtctctttataaatgtcattttacaaattatgtgattatctggaagctctaagatgagagcaaatgcctgatcactctggccaaatgtcagatactaaagcccattcttggccgggcatgttggctcccgcctggtatcccagcactttgggaagcccaagtgggtgaatcacctgaggtcaggan

SEQ ID NO: 24126 - DNA, 504 bp, Homo sapiens
  misc_feature (1)...(504): n = A,T,C or G
cggctcggnnnaattganaattgagcgccatgcggaattcgccacgagattgctgccgagaagcgaggctccaacctcgaagtagagctgtggctcatcacggccttccatgacaagggctccctcacggattacctcaaggggaacatcatcacatggaacgaactgtgtcatgtagcagagacgatgtcacgaggcctctcatacctgcatgaggatgtgccctggtgccgtggcgagggccacaagccgtctattgcccacagggactttaaaagtaagaatgtattgctgaagagcgacctcacagccgtgctggctgactttggcttggctgttcgatttgagccagggaaacctccaggggacacccacggacaggtaggcacgagacggtacatggctcctgaggtgctcgagggagccatcaacttccagagagatgccttcctgcgcattgacatgtatgccatggngttggtgctgtgggagcttgtgtctcgg

SEQ ID NO: 24127 - DNA, 489 bp, Homo sapiens
  misc_feature (1)...(489): n = A,T,C or G
gccgccccaggnntttgancgctttggaanaattgaccgcctgaggtganacaggcctgttcggngctggactcggtggggcctggctggccctgagggctgagaaggagaggctgcagcagcaaaagcgaacagaagccctgcgccaggcagctgtgggccagggcgacttccacctgctggatcacagaggccgggctcgctgcaaggctgacttccggggccagtgggtgctgatgtactttggcttcactcactgccctgacatctgcccagacgagctggagaagctggtgcaggtggtgcggcagctggaagcagagcctggtttgcctccagtgcagcctgtcttcatcactgtggaccccgagcgggacgacgttgaagccatggcccgctacgtccaggacttccacccaagactgttgggtctgaccggctctaccaaacaggttggccaggctagtcacagttaccgcgtgtactaca

SEQ ID NO: 24128 - DNA, 446 bp, Homo sapiens
attgacttccctccgcgtgcacaattcggcacgaggtgaaagccaggaagagctcatatttcactgtggattcaggcgcttccgagcctcacctttattctctcagcacactgcagcggacaaacataaattgcagagattcctgactgctgacatggccctggtggcgacagtctatgcgccaatcacttttcctcctgcatctgtgctgcttttcaagcaaaaaagcaatggaatgcacagcctcattgctacaggccatcttatgtcagtagatccagacagaatggtcatcaagagagttgttctgagtggtcatcctttcaaaatttttactaagatggcagtagtacgttacatgttcttcaacagagaggatgtgctgtggtttaaaccagtggaactgagaacgaagtggggccggagaggacatatcaaggaacctt

SEQ ID NO: 24129 - DNA, 357 bp, Homo sapiens
  misc_feature (1)...(357): n = A,T,C or G
tgtgtccnnagttgnaatctagctcctcctacgatgctntagcanaaancgactccttttgggtccccgaggtggggtcccctcccagccctgcatcctccgtgccgtagacctgctccccagaggaggggccttgacccacaggacgtgtggtggcgcctggcactcagggacccccagctgccccagccctggtctctggcgcatctcttccctcttgtcccgaagatctgcgcctctagtgccttttgaggggttcccatcatccctccctgatattgtattgaaaatattatgcacactgttcatgcttctactaatcaataaacgctttatttaaaaaaaaaaaaaaaaaaa

SEQ ID NO: 24130 - DNA, 322 bp, Homo sapiens
aatttcaaatattccatggacacctatgtttttaaagatagttctcagaaagacctgctgaattttactgtcacaattcctgtgatgtatcagggtaatacatataacataccatttcgtttctggattttggattctcaccctatcgctccccctatttgcttcttgaagccaactgcaaatatgggaatcttagtcggaaaacatgtggatgctcaaggcagaatatatttgccctatctactaaactggagccatcctaaatctgtcattgttggattaattaaagaaatgattgccaagtttcaagaggaacttcctt

SEQ ID NO: 24131 - DNA, 502 bp, Homo sapiens
  misc_feature (1)...(502): n = A,T,C or G
ggtggtcnnnnnnattgaccgattgtaggctcttcagagcanaaggagaattgcttggattgctacatggaccccctgagactatcattattacctcctagggccaggaagccagtgtgtcctccgtctctgtgcagctccgtcattaccataggggacttggttttagactctgatgaggaagaaaatggccagggggaaggaaaggaatctctggaaaactatcagaagacaaagtttgacaccttgatacccactctctgtgaatacctacccccttctggccacggtgccatacctgtttcttcctgtgactgtagagacagttctagacctttgtgatagaactaaaatgctctctgtactctagtctcctgcctcctcagctctgcaagtagtttagtaggaatgagagtgaagtccaggcttggattgcctaactacactgctaaaaatatttgtaatccttaataattaaactttggatttgttaaaatacaaa

SEQ ID NO: 24132 - DNA, 445 bp, Homo sapiens
actgactccgctgcaggaattcggcacgagacacaattgaaagctggcttcctgcaaacacaccaagagtctgtaatctagcctatccattatatgtcctttattattcatgatatcctattcttctaccttgttgcctggtaactttttctgaggactgagtttctgcagcgatgtggtgcactcttcctgtgatgaggaaacatctgggcccccttctgcaggctttggaagatgatgtgtcttgtcaaggggtaaagggcaaatggatttaatttctgcttaaaactatcatagacgttccaaatagaatatgtaaaatttctctgtattagaaaaagaaacgtgataccaattgtatattttcttttctttatttattctctgtaagtctgtcagatgataaattgtaaataacaatgattaaagagtcatgctactgatg

SEQ ID NO: 24133 - DNA, 501 bp, Homo sapiens
  misc_feature (1)...(501): n = A,T,C or G
agannnnnnaaggatggccgaggngnnnnttctgatcgcctgtagattgcgtcgagggaaaaccgcggctattagccatggtcaaccccaccgtgttcttcgacattgccgtcgacggcgagcccttgggccgcgtctcctttgagctggttgcagacaaggtcccaaagacagcagaaaattttcgtgctctgagcactggagagaaaggatttggttataagggttcctgctttcacagaattattccaggggttatgtgtcagggtggtgacttcacacgccataatggcactggtggcaagtccatctatggggagaaatttgaagatgagaacttcatcctatagcatacgggtcctggcatcttgtccatggcaaatgctggacccaacacaaatggttcccagtttttcatctgcactgccaagactgagtggctggatggcaagcatgtggtgtttggcaaagtgaaagaaggcatgaatattgtggaggcca

SEQ ID NO: 24134 - DNA, 357 bp, Homo sapiens
  misc_feature (1)...(357): n = A,T,C or G
agtnnnnnnnaagggagtncccnaggggnnnnccccctagatgccctgctagatcgccntcaagagttcagcacgagaatgtctgctctaagaagcagacaaccggacatgcgcattcatagcagaaggaaaccatcttgaagtggaaggctgaccatgatgagcagtagatgaatgtgtatgtctaaacaaggactgctctgtgtcctcacagatgaatgaggtcatgctgggaattccctctgcagggaactggcctgactgacatgcagttccataaatgcagatgtttgtctcattacctttttgtatagtttattaaagtattaatatagttttaaaaaaaaaaaaaaaaaa

SEQ ID NO: 24135 - DNA, 466 bp, Homo sapiens
  misc_feature (1)...(466): n = A,T,C or G
nattgccccggcatgcggaattcggcacgagctcgtgccgatattttccatgcattgaaaatgggaaacttccagctggtcaaagagaatgccgatgaagaccccagccacgtgaacttggtcaatggggacggggcgacgccactgatgctagcagctgttacggggcagctggctctggtgcagctgctggtggagaggcacgcggatgttgacaagcaggacagcgtgcatggctggacggccctcatgcaggcaacctaccatgggtcagtgccagccccacgccctcagcgacaaggccagacagatgctctggcctgagatggaggttcccaatgggctcttctggtcctgagatgctgcatacaaaccccaggactatgacgacattgaggcatggaaaaaaaaaaaaaagcggcccaggctcattttagccccccctttttgtggccaaatttcctgt

SEQ ID NO: 24136 - DNA, 477 bp, Homo sapiens
  misc_feature (1)...(477): n = A,T,C or G
atcgaccgccnnnaatggatcgctttcggaatacgccacgagaaaaaaagaaaaaagaactaatatccacctatccaccttggcactcccacaatgcatattcccagtgctctgtccatccccactgctacccaacccatccaagccactggcatctctcctgggccactcaacagcctcttaagtggtctcctgcttccccttccccgctccaagccactcccgcatgtaacacatcagccaaaggggtctttaaacaacataaatcagacatattgggctttgcctaaagctctcattagcttctcttcatattagaataaagcccaatttctgttctctggcttgagctggctcctgcccccttgctcactcccctgcagcaaaaaaaaaaaaaaaaaactcgggggggggcccggcccccaattccccttatagggagccgaataacaatccacggcccgcggtttaacaacg

SEQ ID NO: 24137 - DNA, 496 bp, Homo sapiens
aggtagaacgcgctttggaattcggtacgagagtctgcaccatgtgtccctgcggcgcatgagtgactggcgtatttagcccgtcacatttcattcgctgaaggaaaggcaagagagttgaaacatttttcttacttaaaaaaaatgatctttgtgaagaacatagtgagttcgtttgtcttcagtcaacagcggctgaaactgaccactgagaaatgggtgtgggcactgacagttctcccccattatttggccaggaattgagcttggcttggcaaagttccttttaccctgttctgttcatctaaatgcagacatatttaaatcatattcaactagttactaatgacctcaagttgtattccctggcaaaatggactttctcaaaataggactgcacgcttggggtactttaaatgttaatgtttaatctaaaattttatttaagaggattacagccctaatgttattttcctactttctgaaaacaattttg

SEQ ID NO: 24138 - DNA, 503 bp, Homo sapiens
  misc_feature (1)...(503): n = A,T,C or G
aggatgtagggaggccnnnnnnnttttgaaaactcgtaggccctgcgcgaattcggcacgagaagaaaagaaggaacaatggtcgtgccaaaaagggccgcggccacgtgcagcctattcgctgcactaactgtgcccgatgcgtgcccaaggacaaggccattaagaaattcgtcattcgaaacatagtggaggccgcagcagtcagggacatttctgaagcgagcgtcttcgatgcctatgtgcttcccaagctgtatgtgaagctacattactgtgtgagttgtgcaattcacagcaaagtagtcaggaatcgatctcgtgaagcccgcaaggaccgaacacccccaccccgatttagacctgcgggtgctgccccacgtcccccaccaaagcccatgtaaggagctgagttcttaaagactgaagacaggctattctctggagaaaaataaaatggaaattgtacttaaaaaaaaaaaaaaaaaactcgagggggggcc

SEQ ID NO: 24139 - DNA, 499 bp, Homo sapiens
  misc_feature (1)...(499): n = A,T,C or G
acgcccgtggangngaaccttgataaactgattgccgtgcgcanacccatggatngcagcgcggagttcaggaaatggaaggcgcaatgtttgagcaaagcggacctcatccggaagggcagtgttgacgaggatgtggtagcgcttgtgcagtttctgaacatgcgagatcagtttttcaccaccagctcctgcgctggccgcatcctactccttgaccggggtataaatggttttgaggttcagaaacaaaactgttgctggctactggttacacacaaactttgtgtaaaagatgatgtgattgtagctctgaagaaagcaaatggtgatgccactttgaaatttgaaccatttgttcttcatgtgcagtgtcgacaattgcaggatgcacagattctgcattccatggcaatagattctggtttcaggaactctggcataacggtgggaaagagaggaaaaactatgttggctgtccggagtacacatggcttag

SEQ ID NO: 24140 - DNA, 474 bp, Homo sapiens
  misc_feature (1)...(474): n = A,T,C or G
acttgaaacgcctgctggaattcgccatgagcctcatatggaccagtaaccattagggggggcccgcacccaattcacgctatgctgagccttagaagaactcactggcgatgacctgagctcatgctgactgtgaaaactatgttgcctgtggaggcttggacaacatctgctctatatataacttaaagaccagagagggaaatgtgagagtaagccgagagttgccaggtcacacagggtacttgtcctgctgtcgttttttagatgacagccaaattgttacaagttcaggagatacaacttgtgctttatgggacatcgaaactgcccagcagaccaccacattcactgggcattctggagatgtgatgagtctttctttgagtcctgacatgaggacttttgtttctggtgcttgtgatgcctcttccaaattatgggatattcgagatggaatgtgtagacagtctn

SEQ ID NO: 24141 - DNA, 479 bp, Homo sapiens
  misc_feature (1)...(479): n = A,T,C or G
aattcancggctgcatgaattcggcacgaggatacggaggcagggttgtggttgctggctgttaccaggacaaccggaggcgattgaccgttatctgcggtttggagccgttagcgggagaggcagagatattcagaggtcttttaggatgtgctaaagggtcgtgagggctctcttaaaattttcttcacaagcggttatccagtcgtgccccgcggccctgctgctggccccggggatctgagtcgtaccctcttgtttttctctgagtcagtcttaaggtgaaatgaagtgtggcccagtggctcctcactgtcgcttctctagttttctgcctccttttagaaaattgaattgaaaagacaggatgaagtggacacagcatgtgaagacaattcttntcagaagtttggctgtcaaggaaaacagagaatgtgctaaagaacatacagacacagagcagacaggccacctttgca

SEQ ID NO: 24142 - DNA, 505 bp, Homo sapiens
  misc_feature (1)...(505): n = A,T,C or G
gcgcgccnnnnnaaattgatcgattgtagcgcttgcggattcggcacgaggccattattccaagcaaaataagagataatcccttcaagttaaattgaaaattttcctgaaaccatacatttcaagtgaaataagtaattctagataggacaatttaaattggataattttaaagtgtctataattgcagtggtttatttgcaaaattcctaaaaggaaaaattttatcactgccatcacagcaggtttcctcatccagatgaggaaactagacaaatgctagtgtgttttaactagctaaacaaaactaagttaaatgaacatttaaaagtttccctagcgggccattccttagcaaaatgttggaatccctgttgctacattgactaaaaggtcatgatgaatggaatatgtaagacttggctcatagaaacctaatcagatggttagaggtgttggcagcttaggacctgctgtcatacatgtgtgaacaaccttttgtaac

SEQ ID NO: 24143 - DNA, 454 bp, Homo sapiens
agagtaacatgagtgctctgacgaattccgcacgagaataactgtggcatcgagatatactaccaaacagacatgcaaagcacctcagagaatatgtttctggagctcttctgtcagattatctcggaaccttgcttcaacaccctgcgcaccaaggagcagttgggctatatcgtcttcagcgggccacgtcgagctaatggcatacagggcttgagattcatcatccagtcagaaaagccacctcactacctagaaagcagagtggaagctttcttaattaccatggaaaagtccatagaggacatgacagaagaggccttccaaaaacacattcaggcattagcaattcgtcgactagacaaaccaaagaagctatctgctgagtgtgctaaatactggggagaaatcatctcccagcaatataattttgacagagataacactgaggttg

SEQ ID NO: 24144 - DNA, 467 bp, Homo sapiens
catcgacccccattgaccgtatgtcagacgaagctgtccatgaggacatccgcgtgctctctgaggacgccatccgcactgccacagagaagccgctgggggagctatggaagtgacccaaggctgcccactggagacgcctctccctgcagtcccccgagaggtgggagactcgcggaaggccccgtccccagcagagtccagaccccacaacttcaggagctctttcccggcagcagagatctgcaggctgcctcttctgccccggagctggggtgcactggggacccccgtggtggggaccttggcagtgtggacatgagcagagcgatggagcagactcctgccctctcccctgtcctgatggcactctgttgtattttcttactgaagttcagtgataactctgagcagtttcattgtgatcactgtaaatggtaatcagttggaattctcctaaatgtctt

SEQ ID NO: 24145 - DNA, 257 bp, Homo sapiens
gtttgaaaagccctttttgatccgccctgcaggaattcggcacgagggaaaatgatcagaaaaagaaagaagccaaagagaaaggtacctgggttcaactaaagcgccagcctgctccacccagagaagcacactttgtgagaaccaatgggaaggagcctgagctgctggaacctatttcctatgaattcatggcataataggtgttaaaaaaaaaaataaaggacctctgggctacaaaaaagaaaaaaacggca

SEQ ID NO: 24146 - DNA, 496 bp, Homo sapiens
  misc_feature (1)...(496): n = A,T,C or G
gccgtgtggaattngccacgagcanannnnaattgctccgcctgcaggaattcggcacgaggtaatgcccacgcaagagaacaacaccttccaaaagtcctcatgggggacagagagaaagacctggtgagagatcccgggagaaaccacaggatgagaggtcggcgaaagaacattctgagggggtgcttcctcagcaaggctgcccctttggacacacacccccagaacatcaggaagtcagcaacctgttttgaaagactagggaagactcctcttgcagaaaacatcatgcaactcactccatactccagcaaagatcctttggtgacatcacagattcccagaaagaggatggcacatgggtctcctttttcctgagtaactgggggagtggggtgggtagaatacgcatgtttacaatagaaatatgtgggctgtagaaaacaaaaaaataaatcaagaagggcttgtaactgtcacacagaatcaaccc

SEQ ID NO: 24147 - DNA, 523 bp, Homo sapiens
  misc_feature (1)...(523): n = A,T,C or G
agagcccgaggcncccccnaatttggcnccccttctttttgcccgcgctgcaggaattcggcacgaggaaagattaaaagcgtcagaaaattctgaaagtgaatacagtaggtcagaaataactctagtaggcataagtaagaaaagtgcagagcattttaagagaaaatttgccaaatcaaaccaagtgtctaggtcagtgtctagttcagtgcaggtgtgtcctgaagttggaaagagaaacttacttaaagttttgaaggagactttgattgagtggaagacagaagaaacattgaggtttttgtatggccagaattatgcttctgtgtgtctgaaacccgaagcctctctggttaaagaagaacttgatgaagatgacataatctcagatccagatagtcatttccctgcctggagggaatctcagaacagcttggatgagtctttaccttttaggggctcaggtacagccattanaccactgccaagttacgagaatttgaananagaaactganagg

SEQ ID NO: 24148 - DNA, 504 bp, Homo sapiens
  misc_feature (1)...(504): n = A,T,C or G
cgggtgagggccccccccnttttgacggccgtattcgcccggctgcaggaattcggcacgagcggngagggagggtatcacacttttagcacttgtttgactgtctcctggttgcaggaggaccagtatgatcatttggatgctgctgacatgacaaaggtagaaaaaagcacaaatgaagcaatggagtggatgaataacaagctaaatctgcagaacaagcagagtttgaccatggatccagttgtcaagtcaaaagagattgaagctaaaattaaggagctgacaagtacttgtagccctataatttcaaagcccaaacccaaagtggaacctccaaaagaggaacaaaaaaatgcagagcagaatggaccagtggatggacaaggagacaacccaggcccccaggctgctgagcagggtacagacacagctgtgccttcggattcagacaagaagcttcctgaaatggacattgattgattccaacacttgtttctattn

SEQ ID NO: 24149 - DNA, 491 bp, Homo sapiens
  misc_feature (1)...(491): n = A,T,C or G
ggggnttnnnnnnnttggcccgtctgcaggaattcggcacgagaaaaggcttgccaatctatttatcctctccatgatgtcttcgttagaaaagtaaaaatgctgaagaagcccaagtttgaattgggaaagctcatggagcttcatggtgaaggcagtagttctggaaaagccactggggacgagacaggtgctaaagttgaacgagctgatggatatgaaccaccagtccaagaatctgtttaaagttcagacttcaaatagtggcaaataaaaagtgctatttgtgaaaaaaaaaaaaaaaaaaaaaaaaaaaccctggggggggggccgggcccccatttccccttatgggggggggtttaaaattcccggggcgggggttttaaaacgcggggggggggggagacagnnnnnnnnnnncggggcttgtnntgttntnnntttnaannngtctttcaagaatnnnccccttcccttggccccttggt

SEQ ID NO: 24150 - DNA, 495 bp, Homo sapiens
  misc_feature (1)...(495): n = A,T,C or G
ggggcaggggnncccccnattcgacggctgtgtagttcggccgagggaatttaaatgttgggaatcaaatccaaaaattcaagatttcatgaggcaaaaaggctttggcacagattttaagaaactagaatctttctacattcaaaaggttttggatattattgcaaccataaacaagggatccattgtctggcaggaggtttttgatgataaagcaaagcttgcgccgggcacaatagttgaagtatggaaagacagcgcatatcctgaggaactcagtagagtcacagcatctggcttccctgtaatcctttctgctccttggtacttagatttgattagctatggacaagattggaggaaatactataaagtggaacctcttgattttggcggtactcagaaacagaaacaacttttcattggtggagaagcttgtctatggggagaatatgtggatgcaactaacctcactccaagattatggcctcgggn

SEQ ID NO: 24151 - DNA, 498 bp, Homo sapiens
  misc_feature (1)...(498): n = A,T,C or G
tggaggtcanannanttagggcgttcgcaccgcctgcaggaattcggcacgagccaagacctgccaggcgacgagctcaccgttgtgcgtggcaaggacgactgtggccacgtgcacaataagggacagatgggggcacagtgggctgggcgcccctgcataacatgaaccttacgctcctggctgccacaggggcctccgatgctggcctttgcgcctctacaggcagccactcatggattcaagacctggctccgcctcttccatcaggaccactattaatccataggagtcctgggggcgcaaagggtgcccctctgtcaacacccttggctcctgtgtttataggggcggcctgaaggaccttttctgctgggacaagacactgtactgtcctctgctgggaaggggttttaataaacagaccctggcgcttgtgatgttcaaaacaaaaagcaaaccaagggggggggcgggtccgccttctcctctaatgag

SEQ ID NO: 24152 - DNA, 478 bp, Homo sapiens
  misc_feature (1)...(478): n = A,T,C or G
attgaccngcgctgcaggaattcggtgcgagacaatctgatgatatgtttgctgcgtattttgatagtgctcgtcttcgggccgctggcattggaaaagatttcacagagaatcccaacctcagagataactggaccgatgcagaaggctattatcgtgtgaacataggtgaagtcctagataaacgttacaatgtgtatggctacactgggcaaggtgtattcagtaatgttgtacgagccagagataatgcaagagccaaccaagaagtggctgtaaagatcatcagaaacaatgagctcatgcaaaagactggtttaaaagaattagagttcttgannnnnttaatgatgctgatcctgatgacaaatttcattgtctgagactcttcaggcacttctatcacaagcagcatctttgtctggtattcgagcctctcagcatgaacttacgagagggtgtaaaaaaatatggtaaa

SEQ ID NO: 24153 - DNA, 472 bp, Homo sapiens
cttgatcgccttcggatgtctttcgcatggaaatctgcgtgctgggcatggagagtgtgaagcatgcagatgccaatgcttcagtggctgttatggtgatcgatgccagtgcccttcagcagcagcccagcactgtgtcaattcatagggccaagtgtgcagcggaagaggcacgtgtgagtgtggaaggtgtgagtgcaccgatcccacgagcatcggccgattctgtgaacactgtcccacctgttatacagcctgcataggaaaactggaattgtatgcaatgccttcaccctcacaatttgtctcaagctatacttgatcagtgcaaaacctcatgtgctctcatgggacaacagcattatgtcgaccaaacttcagaatgtttctccaggccaagctacttgagaatatttttcatcattttcatagatacattcttgatcgggctgcttaaagtcctgatcattag

SEQ ID NO: 24154 - DNA, 500 bp, Homo sapiens
  misc_feature (1)...(500): n = A,T,C or G
aggctggagcggnnnnnnnnnnaattgatcgactgaacgacctgaggagagcgcacgagagacactgaggcttcgcccttataggagtcaggagcaggcgatcgaagtaattctgttctgcggtgttcagcatcatgcacgttccccctgggccattctctgatgcatggcacttgctccacactctgggaacccagattcaccagtctgccctgtcacgtagttgaaggagccgcatttatctttctggctcctaattcctttaaaattacatttgttgcagaacctccacaaggctaaataaaattacatttgtgaccatcagagaactgaataaaccattaactggccatcctggtttcgcagagatcaagttgttgacagttcctggttgacccacagctacccatgtcagttatgtgcactaacatatccaagaatctttgtaggacaatttctccacctgcaaggtctttcaggtagaactctttttttaaaga

SEQ ID NO: 24155 - DNA, 465 bp, Homo sapiens
  misc_feature (1)...(465): n = A,T,C or G
gtggcngnnnnaaattgacttcatgcgccatttcgcgacgacgagatctatggaaaagagcttaagaaaggccatgtgaagacacggtgagaagacggccatctgaatgtcaggaggagtatcctcttgagaactgaatcaagctagtactttgatcttggacttccagcctccagaactgcagtgttggtctgcaagcttcaagagccagtgaccctgactgccaagtgatttgccgaagggaattatggttttgcatttgatggtttccaggaactgctaagagtgagatcatccctgaagcagtgactgccagaggaaggcgagagacatatggtggccttacaggagaagaacatgtctcagagagctcctactcctccagttttggccccagaatgaaacacaggaagaagacctgaatttgatttgcatttcaaagtagaactgtcccagctgacatga

SEQ ID NO: 24156 - DNA, 502 bp, Homo sapiens
  misc_feature (1)...(502): n = A,T,C or G
cggcgaggacnccccccaatttgacggccgtattagatcggctcgagggaatcgacacgagcagcaaatgaatggcaagctgacagattctactgctgataccttcctctcttggacagagtgggaaccgacagccactctacccattggcagctgacgacgcaaacacgctctacagaggcctgctgataaagggctcagccttgccgtgtgctgcttctcatcactgcacacaagtgccatgctttgccaccaccaccaagcacatctgtgatcctgaagggcggccgttagtcgttactgctgacttctgggtcaccagcagacacactgggcatggacccctcaaagcaggcacacccaaaacacaagtctgtggctagaacctgatgtggtgtttaaaagagaagaaacactgaagatgtcctgaggagaaaagctggacatatactgggcatcacacttatcttatggcttggcataatcattgtagagtgtgggn

SEQ ID NO: 24157 - DNA, 470 bp, Homo sapiens
  misc_feature (1)...(470): n = A,T,C or G
cggggannnnnnnatttgaaatcgatccgcgctgcaggaattcggcacgaggttgggtgtggagtttcccagcgcccctcgggtccgaccctttgagcgttctgctccggcgccagcctacctcgctcctcggcgccatgaccacaaccaccaccttcaagggagtcgaccccaacagcaggaatagctcccgagttttgcggcctccaggtggtggatccaatttttcattaggttttgatgaaccaacagaacaacctgtgaggaagaacaaaatggcctctaatatctttgggacacctgaagaaaatcaagcttcttgggccaagtcagcaggtgccaagtctagtggtggcagggaagacttggagtcatctggactgcagagaaggaactcctctgaagcaagctccggagacttcttagatctgaagggagaaggtgatattcatgaaaatgtggacacagan

SEQ ID NO: 24158 - DNA, 420 bp, Homo sapiens
  misc_feature (1)...(420): n = A,T,C or G
aggtagacccgcccttttganccgcgctgcaggaattcggcacgaggtgaacacttgggatttttctcctctgtcccgaggtcgtcgtctgctttcttttttgggtttctttctagaagattgagaagtgcatatgacaggctgagagcacctccccaaacacacaagctctcagccacaggcagcttctccacagccccagcttcgcacaggctcctggagggctgcctgggggaggcagacatgggagtgcttttataaattattttccttgtagattttatttttaatttatctctgtgacctgccagggagaggggagagagagagagatgctgttgagcacatgacaaaataaaataaaatggatgattcattcttaaaaaaaaaaaaaaaaaaaactcgggggggggccggtgc

SEQ ID NO: 24159 - DNA, 443 bp, Homo sapiens
  misc_feature (1)...(443): n = A,T,C or G
nattgacctcgctgcgcgattcggcacgagctgttgtaccacgagaagataaaaactagtcgagtattcatccgagactgcagcatggtgtctgtgtacccgctggtcttgtttggaggaggccaagtgaatgtgcagcttcaaagaggagagttcgttgtctccctggatgatggttggatccgttttgtagctgcttcccatcaggtggctgaactggtaaaggagcttcgttgcgaacttgatcagcttcttccgggataaaattaaaaacccaagcattgatctgtgtacgtgtcctcgaggatcccggatcatcagcacaattgtgaaacttgtcaccacacaataaaaagcagtcttagagagtgcttgctactcacctgcttctagctcacctgggaaataacagcagaacctctacctcgaactaaagacctatt

SEQ ID NO: 24160 - DNA, 502 bp, Homo sapiens
  misc_feature (1)...(502): n = A,T,C or G
tgtgcgcgggacncccccccaaattgatcggctgtattagtacggcactaggagggaggccgaggagacgcagagcacactgcaggccgagtgtgaccagtaccgcagcatcctggcggagacggagggcatgctcagagacctgcanaagagcgtggaggaggaggagcaggtgtggagggccaaggtgggcgccgcagaggaggagctccagaagtcccgggtcacagtgaagcatctcgaagagattgtagagaagctaaaaggagaacttgaaagttcggaccacgtgagggagcacacgttgcatttggaggcagagctggaaaagcacatggcggccgccagcgccgagtgccagaactacgccaaggaggtggcagggctgaggcaacttctcctagaatctcaatctcagctcgatgccgccaagagcgaagcccataaacagagcgatgagcttgccctggtcaggcagcagttgagtgaaatgaagagccac

SEQ ID NO: 24161 - DNA, 465 bp, Homo sapiens
  misc_feature (1)...(465): n = A,T,C or G
gtgggtnannnaaattgacttcgatgcgcgattcgcgacgaggtcacctgtactcatgaccacctttagaagtaaatggggttacaatctgctggctgaaaaataggtcataagcgatttttcttgaggttagtagcaaacataggcagaactagaattagaattccggtatctagggctgtttctttaagtcctaaggttgttaaaagcagagactctggagctagactacctgaatctaaatctcagcctttctgcttatcagccatgtcattttcttccatttgtacaaagcaggcaatactgagcaactaccttataggaataactgagttaatatctaaggggctttcagcagtacctgaaatatagtaagtgttacatatatgattactctttttattttatttggaattgtgaactgataataattgaagcctacctgctagtggccatctctgctgg

SEQ ID NO: 24162 - DNA, 494 bp, Homo sapiens
  misc_feature (1)...(494): n = A,T,C or G
gtagaccgcctgtggattccgcacgagtccatagtttattgttagtatgaacacaactgtaacatttacctggtatctacatccttacctgcattggaaaatgtttgctacctcacaacaaccatttgcctcctttaagaacactgatgggctgcactttttggatagaaatagaatttgatttcagaatgtatgcttggtgagtctcagtgcccaggaacacttttggaataatttatcagacattgaacttctgtgattaatcgcttttatagatttactcagtctttaaaattcgtctctgatttgccagagaaaaacggtggtagccatggaaatcgggagtgaaggagcactgcttcattgtggctcagcccttcctaggggcctctgccctttgatgtccttgagctactcttcagctctggaagttgtggacanaccgtangaatgtatgtgtgcgtgtggtggagtgattagctgtgaatgacagg

SEQ ID NO: 24163 - DNA, 459 bp, Homo sapiens
  misc_feature (1)...(459): n = A,T,C or G
natagaaccgctctgaagacttcggcacgagaacttctccagacagaggtgttagcagtgtaggatcagatttctcaaccacgtcactcccatgtctgggtagatatctctgcccaagtgttctcatagcacttgagcagtactctctaagcgcccaggatctaccatgttgcttttttaaaatttgattaatttatttttttatactgctccttgtggagcaggagtgttcccagagtagcccaccatgttatattgaaatggatctgtgtgcataatgcagctgtccatctacatcgtatatttttgtctcctcaagggtagggaccacatgagccttattcttggggctttgatctctacatgatgcagacttacatctattactgtaacccaagtctgcatgagggcagaatccagaaggaaaaggaatcccatggctgtgacttgccctgttat

SEQ ID NO: 24164 - DNA, 471 bp, Homo sapiens
attgaccgcctgctgaattccgacgagccccttacggcgccggagagatggcggagttggacatcgggcagcactgccaggtggagcattgccggcagcgagattttcttccatttgtgtgtgatgattgttcaggaatattttggtgactgtaatcaatgagagactgaagacagatcaacatacatcttacccatgctctttcaaagactgtgctgagagagaacttgtggcagttatatgtccttattgtgagaagaatttttgcctgagacaccgtcatcagtcagatcatgagtgtgaaaaactggaaatcccaaagcctcgaatggctgccactcagaaacttgttaaagacattattgattccaagacaggagaaacagcaagtaaacgatggaaaggtgccaaaaatagtgaaacagctgcaaaggttgcattgatgaaattaaagatgcatgctgatggcga

SEQ ID NO: 24165 - DNA, 495 bp, Homo sapiens
  misc_feature (1)...(495): n = A,T,C or G
agaggcagggnnnnnnnnaatagatcggtagtaggaacttgcacgaggggaaaccgggagtcgggcaggtggcgtaacccagaaagggaaggagagccggattgattggggtgagagaggaaggaagcacgccaagttaggcctgggagaactgagggacctgatgagggaggagggagaccaacacagggtgggaaggcggaaatggccaaaccccaggcatcaggtctgtccagaggctgacgtagacagtgaagggtgaagggtaggttttaggagtagggggagttatgattatttggttacattttgggattatttggtctcacaggtagaaaggagcctgctggtctctgtgtaacggatggcttaaaagcaaggttgtctgcgtcttggattactgtctgccattcagcctttgccaaaaaatttggcactgatctgcacatttttatagtcatttaaaattgtatgactctgtcatatgatttaagt

SEQ ID NO: 24166 - DNA, 470 bp, Homo sapiens
  misc_feature (1)...(470): n = A,T,C or G
attgagcgcatgcgganngaacattatcatgcggttcaagagaagatctggtctgtgttggagtccccaaggggtgtttggatgcaagctgaaatcacctttaagaagcccatgcctaccaaggtggttttcatgagcctatgcaaaagtttctgggactgtgggcttgtagccctggatgacattacaatacaattgggaagctgctcatcttcagagaaacttccacctccacctggagagtgtactttcgagcaagatgaatgtacatttactcaggagaaaagaaaccggagcagctggcacaggaggaggggagaaactcccacttcctacacaggaccaaagggagatcacactactggggtaggctactacatgtacattgaggcctcccatatggtgtatggacaaaaagcacgcctcttgtccaggcctctgcgaggagtctctggaaaacactgcttgan

SEQ ID NO: 24167 - DNA, 478 bp, Homo sapiens
  misc_feature (1)...(478): n = A,T,C or G
gttgaanaccanacttgcaccgcgctgcaggaattcggcacgaggaccgctcctctgccaacctgctcctgggaggaggcatggtgctggcagtggctggcggccacctcggccctgagggccgctctgtggctggtcaggcaatgctgttggtggtcgcagtgaccatcctcattgtagctgtcttcacggccaacacttatgggatgtgggggggggcgatgctgggtgtggcaggcctcctgagccggctggaggaggacaggctgctgctgctaccgaaggaggatgtctgtcgctgggccttggctgtaggcagctgggcttactgccgggccctgcatacacagcgcctccagtgggagtgacagttggatacagccaggcagggtttctgccctgccgaacactttccctcccacctgcctgctcctggcgccttctccctaggggtagactcttctgcctactgaagtgg

SEQ ID NO: 24168 - DNA, 343 bp, Homo sapiens
gccgtacactcgtacgtgactgggactgcaaaaacaggggttatcttgttaaactaaaggaccatttttttttccaatcccatgatggacaaaagggtttatgcaacccatggaaggccccaaaggggaagggatttttggccttaaaatatacaaaaaattgcctactttgaaaaaaaaatagccatccttgaaaaaaaatagttaagggtttctgccttgggttcctgaccccctacaaatttcaccatatacaaaaagtttcaattcctaccattcttttaaagggacccacgtcaaacaaaatcaagttaggaaaagccctgtttttatccaagaaggg

SEQ ID NO: 24169 - DNA, 501 bp, Homo sapiens
  misc_feature (1)...(501): n = A,T,C or G
tggcnnnnnnaattgancgtttgcangacctgcacgaattcggcacgaggcctcatctcctcctcaactcagagtggggcctatgtggtcactcccttccactgcaccgacctgggagtcaccatcctggtaaatagagggttcgttcccaggaagaaagtgaatcctgaaacccggcagaaaggccagattgagggagaagtggacctcattgggatggtgaggctgacagaaaccaggcagccttttgtccctgagaacaatccagaaaggaaccactggcattatcgagacctggaagctatggccagaatcacaggcgcagagcccatcttcattgatgccaacttccagagcacagtccctggaggacccattggagggcaaaccagagttactctgaggaacgagcatctgcagtacatcgtgacctggtatggactctctgcagctacatcctacctgtggtttaagaaattcctacgtgggacacctggtgtg

SEQ ID NO: 24170 - DNA, 408 bp, Homo sapiens
  misc_feature (1)...(408): n = A,T,C or G
cgaattccgcacgagaatttatgaagcctcgtgcaacatggtgctttctcaccgaggtcatatgcctggctgctgctgttccactcagctccatgagccacgtttgttattttatgtttcttctgtgcttttgctcatttccacccatgtgtttatagaccttttttcagccctttttctttgttcctttccctcatctttttgcctcaggtagaatccatcagttttcctccccctccaaatgactgtgtacctccagctgctcaggactttggaggtgggggcggggcctggggatctacccttctaaaaaactctccaagtaattctgataccaataaagtgggagacctccatttttgaggcctatttgcaaaaaaanaaaaaaaaaaaacaaaaaaaaaaccc

SEQ ID NO: 24171 - DNA, 468 bp, Homo sapiens
  misc_feature (1)...(468): n = A,T,C or G
cgtggtcgannnnaaattgactttcatgcgcgaattccgcacgagggactctgcaggggtgtccttgtccactcgcacccctcgccgcccaccagggccatgctctgtgacttgggctgatccccaccctttctgggcctacagcaccacaggccgctgtacccccttagagctgcccctctctggcctggccggcagacgtcttcttaactcctctgtcctctatattcagcatgttccttgtcagctgctgggccggccctgccttgcgctagcagagcctctcctggcagcttctcaggtctccctaatggagacaccaggctactaggacactggctggggccaccccctcctgcctaatgcctcaccttacagctggggaaactgaggcctggaatggcccagagtcaccaaggcaaagttggggctggtcccagcctgaggctccagctgatgccctcagct

SEQ ID NO: 24172 - DNA, 478 bp, Homo sapiens
  misc_feature (1)...(478): n = A,T,C or G
gggacngnattganncccttgaggaactctgcacgaggaaatgggctgctggccagaacaaacaacattctattaccaagaacacggccaagctggaccgggagacagaggagctgcaccatgacagggtgaccctggaggtgggcaaggtgatccagcaaggtcggcagagcaaggggcttacgcagaaggacctggccacgaaaatcaatgagaagccacaggtgatcgcggactatgagagcggacgggccatacccaataaccaggtgcttggcaaaatcgagcgggccattggtgagtgtccctccacccttcgccgggtccgctgaacagggaggctacccgctcccagctggggttggtgagagtgggactcgggggaagaagatggccctgggggtcccctgttctctgaattctggagctntgcttctccaggtagtacagactgagggatggtggggtctctgcaggg

SEQ ID NO: 24173 - DNA, 380 bp, Homo sapiens
  misc_feature (1)...(380): n = A,T,C or G
ggggaggaggaggggnnnnnnnntttgatcgtctgtagacttcggacgagcccttttgnggataatgtcccagagtccccccactagacacaggtcactgccaagcatcagggccactcgggctcagaggtcactcagggtcaatactcagggtcagtgcaggttatgagatccttggggtccaccctagtctctgacacctgggacaggggtgcttttgctactttggttgtggtcactcccccacacctgcctgcctccttcacggactcgaagtgaccttcctggaggaggtgggcagctcaaactccacatgctggtggtgcctgaggtctgatggcctctaataaactgtgtcctataaaaaaaaaaaaaaaaaa

SEQ ID NO: 24174 - DNA, 503 bp, Homo sapiens
  misc_feature (1)...(503): n = A,T,C or G
ccccccgcgcccccccnnttttgacgctcgcccggctgcaggctttnttagaaatagagatgctttatagtagatcacttaaatactggatcttttgctagtgtgaaaacattgggaatttaatgacattattgagctgaaagaaattacatgagtccagctaccctcatttcttttttatgtgacatggagcacaaagaactgaaaatatgttttgagggagcatgacatccttgacctcatttgaaattacttccattttcaaaaaccatcatgttttgcagatacattttgagaaaaaccatcatgttttgaggatacatttgtgaaagtgcaggcatgccaatgactactcagttttaggacttttgtggaagaaaaaattaaaagggagaagaaatcaattccactacttttgaagttctgcaacagatgagattttgtttcgaaagttttgtagtatattaaccattggagtatcactctagattcaacatattaan

SEQ ID NO: 24175 - DNA, 501 bp, Homo sapiens
  misc_feature (1)...(501): n = A,T,C or G
aggggtttnnnnnnnntttcgcatcgtctgcangaattcggcacgaggtggcgcactgcaaacgcggcaatggtctcatcaaggtgaacgggcggcccctggagatgattgagccgcgcacgctacagtacaagctgctggagccagttctgcttctcggcaaggagcgatttgctggtgtagacatccgtgtccgtgtaaagggtggtggtcacgtggcccagatttatgctatccgtcagtccatctccaaagccctggtggcctattaccagaaatatgtggatgaggcttccaagaaggagatcaaagacatcctcatccagtatgaccggaccctgctggtagctgaccctcgtcgctgcgagtccaaaaagttntgaggtcctggtgcccgcgctcgctaccagaaatcctaccgataagcccatcgtgactcanaactcacttgtataataaacagtttttgagggaaaaaaaaaaaaaaaaaaaaacctcggg

SEQ ID NO: 24176 - DNA, 492 bp, Homo sapiens
  misc_feature (1)...(492): n = A,T,C or G
ggggnaattgcccgcctgcggatttggcacgacggaatgttgaagccatgggaaactctaaggaggaagacctgaggagatacagggcagaaaaagaatctaaaatattcctggaaatggagagtcctgacatgatggccccatgatgaaaagaacccaggttcctgagtcacgacgtggacatgaggcaccaaggagaaaacacgtgaaccttaataagtttgggattcactgcagattagagtacccagaattagccaagaccttcaacatttaatgactagccatggagaagaaataagatgaactgcttgtcccagaaagcgatagaactttgaaagcagctatatatttcctagctacctctaaaaaatggagctgtcttcatgagacctgtaagaagccaacagttttcctcactgccaccatgtgaagaaggatgtgtttgtttcccttccttcatgattatcaaatggaggttcccatgatttt

SEQ ID NO: 24177 - DNA, 500 bp, Homo sapiens
  misc_feature (1)...(500): n = A,T,C or G
gggggaaattgganngcccgtnggaaattgacccgcctgtangaattcggcacgagagacagtgagagtgagaaagaaagaacatgaggcagggaatactaggaagaaatgcaaggaaatatattcatggattggtcactgtttctggtatttcagagatatagctggttgcttagcaggtgcatccatatggccacatgtgcacaggccatatggagaattatgttttggaacagtttgtgaaagggaagaggtgtgggacattgtcttcccatctcctattacattgatcacagttcaccctacaaggagataacttctgcattgtttcatgcagcttccttggcagttgatctgggagccagatacaatcttcacagtgtggcttcctatcgaagtgcagaagtggctttagaagccagaaactcaaaagtatatggcggctaggcctggatgcaccttggcagaaatggggagtgcctagctcatttgggacagtg

SEQ ID NO: 24178 - DNA, 494 bp, Homo sapiens
  misc_feature (1)...(494): n = A,T,C or G
agcggattttnnnnaatagancgtctgagttcttttgccatgccacgaggtgtgttttattttcattattcatacaaataattttctataatatcccggggcaaaccggagaatttggcagtccgattgggggggggtcccttcatagacccacaggccggtggcatcggcgcggagtgcccaggttcacagtgcagcttgtggctcgtgtccatcttgcaggtggctcttcctccacatcacgactggggtctcgaagaggacgggggtaggaaatcctccaggatcttaggaaatttcactccgcttctcctgctcaatggtctctttggtcggcagggtgttcttctcctgcgtctccgttttcttcagcttggccttatcgaagctggcgatttcccccatgtctggttgtctgccattttcttaaaacaatccgtgcagtctcgttccgagcccgagatcctggtgctccacttcgccctcgaccggtg

SEQ ID NO: 24179 - DNA, 465 bp, Homo sapiens
  misc_feature (1)...(465): n = A,T,C or G
catagaccagcctgtaggaattcggtacgagcttgcttcactggccacagcatctccctccagccctcgctatgtgcctctgccatcttcacccatcatggagcanaggtgaggagaggcagcctgggaatatggagaccagtgaaggaccaggcctggagagcacagggtcctacctgggcatccagcagaggagcccctaaaggccaggagcaccccaagaggagggagggcagccagcctccattgacggcgagcctccagccctctcctactttgatcaccatttctctccaggctttctgcctccgagatgtggcaccatagtgcggtgccctgtggcttcaccgccctacttccacctccgcccagcctgtaatgtttatataagcagcctcaaggaccaagaaccatctgcgaaaggacacacacaggaaattcataaaagaaatctgaatggataaa

SEQ ID NO: 24180 - DNA, 408 bp, Homo sapiens
ggaattcggcacgagggattaagaggttactgcaaagcccctgccctttctgtgattctcctgtcttctaaataatcagtgacgggaagatggaagggcatgatgaactctgccatagaaaacttcctccagcctgaagagaaggatgcactggaggaagccggaccctcacgagtggagagaagtccttggtgattgtaaagagggcccctggagctcatttctgaatcgcactctccatttccagagactaaaggatgtcctttgaaatggctggactcagagagttggagtcgttttgagatgagcattagccccagctttgtaaccaatgaggaacacttacttatttttaagtatcttgacagaagcaatttgaacacagtgtcccgtcatttctagaaacag

SEQ ID NO: 24181 - DNA, 452 bp, Homo sapiens
  misc_feature (1)...(452): n = A,T,C or G
gcatgcgccccnccattgcccgccatgaggaatctctcacgagcaccttcagaagtcgacctgtggcaaatgtggctaccctgccaagcgcaagagaaagtataactggagtgccaaggctaaaagacgaaataccaccggaactggtcgaatgaggcacctaaaaattgtataccgcagattcaggcatggattccgtgaaggaacaacacctaaacccaagagggcagctgttgcagcatccagttcatcttaagaatgtcaacgattagtcatgcaataaatgttctggttttaaaaaataanaaaaaacaaaaaaaaaaaccccccttttaaattttttaaaggcatctttttaagggaaaaagtggatcataaatttggaaaccaaaggggaatttttcaggtttttggaaaaaaaaaaaagcctccttaccaccacccttttggtc

SEQ ID NO: 24182 - DNA, 489 bp, Homo sapiens
  misc_feature (1)...(489): n = A,T,C or G
cggggnnnnaagggagggccnnnnnncttgannttactgatcccgcctgcaggattcggcacgagcgccgcttgtgctgcagccatgtctctagtgatccctgaaaagttccagcatattttgcgagtactcaacaccaacatcgatgggcggcggaaaatagcctttgccatcactgccattaagggtgtgggccgaagatatgctcatgtggtgttgaggaaagcagacattgacctcaccaagagggcgggagaactcactgaggatgaggtggaacgtgtgatcaccattatgcagaatccacgccagtacaagatcccagactggttcttgaacagacagaaggatgtaaaggatggaaaatacagccaggtcctagccaatggtctggacaacaagctccgtgaagacctggagcgactgaagaagattcgggcccatagagggctgcgtcacttctggggccttcgtgtccgaggccagcac

SEQ ID NO: 24183 - DNA, 456 bp, Homo sapiens
  misc_feature (1)...(456): n = A,T,C or G
cggggcnccccnaattgacccccaattgaccccgtgctgcaggaattcggcacgagatttggccagcctgtccaagggcatgacaccaagtagacactacagagagagaaacactacagcaacccagggttgtcctgaaacagacttttatacttgaacatggagactgcacatggactttagggtttgtgctgtgggataaacggaagctacagtgagaacatagccagtcccaaagacaatttcaaagaaaaatgacagtaaagattagctgggagtagtctttgacagtgcttatttgatactgtctctcagagtttgcaaaccagattgtacaagtcattagcgtcagatagctttaaagttgtgaccttcttgtacatgaatcttctagccagtttcctttcctttgtaacgaaacatgaaatcctagaatgtatgagaagttcagacatt

SEQ ID NO: 24184 - DNA, 495 bp, Homo sapiens
  misc_feature (1)...(495): n = A,T,C or G
ggagggcnnnnnntttgacgatagaccgcctgcggctgngacagcagatgggcttctgggcgccgttggtgctgagccacagccgccgccagggggtggtgcgcctgcgtctgcgggacttgcaggaggcctttcagcgcaaggggagcgtcccgctggggctggccacggtgctgcaggacctgctgcgtcgaggggagctgcagcgggagtcagacttcatggccagtgtagacagcagctggatctcctggggggttggggtcttcctgctgaagcctctcaagtggactctttctaacatgctgggagataataaggttccagctgaggaggtccttgtcgctgtggagctgttgaaggaaaaggctgaggaggtgtatcgtctgtatcagaactcgcccctctcctcccaccccgtggtggccctgtcagagctcagcaccctctgtgctaactcctgcccagatgagaggaccttctacttggtgtgcn

SEQ ID NO: 24185 - DNA, 490 bp, Homo sapiens
  misc_feature (1)...(490): n = A,T,C or G
agagaaatgagngcctcgganattgaccgcggtgccgaggggcgaattacttgctcttccggacattgaacgccttcataaaaagccaaaatctgacaaagagacaagactagcaactgcaatggctggagagacagaccgaggagaatttgtgaggaagaaaaccaaagtgaatccattttccagttcaaaaagtaaagagaagaaaaaacagaagaactttatgatgatgtggtatagccagaatgtctggtcaaaaaataagcgttccttctgagaaaaacagttggcgctgcgagatgccttttgaaaagagaaaaagaatgaagtaacttcccagaaagttttccattccaagaagaatgctaagtttgtgtcattactctgaaaattggtaaatcaagcatgtttgtttacattaaaaagtccagaagcactatattatgaaaactgctgaaaatgtggcagcaatttggtgttttattttggg

SEQ ID NO: 24186 - DNA, 500 bp, Homo sapiens
  misc_feature (1)...(500): n = A,T,C or G
agaaaaaaaannnnntttccaccgttctgcaggacttcggcacgagctgngcaggagggtggggtctgctgtgggttcagaggactccacctcctggctggtttacctgctgctgcccattttctctgggtactgctggccagaggactttagcctacccctgaagagcctgtccatgtcattttcctactgccatagataccctaagcccagggccccttgaggcccagactcagcctgcccactggtgccggagacggagtggagtgggcctggatccgagggatgctacctctccctttcccacttgaggaccctggggagagatgggggcggggaaaatggaggtatgaatttggggtaaagagaagtgagatctccgcttgcaggtcagcccctgccttgcagggcgggctggcttgactcangccctgtgagatagagggcccagcccagccccacccacagatcccctgctccctgtgtggtctggtgaaatc

SEQ ID NO: 24187 - DNA, 458 bp, Homo sapiens
  misc_feature (1)...(458): n = A,T,C or G
cttgaacgcctgtggaattcgcacgagcccatattnattgtcaaaccctatttccaagttcaagttaactagctntgaatgtgtcccaaaacagcttcctccatttcctgaaagtttattgatcaaagaaatgttgtcctgggtgtgttttttcaatcttctaaaaaataaaatctggaatcctgcttttttgctctactagtacctctgtcacactagtcttatcaaaaaccagttcttaagatcaatgttaagtttattagttaatgtaaatttctcatcctcgaaaagggtgaacataaatgcctttaaggagtatatctaaaaataaacattangatatctaagtttgatgtaattgtttcaggaaggaaaaaagaaaagcattctggaatgagcctacttcaagtaatcttagtttctaaaactaacagttaatattttcaattccagtatat

SEQ ID NO: 24188 - DNA, 487 bp, Homo sapiens
  misc_feature (1)...(487): n = A,T,C or G
tgggggtnnaaggnngnnnnnnnnttttgccccgctgtacgacgtctgcacgagatcgacaagagcgcgggtcaacccggccgaggccgtccaggtcctgcgctactgctgcctcctggcccacagcatctccagtcaggtgtctgccagcgacattggcgtcatcacgccctaccggaagcaggtggagaaaatcagaattcttttgcgtaatgttgatatggtggatataaaggttggatcagtagaggagtttcaaggacaagagtatctggtcatcatcatttcgaccgtacggtcaaatgaagatagatttgaagatgatcgatatttttttgggtttcttgtccaactcaaaaagatttaatgttgcaatcaccagacccaaagctttgctgatagtgctgggaaacccccatgttctcgttcgagacccctgttttggtgctttgctggaatacagtattacaaacggtgtttacatggg

SEQ ID NO: 24189 - DNA, 466 bp, Homo sapiens
cctcgaccccccttagacccgcgtgcggaattcggcacgagaagattctagttctaaatttgttataagcccctacagcgttagcgcaagaaacaaccttatagataatcttttccacttcccaccacacctctttgacagatggcacttagctccaagttcaggaccaacctaatttctcctttcacttcaagtctagatatattttctccaggctgccagagtcaagagatctttataaatgagctaaattttctttctcatcaaagatgtgattgtacaggttgagtatccctaatccaaaaatccagaatgctcggaaatccaaaactttatgagcgccaacatgacaccacaagtgaaaaattccacacttggcacctttgctttttgatggttggttcatgtacacaaactttgtttcatgcacaaaattattaaaaatattgtataaaattatcttcag

SEQ ID NO: 24190 - DNA, 452 bp, Homo sapiens
  misc_feature (1)...(452): n = A,T,C or G
ggatgcggaannnnnnattgacccgccttaggaatccggcacgagggcaaaggtgaagcaggacatgcctccgccggggggctatgggcccatcgactacaaacggaacttgccgcgtcgaggactgtcgggctacagcatgctggccatagggattggaaccctgatctacgggcactggagcataatgaagtggaaccgtgagcgcaggcgcctacaaatcgaggacttcgaggctcgcatcgcgctgttgccactgttacaggcagaaaccgaccggaggaccttgcagatgcttcgggagaacctggaggaggaggccatcatcatgaaggacgtgcccgactggaaggtgggggagtctgtgttccacacaacccgctgggtgccccccttgatcggggagctgtacgggctgcgcaccacagaggaggctctccatgccagccacg

SEQ ID NO: 24191 - DNA, 461 bp, Homo sapiens
cctagaccgcccttaggaattcggtacgagcacctgcctagcctcccaagtgctgtgattacaggcatgagccactgtacctggctgtaaacataatttatctactggaaaaccaaaaaatttgtttgactagctttattgcagtacttgctttattgtggtggtcttgaaccagagccttcagtaactcccaagttgtgcctgtatgcaagtcactggtttttaatatattcagagttgtaccaccatcaccacagttaactatagaacatttttatcaccctcataccacgaacccaaaagagattgattagcagccattccccatcttccctgaacctcttcagtcctaggcaagcattactctgctttttgtttctgtagatattctggacatttcttataaatggaataacacgataagtgatttttttgtgactggctgcttttacttagcctgg

SEQ ID NO: 24192 - DNA, 470 bp, Homo sapiens
  misc_feature (1)...(470): n = A,T,C or G
cgccccccccccattgcnccgcgctgcatgaattcggcacgaggtgaacccaccttcatgaatagcactgtgttccatgtgcctgatgtggctgacatggactgctggcctgtgagccctgagtttggccaccgttgtgcccttgggggtcaggggcttgaggtttacaactggtatgactgaggtatcctgcggtggctggcgtgctgggcatggggcctgctcacagacagcatggagcagggatgggctgtctgtgcccatgctcagcatgccttgaggggaggaggtggtggccgtgggttcctgatgtcggtgcaggagctgaaggtgagtggagtgctgccaagaatatgcccgactccccatgacaagacagaactttgtaacaaacagtaccaatttattttggcccggggtttttgctttttttccagttgatgactttgtgaacattcccaggtattgga

SEQ ID NO: 24193 - DNA, 500 bp, Homo sapiens
  misc_feature (1)...(500): n = A,T,C or G
ggggggcaaatgctcggctgtggtattcggcacgagaatgccctatacttgagtcttacttagatgctgtggtaatgcaccattttagaagatgaatgatactgctatttctcttcagggaaacaataatggataaagaaatgtaactgccgggcagcaaagcttctaagtgaaacctgtagtagcagtagtagtagggagaaaatgtgtagtcatcaagtgaaaataggaaaggatctatgatttatgatgtcttaatagaccctaaattgttctttaattacaagagtggcagtctctgaagtcatttgtgagcttgtatgacttttgtatttagcaatgttgcatgctcacataattgaaaattaaaagtaacacatttttctgagnaaaaaaaaaaaaaaaaaaaaaaaaaaaaaaaaaaaaaantcttggggggggggcccggcccccaattcccccttaaggggggggttttaaaattccgggggcggggttta

SEQ ID NO: 24194 - DNA, 492 bp, Homo sapiens
  misc_feature (1)...(492): n = A,T,C or G
ggggaaattgtcgcctgtagatactgcaccgcctgtcangaattcggcacgagccagcctgggactggccagagctgggcccaagctgcgctggaatcgcagcaggagaggggagtgggctggttcttcccaccacttcccaggctctgacagccgagactcatttccaaggcacagcagctttctaaagggactgagtttggactgggttttggacctccaggggctggagcttcatcacctgggcagtgtcttttctcagagagcaggtttctttatagtttggaaataaatggttcacggtccnaaaaaaaaaaaaaaaaaaaaaacttggggggggggccgggcccccatttccccttatgggggggggtataaaaatcccgggcccggggttttacacgggggggaggggggaaaaatnnngnnnngnnnnttnntgggggtgcctgtccccgggggcggctgggccccgccccnccnggggggggg

SEQ ID NO: 24195 - DNA, 492 bp, Homo sapiens
  misc_feature (1)...(492): n = A,T,C or G
ggaggtcccnaaagtagnnnnnttctgatnnccntgtctgcccgcgctgcaggattcggcacgagaagaagttataccatggagagtactttatgtggctgtgatcagggaaaatacaagggtttacagattggtacccgagaactggaagagatgggagcaaaattttgtgttggtcttttacgtttgaaaagactgacctctccattggagtataatctgccttccagcctgcttgactttgaaaatgatttaattgaatcaagctgcaaagtaactagccctaccacttatgtcttggatgaagatgaacctcgattccttgaagaagttgattacagtgcagaaagtaatgatgagttagatattgagttggctgaaaatgtaggagattatgaaccttctgctcaagaagaagtactttctgactctgaattatcaagaacatacctaccttgagcccgctgccatctcttgttaactgcaaagaat

SEQ ID NO: 24196 - DNA, 480 bp, Homo sapiens
  misc_feature (1)...(480): n = A,T,C or G
ggggggtttctgancggctgtangaattcggcacgagatttttttggaaacctctgcgccatgagagccaagtggaggaagaagcgaatgcgcaggctgaagcgcaaaagaagaaagatgaggcagaggtccaagtaaaccgctagcttgttgcaccgtggaggccacaggagcagaaacatggaatgccagacgctggggatgctggtacaagttgtgggactgcatgctactgtctagagcttgtctcaatggatctagaacttcatcgccctctgatcgccgatcacctctgagacccaccttgctcataaacaaaatgcccatgttggtcctctgccctggacctgtgacattctggactatttctgtggttatttgtggccgagtgtaacaaccatataataaatcacctcttccgctttttagctgaagattnnnnnnnnnnnnnnnnnnnnnnnnnnnnnaaactgggggggg

SEQ ID NO: 24197 - DNA, 486 bp, Homo sapiens
  misc_feature (1)...(486): n = A,T,C or G
atttgccncggctgcattagtacggcacgagctgacctcaaaccagatgtggaggtgcacgagaggcgcaggaacgggcagtggctgacagctgggaaggccctgagcgtcactgctgctgggcggaagggcctgtggacagcccacccaggcggcggggtcttggtgggtccagtggtaatggtgcccctcccctccattccctgtgggtgcagcccacaggctggcgaggaggtgcctctgccctaccctcgggtctggcgagggagggggcagggtgcatccactgtgacagcccctctgggcccacaactccctgaccctggaagctgagcctgctttcctgaccctccgccccaccccctcctccccagaacactcagagggacggtcaacatcagagcacattaaacgctggtgaaaccaaaaaaaaaaaaaaaaacctcgggggggggcccggcccaaattcccccattgggagtcgag

SEQ ID NO: 24198 - DNA, 461 bp, Homo sapiens
  misc_feature (1)...(461): n = A,T,C or G
aatgngccnccttttgccccgcgctgcaggattcgcacgaggagagagactccatctcanaaaaaaaagaaagaaagaaaggaaaaaaagaaaagaaaagaaccaaagaaatttttcagtaaatacatacaacagcattgatggcctggagacataccaccttcagttgtgatcctggcagatgtgatagattctacaaggttggacaggttaaattcttgcaaggaagtcctttctggaacacccaagaattacagaaagtttagctatctttcaaatgagatttcattctcagttttacttgttccatgacccttccaaactacacacgggattcttttcattcagttgccttggccagcattttatcaccaatagtcctattttatgtaactgagtttgccttgccctttactgcatttaggtaaatggaatgggggtttttagacttccgaaactat

SEQ ID NO: 24199 - DNA, 529 bp, Homo sapiens
  misc_feature (1)...(529): n = A,T,C or G
gaggggnnnnatgtggccnnngnnnnnnnnagnnnaaactgctcggcttgtagganatcggcacgcncttccaccatgccagagacttgggcaactatttatttaactttgcatctgctgccacaaaaaagataactgaatcagttgctgaaacagcacaaacaataaagaaatccgtagaagaaggaaaaatagatggcatcattgacaagacaattataggagattttcacaaggaacagaaaaaatttgatgaagagcaacatacaaagaggtcagaagcagctgtgcccccatgggttgacactaacgatgaacaaacaattcaacaacaaattttggccttatcatctgacaagaggaatttccttcgtgaccctccggctggcgtgcaatttaatttcgactttgatcagatgtaccccgtggccctggtcatgctccaggaggatgagctgctaagcaagatgagatttgccctcgttcctaaacttgtgaaggaagaagtgttctggaggaactactctta

SEQ ID NO: 24200 - DNA, 493 bp, Homo sapiens
  misc_feature (1)...(493): n = A,T,C or G
nggacctgangccgtggatttgatcgccttcggcaagattccaagttctcacctcttaaagaaaacccaccccgtagattcccatcatacacttccttcttttttaaaaaagttgggttttctccattcaggattctgttccttaggattttttccttctgaagtgtttcacgagagcccgggagctgctgccctgcggccccgtctgtggctttcagcctctgggtctgagtcatggccgggtgggcggcacagccttctccactggccggagtcagtgccaggtccttgccctttgtggaaagtcacaggtcacacgaggggccccgtgtcctgcctgtctgaagccaatgctgtctggttgcgccatttttgtgcttttatgtttaattttatgagggccacgggtctgtgttcgactcagcctcagggacgactctgacctcttggccacagaggactcacttgcccacaccgagggcgaccccgtcac

SEQ ID NO: 24201 - DNA, 508 bp, Homo sapiens
  misc_feature (1)...(508): n = A,T,C or G
nggggagggaatggaaaccntattgagcggctgtangaattcggcacgagctgtagtgggtgactcgactgtgagactggattatgacatggacaaatcttattttgcttaatgtgactgtgtgctggtctgcgtgtgtcagcgtgtgagtggatatatatatatatatataaatatctttcccaatatgccccggtgacagtgtttaaattccacactaggactgctgatctgcacaatttaattatgtggttattcgagcacttaatttcactcaaggttcattgggctctgctctcctccctgccattacgggagctgtggacagagctctctcacttcaagattcctagtgtttttgcacaacaggttgtccaagtgagaaagactgagttgcgtgtctgtaaatgtctgcgcagggtgcacatgctgagaggtctacattctgcgggcctgtctctcccagatgggctgggcctttgggccctcctcagagtatgcctgggca

SEQ ID NO: 24202 - DNA, 458 bp, Homo sapiens
  misc_feature (1)...(458): n = A,T,C or G
aatttgccccgctctgcaggaattcggcacgagaagagttcaaagtgttctactgctgggagttccccaaacagcgtaagtgaattgtccctggcttccctcacagagaagatacaaaagatggaagaaaaccaccatagcactgcagaagaactacaggctactctacaagaattatcagaccagcaacaaatggtacaggaattgacagctgaaaatgagaagctggtggatgaaaagacgattttagagacatcctttcatcagcatcgagagagggcagagcagctaagtcaagaaaatgagaagctgatgaatcttttacaagagcgagtaaagaatgaagagcccaccactcaggaaggaaaaattattgaactggagcagaagtgcacaggtattcttgaacagggccgctttgaaagagagaagctactcaacattcagcagcagttgan

SEQ ID NO: 24203 - DNA, 458 bp, Homo sapiens
  misc_feature (1)...(458): n = A,T,C or G
attttgccccgtctcccccgcgctgcaggaattcggcacgagatctgttacagttctgtgcataagaaggatctcaagagtgttgttgccacagagtcacatcagtatgttgttggtgataccattacgatgcagctgatgaagagggagaaaggggtgttggtggctttgcccaaatccaaatggatgaatgtagaccatcccattcatctaggagatgaacagcacagccagtactccaagttgctgctggcctctaaggagcaggtgctgcaccgggtagttctggaggagaaagtagcactagagcagcagctggcagaggagaagcacactcccgagtcctgctttattgaggcagctatccaggagctcaagactcgggaagaggctctgtcgggattggccggaagcataangggggaggtggngntgnggctgctctggaacaactggtg

SEQ ID NO: 24204 - DNA, 462 bp, Homo sapiens
  misc_feature (1)...(462): n = A,T,C or G
natagtaccgcgcttgatgagctctgcacgagcgctctgcaccgtgacctcaagccttccaacctgctgctcaacaccacctgtgatctcaagatctgtgactttggcctggcccgtgttgcagatccagaccatgatcacacagggttcctgacagaatatgtggccacacgttggtacagggctccagaaattatgttgaattccaagggctacaccaagtccattgatatttggtctgtaagctgcattctggcagaaatgctttctaacaggcccatctttccagggaagcattatcttgaccagctgaaccacattttgggtattcttggatccccatcacaagaagacctgaattgtataataaatttaaaagctaggaactatttgctttctcttccacacaaaaataaggtgccatggaacaggctgttcccaaatgctgactccaaagctctg

SEQ ID NO: 24205 - DNA, 458 bp, Homo sapiens
  misc_feature (1)...(458): n = A,T,C or G
nttgcccgcctgtagatgtctgacgaggttgccactactgccctggcccccaagatcgggcgcctgggtctgtctgcaaaaagagttggtgatgacattgccaaggcaacgggtgactggaagggcctgaggattacagtgaaactgaccattcagaacagacaggcccagattgaggtggtgccttctgcctctgccctgatcatcaaagccctcaaggaaccaccaggagacagaatgaaacagaaaaacattaaacacagtgggaatatcacttttgatgagattgtcaacattgctcgacagatgcggcaccgatccttagccagagaactctctggaaccattaaagagatactggggactgcccagtcagtgggctgtaatgttgatggccgccatcctcatgacatcatcgatgacatcaacagtggtgctgtggaatgcccagccagtta

SEQ ID NO: 24206 - DNA, 442 bp, Homo sapiens
  misc_feature (1)...(442): n = A,T,C or G
ntttgccccccctgtgccccgcgctgcaggaattcggcacgagcccacaggaggccctccatacccccatgccccgtatggtgctggtcgagggaactatgatgccttccgaggccagggaggttatcctgggaaacctcgcaacaggatggttcgtggagacccaagggccattgtggaatatcgggacctggatgccccagacgatgttgatttcttttgagccgtcccccgttcctcagtcctgtatcatccatacttgtactaccttgtcctatgaagctctgagaattttttgtacgatcagccttactgctaataaaagcacttccacagggcgggcgggaaataaaaaaaaaaaaaaataaaaaaaaaannnnnttggggggggggcccccccccccaccccccttaaagagggggttattaaatttcgggggcg

SEQ ID NO: 24207 - DNA, 455 bp, Homo sapiens
  misc_feature (1)...(455): n = A,T,C or G
cttgaccgcctgaggaactctgcacgagtagagtgaaggcaggaaggaactcaaggtggctggagatggctgctgctcaccctcctagcctgctctgccactgggacggctcctgcttttggggctcttgatcagtgtgctaacctcactgcctcatggcatcatccattctctctgcccaagttgctctgtatgtgttcgtcagtgttcatgcgaattcttgcttgaggaaacttcggttgcagattgaagcatttcaggttgtgcattttgtgtgatgcatgtagtagcctttcctgatgacagaacacagatctcttgttcgcacaatctacactgccttaccttcacttaaaccacacacacaaggtgctcagacatgaaatgtacatggcgtaccgtacacagagggacttgagccagttacctttgctgtcactntctctcttataaat

SEQ ID NO: 24208 - DNA, 467 bp, Homo sapiens
  misc_feature (1)...(467): n = A,T,C or G
ntttgaccgcctgcaggaattcttcgcgagcccagagatgcctgtgcttccctgggaaacctggtgaactggaccaggtggcctcactggctcttctcaggacaactaagcctgctggtcagggctggctttcagccttcctaaggctcctggactccagaggccagcggggagcctttcctggctccctctgttttctctcactgtagaccaaagagccgcttgtgtgatattaaagccactttagaaagcanaaaaaaaaaaaaaaaaaaaaaaaccccgggggggggcccgggccccaattcccccttatgggggggggattaaaattcccgggcccggggtttaacacgggggggagggggaacaannnnnnnnnnnnnnnnnncnncttntccttncctctctttttctcccttttctttttctttctcttccctttttctttccccttcccccctttctcg

SEQ ID NO: 24209 - DNA, 487 bp, Homo sapiens
  misc_feature (1)...(487): n = A,T,C or G
agccggnnnnaattgacattcgatcgcatgtcggaattcggcacgagttgtccaacaggtggtactttatgctagaacccagcgcaggagtaaattgaaagaatcacttgattctggaaaccaaaatggaggaaatgatgataagactaagaatgctgagaggaactatttaaatgttttacctggggaattttatattacacggcattctaatctctcagaaatccatgttgctttccatctctgtgtggatgaccatgtgaaatcgggaaacatcactgctcgtgatcctgccattatgggactccgaaatatactcaaagtttgctgtacccatgacatcacaacaataagcattcctctcttgctggtacatgatatgtcagaggaaatgactataccctggtgcttaaggagagcggaacttgtgttcaagtgtgtcaaaggtttcatgatggaaatggcttcatgggatggaggaatttct

SEQ ID NO: 24210 - DNA, 546 bp, Homo sapiens
  misc_feature (1)...(546): n = A,T,C or G
aggcgatcgacggctgtngatcgcgncggctgcatgaattcggcacgagctacacattntgccaggtcacgcattttgctagtaagcaggatgcccccaactctccctgccatggaggattcttttttttaagctttgggtgcttttttaatacttttttttttaatgtggggaaggagcttgctctgacgtaaccctcctctcccctgactcctgtcctgagagctgtggatgccgcctcctgccctgcctacccctgaaacgtgaggaatgggggccccaggacagcatcaggacttttgagtccagctgccagcaatggttccaactcggaggcagcgcctcttggtccccatttctgtatancangcgtgtgtgtgtgtgtcgaggttttttattttttgcttaatcaaactccattcccaaatacactccatctttggctctgagggcgctccctcctctcagccnggcaggctggcctctccttgccagacctgcggtccagcatcccccagagccagggaacaggcccaggcggggagg

SEQ ID NO: 24211 - DNA, 442 bp, Homo sapiens
gattgaccgcctgcggaattcgtcgcgagccggatgcacataatcgaaggtctgaaagcttccctggagcgactgcagctggagtacgtggatgtggtgtttgccaaccgcccggaccccaacaccccgatggaagagaccgtccgcgccatgacccacgtcatcaaccaggggatggccatgtactggggcacgtcacgctggagctccatggagatcatggaggcctactccgtggcccggcagttcaacctgaccccgcccatctgcgagcaggctgagtaccacatgttccagcgtgagaaagtggaggtgcagctgccggagctgttccacaagataggagtgggcgccatgacctggtcccctctggcctgtggcattgtttctggcaagtacgacagtggcatcccaccctactcaagagcctccttgaagggct

SEQ ID NO: 24212 - DNA, 500 bp, Homo sapiens
  misc_feature (1)...(500): n = A,T,C or G
ggctacccnantttgcaccgcctgcaggaattcggcacgaggtccagttataacttcctcttagaaatctccaagaagctgggtctccagatcccatttagaaccaaccaggtgctgaaaacacatgtagataatggccatcatcctaagcccaaagtagaaaatggtagaaggtagtgggtagaagtcactatataaggaaggggatgggattttccattctaaaagttttggagagggaaatccaggctattaaagtcactaaatttctaagtatgtccatttcttccttttgctgttgcttcccccctcacacacttggttttgttctatcctacatttgagatttctattttatgttgaacttgctgcttttttttcatattgaaaagatgacaccgccccaagagccaaaaataaatgggaattgaaaaaaaaaaaaaaaaaaaactggagggggggccgcggccccatttcgccttatagtgggcggaattaca

SEQ ID NO: 24213 - DNA, 493 bp, Homo sapiens
  misc_feature (1)...(493): n = A,T,C or G
catagacccgctctgcaggaattcggcacgagacctggtgtgtccgtttctctggtgaatccccagccatccaatggccacttctcaaccaaaattgaaatcaagcaaggagataactgtgattccataatcaggcgtttaatgaaaatgaatcgaggaattaaagacctttccaaagtgaaactgatgagatttgatgatccactgttggggcctcgacgagttcctgtcctgggaaaggagtacaccgagaagacccccatttctgagcatgctgttttcaatgtggacctcatgagcaagaaaattcatctgactgagaatgggataagggtggatattggcgatacaataatctatctggttcattaaactcatgcacattggagatttatcctgggttcttaagaatactactactctgattgtgtctactgattggctatcagaaccttangctggacctaaatagattgatttcatttctaaccat

SEQ ID NO: 24214 - DNA, 494 bp, Homo sapiens
  misc_feature (1)...(494): n = A,T,C or G
ctcgcccgcctnnnnaatagaccccgctgcaggaattcggcacgagggaattttcaatgagacttgagacaggtgcatttccagcttttctcaattgcttggtgtgtacatttccaaggaggagcctgtataccaactaattctaactctcaaagtccattgagaacatttctgcatatgaccaaaatgatcaggctaccaaactggccactatgatcattctagctgttctcataagagattaaattcatgaacaaggtgtcagcttgaatgcttctctggccttacttgacctgccacctcccattcatataatgttaacaataacttgtcatgtgtttgtgaaacactgtgaacttctccatccaataatattcagtatgtttccagtcacatggtcagggtaaagtcatggctatctcgctcctcacagaaatcaagagagtaacagagccttttgaaagtcacacatgctcaggtaatgaggaaacact

SEQ ID NO: 24215 - DNA, 441 bp, Homo sapiens
  misc_feature (1)...(441): n = A,T,C or G
nttttgcnccgcgctgcaggaattcggcacgagcaaatcttggttgccttctaacggcaggtgggcataaggctgtccttcaggaccagccagtttacaagcatgtctcaagctagtgtgttccattatgctcacagcagtaaatgcctacctctgtgtttgacatctgaaagaatacattgaagcagcttgttgcatttgtttttctggcttagtaatctaatagatttccttaagggcaggagatagactctggcccttgtttctagcctccttccttgcagtgtttacaacatagccagtgtttacagcatagcagatgctgctgctgattaagagaatagatgcaaacaaggcatgcatttggccaaaataaacaaatgctggtctgtccaaaaaaaaaaaaaaaaaaaaactcgagggggggccgggcccccattt

SEQ ID NO: 24216 - DNA, 459 bp, Homo sapiens
  misc_feature (1)...(459): n = A,T,C or G
tgaaaaaaaaanantttgacncgtctgcaagacttcggcacgaggaatcttcgccccagcccttcactaaccctgtgagccgtaggcagagccttgtgtgtcaatgctttcgtcggagacgtagcctcgggttgctgtgttattgtgggcattgctgctgcacgtggtaatacagctcagtgtcaggtgtggggttcacgatatttcagactcggaacttgggggctctcacatggccatctcatttgctttgtggtcttaggtgggatactttcagatttctcctataaaatggggttgagaaagtcatctgaagcatttttggggattaaggtgataccctaaaaccccggagggcgcacgtaggatcaggtgcacccttcctgcagcgccttggtgtctgcagccgtggcggcctcacggngtgggtggagaggaaagagtggtgcggctactgcg

SEQ ID NO: 24217 - DNA, 468 bp, Homo sapiens
  misc_feature (1)...(468): n = A,T,C or G
atggcccgcctgcggaattcgtacgaggtcaattccaagaagaaccaaatgtattttgactggggtccaggggagatgctggtatgtgaaacctccttcaacaaaaaagaaaaatcagagatggtgccaagttgcccctttatctatatcatccgtaaggatgtagatgtttactctcaaatcttgagaaaactcttcaatgaatcccatggaatctttctgggcctccagagaattgacgaagagttgactggaaaatccagaaaatctcaattggttcgagtgagtaaaaactaccgatcagtcatcagagcatgtatggaggaaatgcaccaggttgcaattgctgctaaagatccagccaatggccgccagttcagcagccaggtctccattttgtcagcaatggagctcatctggaacctgtgtgagattctttntattgaagtggccccagctggccctctn

SEQ ID NO: 24218 - DNA, 482 bp, Homo sapiens
  misc_feature (1)...(482): n = A,T,C or G
tgggccgnntnnnnaattggactgcgtggctgtcaggaattcggcacgagtgtaccgacagtcggtggagattatctctcggtaccttcgggagcaggccaccggcgcctaggacacaaagccaatgggcaggtctggggccaccagcaggaaggcgctggagaccttacgacgggttggggatggcgtgcagcgcaaccacgagacggccttccaaggcatgcttcggaaactggacatcggaaacgaagacgatgtgaaatcgttgtctcgagtgatgatccatgtgttcagcgacggcgtaacaaactggggcaggattgtgactctcatttcttttggtgcctttgtggctgaacacttgaagaccataaaccaagaaagctgcatcgaaccattagcagaaagtatcacagacgttctcgtaaggacaaaacgggactggctatttaatcaaagaggctgggatgaggttgtggagt

SEQ ID NO: 24219 - DNA, 504 bp, Homo sapiens
  misc_feature (1)...(504): n = A,T,C or G
agcgngnnnnnaattgcttgcctgccgaattcgcacgaggctccgcggtggagtcaccgcaccgctcccgggatcatggtgttctacttcaccagcagcagcgttaattcatctgcctacactatttacatgggaaaagataaatatgaaaatgaagatctgatcaagcatggctggcctgaagatatctggtttcatgtggacaaactctcttcggctcatgtataccttcgattacataagggagagaatatagaagacatcccaaaggaagtgctgatggactgtgcccaccttgtgaaggccaatagcattcaaggctgcaagatgaacaacgttaatgtggtatatacgccgtggtctaacctgaagaaaacagctgacatggatgtggggcagataggctttcacaggcagaaggatgtaaaaattgtgacagtggagaagaaagtaaatgagatcctgaaccgattagaaaagaccaaagtcgagcggttcccagac

SEQ ID NO: 24220 - DNA, 483 bp, Homo sapiens
  misc_feature (1)...(483): n = A,T,C or G
gggnnnnattgccttccccgcctgcggaattcggcacgaggagagagagagagagagagagagagagagagagagagagagagagagagagagagagagagagagagagagagagagagagagagagagagagagagagagagagagagagagatttgtgtgcacacactctctcacggcggggtttgtttgtgtgtgtgtgtagagagacacacactctgtgttcgcgctcactatatgtgtctcgcgtgggggggcgctctctatgtgcctttatggagagagagtgtgtgtgtgtgtgtctctatacacacacgcggggagagaatatctcacactggggacgcgccacacacacacgctctctctgtgcgcgcgtgtttttttttttgtgtctccccgccctttcacacacacacggggggcgcgcgctcctctcatcacaccaatttatatagccctccgcgcactctctctctagag

SEQ ID NO: 24221 - DNA, 468 bp, Homo sapiens
  misc_feature (1)...(468): n = A,T,C or G
ngggtttcatagatcgtcgtgggcattccgcacgaggcgagaggtactacgtgcccgaaggagagtgctgcccagtgtgtgaagatccagtgtatccttttaataatcccgctggctgctatgccaatggcctgatccttgcccacggagaccggtggcgggaagacgactgcacattctgccagtgcgtcaacggtgaacgccactgcgttgcgaccgtctgcggacagacctgcacaaaccctgtgaaagtgcctggggagtgttgccctgtgtgcgaagaaccaaccatcatcacagttgatccacctgcatgtggggagttatcaaactgcactctgacagggaaggactgcattaatggtttcaaacgcgatcacaatggttgtcggacctgtcagtgcataaacaccgaggaactatgttcagaacgtaaacaaggctgcaccttgaactgtcccttcggtt

SEQ ID NO: 24222 - DNA, 344 bp, Homo sapiens
  misc_feature (1)...(344): n = A,T,C or G
naattggcctgcgctgcacgaattcggcacgagccacgctggacgtttacacccagtggcatcagcagtcacagagcaccaagccaaaaaaagtacggccctcagccagtcgctatgcagcactttcggaccagggactagacatcaaagcagcgttccaacctgaggccaacccatctcacctgacactgaatactgccttggtagaaagtgaggacctgtaatccagcattcttgttaaagctgaaacactgaaacagccattgccttgaccaacatattcctttgtcacattatgtaaaaggcagaaacatacctttgactataaaaaaaaaaaaaaaaaa

SEQ ID NO: 24223 - DNA, 513 bp, Homo sapiens
  misc_feature (1)...(513): n = A,T,C or G
gggtgnncccaaggatgccnnnnnaattgannnccatgatcgccctgctgaattcggcacgagtggagtgctgcgggcagcctttctcatggaatgacatgaatcaacttttttctttgtttcatcttttaagtgtacgtgcttgcctgttcgtgcatgtgttcataaactcaacactttaatcatggtttcatgagcattaaaaagcaaagggaaaaaggatgtgtaatggtgtacacagtctgtatattttaataatgcagagctatagtctcaattgttactttataaggtggttttattaacaaacccaaatcctggattttcctgtctttgctgtattttgaaaaacacgtgttgactccattgttttacatgtagcaaagtatgccatctgtgtctgctgtattataaacagataagcagcctacaagataactgtatttataaaccactcttcaacagctggctccagtgctggttttagaacaagaatgaagtcattttggagtn

SEQ ID NO: 24224 - DNA, 488 bp, Homo sapiens
  misc_feature (1)...(488): n = A,T,C or G
agcgggtnnnttctgacctccgtgtaggaattcggcacgaggccccatggccttgccagtgaaaaggttatttttggactcagagggctttaaaataaattttaagatgtatcagatacacaaacatttaatgggcacctatgggttggacactttgagaattcttaaaagtataagtgggagcaaaatgtatgcaaatttatcacaaactatttaaagcaacttcttggaggcttacaaaccacaatttaacagaaactgtagatggttgaactactagtgacttttttccccttttcccagttacaattatactttcagctaacatatgccagtttcacagaactattaagtccccttattgtactttttatggcatgcccatgaaaaagcactttcttaagcctacagtatcagatcaatgggaaaacaacagaaaactaagaggagaattttcccgttaattttcttgcagaanagtataagtn

SEQ ID NO: 24225 - DNA, 500 bp, Homo sapiens
  misc_feature (1)...(500): n = A,T,C or G
gatggccnnnnnaattgaccgcttgaggactttgcgcgagctctttccaggccttgcatggaaaggcctagccattgtctgaggcagcaatctttggcatctacaggtggcagcagcctttcaccagggctccatctgtgaagagtctcagccatgactttgagctgagcttgggagaagtaaagcaactgttaaggccagcccttgcccctcagacctgccatgaaaggaatgagccctagactgactcctgcagcacccccgggacaggctgggaccagctgtttgtctccaggtgtcagagtccctcctcctcctccaacctctccaacctactttgtttggaaataccgagctacacttcaaaatgtattcaagggatttccaataaattttttttctgtactttnnnnnagnnnaaanaaaaaataaaaagaaaaaacctggggggggggccgggcccccaattccccttttagggggcgaataacaattcaggg

SEQ ID NO: 24226 - DNA, 504 bp, Homo sapiens
  misc_feature (1)...(504): n = A,T,C or G
ngaggcnnnnnnattgaacgattgagcgatntgcggaattcgccacgagattagatatgctgagaaggaccaattaaagcagagacctttagttccctttaacagggactggagatatgatgcatgtgttacgacttttggcccactgtccatgcaactctaagtgcaggatgatttgctttccagaaatcccaaaggggctgctcttggatcaccgaagagccttacctatatcaaatcaaaaagacattctgggtcagattagactatgctcctggccctacagattgcacataaactatcataaatacagctttttcagggaactagttctaaaactcttacctactgagaataagtcttaacactaagatgactgtattatatcaatttattattagaatcagacttatacctagcacaattaactattgtgtgggcaaagaacatttaaagggcatagtagaggtaaggagagacacatactcagctagagataanaan

SEQ ID NO: 24227 - DNA, 490 bp, Homo sapiens
  misc_feature (1)...(490): n = A,T,C or G
gtgcagggtgctgcaatgaangactgagacntcgcgaggacaantacaggatattaaatatccaaaacaatagtgtttctgtacacagtgaactagctgaaaaagaaatcaagaaagcaatcccatttacaatagtgccaaataaataagataactaagaattaaatttaaccaaacaagtgaaagacccccataaggaagattataagatactgatgaaagaaactgaacaggatacaaagggaaagacatcccaagctcatggatcagaataattaatattgttaaagtggcagtactctccaaagcaatctacagattcagtgcaatctgtatcaaaatacgagtgacattcaaaacagaatgtcactggaagaaaaaaatctggataggcaaggtggctcacgcctgtaatcccaccactttagaaaaccaaggcaggagatcacttgaggccaggagtttgagactgtcatagtgagatctctct

SEQ ID NO: 24228 - DNA, 486 bp, Homo sapiens
  misc_feature (1)...(486): n = A,T,C or G
cgcgggtcnnaattgactttcatcgncaattcggcacgagctgcgccgcggctcacagctgacgatgggggaccccagcaagcaggacatcttgaccatcttcaagcgcctccgctcggtgcccactaacaaggtgtgttttgattgtggtgccaaaaatcccagctgggcaagcataacctatggagtgttcctttgcattgattgctcagggtcccaccggtcacttggtgttcacttgagttttattcgatctacagagttggattccaactggtcatgggttcagttgcgatgcatgcaagtcggaggaaacgctagtgcatcttccttttttcatcaacatgggtgttccaccaatgacaccaatgccaagtacaacagtcgtgctgctcagctctatagggagaaaatcaaatcgctcgcctctcaagcaacacggaagcatggcactgatctgtggcttgatagttgtgtggctccacn

SEQ ID NO: 24229 - DNA, 487 bp, Homo sapiens
  misc_feature (1)...(487): n = A,T,C or G
gtggcnnnnattgacattgatcgtcatgtcggaattcggcacgagctggaattacacagctttagtgctgagcttttaacaggaaatgtggccctaggtattagtcttagtttaaaatgttggtgtttagagactgtaaatgcatattcacaaagttatctgatagggccttggaggagaaggtccagttttaaaaaatgacagtttgtgtttaataaatgaaggcatgagaggaagtaagtagcaagttgaaggacaggtagttgagatgaaacacttcaaaaccctggttatagatgtactgtttggatgtagcatagtcttgagtctagcgtccacaaagaattattcaaatgatatttagaagaattataactattacattgaatggagtcccttggatattttgatagtaaaattaatagccataaagtcctagacttcttatttgaagttaaaatttcttatttgaaaagttgaaatttac

SEQ ID NO: 24230 - DNA, 503 bp, Homo sapiens
  misc_feature (1)...(503): n = A,T,C or G
cgcaacccnaanaattgcaccgcgctgcaggaattcggcacgagggacaagaatatggaagtcttcatcccactctcaacttctgcagcctctagtgggccatgggctcattccttatttgcttttataccctcctggcctaagaagaacttatttaaaagagagtctcctataacacaccgcctgtatggggacatttcaagagaagttcaagggacttctgaaaatggagtaatttttcagaaatgtgcactggtgtctgggtcgagtgaagcacagacagcccgcatatggctgcttgttaacaacaccaagacaacctcgtcagccaacctctcggagctgctcttgctggacagcattgctggtctcaccatttgggactctgtgggaaacaggacctcggaaggattccaggcttttagcaagaagtttctgcaagtgggagatgcctttgctgtcagctacgcagccacgctccaggctggagacgctcggaacgg

SEQ ID NO: 24231 - DNA, 493 bp, Homo sapiens
  misc_feature (1)...(493): n = A,T,C or G
gccctgtggaattcgcccgaggnaaaaaaatttgcccgcgctgcaggaattcggcacgagggaaaggttatcaagacacagaacttggcagctctccttcatgcgattgccagacgtccaaaggggcagcaactagcatgggattttgtaagagaaaattggacccatcttctgaaaaaatttgacttgggctcatatgacataaggatgatcatctctggcacaacagctcacttttcttccaaggataagttgcaagaggtgaaactattttttgaatctcttgaggctcaaggatcacatctggatatttttcaaactgttctggaaacgataaccaaaaatataaaatggctggagaagaatcttccgactctgaggacttggctaatggttaatacttaaatggtcaatagaaaaagtaggctgggcgcggtggctcacgcctgtaatcccagcactttgggaggctgagaagggcggatcacgaggn

SEQ ID NO: 24232 - DNA, 486 bp, Homo sapiens
  misc_feature (1)...(486): n = A,T,C or G
gannagttgccaagaaaacccccaactaaagctttnactganagcntaccaancnncaaacaaacgtgtgttccccagatgtcattttcatctcttcacactaatatgattgttaattttgtgtgttaacttggttaggccatggtatccggatttttgttcaaactagatgttttatgcagctattttttagagatgagattaacatttaaatcagtcaacttctagtaaagcggattatcctccataatgtgggtgggtctcatccaatcagttgaaggccttaatagaaaaagactgacctcctcagaagaaaagggaatcctactagcagatggcctttggacttgaagagcagctcttccctgggtctccagtctgctgacttattctgcagattttggatttgtcaagcctttgcaatcatgtgagccaatttcctaaaataaatctcatcagtaaggtggtggaatagaagttatcggg

SEQ ID NO: 24233 - DNA, 502 bp, Homo sapiens
  misc_feature (1)...(502): n = A,T,C or G
tgagggtnnnnnnnnttcgaatggctgtangaattcggcacgagccctagacagacgtgatccccctgtgatctacttctggcaagattctcagtctggacaggtcttccctatgagatagaacctgataaggagctagggcaattctgacaacattaccaaaggcccacataacttctaaattttggtctggtctgaaggaaaacctgttcttgccctagtgatggatgaactctcttatctctggcttctagagggaaaaaaaaagcatacctcttttactttttaagtacctccatcagagtcatgaaatcacctgtcaagactatctatcttttatgtttccattctggtaagaactctttaaatgaggacactgctgattgctggtgatgttttttgagcaaacactcgggggtatggatgaaagccaatcgcaggtcaaatgactccttggggaagctacttctcctctattcagatttcactaaaatcttccaag

SEQ ID NO: 24234 - DNA, 502 bp, Homo sapiens
  misc_feature (1)...(502): n = A,T,C or G
ggagggcnnnnnatttgatcgactgaggactttgcgagagagcacatctgttggaccagcagtcacataactaacctttttgaatttttggaagccattgctgctgtaaagtcattatgtagaatgctacagaccctagacttagtatagtactaatttctgaaaaagactttgagacagtactatgtcagttcagccacctattttgcattgatgtctataaggaggcaaagcatatgtgttttactgttatgcaccttatatagcctttaccactgtgtgatgttcacaaacaccaaagtaaaggaaaaatgcaggatgctaccgtaaaatccagctgctattcatggagctgaaacacaaagcgcagataatagatagctaagctaagagctactaagtaggttatagaagtagggaaaaacgtaatactgctttttattcatgtctttaaagcctttttcagaataagtgccaatcactgatgttgaaataatggtgg

SEQ ID NO: 24235 - DNA, 473 bp, Homo sapiens
  misc_feature (1)...(473): n = A,T,C or G
nttgaccgccttgganngtttgaggcctttgcaagncctctttgtcaagccctccctgaagctgtctgaaacctatgggccgggcgcggtggctcacgcctgtaatcccagcactttgggaggcccaggcgggcggatcacgaggtcaggagttcgagaccatccgggccaacatggtgaaaccccgtctctactaaaaatactaaaattagcgtgggcatggcggtggacgcctgtagtcccagctacttgggaggctgaggccagagaatcccttgaacccgggaggcggaggttgctgtgagctgagatcatggcattgcactccaccctgggcgacagagcgagaatccgtctcaaaaaaaaaaaaaaaaatctggggggggggccgggacccaatttcgccttatggggggcggtataacaattcatgggccgcggtttaacaacggggggatgtgggagaatccctn

SEQ ID NO: 24236 - DNA, 510 bp, Homo sapiens
  misc_feature (1)...(510): n = A,T,C or G
aggttgggccnagggtnnnnnnnaaagaccggcataggaaacggtacgagcttttccagagtatgcaactctgacgttgatcccagagagcagcttcagtgacaaacatatcctttcaagacagaaagagacaggagacatgagttctttgccggaggaaaagcagctcaagaacacatgtgcagtcactggtgtcaccctggataggcaagggataactcttctaacacaaaataagtgttttatgtttggaataaagtcaaccttgtttctacaaaaaaaaaaaaaaaaaaaactggggggggggccgggcccccaattccccttatagggaggggtttaaaaattcatggcccggggttttaaaacggggggagatgagaaacnnntntnntgnttgntgtnttntnnncngnnttgcnntctggctgggtggtggttttctttgctcgctcttgncgtctcgcttgctggctggtttttgngcgtggttggcgctttttccgtggg

SEQ ID NO: 24237 - DNA, 511 bp, Homo sapiens
  misc_feature (1)...(511): n = A,T,C or G
tggggntnnncaggatggnnnnnttttgannncattgatcgccttcggaattcggcacgagcttctacaacgctgactacctggcggcccgagcccggctggcaggtgaactggcaggccaggaagaggaggaagccctggaggggctggaggtgatggatgttttcctccggttctcagggctccacctctttcgggccgtagagccagggctggtgcagaagttctccctgcgagactgcagcccacggctcagtgaagaactctaccaccgctgccgcctcaacaacctggaggggctagggggccgtgcccagctggctatggctctctttgagcaggagcaggccaatagcacttagcccgcctgggggccctaacctcattacctttcctttgtctgcctcagccccaggaagggcaaggcaagatggtggacagatagagaattggtgctgtattttttaaatatgaaaatgttattaaacatgtcttctgccagaaaaaaaaa

SEQ ID NO: 24238 - DNA, 472 bp, Homo sapiens
  misc_feature (1)...(472): n = A,T,C or G
cttgaccgcctgcggtatacggcacgagatcatttaatggcaacagggaggaagctgacaacccaaatacagggattggtgccttccgattcatgctggaatccaacaagggcaaatcaatgttggagttccaggagctaatgacagtttttcaactgctacactggaatggcagccttaaggccatgagggaacgacaatgctctcggcaggaggtgttggctcattattcgcaccgggccctggatgatgatattcgccaccaaatggccttggactgggtgagccgggagcagagtgtgccgggggcactgtctagagagctggcctctactgagcgggagctggatgaagcccgactggcaggcaaggagctgcgcttccacaaggagaagagagatattcttgtgctggctgctgggcagttgggcaatatgcattcttccaactgctaggcatccacccacataan

SEQ ID NO: 24239 - DNA, 463 bp, Homo sapiens
cttgactgctcgcgtgcacaatcggacagctgatttctaaaaattgtaaaatagtcttcttttatactgtaaaaaaagatataccaaaaagtcttataataggaatttaactttaaaaacccacttattgataccttaccatctaaaatgtgtgatttttatagtctcgttttaggaatttcacagatctaaattatgtaactgaaataaggtgcttactcaaagagtgtccactattgattgtattatgctgctcactgatccttctgcatatttaaaataaaatgtcctaaagggttagtagacaaaatgttagtcttttgtatattaagccaagtgcaattgacttcccttttttaatgtttcatgaccacccattgattgtattataaccacttacaggtgcttatattctttgctttaacttttggtctttaacatttagaatattacattttgtatg

SEQ ID NO: 24240 - DNA, 473 bp, Homo sapiens
  misc_feature (1)...(473): n = A,T,C or G
naattgccttgcgtgcgcgaattcggcacgagggaaagtcaagtagcaagaaggaaatgtctaaaagagatggccaggagaaaaaagacagaggagtgacgaggtttcacgaaaatgccagcgaagggaaggcccctgcagaagacgtctttaagaagcccctgcctcctactgtgaagaaggaagagagtccccctccacctaaagtgggaaacccactgatcggcctcttgggtgaatatggaggagacagcgactatgaggaggaagaagaggaggaacagacccctcccccacagccccgcacagcacagccccagaagcgagaggagcaaaccaagaaggagaatgaagaagacaaactcgattaagacaggagacatagttcatgggatacaacctccctcttggtttgttggctctccttttcttttgatactggtcttgctgctagaactttttatatagacttn

SEQ ID NO: 24241 - DNA, 481 bp, Homo sapiens
  misc_feature (1)...(481): n = A,T,C or G
gatttattaaaaactgatcgccntcggctgattcgcctagggggagcggccggagaggagctgccgggagttcgtgccctgcaggacatgacaccagtggcatatcacggccatggggtctcagcattccgctgctgctcgcccctcctcctgcaggcgaaagcaagaagatgacagggacggtttgctggctgaacgagagcaggaagaagccattgctcagttcccatatgtggaattcaccgggagagatagcatcacctgtctcacgtgccaggggacaggctacattccaacagagcaagtaaatgagttggtggctttgatcccacacagtgatcagagattgcgccctcagcgaactaagcaatatgtcctcctgtccatcctgctttgtctcctggcatctggtttggtggttttcttcctgtttccgcattcagtccttgtggatgatgacggcatcaaagtggtgaaagtc

SEQ ID NO: 24242 - DNA, 470 bp, Homo sapiens
  misc_feature (1)...(470): n = A,T,C or G
agggtcnaatgatnactacggcgctgcacgaannccgcacgagaaaaattaaaggttttggctgggtgcagtggctcatgccggtaatcccagcactttgggaggccaaggtgggaggatcacttgaggtcaggagtttcagactggcctgggcaacgtaaaaaattaaaaaaatagccaggcatggacatggtagtgcatacctgtggtcccagccactcaagaggctgagacaggatgattgcttgagcccaggaggatgaggctgcagtgagccatgatgacgctactgcactccagcctggatgacagggcaagaccctgtctcaatattttaagtcaagggtttgtagtaatgtattcagtgccacttcttgccatcactttgcaattattgaaatgggaatactgagctcagaaagcaaatatgatgctttcatgggagatggagccacatttgtgttctgggn

SEQ ID NO: 24243 - DNA, 509 bp, Homo sapiens
  misc_feature (1)...(509): n = A,T,C or G
nggttttnnnaaggggnnnnnnnattgcccggcataggaattcgtccgagccgcacgatgcctggagttactgtaaaagacgtgaaccagcaggagttcgtcagagctctggcagccttcctcaaaaagtcccgggaagctgaaagtccccgaatgggtggataccgtcaagctggccaagcacaaagagcttgctccctacgatgagaactggttctacacgcgagctgcttccacagcgcggcacctgtacctccggggtggcgctggggttggctccatgaccaagatctatgggggacgtcagagaaacggcgtcatgcccagccacttcagccgaggctccaagagtgtggcccgccgggtcctccaagccctggaggggctggaaatggtggaaaaggaccaagatggcggccgcaaactgacacctcatggacaaagagatctggacagaatcgccggacaggtggcagctgccaacaagaagcattagaacaaaccatgct

SEQ ID NO: 24244 - DNA, 472 bp, Homo sapiens
  misc_feature (1)...(472): n = A,T,C or G
attggcattgctcagcctgcacgattcggcacgaggtggctcacgcctgtaatcctagcactttgggaggccaagttgggcagatcacaagttcaagagatcgagaccattctggccaacatggtgaaaccccgtctctactaaaaatacaaaaattagctgggcatggcagtgcgtgcctgcaatcccagctactcaggaagctgaggcaggagaatcgcttgaacctgggaggtggaagttgtagtgaactgagatcgcaccactgcactccagcctggcaacagagctagaatccgtctcaaacaaacaaacaaaaaatcccacagctattggatcatccacagattttttctttacaatcttgttctccttgtccatggaccatcaatagttgacttgccagggttaattctttcattgcttgagaagaaaggaatcaaaggactgtgtgtagtaagctgacggtaan

SEQ ID NO: 24245 - DNA, 521 bp, Homo sapiens
  misc_feature (1)...(521): n = A,T,C or G
tggtnnnnnnncggcnnnnattgcncgcctgcagattttccccgcgctgcaggaattcggcacgagaaaatatcatctgaaactgttacatcagatttctggcactctactgactgtggaagatagccagctgactggaagatagccagctgattagttccctgaagaaacctgaagacagatacctggttaactagatcaactacactgccaacttgtttgatgctgagagacaatggacttattccatgggggaagggaaaaaagaagtcaatcaccaaatctgaagaagttaacctagatctttgaggtttgatttgcaactttatatgcagagtattatgtgggtattttcccttanaatattcaaagggatttacatatgggattagctaatgagcctagccaagaccttccctggaggacaggctggtcattgcggaggcccttctgtgcttcagtgggtcatatcctctagtccggatgattntcctacgcttatatgtcangggcaggagagg

SEQ ID NO: 24246 - DNA, 471 bp, Homo sapiens
  misc_feature (1)...(471): n = A,T,C or G
tgagggaatgtactgctgccgtgaggannncnnngagattttgggaggccgagatgggcggatcatttgctgtcaggagttcgagaccagcctggccaacatggtaaaaccccacctctactaaaaatacaaaaatcacctgggcgtggtggcgggcgcctgtaatccccactactagggaggctgaggcaggagaatcgcttgaacccgggaggcggaggttgcaacagtgagccgagatcgcgccacggctctccagcctgggcgacagttagacccgtctcanaaaaaaaaaaaaaaaccaaaaagggtggatccaccgataagttgctccgctccgttttttttaggggaaaccatggtcccccttttttggggttattttttcaaagcctacaaaaaaactttttataaagaggacccttcaatacatattctacagcccagttaaaatgtgagaggccttgatct

SEQ ID NO: 24247 - DNA, 491 bp, Homo sapiens
  misc_feature (1)...(491): n = A,T,C or G
ngcgccgnnaannttaaacttgacgctctagaactctgccgagggaaagttgatatttggtcacttggcatcacttgtattgaattggcggaacggaagccgccccttttcaacatgaatgcaatgagtgccttatatcacattgcccagaatgactccccaacgttacagtctaatgaatggacagactcctttaggagatttgttgattactgcttgcagaaaatacctcaggaaaggccaacatcagcagaactattaaggcatgactttgttcgacgagaccggccactacgtgtcctcattgacctcatacagaggacaaaagatgcagttcgtgagctagataacctacagtaccgaaaaatgaaaaaaatacttttccaagagacacggaatggacccttgaatgagtcacaggaggatgaggaagacagtgaacatggaaccagcctgaacagggaaatggacagcctgggcagcaaccattc

SEQ ID NO: 24248 - DNA, 512 bp, Homo sapiens
  misc_feature (1)...(512): n = A,T,C or G
cgggatgcgggananannnnnnnnttgcgcaacggctgtaggaattcggcacgagggtttgacacctgtgactcggtctcagggatatgcctaccaatagcgggtatcgtaaggcatgtacccaaacataacggatgtaaggcagaaagtgatcggagaaggaatgagaaagtgtgcgtgatgttaatgaaaagtcatatgcagctagagcagacccaggaaagctttctggaagagattgcatctgaggaaattcaggaaggatctttgtagattggggggagattctaaattgaaggggtgatagggtgaggggccagagggaagtctgctgtgttctcatgtaggatgtcagccctccctgcaacttctctttttggccaatgtcttttcactttcctgaccctttagaatcatccccagccagacgcaatcatggaagttgccttattgtcactggttaagaacttggcgagattgaagggcttttgttattgttgntggatattttt

SEQ ID NO: 24249 - DNA, 440 bp, Homo sapiens
attgaccgcctgaggagcccattgacctcgctgtttgactgctccacaagattggacgttttgtgatcgaagaggttcctggtgagctcatgcaggaagacctggcaacggatgacgtcatgcttctggacacctgggaccaggtctttgtctgggttggaaaggattctcaagaagaagaaaagacagaagccttgacttctgctaagcggtacatcgagacggacccagccaatcgggatcggcggacgcccatcaccgtggtgaagcaaggctttgagcctccctcctttgtgggctggttccttggctgggatgatgattactggtctgtggaccccttggacagggccatggctgagctggctgcctgaggaggggcagggcccacccatgtcaccggtcagtgccttttggaactgtccttccctcagagaggc

SEQ ID NO: 24250 - DNA, 489 bp, Homo sapiens
  misc_feature (1)...(489): n = A,T,C or G
nattggaccgcccttngngaannnatcgcaccgcctgtcaagaattcgccacgagaagagctgggagctgctgaaggaaggttttcttctggcgctgacccagggcagagagatccaggctcagaacttcttctccagcttcaccctgatgaagctgaggcactcctccgctctgggtggggccagcctaggggccaggcacatcgggcacctcctccccatggactatagcgccaatgccattgccttctattcctacaccttttcctagggggctggtcccggctccaccccctccaagctcagtggacactgggtctgaaaggaaggagtcttttgcttcctttctcctttttacaaaaacaaacatagaagaaaataaatgcactttatccactcaaaaaaaaaaaaaaaaaactggggggggggccgggcccccatttccccctaaggggggcggaataacaatccccgggccggggtttaaca

SEQ ID NO: 24251 - DNA, 452 bp, Homo sapiens
  misc_feature (1)...(452): n = A,T,C or G
gattgaccccgttgangnnnnnnnnattgaccccgcgctgcaggaattcggcacgagccggccccggccgtgtgctgcgcttgccttaccagctctctcctcgcttttctctcccgttttctctctgctttctctccaactgccagccgatcgggtcaggcaagtccatcccgtcctgagagccccaggccccccttcgacctctaaacagatccctcctcttctcggagacctccctttccaagcctgcctggacggctgttctgtgacttgacagtggctcccccagccccaaagccagcccccttcatctgtgacttaatctgttgtagtggtgagctgatacattcaggtgtgaccgttggtgaaaacttgtgccccttctgtggtatgcccttgccctgttctataaatatctataaatactcatatatatacacacctacacatgg

SEQ ID NO: 24252 - DNA, 473 bp, Homo sapiens
agctgggaactgccttgactggcgctgtacgatacgaggcgagatggtagccatgcgaaaacggctccggagcagcgaggtgtgcgctgactgcagcgtgccggatccttcctgggcatcagtaaataggggaacgtttttatgtgatgagtgctgcagtgtccatcggagtctagggcgccatatctcccaagtgaggcatctgaaacacacaccgtggcctccaacactgcttcagatggttgagaccttgtataataacggtgctaactctatatgggagcattctttgctggaccctgcgtctattatgagtggaagacgtaaagctaatccacaggataaagtacatcccaataaagcggaattcatcagagccaagtatcagatgttagcgttcgtccatcgcttgccctgccgggatgacgatagtgtgactgccaaagatcttagcaagcaactccattcgagcg

SEQ ID NO: 24253 - DNA, 493 bp, Homo sapiens
  misc_feature (1)...(493): n = A,T,C or G
aggggagttgccnaggaaaanaacaatcgatagcctgagtagtatgcccctagcctgagtgaccagnggtcctcctttctgaaggctcttgctacaaaggaaagatgaggatattctatttcttgatccctctcagctactgggagctgctttgtgccttggaagcctcaagctgaaatggatgtcagcctcaagtttaactccaagagggttcaccttgtttctttgaacaaaatgtgctgcctgttgcttccctttgccaggagtggtgttcccttttccacaggtctggaccacagtgtctctagctcccgctcctggatacttggttactgtgtgtttcggtaaaaaagcatccacaacatgaatatccactaagctataacagggcctgctgcaactatagtatttcctgaaaaagtatcaactgccacaagggccacaaataaagtctgtgaacttgaaataaccatggagaatgaaatgttctgat

SEQ ID NO: 24254 - DNA, 483 bp, Homo sapiens
  misc_feature (1)...(483): n = A,T,C or G
agggtagtaaccaactgatacactcgccgtacgccctcgaaanngcnccgagaggacagacagcacaccctagagcatttcgagcatgtgcgcatggtggatcccaagaaagccgctcagatccggtcccaggttatgacacacctccgtgtgatttatgagcgcatgaatcagtctctctccctgctctacaacgtgcctgcagtggccgaggagattcaggatgaagttgatgagctgcttcagaaagagcaaaactattcagatgacgtcttggccaacatgattagtgaaccaaggatcagttacggaaacgatgctctcatgccatctttgaccgaaacgaaaaccaccgtggagctccttcccgtgaatggagagttcagcctggacgatctccagccgtggcattcttttggggctgactctgtgccagccaacacagaaaacgaaggttctgggttgacaaatatcaagacggag

SEQ ID NO: 24255 - DNA, 474 bp, Homo sapiens
  misc_feature (1)...(474): n = A,T,C or G
agagggaaatgaattgactggcgctgcacgaattcggcacgagcgtaaagctagttttcaagaggaagaaaaccacacttactaatgttttctgtatctaatcaaatactcttcatatataattaagcctcatgttatcttttttttaaatcaaccttttgaacttcaactacagtctaaaagtcttgatggtaactatagtgtaattatctttttgtctcactggattttatagttagtggaaaatgcctttacaaaatgtatttaaaatagctgtcatctcatttgtaaattttgtcgtgtattgtgatatagtgaaccttattgtccttatgaaatggtagctttgtgaaatacattcaccaaaaatcaaaatttgaacatctttatgattccttaccagctgaagccagatagacaggtattaattgagctgatgccccacttgagtttatagactgtttgataactgcn

SEQ ID NO: 24256 - DNA, 447 bp, Homo sapiens
  misc_feature (1)...(447): n = A,T,C or G
gttgaccccctgaagannccnactgacccccgctgcagttttgccttgctttttgtcagtgcacatccgtgaccagacgcccagggtctggccgggtaaacagtatgtgagtgtagtaatcaactgagaaataaatactggctccaggaaaacttaacctcattcaaattgttttgctcagggctcccagggagaagtgaatttaggcacccgctgcggtgatcaattctgttctatgcgcttgtaagtgaagctcttaggcaaaaaacaatttcataggagatcagggttagggagggtatcccattgagagttgtgacaggttttcttaccccctttaatccttcttctgcccctcctcttccttcacttcttccccctatccccacccaacattttggccatacacttgaaaagaaatacccaatgcattttatctttgtcttc

SEQ ID NO: 24257 - DNA, 475 bp, Homo sapiens
  misc_feature (1)...(475): n = A,T,C or G
ntttgccttgcgctgcacgaattcggcacgagccaagatctgtgccaatgtgttttgtggagccggccgggaatgtgcagtcacagagaaaggggaacccacctgtctctgcattgagcaatgcaaacctcacaagaggcctgtgtgtggcagtaatggcaagacctacctcaaccactgtgaactgcatcgagatgcctgcctcactggatccaaaatccaggttgattacgatggacactgcaaagagaagaaatccgtaagtccatctgccagcccagttgtttgctatcagtccaaccgtgatgagctccgacgtcgcatcatccagtggctggaagctgagatcattccagatggctggttctctaaaggcagcaactacagtgaaatcctagacaagtattttaagaactttgataatggtgattctcgcctggactccagtgaattcctgaagtttgtggaacagaat

SEQ ID NO: 24258 - DNA, 503 bp, Homo sapiens
  misc_feature (1)...(503): n = A,T,C or G
tttttttttccaaggccnnnnnnnnnnntttgatcgccttcggaatnctgtgcgagcgatgatatagagcgaggaagactgcccctgttgcttgtcgcaaatgcaggaacggcagcagttggacacacagacaagattgggagattgaaagaactctgtgagcagtatggcatatggcttcatgtggagggtgtgaatctggcaacattggctctgggttatgtctcctcatcagtgctggctgcagccaaatgtgatagcatgacgatgactcctggcccgtggctgggtttgccagctgttcctgcggtgacactgtataaacacgatgaccctgccttgactttagttgctggtcttacatcaaataagcccacagacaaactccgtgccctgcctctgtggttatctttacaatacttgggacttgatgggtttgtggagaggatcaagcatgcctgtcaactgagtcaacggttgcaggaaagtttgaagaaagtgat

SEQ ID NO: 24259 - DNA, 460 bp, Homo sapiens
  misc_feature (1)...(460): n = A,T,C or G
aattgaccncctttgacccngcgctgcaggaattcggcacgagaaattacgaagtccgcagccttgtgatacccacatttacagcggagaagactgaggtccaaaaaggaaaaagtctccatgaggtcagggaccttgtttgtcttaaatatcactacatccctgctgaatggtctggcaaacagtagatgctcaacacatattgttgaatgaattgctaatgtaagttactaattaggccattatttcctatttgcgagtgattttgcctccaggaacatttggcagtgcctggagacatttttggtggtcacaagtaggggagacgggcgccaccagtatccagtgggtgaggccagagatgctgctgaacgttctataatgcggtaatgcacggaacatcccccacaacacaaaatgatccaccccaaaatgtgagtagcgccgaggcggagaaatc

SEQ ID NO: 24260 - DNA, 468 bp, Homo sapiens
  misc_feature (1)...(468): n = A,T,C or G
caggccccccnnaannttttgatnnccntnnnnannnttggaccgcctgcaggaattcggcacgagatcgttttttatttaaaaaaataaaatacggagtctgtaggggccccaccccgggcggaggaaagcgccgcgcggttccggcctgggggcgtccctcacacggtggtctcaccgtgtcggctgttggtgaggcgagtgtagaacttcctccacgagtgcagcgtcttgcccgaccagatccagaagcccgacgtgatgcccacgatgagcgtcatgaggtatttgatcatgtagaccgtgaagtcgggcgacatgcgcggcgtgtagtgcgccgggcacgggatggccaggctcttgcagtgctggctcacccacgagcgctcccagtgctcgcggaaggcctgctcgtagaagtagcaagcgatgacgatggtggcgggcactgtgtagagcacggctagt

SEQ ID NO: 24261 - DNA, 475 bp, Homo sapiens
  misc_feature (1)...(475): n = A,T,C or G
nttcgacggctgtagatttcgcncgcctgcaggaattcggcacgagcagatgtcttagagtttgacgatggcaccccagctaccatgtcccagatagccaaggatgtgtgcaccttcctgcgctgggcatctgagccagagcacgaccatcgaaaacgcatggggctcaagatgttgatgatgatggctctgctggtgcccctggtctacaccataaagcggcacaagtggtcagtcctgaagagtcggaagctggcatatcggccgcccaagtgaccctgtccagtgtctgcttgccatcctgccagaacaggccctcaagcccaagagccatcccaggcctgttcaggcctcagctaagcctctcttcatctggaagaagaggcaagggggcaggagaccaggctctagctctgggccctccttcagcccccatcatgggaataaattaattttctcaatgtaaaaaaaaaaa

SEQ ID NO: 24262 - DNA, 471 bp, Homo sapiens
  misc_feature (1)...(471): n = A,T,C or G
nttttgccggctgcangattcggcacgagccgccatcgtggtgcggtcttgactccgctgctcgccatgtcttctcacaagactttcaggattaagcgattcctggccaagaaacaaaagcaaaatcgtcccattccccagtggattcggatgaaaactggaaataaaatcaggtacaactccaaaaggagacattggagaagaaccaagctgggtctataaggaattgcacatgagatggcacacatatttatgctgtctgaaggtcacgatcatgttaccatatcaagctgaaaatgtcaccactatctggagatttcgacgtgttttcctctctgaatctgatatgaacacgttggttggctggattcagtaataaatatgtaaggcctttctttttgaaataaacagagcatccttttaagatcgggggggggggccggagccccattctgccctaaatggagcaga

SEQ ID NO: 24263 - DNA, 468 bp, Homo sapiens
  misc_feature (1)...(468): n = A,T,C or G
attgccctccgtccgcctgcangaattccgcacgagtggccctgaactttctctttttacgaataccaaagttttcaactttttcagctttagaatttgtaaatatttttgtagaatatcatatgactgtaattccagagtgttccaacttgtttatgatatatttgggtaaatttacaactgttcttttatttgccataatctggttataacactgtttgtggtaggaaaggaaaacatgcaaaacatacacacacacacacacacacacacacacacacacacacacgcagaggtgtgattctcagtaccacgctataggaccatgttatagatcagcgtttagtcacctccaggttatatgcatcgagaacctgaataaatcatgccactatattaatatatattacgtgtttcatatttaaaacatgttttcctaaaatgtagcaactacgtgtgataaaagca

SEQ ID NO: 24264 - DNA, 472 bp, Homo sapiens
  misc_feature (1)...(472): n = A,T,C or G
attgancgcctgcattagtacggctcgagatttaaggcttagactcataaataatgctattgtttatgatttgaaaactttcaggcaaaatccaatttacatttttcccttccctagcaattacttttttccagcttcaactcttcttagttactaatactttgttgactttaaaaatgaaatcattcacaaacttttggtatatgatggagaatgaaaaactagagtcagacagctttaattgacattgtcaacacctccagttatcaggaatacatttttttactgccttaacctgtagtgcgtagaatatgcatcaatttcttgaaggagattcatgtttttataagaattttcatgtaattattgcaattgtggtcaaataaggaacgtttcctgcttgaaattatattgatttaaatgatgtgtgagatgtttcaccattttcaggcactgtgtaattctattgaaa

SEQ ID NO: 24265 - DNA, 486 bp, Homo sapiens
  misc_feature (1)...(486): n = A,T,C or G
aggtagtggccaagggaanaaccctgaagccntcgctgatcccctccaannaccgaaganntaatttacaaaacagatgggtactttggttttacaaaaattacaaaaaatgactcttaaaaatagaaatagcttctcagactcttgggaactacttttaagcacccaaggagttaaaactcaaatggttttcttttttgtaacagcaacaatgaccacggctttgtgccatggcaatcactgctgagggtcttctcctacaattacacaggcccgagctgtgtctgggggaaaggtctccactcaggtcaaagtctgaaggagcaagatcttctcattaatgcagaacctgtgcagaaccaccatcaaattctctccacagcgggagacctggcgctccatggccaggcgaaagtcctccttcacgcctttggggatgcctcaagttacagggtggggcttgatcagcattccttgattgggtag

SEQ ID NO: 24266 - DNA, 468 bp, Homo sapiens
  misc_feature (1)...(468): n = A,T,C or G
nttcgcccgcctgcangcaaaaggaagctgcagatcggggtcaagaagcgggtggaccactgtcccatcaaatcgcgcaaaggggatgtcctgcacatgcactacacggggaagctggaagatgggacagagtttgacagcagcctgccccagaaccagccctttgtcttctcccttggcacaggccaggtcatcaagggctgggaccaggggctgctggggatgtgtgagggggaaaagcgcaagctggtgatcccatccgagctagggtatggagagcggggagctcccccaaagattccaggcggtgcaaccctggtgttcgaggtggagctgctcaaaatagagcgacgaactgagctgtaaccagactggggaggggcagggggagaggcccccatcagggaccagactgttccaaaaaaaaaacaaaaaacaaaaacaaacaaaaaaacacttaaaagcccc

SEQ ID NO: 24267 - DNA, 489 bp, Homo sapiens
  misc_feature (1)...(489): n = A,T,C or G
gccggnttnnnnnnnaaactgccctccgtgcancaattcggcacgaggagattntcatttagcacccagtttcttatacagtgtttcagggccctgtctggaacttggcatgatggttctgttgcgaccagcatggtgggtgttttttaggtttttttttttaatgggctgaggtaatttctcatgacatgttttccttctaatttgggacagcctttggggtggatttctaaagttatacccacacaattaaactatcccagaaacactgggcaatgttaacgacacgcgttcccctgccttggctacttaattgctgaagatgtaatgagcactgttctcacagcctgttcccctgtccttccctttaggagatgagtgaaaaacccaaaaagaagaaaaagcaaaagccccaggaggttcctcaggagaatggaatggaagacccatctatctctttctccaaacccaagaaaaagaaatcttttt

SEQ ID NO: 24268 - DNA, 548 bp, Homo sapiens
  misc_feature (1)...(548): n = A,T,C or G
aagaattgacggctgtgaattcgcacgagctggcctcgaactccctgcctcaagtgatccacccgccttagcctcccagaatgccgatattacaggtgtgaaccaccgcgcccatctcatgcagcttttaaaatctctgcgtgtgttataacagtttcagctagatgagaaaaaaaaaacattttctgtcacaataaatggcactccagctaagttaggttaaaaaaaattagatttcattagaattttaaaacaaacttgatgtttctgttatttcttcattccactaaatgatatggtttgaaaatatttatgctcagatttttaaatggtctctacaacaaattgtcacttgttgggttcaattaagtgctcattgtataagtgcacatggtacaaatcaacaccagcttataggattgtggaaagaattaagagatgaatttagtgatcttatataccctgtcagttggtcatattgtggaagaactctacaaaacttactgtactgggtaactccagatttcttcncataacagggatgctag

SEQ ID NO: 24269 - DNA, 455 bp, Homo sapiens
  misc_feature (1)...(455): n = A,T,C or G
acttgacccgcgctgcaagaaaancnaccttgacccccggctgcaggaattcggcacgagcataacccaatcctacattcagccatcgggacaagtctgtcggggaggtagttcatggtttacaagcctttgctttttaactgtccaatttcctttaaagcacaactagctatttgtttacaaatgatatttttatgtatattttgtatagtgtatcatcatttttgccaaatatgtttttcattataaatgagtaaagagtacttaaggttgcattcatgtattacatgtttgttgttgtaaacctctccaatcagctggtagaaattctcctcattgtgttctatttggtcagtctctgtgtgattgtaggatgtgctccttggtagtactcccagctgtagatttaccagcttaaaagtttgttaggatctgtgcaataaagtgtttgcagt

SEQ ID NO: 24270 - DNA, 489 bp, Homo sapiens
  misc_feature (1)...(489): n = A,T,C or G
agcgccgnnnnntttaaaactggtgatgaggacatacgnanagacacgtagaggaggatgaccacctgaagacacagggagaagatggccagcgagagaggcctcataagaaactagcgtaactggaccttgccggttttgagtatcgtgagtaccctggcagcatagctggtatgagtactcgaagtaccccggcagagtagcggcacctagtagccacaagtaaggtgcaaatacccttgcagcgtatccaggcccagtaggcacgagtactataaataccctctgttatgggcttacttgtgttaccccaaattcatgtgttgaatctctaaccctagtgcctcagagcatgactatacttggaaatagagtctttaaagaggtgattaagttaaacgtggccgttagagtgggccctactccagtctgactggtgtccttataagaagaggagataagacttagacacatagagggggcaaacan

SEQ ID NO: 24271 - DNA, 456 bp, Homo sapiens
aatttcccccgctctgcaggaattcggcacgagggaagggaaacagtctattatacatagccctgtatatatgtacaccaacatgaaacttttatttaacagacgtgtcctggtaaatatgatttttgtagctttttgtaaattatttaaagtgatgtaaaagatatttttggaaaatactgttgttcaattttgtagggtgttcctaactgcagttttctgtgttctgcatacaagtcttagcttaggaaacatttggttcttaccatcacagccaggttcacagaggctctgatgctttttggttgattgctggtgagaatggccggcggtggctgcagtggtagcctgaggaaggccaagctgccctccctgggaatcactcagatgccccaagatgtccgttgggaagctcccaggacagcactttttatacagaggacaccgcctcggccc

SEQ ID NO: 24272 - DNA, 478 bp, Homo sapiens
  misc_feature (1)...(478): n = A,T,C or G
cttgcccggctgcangaattcttcgcgagacataaatccctttggttccagaaaatctcctgaaaaagaggaaggcttatcaagccctcaaagccacccaggcaaagcatgcacttttggcaaagaaggagcagaagaaaggaaaagggctcaggtttaagcgactggaatcattcctacatgattcctggcggcagaaacgtgacaaggtgcgtctcagacgactagaagtgaaacctcatgccttggaattgccagataaacattccttggcctttgttgtacgcatcgaaaggattgacggcgtgagtttactggtgcagagaaccattgcaagacttcgcctaaagaaaatttttagtggtgtctttgtaaaagtcaccccccagaatctaaaaatgctgcgtatagtggaaccttatgtgacctgggcaacaagcgaaactctgtctcaaaaaaaaagaaaagacagtagcan

SEQ ID NO: 24273 - DNA, 427 bp, Homo sapiens
  misc_feature (1)...(427): n = A,T,C or G
ntttgatcgccttcggaattcttcgcgagacacaggccactgaaaataaatcactccaacaatgcaatagtaaaaccccctgagatgacacctcatgctgcagctaaggagttagaagaagtaatgaagcgagtacgagaagctcagtcatttatctcagcagctattgaaccagagtctggaaagagcaatgaaagaaaaggcggtcgatctcgttcccatactcgctcaaaatccaggtctagctcaaaatcccattctagaaggaaaagatcacaatcaaaacacaggagtagatcccataatagatcacgttcaagacagaaagacagacgtagatctaagagcccacataaaaaacgctctaaatcaagggagagacggaagtcaaggagtcgttcgcattcacgggacaagagaaaagaca

SEQ ID NO: 24274 - DNA, 501 bp, Homo sapiens
  misc_feature (1)...(501): n = A,T,C or G
aggggtagnnnaanttttgacggcctcgngannttcgacgagacgtgtcggaattcggcacgagcatccccttgcaggtgaggacttaagcaggtgggttttggggggtcttgctcaggccacagctgggtgcatgaagagccagtgagcctcattgagcccctctggtcagccagatctgacattgagcccagcattgaagatcaaagcaggtggggctttgggatgtgaagtgggttctgacgcggggccccacagacctgtctccgcgtgagctgcctgcaggcccctgcgtcattcctcatctgcgtgcgaggcctctggcttggagagcctccccgctgtgcacagttctctctttgccagggcagggcttggggcagcaccaggctggggcagaggaggaaagcgagaggacagacctccagaagagcagcggagggcgggtgaggatttccccatataccagtgtgtgttcatctacccatgaggaataaaacn

SEQ ID NO: 24275 - DNA, 492 bp, Homo sapiens
  misc_feature (1)...(492): n = A,T,C or G
aaggcccnnnanannttttgacggctgtagaattctcgaaaagcgctttggagccggccccaggcagcgtgtgtcggtcgcctagtctggagaactagtcctcgtctcacggtgagggaatggaccgacacgggtattgtaccgctgagggaaaggagcgggactccggacctccaagaggtagggagtgaggccggtagaccggcgcgcctccgggggggattcctcccgggcgttgagttgccaacctgggacccgaggaagttcggcgtggtggtgtgctttttgttgttgttaaccctcctcggatttctcgaatttcacaccactgtccatatgcgatgatgtttgtttgcccttgacgcacttactcatggatggtacttcagcctcgttagacagcctggtgatggaggatgaagaaaccatgtgcttctcattcagttctggactcagtttcccttgtcttcagcaagttatttttgttagttc

SEQ ID NO: 24276 - DNA, 477 bp, Homo sapiens
  misc_feature (1)...(477): n = A,T,C or G
nttttgaccggctgtaggatttcgccncgcctgcaggaattcggcacgagccgcgtctagcttagtttcagagaccttaatttatattctccttcctgtgccgtaaggattgcatcggactaaactatctgtatttattatttgaagcgagtcatttcgttccctgattatttatccttgtctgaatgtatttatgtgtatatttgtagatttatccagccgagcttaggaattcgcttccaggccgtgggggccacatttcacctccttagtccccctggtctgaactagttgagagagtagttttgaacagtcgtaaccgtggctggtgtttgtagttgacataaaggattaagaccgcaaattgtccttcatgggtagagtcaggaagcccggtggcgtggcacaacacactttggtcatttctcaaaaaccacagtcctcaccacagtttattgatttcaaattgtctggtcn

SEQ ID NO: 24277 - DNA, 501 bp, Homo sapiens
  misc_feature (1)...(501): n = A,T,C or G
ngcggccatttgatcgccttcggattgatncgcctgaggaattcggcacgagaaagagctggattcctgcttagtaagacagaaagaagtacatagagttgaaatggaagagttgacctcaaaatatgaaaaattacaggctttacaacagatggatggaagaaataaacccacagaacttttggaagaaaacactgaagaaaagtccaaatcacatttggtccaacccaaattgcttagtaacatggaagcccagcacaatgatctggagtttaaattagccggggcagaacgggagaaacagaaactgggcaaggagattgttagattgcagaaagaccttcgaatgttgagaaaggagcatcagcaagaattggaaatactaaagaaagaatatgatcaagaaagggaagagaaaatcaaacaggagcaggaagatcttgaactgaagcacaattccacattaaaacagctgatgagggagtttaatacacagctggc

SEQ ID NO: 24278 - DNA, 477 bp, Homo sapiens
  misc_feature (1)...(477): n = A,T,C or G
cattggcactcgatcgcgctgcaggaannccgcacgagtatagatcatggccagccaagaccaccctcaaacagaacggtccagtcaccaaattcatcagtgccatctccaggccttgcaggacctgttactatgactagtgtacaccccccaatacgttcacctagtgcctccagcgttggaagccgaggaagctctggctcttccagcaaaccagcaggagctgactctacacacaaagtcccagtggtcatgctggagccaattcgaataaaacaagaaaacagtggaccaccggaaaattatgatttccctgttgttatagtgaagcaagaatcagatgaagaatctaggcctcaaaatgccaattatccaagaagcatactcacctccctgctcttanatagcagtcagagctctacttctgaggagactgtgctaagatcagatgcccctgatagtacaggagatcaacct

SEQ ID NO: 24279 - DNA, 470 bp, Homo sapiens
  misc_feature (1)...(470): n = A,T,C or G
ncttgaccgtctgtangacttcggcacgagggctggcatcatcacgacaaagatgggtggcccctctgtatgctcaggctggggcagatggacaccaacggcttggtgagagcactcggggaggaagccctgctgagatacgttctctccataaatgaagaagagctaaggcgatgtgaagagaatacaaaagtctttgtttggcctatcagctcatggacctgcctggcggacttggaaggggtgaacatgcgccacttatggagacctgatgtcaaagtgctgcggtggatcatcgaggtggtgaaggccagttaccctaagagactgggccgacttctcatcctgcggtcacccagggtatttcctgtgctctggacgctggttagtccatttattgatgacaacaccagaaggaaattcctcatttatgcaggaaatgactaccagggtcctggaggcctgctgga

SEQ ID NO: 24280 - DNA, 485 bp, Homo sapiens
ataaaacctagatcgccctgcaggaatccggcacgaggccattgctaccaaatgtggtattttacatcctggggaagattttctgtgcctagaaggtaaagattttaacagaagaatacgaaatgaaaaaggagagattgagcaagagaggatagacaagatttggccaaaacttcgagtacttgcaagatcatctcctactgataagcatacactggttaaaggtataattgacagcactgtctcagaccaacgccaggttgtagctgtaactggtgatggtacaaatgatggcccagcactaaagaaagcagatgttggatttgcaatgggtattgctggaactgatgtagctaaagaagcatccgatattattctcacagatgacaactttacaagcattgttaaagcagttatgtggggacgaaatgtctatgacagcatctcaaaattccttcagttccaacttactgttaatgtagtag

SEQ ID NO: 24281 - DNA, 499 bp, Homo sapiens
  misc_feature (1)...(499): n = A,T,C or G
agagccggggcccgngaaaccttgannaatcgaccggctgtacgaattcggcacgagctgagggctgtcgagtgagctgccccagcccctcccagcccttgcccagcctgggggagtggggaaggcttgggcatggccccgttggaggttgatttgctgttttgtttcttgtctttgtgttctgtggtacttgctgagagaaaagaaaagtgagccaagcagaaggaggtgggaaaacggacccaaaccccagtgtgccctgccccatgcctttcctttagtggtgggaaacccttatcttgcaaagtgaatgtgtccccttccccaccctctagtgtatttcacagaaaacaaaacctcccaataaaacggttgaaacctgaaaaaaaaaaaaaaaaaaaaaaaacctcgggggggggcccggcccccatttccccttatagggaggggttttacatttccttgcccgggtttttacaacgtcgggacgtggggaana

SEQ ID NO: 24282 - DNA, 516 bp, Homo sapiens
  misc_feature (1)...(516): n = A,T,C or G
tgttttttttatcaagganganaaaaaanttttgatggccntcngnaannttcgatagccttcggcagaatctattctttcttgcagaccgaacagaaatgctgtctgagagcaagaatatattggatgaactgagaaatgaataccaagaaatagaaaacttagacaagaccaaaatcaagaaatagtcaacctgatttcacataacaatgtgtggcatttgttgttctgtaaacttttctgctgagcatttcagtcaagatttaaaagaggacttactatataatcttaaacagcggggacccaatagtagtaaacaattgttaaagtctgatgttaactaccagtgtttattttctgctcacgtcctacacttgaggggtgttttgactacccagcctgtggaagatgaaagaggcaatgtgtttctatggaatggagaaatttttagtggaataaaggttgaagctgaagagaatgacactctaaaaaaaaaaaaaaaatattaaaaaaaaa

SEQ ID NO: 24283 - DNA, 461 bp, Homo sapiens
ctttggcccccttttcccccgcgctgcaggaattcggcacgagccgacgaggactctctcattgagatcatctgctccagaaccaaccaggagctgcaggaaattaacagagtctacaaggaaatgtacaagactgatcagaatcatggtctcccgcagtgaagtggacatgttgaaaattaggtctgaattcaagagaaagtacggcaagtccctgtactattatatccagcaagacactaagggcgactaccagaaagcgctgctgtacctgtgtggtggagatgactgaagcccgacacggcctgagcgtccagaaatggtgctcaccatgcttccagctaacaggtctagaaaaccagcttgcgaataacagtccccgtggccatccctgtgaggggacgttagcattacccccaacctcattttagttgcctaagcattgcctggcctttctgttt

SEQ ID NO: 24284 - DNA, 371 bp, Homo sapiens
aatttgccccgctctgcaggcttcagtctgtggtttggacagtctgacccaaccttgagctttgtgggtgaacatgtaattcagacctcatcaatcagcaaatccatctgaactgtggaggagaagctctctttactgagggtgctttagctttgtaggatgaaaacctcaaactaacagggcctaccatgtagagaatgaagccagtgcaggggaaagcagagccaaaatatggagagacttgaatcctgatgacagcgtttgtgcccctggatccaaccgtgcctgaagctagaatatcccctggacttttcagttatgtgaaccaataaatacccttttttgcttaagttaaaaaaaaaaaaaaaaaa

SEQ ID NO: 24285 - DNA, 486 bp, Homo sapiens
  misc_feature (1)...(486): n = A,T,C or G
gtggtggcnaattgcacgctgcggaattcgatggagcacatgcggggcacccagacagaggtggacagccacatcgtgaaggtggtgcagcagatcgtgcaccaggctagcgccggccaccagatcatcgtgcagaacgtcaccatggacgaggagactgcgctgggcccagaggcggctgccgccgacaccatcaccatcgccacccccgagagcctgacagagcaggtggccatgacgctggcctcggccatcagcgagggcactgtgcttgccgcccgggcagggacaagtggcactgaacaggccactgtgaccatggtgtcatcacaggacatcgagatcctggagcatgcaggcgagctggtcatcgcctcgccggagggccagcatggaggtgcagacggtcatcgtctagcatgaggtctgcggtgtcctggccgggcagggacagggcagaggactctgagcgccccacccatgcct

SEQ ID NO: 24286 - DNA, 450 bp, Homo sapiens
  misc_feature (1)...(450): n = A,T,C or G
attgaccgcgctcaagaancnacttgacccgcgctgcaggaattcggcacgagagggaatccagctcctgaatacacatggtttaaggatggcatccgtttgctagaaaatcccagacttggctcccaaagcaccaacagctcatacacaatgaatacaaaaactggaactctgcaatttaatactgtttccaaactggacactggagaatattcctgtgaagcccgcaattctgttggatatcgcaggtgtcctgggaaacgaatgcaagtagatgatctcaacataagtggcatcatagcagccgtagtagttgtggccttagtgatttccgtttgtggccttggtgtatgctatgctcagaggaaaggctacttttcaaaagaaacctccttccagaagagtaattcttcatctaaagccacgacaatgagtgaaaatgatttcaag

SEQ ID NO: 24287 - DNA, 468 bp, Homo sapiens
  misc_feature (1)...(468): n = A,T,C or G
aggggccttagccctcctgcggaattcggcacgaggagaaccccagggggatgccaagaaaccagggaaggagtctccctgggaggttctgaaaaggaagccaaaagatgctggtggtggatctgtcttgaagtcaccatcccaaacccccaaggagatgaaatccccagttgtcttcagccaagaggatgatagagaagtagacaaactctactgctttccacttgatattgtgcacatgcaggctgcggcagaggggagtagcagggactatgtagccgtcaaccggagccatggccagctcaagacagatgagcagggcctgaacacacatggggccagcgagatatcagaggatcagatgttaggtgatagccaatccttctctcgaacggactcagataccaccacagagacagcaccaggcaaaggcaaattgaggagtgggtctaacacaggcctggattn

SEQ ID NO: 24288 - DNA, 485 bp, Homo sapiens
  misc_feature (1)...(485): n = A,T,C or G
aactagannanaccttgaccaggcctgcaggaattcggcacgagtagatctcttattgaaatgcgtattttatttaatgtaagtatattttggaacagatttgtaatttgtacaattcaatgctttaattatttgttctattctcatttagtttgtattttcattgtatagagcagacagaaagatgttgggtcaagcaactattgaagagaaatacaaagaaaatatgaaaggcacattattcattttgtccaaatgcaatgagaatctcactcttaaaaatcagctcttgctttcgggtccggatgtggtgagcacattttggagccctttgaagctagatttggatgatcaaaacaaaaaggcagggagcccattctaacatgctgcccagaggaaactggctggagcctggaccagctggggctgatgcttttgcagtggtcatgtgattgtgacctggtagctacttatcagagagccag

SEQ ID NO: 24289 - DNA, 494 bp, Homo sapiens
  misc_feature (1)...(494): n = A,T,C or G
gggagnncnccaagggagcccngaataganncccttttagaccgcctgcangaattcggcacgagccgaaatgggcaagttcatgaaacctgggaaggtggtgcttgtcctggctggacgctactccggacgcaaagctgtcatcgtgaagaacattgatgatggcacctcagatcgcccctacagccatgctctggtggctggaattgaccgctacccccgcaaagtgacagctgccatgggcaagaagaagatcgccaagagatcaaagataaaatcttttgtgaaagtgtataactacaatcacctaatgcccacaaggtactctgtggatatccccttggacaaaactgtcgtcaataaggatgtcttcagagatcctgctcttaaacgcaaggcccgacgggaggccaaggtcaagtttgaagagagatacaagacaggcaagaacaagtggttcttccagaaactgcggttttagatgctttgttttg

SEQ ID NO: 24290 - DNA, 480 bp, Homo sapiens
  misc_feature (1)...(480): n = A,T,C or G
catagcacctcggncggctgtccgaattcggcacgaggcggtctacgccgagtgacagagacgctcaggctgtgttctcaggatgaccgagtgggagacagcagcaccagcggtggcagagaccccagacatcaagctctttgggaagtggagcaccgatgatgtgcagatcaatgacatttccctgcaggattacattgcagtgaaggagaagtatgccaagtacctgcctcacagtgcagggcggtatgccgccaaacgcttccgcaaagctcagtgtcccattgtggagcgcctcactaactccatgatgatgcacggccgcaacaacggcaagaagctcatgactgtgcgcatcgtcaagcatgccttcgagatcatacacctgctcacaggcgagaaccctctgcaggtcctggtgaacgccatcatcaacagtggtccccgggaggactccacacgcattgngcgcgccgggac

SEQ ID NO: 24291 - DNA, 474 bp, Homo sapiens
  misc_feature (1)...(474): n = A,T,C or G
nattgacctgcgctgcacgaattcggcacgagacatcgctggccccacaaacgttcaggggtacagccatggcagctccttcctctgccgtgagaaaagtgcttggagtacggtttgccacacacgtgactggacagtgtccaattcaaatctttcagggcagagtccgagcagcgcttggtgacagcctgtcctctcctgctctccaaaggccctgctccctgtcctctctcactttacagcttgtgtttcttctggattcagcttctcctaaacagacagtttaattatagatgcggcctggccccatcctcacttcctctttttatttcactgctgctaaaattgtgtttttacctactactttggtggttggcctcttttcggcaaagttggagcgagtgccaagctctccatctgtggtcctttctgccaagagcgactcatagtaaccaggatgggagagcagctgcn

SEQ ID NO: 24292 - DNA, 493 bp, Homo sapiens
  misc_feature (1)...(493): n = A,T,C or G
cgggtggggaatgcacgctgcangaancgaatggaaggtcatgcgagacacncccacgagatagaattggctgcagcattggcaagatgctatagcgagcatgatgccctttccattgaccacatccttccagaaacagttaggaagaaagaactaagggcctccactttaccactttatgcttggataaatacttgtaaaatcagccctgaagaagtttataataatttgaagagaagaggctataataaagtcaaatctgtattgcatattgatgataaagtctttgctgtggatcaacattgctatgatgtcttaatttttccatctcatcttaaaaatgatcttataaatatagatcttttcaaagattacaaacttatatttcaggacaaatctcgaagtcttgctgtccattctgtaaaggctttattaaatatggatgatgatgtcttaatggtcaatacaggctcatggtacacagcttcccaca

SEQ ID NO: 24293 - DNA, 494 bp, Homo sapiens
  misc_feature (1)...(494): n = A,T,C or G
agcgccgnggaattttaaattgacgactgtaagaacntgcacgaggaacaagagaaaatcagtggcactgttaatatccgcacaagagacaataaggtccacggggaacgcaccatttctgaaactatcgagcggctacagcagctcaaagagttccgcagcaaacaggcagaagaagaattttaatgaaaaaattacccagattggctccatggaaaaggaggaacagcgtttccgtaaaattgactttgtactctgaaaacgtcaatttatattgaacttggaggagtttggcaaagtccgaataggtcaacctgcaggcgtaactatttttgacctagtcagtttttaaacaatgtgcatttgaaggagttaattaaaagagagccaataaaatgattttactcattcagtatctgagtactggaagtgaaacatgaggaatgctttagtgtaatgtgggagaacttttttgtaaatttaatgcaattgaa

SEQ ID NO: 24294 - DNA, 470 bp, Homo sapiens
gcgcgccatagacttcgtcgccgctgcaggaattcggcacgagatttaacctccccctgcctctatttgctcatctgtaaaatggggataataatagttaacctactttgcagggttattgtgaggattaggaattaatccatgttaaaaaaaaaaaaaagttggaccaggggttggttaccaacctatttagttaagggctaaataaacaatttaggctttgtgtgctaaggatcaaaattaaaaatgaaactgggggcgggggctcatgcctgtaatcccaccagtttggaaagctgaggcgggcaggggcttgaccccaggagttcgagaccacccaggcaacatggcaaaaccctatctctacaaaaactttaaaatttattcaggtgtggttgggtgtgcctgcggccccacctacttgggaagctgaggtgggaggatcacttaggcctgagaggtcgaggcta

SEQ ID NO: 24295 - DNA, 460 bp, Homo sapiens
  misc_feature (1)...(460): n = A,T,C or G
ggtgcactgtccttgcagattcggacgaaacctagcttcacaatgatggcaatatttttcgtcaacagcagttcacctagtgagtgttgagactctgggtctgagtgaagctgagggtagagggaacacagggttggggtagtttctctctttgggctgacaggctttgtcacccacacacatccagaggtgcccacgagtgtattcggggagaagcttcgagaacaagttgaagagcgactgtccttctatgagactggagagataccacgaaagaatctggatgtcatgaaggaagcaatggttcaggcagaggaagcggctgctgagattactaggaagctggagaaacaggagaagaaacgcttaaagaaggaaaagaaacggctggctgcacttgccctcgcgtcttcagaaaacagcagtagtactccagaggagtgtgaggtcagtaggcagn

SEQ ID NO: 24296 - DNA, 486 bp, Homo sapiens
  misc_feature (1)...(486): n = A,T,C or G
gcggggccccaatgcncggctgcatagatcgcacgaggggaatggccggccgccccactgaaagcgctggggaaccgagaggtgtcttagaaagctgcatgagtggcagaacggtggctactatgacagagaggccgccgtgggcgaagagggagtgtgacattcttcagaattcatcctggaatcaatattatgccaaagaaaattttctgaaagctacacagatcataccactgcaactcagccaaccagcacatcggacagtgggaggaggaattcttggctaagagtactgagagatggggtttcaccatgttaaccaggattgtctcaatctcctgaccgcgtgatccacctgcctcagcctcccaaagtgctgggattgcaggcgtgagccaccatgcctggccaaaattctgtatgtctttctaatctcacttcctaatggagataaaatagatctcaggcttatgtatttttctagaa

SEQ ID NO: 24297 - DNA, 310 bp, Homo sapiens
  misc_feature (1)...(310): n = A,T,C or G
anaagctataatgaccgtcctgatgtcattgtagaggctcagtttgatggcagcgactcacaagatggacatggcatcacacaaaatgtgctggttgatggtgttaagaaactctcagtttgtgtttctgagaaaggaagagaggatggtgatgcaccggttacaaaagatgagaccacctgcatttcacaagacacaagagctttatcggagaaatccctgcaaagatcagcaaaggtcattgcctacagattttctccacgtgtccaaatggctttcacctgagctacttgttgaagatctcgtgtga

SEQ ID NO: 24298 - DNA, 344 bp, Homo sapiens
aacacaggcagctggattcggttttggggtatctgggctccaggcagaagcacagcctctcccgacctgccctacgactacggcgccctggaacctcacatcaacgcgcatatcatgcatctgcaccacagcaagcaccacgcggcctacgtgaacaacctgaacgtcaccgaggagaagtaccatgaggcgttggccaagggagatgttactgtccagatagctcttcatcctgctctgaagttcaatggtggtggtcatatcaatcatagcattttctggacaaacctcagccctaacggtggtggagaacccaaaggggagttgctggaagccatcacacg

SEQ ID NO: 24299 - DNA, 496 bp, Homo sapiens
  misc_feature (1)...(496): n = A,T,C or G
gcgagggcgcccnaatcgcacgcccgnattgcaccgcctgcaggaattcggcacgagcggagctttacctgagatattcacagaattggaaatttcctatttcctgcttagacggcttctaggtgtacgcactgaaggagacaagaaagcagcaaaggttcaaaagctgtctaagaatgaagtgctcatggtgaacataggatccctgtcaacaggagggagagttagtgctgtcaaggccgatttgggtaaaattgttttgaccaatccagtgtgcacagaggtaggagaaaaaattgcccttagccgaagagttgaaaaacactggcgtttaattggttggggtcagataagaagaggagtgacaatcaagccaacagtagatgatgactgaagaataccagttaaataatacattcggatggatttggaagttggaattcctcttaacaaccaaggggtttattttcaaagcaatattggggaattgatttca

SEQ ID NO: 24300 - DNA, 456 bp, Homo sapiens
  misc_feature (1)...(456): n = A,T,C or G
attttgcccgtctgcaggaattcggcacgagggaaaatcagccagatgccggtgattttgacaccattacattttgatcgggacccacttcaaaagcagccttcatgccagagatctgtggttattcgaacctttattactagtgacttcatgactggtatacctgcaacacctggcaatgagatccctgtagaggtggtattaaagatggtcactgagattaagaagattcctggtatttctcgaattatgtatgacttaacatcaaagcccccaggaactactgagtgggagtaataaacttcttgttctattaaaaaaaaaaaaaaaaaaaaaaaaaccctcgggggggggccgggaccccaattccccttatagggaggggaataacaattcatgggccggggtttaacaacgccgggagggggagaggaggggnnnnnnnnnnnnnnnnnn

SEQ ID NO: 24301 - DNA, 478 bp, Homo sapiens
  misc_feature (1)...(478): n = A,T,C or G
gaaaaaaatttagtcggctgtcagattttgatcgacatgaagatgtgatatgtgcatacgattccaatcatcacatgcctaaatcatctttggcaaagcacatggcatcttgtatattgaggaaaatgggctataccaaagaagaagaggatgaaatgtataatcctgagtttttctatgaaaatgtgaagataccttcgattactttgaataaggactcacaattccagataattaaacaagctagaactgcagttgggaaagacagtgattgttataatcaaagaatttattcttcattgcctgttgaagttcctttgaatcacaaacggtttgtttgtgatctaactcaagctgatcgtcttgccctctatgatttcgtagttgaggagacaaagaaaaagcgctctgattctcaaattattgaaaatgacagcgatctctttgtagacttggctgccaaaatcaatcaagacan

SEQ ID NO: 24302 - DNA, 472 bp, Homo sapiens
  misc_feature (1)...(472): n = A,T,C or G
nttcgaccgccctgaagaatnnngctctgccccgcgctgcaggaattcggcacgagcaaagtgtgcagctgtaactgctcacgccaaaatggctgatggggaggctgctgctttcaggggcccgtgcttgtaaaataaccttccaggaagaggcacattgcccacctttggaaagggaggaatatgccttctccttggttgttccacagagttttaggaaaatctgttagggatgggtagatgtcaaactgccttacgcagtcatactgatctttagccatcagattgatcttcttcacaccaagctctgtttacattccgagaggtgtcatgaagaaaagtctgttcaataagggtttgggaatgttannaaaaaaaaaaaaaaaataaaaaaaaaaaaaaacctggggggggggccgggcccccaattcccccttaaggggggcggttaaaaatcccggggccggggttt

SEQ ID NO: 24303 - DNA, 312 bp, Homo sapiens
agtccgagtctgcttcaactgcaataaaaagcccggtgacctttaaccccagccccctctccgagtccttcacaattccttaggttctcagggttagaaacagtcttgcgaggtaggccctcctcccagtcacctgctgtggtgtgtgtcctctcctctccgcatccagggccactttccctcagtgggggtgagcctggcggcaggcccgaaggtgtggacccctcatggcaggggaccttgcaacttatcgcaaaggggaatgaacctgaatcccgtgcatttatttcagttaaaaataatgaatatatg

SEQ ID NO: 24304 - DNA, 505 bp, Homo sapiens
  misc_feature (1)...(505): n = A,T,C or G
tgcgnttnnnnnnaattgatcgccttacgaattcggcacgagatcaaagcattctatcagaagatgtatggtatctccctttgccaagccatcctggatgaaaccaaaggagattatgagaaaatcctggtggctctttgtggaggaaactaaacattcccttgatggtctcaagctatgatcagaagactttaattatatattttcatcctataagcttaaataggaaagtttcttcaacaggattacagtgtagctacctacatgctgaaaaatatagcctttaaatcatttttatattataactctgtataatagagataagtccattttttaaaaatgttttccccaaaccataaaaccctatacaagttgttctagtaacaatacatgagaaagatgtctatgtagctgaaaataaaatgacgtcncaagacancnnnnnnnannncntnnnnnnnncnnnnnnnnggnnnnnnnnnnnnnncnnnnncctanccccccc

SEQ ID NO: 24305 - DNA, 467 bp, Homo sapiens
  misc_feature (1)...(467): n = A,T,C or G
cgtggtcnnnnatttgacttcatgagcatttccgcacgaggcaagntggatatgcacaaaaagatgttccgcagaggttatatagccatgttagccgtgtattccaaatacaggagaaatggcattggtactaacttggttaagaaagctatatatgccatggttgagggagactgtgatgaggttgttttggaaaccgaaataacaaataagtccgctttgaaactttatgaaaatcttggttttgttcgagataagaggctgttcagatactatttaaatggagttgatgcactgcgacttaaactgtggctgcgttgagaaactgacatcaaggaacaactatcatccacacagaatcgacctttgcatgcaatgcaatttgtacagaattgctttgcaagtggatttagtaatttccatgcagctcttacctgtcagtgtctcattgagtgtcgcacaatatt

SEQ ID NO: 24306 - DNA, 506 bp, Homo sapiens
  misc_feature (1)...(506): n = A,T,C or G
ncgtgtttgacgctattgatcgcctgtagaattctgcacgagcttctctgcctgctagcaaacggcttctatcgaaatagcatctgcagccagccagatctgcatgctattggcctgtccatcatcccagcccgctttaccagagtgctgcctcgagatgtggacacctactacctctcaaacctggtgaagtggttcattggaacatttacagttaatgcagaactttcagccagtgaacaagataacctgcagactacattggaaaggagatttgctatttactctgctcgagatgatgacgaattggtccatatattcttactgagtctccgggctctgcagctcttgacccggctggtattgtctctacagccaattcctctgaagtcagcaacagcaaagggaaagaaaccttccaaggaaagattgactgcggatccaggaggctcctcagaaacttccagccaagttctagaaaaccacaccaaaccaaagaccagcaa

SEQ ID NO: 24307 - DNA, 539 bp, Homo sapiens
  misc_feature (1)...(539): n = A,T,C or G
nggagatcgattcccggctgcangaattcggcacgagcaaaggctcacctgtgggaccgcgttgtcagtctcggcgcctgcgctccgctccaggaagaaagcgccaaggcgaggcatggcggtctccgtgcgcaccggcagcttctcgtgggacatcaggatgtcgtccaaagaaagaaagttctcctcaggccccagcgcacccgactccactcggaaataagcctctgacatggcggccacttgagcttctccgcttccactcgcgtgattcggaggagcctcaggagttaggggtgtacaagacggggaagcggagactgggcaggatggttggggtcaggaaagtggattgaaactcgtttcccgcgcccggngacgcatcagacaggagcagtcaattcgggcggtaccggccaggcagaagcaatcgatcaagtctgcagatttagagcagcgggacacggctggngagcggtangtgggggcggccgaagttctcttcccttcgcttgctggacggggtgggaacgttacan

SEQ ID NO: 24308 - DNA, 517 bp, Homo sapiens
  misc_feature (1)...(517): n = A,T,C or G
agggnnnnnnnnnngnnnntttgatcggctgtggaattcggcacgacagcagatgttgggagcttttcagagtgacctcagctccatcagctctgagatccggacactgcaggaacagtcaggagccatgaacattcgacttcgaaatcgccaggcagttcgggggaaacttggggagcttgttgatggtctggtggtgccttctgctctggtcacggcaattctggaggctccagtgacagagcccaggttcttggagcagctacaggagctggatgccaaggcagccgcagtcagagagcaggaagctagaggcacagcagcctgcgcagatgtcagaggcgtgctcgatcggctccgggtcaaggtgggaagtagggatggataccctggaggctactggaagcagccttcccaagatcttcactatggatttccttggcagagctcactgtagcctgtctccagggacttcaccctgccttttctgggcagccccattcttgtctctctgggt

SEQ ID NO: 24309 - DNA, 483 bp, Homo sapiens
  misc_feature (1)...(483): n = A,T,C or G
caaaaattggcacgccttangaaantttgatcgcctgcggaattcggcacgagatactgttgagttttttcctcaaactttatcagccttagagaagctaagatgctagataatggtaaattggcaaggtaggcacaatcgggtgatgtgcatagagaggaaggagaagatggggcatgagctcccacaattcagatttggttgccaagtaagtagaaaaagactaatgtacccagagacaagaaggagtaagtcagcacactataaaaccagtgcagatcgaaagacaatttcagtaacaaggaaagtgttggagaggtagaatcctaagaggatgtgcccagagagggacatttctgaattacgtcttggatataaaatagtttcaatccaagagtggccgcatgtctggatgacagagatgtaggtgagtaatgaggaaactgagagtagaaaggcagttcatcatgtaaggtgttaaag

SEQ ID NO: 24310 - DNA, 505 bp, Homo sapiens
  misc_feature (1)...(505): n = A,T,C or G
nggcggccccttgatcgccccntnngattgcancgcctgcaggaattcggcacgagtacaggtgcatggtcagattcggagagtatcagtttctgatggagaacgaagatggcgagtcattggaattttttgagactcaatttattttatctccaagatcactcttgcaagaaaacaactggccaccacacaggcccataccggagtatggcacttattcgctctgctcctcccaaagcagttctccgacagaaatggatgaaaatgagtcatgaacacagaaagtctaagaggagaaatatgatggatgaagagctctgtagatgctgtatagacactaaataagagttgattagggtagtatattatagtcatctgttatgctgtgaaatttggaattcagtattatcattttgaagtctgtaaattgtgttagtcattaacttagtcacctgttgtattctggatctacacaaaattattttaactgctcttattaatctgg

SEQ ID NO: 24311 - DNA, 500 bp, Homo sapiens
  misc_feature (1)...(500): n = A,T,C or G
acgccccccatagtcgcttgaggaacntggcacgagccaccctccagcctgccttagtactgcggcaagagcgtaggttcaatgtgttttcaagagaaaggaaagaatatgttgttaaagtccattgggcctcccaggcccctccaggacaatggatttcatcatgtcgaccccacctcttgggtgggctcctcctttccagtgaaactacacctgaagccctagagatggcagaatcaggagcaagtttctgcatggaaacaggattccatttagctggctcactcagggaacttgatgttttgcttttgttttaaaagatgcagcttcaaccccttccccctactcccgacttggagggcaccaaagagctggttctgatgaactaagctcactgctgtctcaccctcaccagagggactgccttctcccaaaaggagctcccaaagcccttgtcccacagccatttaaaaatcttctgaagggtctcagggcacana

SEQ ID NO: 24312 - DNA, 473 bp, Homo sapiens
  misc_feature (1)...(473): n = A,T,C or G
gcgcgccatagannatcgagccgcgctgcaggaattcggcacgagctgaatcatctacagtttaaggtattttacctcaaaaatgaatcattgtgttaggattctaattctttataaagaacttcatgggcttcaataatgtctagaaagtaaaataaagaggaatgttaccatccccagctgcccttatttccagagaaccagacgtttgtttcccagttggaaagaagacagttgagcacttcaggatggtttttaaatttggtatgagattctctgccaacaccaagctctgagttaacgtgctttcttctcctggccctgacagagcactacagcatcaaagtaaatctttggggacagtgtagcccatctgcatcctatttaatttcttcccttctccccaccagtgttgtcacagggctatgttgcttaaaggtagtctggctgctgaatccctttctcagctcaga

SEQ ID NO: 24313 - DNA, 452 bp, Homo sapiens
  misc_feature (1)...(452): n = A,T,C or G
cggagggtnnnnnnaattgancgcctgaggaatccggcacgaggttgggcatagactccagtctcttctccttgctcacctcccccaggcagtggtcttttccccttcctctactggagccaattccccctcccccaaatcatcgtttccccaatacatggttcccactgatctcagaccctcaggtcatagaagtttctttaccctcaccttttccatgtcattctctttcccagtgattggggctctgattggcaagcaggagggccgaaatatcgaggtgatgaactcctttgagctgctgtcccacaccgtggaagagaagattatcattgacaaggaatattattacaccaaggaggagcagtgtgagagtggaatagatgtggggaagaggagtgggagttaaaaaaaaaatgtacagggtggggaagatggagagggttggaaag

SEQ ID NO: 24314 - DNA, 479 bp, Homo sapiens
gggtgaaaaactgatgcctcggaatcccttagcgagcgtggtgcgacgccttcttgtgatgctctctgggaagctctcaatccccagccctcatccagagtttgcagccgagtagggactcctcccctgtcctctacgaaggaaaagattgctattgtcgtactcacctccgacgtactccggggtcttttgggagttttctcccctaaccatttcaacttttttttggattctcgctcttgcatgcctcccccgtcctttttcccttgccagttccctggtgacagttaccagctttcctgaatggattcccggccccatccctcacccccaccctcactttcaatccgtttgataccatttggctccttttttggcagaacagtcactgtccttgtaaagttttttagatcaataaagtcagtggctttcatgaaaaaaaaaaaaaaaaaaaaaaaaaaaaaaaaaaaaaaaaaaca

SEQ ID NO: 24315 - DNA, 493 bp, Homo sapiens
agggggaattgatcgccttcggattgcgcacgatgattaaagctacattgccagcagaagtatataggatactttcagtgcacgggacagaacccttggtgctcttcaaggaaggtgctgttcgtggtttagaggccttgcttgcagacccccagcagaaaattgaaactgttatctctgatgaagaagtgattaaatggacaaagtttttcgtagtattcagacatcctgttttaatttttattactgaaaaacatggaaattactttgcttacgtgcaaatgtttaactcacgtatcttaaccaaatatacactcttacttggacaagacgaaaactctgttataaagagttttactgcatctgtagatcggaaattcatctctttgatgtcattaagctctgatggttgtatatatgaaaccttgataccaatacgtccagctgacccagaaaaaaatcagagcttagttaaatcactgctgctcaaggg

SEQ ID NO: 24316 - DNA, 524 bp, Homo sapiens
  misc_feature (1)...(524): n = A,T,C or G
ggcnannnnnnnggggnaattgacggctgtgganatcgtcacgcctgcangaaggcagcaatatccttctcggcatcatgggcggcctcagaccccttgtgaagcccaagatcgtgctaaagagaaccaagaagttcatccggtaccagtcagaccgatatgtcaaaattaagcgtaactggcggaaacccaaaggcattgacaacagggttcgtagaagatatcaagggccagatcttgatgcccaacattgggtatggtagcaactaaaaaacaaagcacatgctgcccagtggctttcggaagttactggtccacaacgtcaaggagctggaagtgctgctgatgtgcaacaaatcttactgtgccgagatcgctcacaatgtttcctccaagaaccgcaaagccatcgtggaaagagctgaccaactggccatcagagtcaccaaccccaatgccaggctgcgcagtgaagaaaatgagtaggcagctcatgtgcacgattggtgtttaaatacatgtaa

SEQ ID NO: 24317 - DNA, 538 bp, Homo sapiens
  misc_feature (1)...(538): n = A,T,C or G
aggcgattcgttggctgancaattcggcacgagacaatcaggatgttatttcctttacttttacattcacttattatttcttttgttacttggaaacttctactgatataagtatcataggattctgaaacaactaatttgctgattggaatgtgaggtctgtaggttgtatcaacactcaggttggctgcagctaactctgatggaggtatccatgcaggtaatgtgctcccagcaacccattttgtccactcaaataagccgggctctacacggatcttcaagtgattttcttgttgtaaacctttcaagatattgtgtgcagtctgaacgcagcgaagggacggngagcaatagacatgatcgataatggtattgctctctaataaggcttcacccactagtcttgcttgcatgcatccaaacacagtgatgggagcatctttctcgtaatctcggaaaccaccactccgctgaggtanactatgangcatgttcangttggtgcgtatgtagcggncctttgcatcgaagcact

SEQ ID NO: 24318 - DNA, 338 bp, Homo sapiens
  misc_feature (1)...(338): n = A,T,C or G
nggagatcgatcgacggctgtangaattcggcacgagccgggaccgtggaggcttccgagggggccggggtggtggggacagaggtggctttggccctggcaagatggattccaggggtgagcacagacaggatcgcagggagaggccgtattaattagcctggctccccaggttctggaacagctttttgtcctgtacccagtgttaccctcgttattttgtaaccttccaattcctgatcacccaagggtttttttgtgtcggactatgtaattgtaactatacctctggttcccattaaaagtgaccattttagttaaaaaaaaaaaaaaaaaaa

SEQ ID NO: 24319 - DNA, 453 bp, Homo sapiens
ctgacgcctgggaatcgctgagccgcatacttatagatcgctatgcaaggttttttcctgctgagataaaacattaatgctggggattgatttctcccagaagcagactcgaagataaagttgagcattcaggatgtttgttagggagcactttctgggccaatatctgtaaaaggaatacctccctctccctgggcagagggagaagttgagttgcaatgcaggtccaacagcctgagcagactacagggaaagcactggaggggaacagcccatcagaatcgtgctgcctccatccattgaaaacttaacagtataaaaaaataacagaatacttatgtccattatctgtaatctaaaatcatgaattcttagatttcaaagcaaccctagaaattaaacccaggatactttttatacaagtagaaattgaaactcagaattaatttccca

SEQ ID NO: 24320 - DNA, 517 bp, Homo sapiens
  misc_feature (1)...(517): n = A,T,C or G
aggccnnnnnnnngggggnttcgatcggctgtgngaaatggcacgacgctaggttctcttgtttatcgaggtttttgggctgagggtttcggcagccagttctggtgactcagtccgcagctatagttgcagtaagaactaaaaaacgtttcacacctcctatttatcaacctaaatttaaaacagaaaaggagtttatgcaacatgcccggaaagcaggattggttattcctccagaaaaatcggaccgttccatacatctggcctgtacagctggtatatttgatgcctatgttcctcctgagggtgatgcacgcatatcatctctttcaaaggagggactgatagagagaactgaacgaatgaagaagactatggcatcacaagtgtcattttattggctgggtgcggtggctcacgtctgtaatcccagcactttgggaggctgaggtgggtggatcacctgaggtcaggaatcgaataccagcccgaccaacatggagaaacctcatctcta

SEQ ID NO: 24321 - DNA, 515 bp, Homo sapiens
  misc_feature (1)...(515): n = A,T,C or G
agaggctcnggggggnnnaggggnattatgatcggctgtangtatgcgcaccatgggcggcgcgtggtctacgccgagtgacagagacgctcaggctgtgttctcaggatgaccgagtgggagacagcagcaccagcggtggcagagaccccagacatcaagctctttgggaagtggagcaccgatgatgtgcagatcaatgacatttccctgcaggattacattgcagtgaaggagaagtatgccaagtacctgcctcacagtgcagggcggtatgccgccaaacgcttccgcaaagctcagtgtcccattgtggagcgcctcactaactccatgatgatgcacggccgcaacaacggcaagaagctcatgactgtgcgcatcgtcaagcatgccttcgagatcatacacctgctcacaggcgagaaccctctgaggtcctggtgaacgccatcatcaacagtggtccccgggaggactccacacgcattgggcgcgccgggactgtgagacaa

SEQ ID NO: 24322 - DNA, 536 bp, Homo sapiens
  misc_feature (1)...(536): n = A,T,C or G
aggtgattcgttggcgatgcattcggcacgagggactgtatctacacctgttcttccctaccttctcttttgttagggaggcctcattctaagttcctcaagagagtccttggcttaaagctgtagcaagggtgtgctaggtgggggatttggagcaaaaccgtcgagtaggcatgatactggtatggagtgggcctgcaaaatcagacagaaatggcttgagaagccgcagggggagcatgcctgtctctcagtgatagagtatgggagggacctccctagcttggaaaatgagaattgaaggggttatgaacaaataggatgcctagttgaggatgttcccaaagttttgtccaatcttatcattagtagattttataagccacagagacaaaccagaaacggaataatgttactttggatgctttatttttttgttctaggtgtggctttgtacatgcagaagaatgctatatgctgcacattttgcctttanagtcttacgactttcccattttagtctaatgggaagatcn

SEQ ID NO: 24323 - DNA, 375 bp, Homo sapiens
  misc_feature (1)...(375): n = A,T,C or G
gcccccattagaacngccttgagngaaatttgcaccgcgctgcaggaattcggcacgagcacagctcctgcagcccacgctggagatcaaccccaggcacgcgctcatcaagaagctgaatcagctgcgcgcaagcgagcctggcctggctcagctgctggtggatcagatatacgagaacgccatgattgctgctggacttgttgacgaccctagggccatggtgggccgcttgaatgagctgcttgtcaaggccctggagcgacactgacagccagggggccagaaggactgacaccacagatgacagccccacctccttgagctttatttacctaaatttaaaggtatttcttaaaaaaaaaaaaaaaaaaa

SEQ ID NO: 24324 - DNA, 448 bp, Homo sapiens
  misc_feature (1)...(448): n = A,T,C or G
tggggttntnagggnatggaannaannttagacncgcgntgtaggccagcgctgcaggaattcggcacgaggaaaaacatgaagaaaacccaggaaattagcaagggaaagaggaaagaggatagcttgactgcctctcagagaaagcagagggactctgagatcatgcaagaaaagcagaaggcagctaatgagaagaagtctatgcagacaagagaaaagtgatgactggctatttggaaaacctgggtgctactgccaactgggtgtatcataagctctaagatcaagattttgtagagtggacagtcattacatatgttataacttatcctttaaaaactattttaaactttatcctttcagctttacttagtgcgatgttttagaagcagtcttcaaagaataaaacactaaccatgcatgtgaaaaaaaaaaaaaaaaaaaa

SEQ ID NO: 24325 - DNA, 537 bp, Homo sapiens
  misc_feature (1)...(537): n = A,T,C or G
nggagatttgatcgccggctgcangaattcggcacgagctctcctcccctttgctcactgtcctggagtggcaccggcctctgcactgactcatttctggtcttggggccagtctcaggggaagctgggtgggggaggtccctcctgccctaagtgcagctggactgtacagaacactccaagggccaatggcagttcagcgcaaggagagggagggcccacaggtcagaaaaagctccagagacctcacagcattgtagggcggggtggtgggccaaagttaggacactgcgtaaaacaggccatcccaccacctctacctgctcatgccaggagaatccataactgcctagaggcctggggcccctaccggtcgtgaggtgagtgggcatctgtccagcctggaagaggggcactaggtgactccctcccctgctgttgtaaatactgtaattatcggagaatntanattattctcatttgtaactgcgtttccgggtcgcgccagagtcatttggactaaaaaaaaaaaaaaaa

SEQ ID NO: 24326 - DNA, 487 bp, Homo sapiens
  misc_feature (1)...(487): n = A,T,C or G
aggcggggncttgancctcgaccggctgtcangaattcggcacgaggacacccactcctccacctttgacgctggggctggcattgccctcaacgaccactttgtcaagctcatttcctggtatgacaacgaatttggctacagcaacagggtggtggacctcatggcccacatggcctccaaggagtaagacccctggaccaccagccccagcaagagcacaagaggaagagagagaccctcactgctggggagtccctgccacactcagtcccccaccacactgaatctcccctcctcacagttgccatgtagaccccttgaagaggggaggggcctagggagccgcaccttgtcatgtaccatcaataaagtaccctgtgctcaaccaaaaaaaaaaaaaaaaaaactcgggggggggccgggtccccaattccccttatagggaggggtataacaattcactgcccgcggttttacaacgcgg

SEQ ID NO: 24327 - DNA, 498 bp, Homo sapiens
  misc_feature (1)...(498): n = A,T,C or G
agagcactgcngctgaganatgtccgcgcttagatacacagcatatttctgagcccaaactctgtccagaatgcagagaaggcttattgtgtcagcagcagagggacctgcgtgaatacactcaagccaccatctatgtgcataaagttgtggataataaaaaggtgatgaaggattcggctccggaactgaatgtgagtagttctgaaacagaggaggacaaggaagaagctaaaccagatggagaaaaagatccagattttaatcaaagcaatggtggaacaaagcggcaaaagatatcccatcaaaattatatagcctatcaaaagcaagttattcgccgaagtatgcgacatagacaagttcgtggtgagaaagcacttctcgtttctgctaatcagacgttaaaagaattgaaaattcagatcatgcatgcattntcagttgctccttttgaccagaatttgtcaattgatggaaagattctaagtgatgact

SEQ ID NO: 24328 - DNA, 507 bp, Homo sapiens
  misc_feature (1)...(507): n = A,T,C or G
cgctgggtnnnccttgaccttcatggccgtggaactcggccgaggaggtcgctgcctccaggccatgaagatgggtgactggaagacctgtcacagttttatcatcaatgagaagatgaatgggaaagtgtgggaccttttccccgaggctgacaaagtccgcaccatgctggttaggaagatccaggaagagtcactgaggacctacctcttcacctacagcagtgtctatgactccatcagcatggagacgctgtcagacatgtttgagctggatctgcccactgtgcactccatcatcagcaaaatgatcattaatgaggagctgatggcctccctggaccagccaacacagacagtggtgatgcaccgcactgagcccactgcccagcagaacctggctctgcagctggccgagaagctgggcagcctcggggagaacaacgaacgggtgtgtgaccacaagcagggcacctacgggggctacttccgagaccagaaggacgg

SEQ ID NO: 24329 - DNA, 492 bp, Homo sapiens
gcgggaattgccttgcctgcaggaattcggcacgagcaaagttccaggtcccaggctctgagaaaggcccaggaggagttctgagcggctggttgctgaggcactgcgtgcctgtgttccattgagggtcagcggcagcctcaagagaagacagactccacctgggaaacaggcaggtgtgaccattggctctgccatcaactctcaatgcaactgggggtgcgacttcatctctctgtgcctgtttcctcctccagaaaacagggtttcctattgaccctcaagaattgttgcaagggcccattgagagaacaatttggccgggtatgatggctcatgcctataatcccagcactttgggaggctgaggcaggtggatcacctgaggccaggagttcgagaccagcctgaccaacacggggaaaccacatctctaccaaaaaatacaaaattagctggatgtagtagtgcacacctgtaatcctggctacc

SEQ ID NO: 24330 - DNA, 495 bp, Homo sapiens
  misc_feature (1)...(495): n = A,T,C or G
cgcggaattgattgccatgtgccatgtangaattcggcacgaggtccctttcaacctgtttagttcaactcaagcctccctgtgtcccagaccctcctgctgccaccaccacccaggtcctccctagtcctccagcgtcaacactatcccttgggagttgtagctgctgtcactgactcccggctatacatggcctgtcgaccacgttatagccctcaggcctgttgaacttgctctctaagagaggttgggaccaggctaggttccgggtgacgcccacgagaggtggtggccttcacacatgcacatggagttgaggaccagggagctgcagggaaagcaacagctataggtgccttgctcttctgtcggaggctgctgggggcaagagcagctgcacaaggccagggcaagtgctagggcccctcccccatcacatggtcacactgggacaggcgtgcagctcactgaactccaagcgagccagccctctct

SEQ ID NO: 24331 - DNA, 460 bp, Homo sapiens
ctttgacccgcgctgcatgaattcgccacgagagcaaacacatctgacctacaggattgaaaattacacgccagatttgccaagagcagatgtggaccatgccattgagaaagccttccaactctggagtaatgtcacacctctgacattcaccaaggtctctgagggtcaagcagacatcatgatatcttttgtcaggggagatcatcgggacaactctccttttgatggacctggaggaaatcttgctcatgcttttcaaccaggcccaggtattggaggggatgctcattttgatgaagatgaaaggtggaccaacaatttcagagagtacaacttacatcgtgttgcggctcatgaactcggccattctcttggactctcccattctactgatatcggggctttgatgtaccctagctacaccttcagtggtgatgttcagctagctcaggatgaa

SEQ ID NO: 24332 - DNA, 470 bp, Homo sapiens
aatagaccggcttgaggaattcggcacgagcataatctttgttcccgttcctcaactgaaatctttccagaaaatccaagtccggctagtacgcgaattggagaaaaagttcagtgggaagcatgtcgtctttatcgctcagaggagaattctgcctaagccaactcgaaaaagccgtacaaaaaataagcaaaagcgtcccaggagccgtactctgacagctgtgcacgatgccatccttgaggacttggtcttcccaagcgaaattgtgggcaagagaatccgcgtcaaactagatggcagccggctcataaaggttcatttggacaaagcacagcagaacaatgtggaacacaaggttgaaactttttctggtgtctataagaagctcacgggcaaggatgtgaattctgaattcccagagtttcaattgtaaacaaaaatgactaaataaaaagtatatattcact

SEQ ID NO: 24333 - DNA, 468 bp, Homo sapiens
gggtggccatagacctcgtgcaggctttgacctaccttgtagagatgtgaggatttagatgtttgctaacttcaaaactgtgcttgaatagactaataatatatgctcatatcagatgtcagttttcatttaacttgattcatttttggctcaggtcattgggaacccattactaatacctaacaggaaatagctaaacacaacacaccttatctattagtcaccttcttaaaactgtttttgctacttttgaagtgtcttatttataagatcagaggtctgacaccttttttgcttagacagctctctatctcatccatttattttcttctctagacttactccatctctcctcatccttttgcctttgttatttctgctcggactcacatactttcaccatatacatattttcaattgtttctttccttttctcctttgtgagcaaagcaaacaagtactgtccaa

SEQ ID NO: 24334 - DNA, 466 bp, Homo sapiens
  misc_feature (1)...(466): n = A,T,C or G
agaaagcgaggaaaaaaanctgaccccgctgcggctagagcttagttgtgtttaaataatcatctttatatttggggttttaattacagttccattagtgcctgtagattagtgaacagaaaattgctttggaagagattctgccctgtagacactatgtgaataactgaagtaacactagactgaatctcctttttggagtatgtatcttctctcacttgttcaagtacaggcacactgttcaaccgcatggtatctttctgttgtgtgacttctacaaatgtaattttaaatgaaattaagttaacatggattcattacgttcctggccctgtagacacgtgtaagattatttaaaattctttcatttttttctgcctcttactatacgactgtagtgcaacaaatattttaaagcccccttttcttctttattttcattagttgtacattgatttcagtgtcn

SEQ ID NO: 24335 - DNA, 518 bp, Homo sapiens
  misc_feature (1)...(518): n = A,T,C or G
aggggtgagncccnnggnnnnnnagnnnaattgcccggctgtggaattcggcacgacgtacaagaacagaaggaacaatggtcgtgccaaaaagggccgcggccacgtgcagcctattcgctgcactaactgtgcccgatgcgtgcccaaggacaaggccattaagaaattcgtcattcgaaacatagtggaggccgcagcagtcagggacatttctgaagcgagcgtcttcgatgcctatgtgcttcccaagctgtatgtgaagctacattactgtgtgagttgtgcaattcacagcaaagtagtcaggaatcgatctcgtgaagcccgcaaggaccgaacacccccaccccgatttagacctgcgggtgctgccccacgtcccccaccaaagcccatgtaaggagctgagttcttaaagactgaagacaggctattctctggagaaaaataaaatggaaattgtacttattacngagnnanataaaaaatgaggggctttttttttcggggggggg

SEQ ID NO: 24336 - DNA, 473 bp, Homo sapiens
  misc_feature (1)...(473): n = A,T,C or G
catcgccccccatgtatgagatcggcatgagggcatccgctcgacggcgggagattgaggacaagctgaagcacgaggaggagactctgtccttcatccgagacagcctggagaagagcgaccagctcactaagaacatggggtctatcttatcatcctttgagagccgccttatgaagctggagacttttgatggcttttggcagggacagacttggacacaaaaccgatccatagaagggcttcccaaaccttgttttgcaacatcccaaattgtctccagttgaaggaaggcctttatcagattcatagatgagctttcattgtaaaaataaatgtactttgcaccacttcatgatggagggagaagtggtcatancccacccaccacccccacctccctacagcacctacatccccctcggcccgggggggggcgccccccacacctctccccttgagggcgggtcacg

SEQ ID NO: 24337 - DNA, 488 bp, Homo sapiens
cttagacccgcctgcaggaattcgacacgagaaacatcaatatttggagccagacttttatatttaagagtttcagttcttttctgaagcctgggctactagttgagctcacaccctcttaaagtgggggtataatgctttacactggaaaatctcaaatagctaaaagatgttttcctataacgccatccatctctgtactttaagttggactcctagaggtttctgaggcagtcacaagtttaaattcaccactgttttcatgaatatttgtgacatttctccctcattggtaacctctcttggtccagtgtatgatgtcccactcagcctctgtgctgaaataattcctctcctaggtttcttcccagccctagacaaggaggaaacagcacagaggggttgggaagaagaagctagttctgggcataaatagcatcatcttactgattcaaaatatgcattcccttccaccccacatgttgaag

SEQ ID NO: 24338 - DNA, 469 bp, Homo sapiens
  misc_feature (1)...(469): n = A,T,C or G
nattgcaccgccntcttgaattcgccacgagatgagctggagccagagaccgacacacgggagccactgactcggatccgcaacaactcagccatccacatccgagtcttcagggtcacacccaagtaattgaaaagacactcctccacttatcccctccgtgatatggctcttcgcatgctgagtactggacctcggaccagagccatgtaagaaaaggcctgttccctggaagcccaaaggactctgcattgagggtgggggtaattgtctcttggtgggcccagttagtgggccttcctgagtgtgtgtatgcggtctgtaactattgccatataaataaaaaatcctgttgcactagtnnnaaaaaaaaaaaaaaaaaaaaaaaaaaaaaaaaaaaaaaaaaaanannnannnnnnnnnnnnnnnnnnnnnnnnnaaaaaaaaaaaaaaaaaaaaaaaatatttt

SEQ ID NO: 24339 - DNA, 483 bp, Homo sapiens
attgaccgcctattagaccgcctgcagaattcggacgagcttgaaccgggcattgctgctgtcaaggaggatgcagtcgagatgctggccagctacgggctggcgtactccctcatgaagttcttcacgggtcccatgagtgacttcaaaaatgtgggcctggtgtttgtgaacagcaagagagacaggaccaaagccgtcctgtgtatggtggtggcaggggccatcgctgccgtctttcacacactgatagcttatagtgatttaggatactacattatcaataaactgcaccatgtggacgagtctgtggggagcaagacgagaagggccttcctgtacctcgccgcctttcctttcatggacgcaatggcatggacccatgctggcattgtcttataacacaaatacagattcctggttggatgtgcctcaatctcagatgtcatagctcaggttgtttttgtagccattttgcttcac

SEQ ID NO: 24340 - DNA, 487 bp, Homo sapiens
  misc_feature (1)...(487): n = A,T,C or G
atttgacncgcctgcgttagttcggcacgagataagtttgtggctcctgaagaagtcctgccattcacagaaggggacattctggagaaggtcagcgtgcattgccctgtgtttgactacgttcccccagagctcattaccctctttatctccaacattggtgggaatgcaccttcctacatctaccgcctgatgagtgaactctaccatcctgatgatcatgttttatgaccgaccacacgtgtcctaagcagattgcttaggcagatacagaatgaagaggagacttgagtgttgctgctgaagcacatccttgcaatgtgggagtgcacaggagtccacctaaaaaaaaaatccttgatactgttgcctgcctttttagtcaccccgtaacaagggcacacatccaggactgtgtcttgcctttcagatcttaacagagcagcagggcttaacttgttgattttggagcctcttagtgacctgg

SEQ ID NO: 24341 - DNA, 490 bp, Homo sapiens
  misc_feature (1)...(490): n = A,T,C or G
tggatgggcccagaaaanaaacatgatcgcctgaactgtatcgcactagggttctcacgagactgaggcatgagaatcacttgaacccaggaggcagagactgtagtgagccgagatcgcgccactgcactccatcctgggtgacacagcgagactctgtctcaaaaaaaagtaaaggaaaaagaaaattggaagctgcaaagcaaatgtagaatccttaaaggcattttgcactgtaatttattttaactgatccatatcaccgcactgccaggacttctaaagaccctgctgcaagttcagtgccatccatatgcttctgagattggtacagataaggagatgaaggggctgtagggaaataagaggcaaggtggtagggttttaactgagcatttttcttaaaatgttatctgtgaaatacctgagtttcacagagttagaaatgctaatcatctttggtttccagcttcagagtaagaggctgtac

SEQ ID NO: 24342 - DNA, 472 bp, Homo sapiens
attagaaaaccccttgacccgccctgcaggaattcggcacgagcgtaggccttatgtgggttcgtgcgccttctacctcgctgtttcggttttcctggctcctcggcccttttctcccctgttgcagctgggagcggacgaagcgcgaagctgggattttttactgtctcctgaagaatttaacacaaacatggatatcagaccaaatcatacaatttatatcaacaatatgaatgacaaaattaaaaaggaagaattgaagagatccctatatgccctgttttctcagtttggtcatgtggtggacattgtggctttaaagaccatgaagatgagggggcaggcctttgtcatatttaaggaactgggctcatccacaaatgccttgagacagctacaaggatttccattttatggtaaaccaatgcgaatacagtatgcaaaaacagattcggatataatatcaaaaatg

SEQ ID NO: 24343 - DNA, 405 bp, Homo sapiens
  misc_feature (1)...(405): n = A,T,C or G
cgcgccccnnnnttttgaaattcgatggctgtacgaattcggcacgagaggaaggtgagaatgagtagaacagttttgtattctactccctacaagccattttgaacttctgccctcaccggactctgggctgtgactggggcaccaaactcagcacatgagtctcccctagctctcgtggggagagggatgctatttattcagtttggggcaggagggagaggagggaaagtatttctgaccctgatgccaacagccgggtggctgtccaagcaggattgcaggggacacagggaagcactgcccagcccctgcctggctgccctttcccccctgctgctgccaccgcttcctgcctgtcatttgaataaacagtgtttctattgaaaaaaaaaaaaaaaaaaa

SEQ ID NO: 24344 - DNA, 506 bp, Homo sapiens
  misc_feature (1)...(506): n = A,T,C or G
agagnntnnaattgatatgatggctgtacgaattcggcacgagacgaagtgaaactcctggtagaacggatgatggctctgcagaccgacattgtggacttacagaggagccccatgggccggaagcaggggggaacgctggacgacctagaggagcaagcaagggagctgtacaggagactaagggaaaaacctcgagaccagcgaactgagggtgacagtcaggaaatggtacggctgctgcttcaggcaattcagagcttcgagaagaaagtgcgagtgatctatacgcagctcagtaaaactgtggtttgcaagcagaaggcgctggaactgttgcccaaggtggaagaggtggtgagcttaatgaatgaggatgagaagactgttgtccggctggaggagaagcggcagaaggagctctggaatctcctgaagattgcttgtaacaaggtccgtggtcctgtcagtggaagcccggatagcatgaatgcctctcgacttaa

SEQ ID NO: 24345 - DNA, 457 bp, Homo sapiens
  misc_feature (1)...(457): n = A,T,C or G
ntttgcacccgctggacgaactctgcacgaatacagaacgaggtacttcttttagttctacctgaatgtctaaggcttgaaatgctgtggaccggtggacttggtttgctgagaccacagcatggctgggttttccattaatgatcatgaatacaaactggcccttttacaatgctatggaagatatcttcagcagttcaataccaattttgatgagaataaagtggatgtaactcaattcaaagctacctttttcccaaaaggctttaaagataaaactgctggacttacatttcatgctttgagtggcaaaaatatgtgcaactaccagctggtctgcgacagtgatgaaaacctgaagaataaagaatctgtggtccagtgtctgcatatcttgtcctccttaacgctcatcatgcaagtggctctgccacaagagcatctttgctggattatn

SEQ ID NO: 24346 - DNA, 511 bp, Homo sapiens
  misc_feature (1)...(511): n = A,T,C or G
acgcgggtnnnttttgaaattcgatggctgtacgaattcggcacgagggaagtatgagttgaaaaaaaattgaaataaactatatcatattactaggacttaatatagtggcatacccaggaaatgcttagtaagtgttcccttcacattttaaaatttgagtatacaatcatgtttgacaatatagaaatttaatttttagtgaaacaattctaaaccccttttccatagacacaagaaagatggcaaatttatgctattcctgtaaaaatacattgtggcttagcaaataagcaagttcccacgttacttttgttttgcttcaagtaatacttctgccagttgtgttttatgaattaaacagggaacggcatgctgaacttgaaactagatttgttcctgcttttttcacaatgtgagtagttttgaaaagtcagatctggccatttgtctttcctagaatagcataactttgntcattggtttttttggttgtctttctgacacagaa

SEQ ID NO: 24347 - DNA, 504 bp, Homo sapiens
  misc_feature (1)...(504): n = A,T,C or G
acgggnttttaatcgactccgtggacttcgcacgaggganagctccggaagaaggagaaacattgcagtggctactgtgttggcccagtagaaattgacagtattttgtatatatgtgcccatttatctttttcttttttaaaaaaagagaatactcttgtggtcccctgatgtctctttctaggatgtgtgtcactttgcttcagtgacagccctcccacccagcctggctctgctggccccgaactgaacctctccaggctctcctgttgctttgccatggagccaggtcagctctctgtctgttctgctgggtaacaaggtttggcagttcctgtttctctgggcttaagtcaaggccacagaattctttttcttccctgaaagctggcagcttttgttacagaagattctcangatgaaggcaggggctgaggcctctgctactggctgcccctttccatccagtggctgctggttcccaagacgggctaagcgtttctt

SEQ ID NO: 24348 - DNA, 471 bp, Homo sapiens
  misc_feature (1)...(471): n = A,T,C or G
aatagaccnccntttgatccgcctgcaggaattcggcacgaggtattccctttttaaaagagctttcaggaagttgctgagaaatggggtggaatagggaactgtaatggccactgaagcacgtgagagaccctcgcaaaatgatgtgaaaggaccagtttcttgaagtccagtgtttccacggctggatacctgtgtgtctccataaaagtcctgtcaccaaggacgttaaaggcattttattccagcgtcttctagagagcttagtgtatacagatgagggtgtccgctgctgctttccttcggaatccagtgcttccacagagattagcctgtagcttatatttgacattcttcactgtctgttgtttacctaccgtagctttttaccgttcacttccccttccaactatgtccagatgtgcaggctcctcctctctggactttctccaaaggcactgaccctcggcc

SEQ ID NO: 24349 - DNA, 511 bp, Homo sapiens
  misc_feature (1)...(511): n = A,T,C or G
aggggncnnnnattcatcgcctgcacgaattcggcacgaggtcctccagccccgaggccggcgaagggcagatccgcctcacagacagttgcgtccagaggcttttggaaatcaccgaagggtcagaattcctcatgctgcaagtggagggaggtggatgctccggattccaatacaaattttcactggatacagttatcaaccccgacgacagggtatttgaacagggtggggcaagagtggtggttgactctgatagcttggccttcgtgaaaggagcccaggtggacttcagccaagaactgatccgaagctcatttcaagtgttgaacaatcctcaagcacagcaaggctgctcctgtgggtcatctttctctatcaaactttgatgtgatgactggtgactctgggattgtcaccagttgtaccaatttgaagaacctggaattagtagaattctagaagttacttctaatcatgtccctctcaattttattcccgcagtccagga

SEQ ID NO: 24350 - DNA, 471 bp, Homo sapiens
  misc_feature (1)...(471): n = A,T,C or G
nttgaccgcctgcagattctggcgagcggacctgggacttttcctgtatctgcacattgtcgttttatacacaattgccaaggtgggactgctttcaactttactgtgcttgaagctgcaaaggttctgccctgatgtttcctggaataatgctgaggactgcctttcgggtagccgccctattcagttcacttcatctcggaaatacctgacccctgccttggatccagcggccctcctgagagctgaggaaggaggaaatcctatgtgtctgctcccggagctgccacaacccatcttcccacaactcggaacttggaaaaaggaacccaggacacgactttgcttttcttttggacctagttggtgattatactctgtctcccatggagaccacgtcttgcatccttccttctatatgggatttaggatagaaattaaaaagaaaacatattattttgagtcttgatt

SEQ ID NO: 24351 - DNA, 466 bp, Homo sapiens
  misc_feature (1)...(466): n = A,T,C or G
aatagaaagcctttggaacgctccgaggccccacgcacacccctacccctctgtgaggagctgtgggaagtgtgggtttgtctccagaacagaagagaatgatggatattctggctctggggccctctccaccaccactcacagtagccttgctgaagccatcacagatgggagaaggccatgccagccacgtccgccgaggggcgccagcctgaagctgccaggccctgaggttcagaccctggaccccatagctggaggcctgtggtgccagaagcccagattagggtggctgtccatccctggatagctatttgcacgaatcatggacataaatccaagttgaagaagatcaaaaaaaaaaaaaaaaaaaacctcgggggggggccgggtccccaattccccttatggggagcggtttaacaatccatgggccgcggtttaacaacgcggggatgggggaaan

SEQ ID NO: 24352 - DNA, 447 bp, Homo sapiens
aatttgacctgcgctgcacgaattcggcacgagaatttttgtatttttggtagagatggggtttcaccaagttggctagactagtcttgaactcctgacctcaggtgatccacccgccttggcctcccaaagtgctgggattacaggtgtgagccactatacccgaccagatcaaatctttttttgacatttttgcaaaaaaattttcctaatgttcttgatttaattgtatagaatttgtataattaggtgtattttatttgcctctagctttgaggtatcataatttatgtatcttatgtgaattttttgctgtaataccaataaagttttttttctccaaaaaaaaaaaaaaaaaaattaagaaaaaaaaaaaaaacctggggggggggccgggccccaattgccccttatagggagggattaacaatccacggccggcggttt

SEQ ID NO: 24353 - DNA, 456 bp, Homo sapiens
  misc_feature (1)...(456): n = A,T,C or G
nttttgcnccgggctgcaggaattcggcacgagcagagaccaaccgcatcgaggtggccaacctcaatggcacatcccggaaggtgctcttctggcaggaccttgaccagccgagggccatcgccttggaccccgctcacgggtacatgtactggacagactggggtgagacgccccggattgagcgggcagggatggatggcagcacccggaagatcattgtggactcggacatttactggcccaatggactgaccatcgacctggaggagcagaagctctactgggctgacgccaagctcagcttcatccaccgtgccaacctggacggctcgttccggcagaaggtggtggagggcagcctgacgcaccccttcgccctgacgctctgcggggacactctgtactggacagactggcagacccgctccatccatgcctgcaacaagcgcactg

SEQ ID NO: 24354 - DNA, 476 bp, Homo sapiens
ccttcgcaccgcgctgcatgaattcggcacgagcctattcagtgctagggcctggggataaagcccaggacaggagactcaagccacatggggccagccctgaggggcaccctgcagcgccacttccagcaatgaaaaacagggacttggccaagcacggtggctcacgcctgtaatccctgcattttgggaggccgaggcgggcagatcatgaggtcaggagtttcagaccagcctgaccaacatggtgaaacactgtctctactaaaaatacaaaaattagccaggcgtggtggtgcacgcctgtaatcccagctactcgggaggctgaggcaggacaattgcttgaacctggaatgcggaggttgcagtgagccgagattacaccattttgcactccagcctgggcaacagagcgggactccatctcaaaaaaaaaaaaaaaaaaaaaaaactcgggggggggccgggcccca

SEQ ID NO: 24355 - DNA, 491 bp, Homo sapiens
  misc_feature (1)...(491): n = A,T,C or G
attagccccgcgctgcaggaattcgtcgcgagacaatgtttccctctgtgggggagaaaaagaaatccaggagctcctccctggattaaaaccaacgaggtgcagaccaaactttaacacctttagccttatgtggaaaccaaaaaccaactgctgggaaactgtgaaaagcccttttacccacaaggggaggggtcaaagttgctgccctttggggacacccgagacccctaattagcctatctgaatgaggaccaaaggttagagccctctttctccccgaagaaagagcccggaaaaacatggcagagcaaagagcaaaatcctttctcccccgaatgctttaccagnnnnggagcgaacatttattcaagatgatttttaccaggaaccttatcanaggcaaaaccacagctgcttgggttgaagtccccatcctgggcctctctcagccgccagacatggccaggaaccctgtggntccaagaacn

SEQ ID NO: 24356 - DNA, 487 bp, Homo sapiens
  misc_feature (1)...(487): n = A,T,C or G
gtgcagggtcctgaaactagacactganagctccggaatcccacgagtgtcactatagtcatacaatccttcttaaagtacttgttatttgtttttattattactgtttgtcttctccccagggttcagtcctcaaggggccatcctgtcccaccatgcagtgcccctagcttagagcctccctcaattccccctggccaccaccccccactctgtgcctgaccttgaggagtcttgtgtgcattgctgtgaattagctcacttggtgatatgtcctatattggctaaattgaaacctggaattgtggggcaatctattaatagctgccttaaagtcagtaacttacccttagggaggctgggggaaaaggttagattttgtattcaggggttttttgtgtactttttgggttttttaaaaattgtttttggaggggtttatgctcaatccatgttctatttcagtgccaataaaatttaggaagaa

SEQ ID NO: 24357 - DNA, 459 bp, Homo sapiens
  misc_feature (1)...(459): n = A,T,C or G
ntttgaccccgctgtgccccgcgctgcacgaattcggcacgaggatgatccgtccacctcaccctcccggagtgctatgattacaggcatgagccaccacgccagccaaatgctcttaaatttcggtcttttgaggcaattttctgtatcttgcagtcttgtacgtagtctttgctccttttcattctttttattttttcctctgacttctttttttttcaagacagggtcttgctctgtcacccaggctggagtgcaatggtacaatctcagctcactgcaacctccacctcccgggttcaagtgattctcctgcctcagcctcccaagtagctggtattacaggcatccaccaccaggtctggctaattttggtatttttagtagaaacagggtttcactatgtcggccaggctggtctcgaactcctgaccttgtgatccacccacctcggcctcc

SEQ ID NO: 24358 - DNA, 479 bp, Homo sapiens
  misc_feature (1)...(479): n = A,T,C or G
gaacgtcnaaanccttgatcgcctttgtgatcgctacgagcacgccgccgcttgtgctgcagccatgtctctagtgatacctgaaaagttccagcatattttgcgagtactcaacaccaacatcgatgggcggcggaaaatatcctttgccatcactgccattaagggtgtgggccgaagatatgctcatgtggtgttgaggaaagcagacattgacctcaccaagagggcgggagaactcactgaagatgaagtggaacgtgtgatcaccattatgcagaatccacgccagcacaagatcccagactggttcttgaacagacagaaggatgtaaaggatggaaaatacagccaggtcctagccaatggtctggacaacaagctccgtgaagacctggagcgactgaagaagattcgggcccataaagggctgcgtcacttctggggccttcgtgtccgaggccagcacaccaagacca

SEQ ID NO: 24359 - DNA, 469 bp, Homo sapiens
  misc_feature (1)...(469): n = A,T,C or G
nattgatttcgctgacgatttcggcacgagggagaagagtctattggagaaggaggggcttattctgcctgagacacttcctctcactaagacagaggaacaaattctgaaacgtgtgcggaggaagattcgaaataaaagatctgctcaagagagccgcaggaaaaagaaggtgtatgttgggggtttagagagcagggtcttgaaatacacagcccagaatatggagcttcagaacaaagtacagcttctggaggaacagaatttgtcccttctagatcaactgaggaaactccaggccatggtgattgagatatcaaacaaaaccagcagcagcagcacctgcatcttggtcctactagtctccttctgcctcctccttgtacctgctatgtactcctctgacacaagggggagcctgccagctgagcatggagtgttgtcccgccagcttcgtgccctccccagt

SEQ ID NO: 24360 - DNA, 492 bp, Homo sapiens
  misc_feature (1)...(492): n = A,T,C or G
aggcgtnccaactgatccgcctgcaggaattcggcacgagatctgtggatttgtctgtgcacctattggctcttctagctgactcttctggttgggcttagagtctgcctgtttctgctagctccgtgtttagtccacttgggtcatcagctctgccaagctgagcctggccaagctaggtggacagacccttgcagtgatgtccgtttgtccagattctgccagtcatcactggacacgtctcctcgcagctgccctagcaaggggagacattgtggtagctatcagacatggacagaaactgacttagtgctcacaagcccctacaccttctgggctgaagatcacccagctgtgttcagaattttcttactgtgcttaggactgcacgcaagtgagcagacaccaccgacttcctttctgcgtcaccagtgtcgtcagcagagagaggacagcacaggctcaaggttggtagtgaagtcaggttcggng

SEQ ID NO: 24361 - DNA, 521 bp, Homo sapiens
  misc_feature (1)...(521): n = A,T,C or G
agagacaaaggggaananananaaacctggacggctgtangaattggcacgacagcgcacaaggtgctcaaacaggcttttggagagaagattaccatgaccattcgtgacaggccctttgaacggacgattaccatgcataaggatagcactggacatgttggttttatctttaaaaatggaaaaataacatccatagtgaaagatagctctgcagccagaaatggtcttctcacggaacataacatctgtgaaatcaatggacagaatgtcattggattgaaggactctcaaattgcagacatactgtcaacatctgggactgtagttactattacaatcatgcctgcttttatctttgaacatattattaagcggatggcaccaagcattatgaaaagcctaatggaccacaccattcctgaggtttaaaattcacggcaccatggaaatgtagctgaacgtctccagtttccttctttggcaacttctgtattatgcacgtgaagccttcccggagc

SEQ ID NO: 24362 - DNA, 511 bp, Homo sapiens
  misc_feature (1)...(511): n = A,T,C or G
cgcgcgccccnnnnnnntttgaaaggccgtggnaanaaaaaaaanntttcgcccggctgcaggaattcggcacgagctcacactcgctctctggctggggtccgcctgccgcccgctggcctgctccctccggggcaagtcttgcttcttaagcgctcctttcacacacgcgcgcgctcgctgggccgtcccctcctctccggccctcctcctcctcctggtccttgctaacgctgccgtcggggaggattgatgtcccttcagcatcatgcagccgccgccgaggaaggtgaaagttacacaagaactgaaaaacattcaagttgagcagatgacaaaacttcaagccaaacatcaagcagaatgtgatttgcttgaagatatgaggacattcagtcagaagaaggctgctattgaaagagagtatgcacagggtatgcagaagttggctagtcaatacctgaagagagattggcctggagtaaaagctgatgatcggaatgattacagg

SEQ ID NO: 24363 - DNA, 474 bp, Homo sapiens
cggggcccattgacaatcgatccgcgctgcaggaattcggcacgagctctttgaacacaaatgcattagccttgtggctagaacaccctcttcctacctctgtctcccctcacttgtcatatgctctgacatgctaacatttcttttgttcatccctgttgcccccacagaaacatcccagaaaaaccggtcagtgttccttcctccctgatccttaggtttctgaaatagggttctgttacatcctcttcgatagcctgtttaaaatgtttagaaggtctggagctcaaaaatgcgttcttccacattgataatttagtaaactgagaacattgacatcactacagggcagcataagaggttgcttacatgtggtagcagctctggtttgattcaagttgctaccatgtacattgacagcacatataccataaccagcgtgttgggttgaattgcactttctacctttgtatg

SEQ ID NO: 24364 - DNA, 434 bp, Homo sapiens
  misc_feature (1)...(434): n = A,T,C or G
aggcgccacnnnnntttgattgcctcgcctgcaggaattcggcacgaggggccccgtagttagcaattctggaaaagttaagccatctcctcctctggcccttccttctggaatcttcagatgcctgttaggccttcttattgtcctcctcctcctggctcggcctccctcacactgaccaagggcctgtgctgcccactgggtaacttctacagttctcccttccacttccctaagtctctcttcagctgtgacttatccaccacatagcccagtaagtcttcagttttggctgggcatgatggtgagcgcctgcagtcccagctacttgggaggctaagcccagttcaaggctgcagtgaactatgatggtgccactgcattccagcctgggtgacagaatgaaatcctggcacaaaaaaaaaaaaaaaaaa

SEQ ID NO: 24365 - DNA, 497 bp, Homo sapiens
  misc_feature (1)...(497): n = A,T,C or G
cattcgcgccgcnctgatgggaacgccgtgcgagacccggcaccaggaacgcagtcaatagaaataagaccacacagttgaaagagagataacatttattagaaatcaaacaagggaaggctggatttaaaatcagaagcatacccccatttaaacatatgggcagaatatcaaatcaaaaggtcacaaatgttcacttcctcctccaccctcttacatattggatcttcaattgcaatagggagtgtaagatggacattttagagacgtacttgcatcagcagaagcaaacccatcttatacaaatgggttttggggataggaaaaggctgctaaaaattcacaagtcaccattccccagaagcaatgaatagccgtagaagaccaaggaagatcaacaagtttccaaagtgctaaagccagagatttggcccttccaaaataccaccaggacgcctggacccgtgggctctccgcatgtcaccactgactgccag

SEQ ID NO: 24366 - DNA, 473 bp, Homo sapiens
agcgggcgggatggaaattgaattcgagtggtatcaggcaaacgcacgagctccggcgtccgggtcgagcgcagatccctgtttattgggaaggatatgttcgattcttaaatacgccatctgacaaatcagaagatggaaggctaatttatactggcaatatggcccgagcagtgtttggtaagtaattggaggtgtgaaatgtttctcttattctacgagtctgattggccttacatttctgccatacatttttacacaaaataatgctatttctgaaagtgtgcctctgcctattcaaatcatattctatggcatcatgggaagctttacggtgatcaccccagtgctgcttcactttattacaaaaggctatgtcattcgattgtaccatgaggccacaacagacacttataaagccattacctacaatgctatgcttgcagaaacgagtacagtgtttcaccagaatg

SEQ ID NO: 24367 - DNA, 498 bp, Homo sapiens
  misc_feature (1)...(498): n = A,T,C or G
cccatcgancgccntgaggaantnggnacaaattgccaccgcgctgcaggaattcggcacgagcccaaaccgccctcatttgtgcagcgccagatccttcggacacatccctaggtgtctccatcctcattcggtccatccaactcccagacctcacgtcaaccggctgcaccccactttccagcctgcgccccagatctgcagccttcgcccctagatacacccgcctggtgatgaggcgctcctcgcgttccttccgtctccagtgcaccggctttccctcgtcctctgcgcagtccatctcagctcatctctccaattcaatgccatcatctctcctcaccatctctcggtgccctggaatgtttgctgtcagatgtcccctgtgaaacccacaaacgcttgcgatttggcctccttgttttattttggggtagcctacaacgtcttgttactaccccctattacaacacttataactcaaaaaaaaaaaaaaag

SEQ ID NO: 24368 - DNA, 484 bp, Homo sapiens
  misc_feature (1)...(484): n = A,T,C or G
aattgaccgcctgcggattcggcacnagtttggatactctgaccgcagggactgtggctccaccgcaatcctaccagtgtccgcccagccagataggggaaggggccgagcagggggatgaaggcgtcgcggatgcgcctcaaattcagtgcaaaaacgtgctgaagatccgccggcggaagatgaaccaccacaagtaccggaagctggtgaagaagacgcggttcctgcggaggaaggtccaggagggacgcctgagacgcaagcagatcaagttcgagaaagacctgaggcgcatctggctgaaggcggggctaaaggaagcccccgaaggctggcagacccccaagatctacctgcggggcaaatgagtctggcgccgcccttcccgcccgttgctgctgtgatccgtagtaataaattctcagaggactcnaaaaaaaaaaaaaaaaaaaaaaaaaatctgggaaatttcccgtgtggg

SEQ ID NO: 24369 - DNA, 406 bp, Homo sapiens
  misc_feature (1)...(406): n = A,T,C or G
agggcgaaagacactttctttctttactctgaagtagctggaggacaaatgagaacttcaagagaggatgttatttagactgaacctctgctgccagagatgctgaagatacagaccttggacaggtcagagggtttcatttttggccttcatcttanatgactggctgcgtcattctgagaagtgagtgctccttgatggtggaacgaccgggtggtgggtacagaaccattgtcacagggatcctggcacacagaagagttacgagcagcagggtgcagggcttggaaggaatgtgggcaaggttttgaacttgattgctcttgaagctatcagaccacatcgaggctcagcagtcatccgtgggcatttggtttcaacaaagaaacctaacatcctactctgn

SEQ ID NO: 24370 - DNA, 496 bp, Homo sapiens
  misc_feature (1)...(496): n = A,T,C or G
cgccccattgaccccgctgcangaanatttcccccggctgcaggaattcggcacgagaaagaattcgtggtttcacccgggaaaacagctccccggattaaacggataggtttacacatactgatccacccagctattcatcttctgtttgctgctttaattgggtgcggttaaaaggccacgtccctaggcgttcaccggctttcttgccatctgctgcatgaaaactgactttgccgaaaaaattaacaaagaagagcgaaaatgacagaccgcaaccgggataagaaaagtacttcaccttcaaattcagacacagaaatgaaatctgaacaactgcctccttgtgtgaaccctggcaatcctgtgttttcatgtatgttggatccaaagacactccagacagccacctcactatcaaaacctcaaatgattatgtataaaaccaattcaagtcaaaaaaaaaaaaaaaaaactcgggggggggcccggcccc

SEQ ID NO: 24371 - DNA, 301 bp, Homo sapiens
  misc_feature (1)...(301): n = A,T,C or G
catagacccccccntttttgacncgccgtgcaagaattccgcacgaggagaactagtctcgacatcaaaagacttaaaggtaaagcgtattacccctcgtcacttgcaacttgctattcgtggagatgaagaattggattctctcatcaaggctacaattgctggtggtggtgtcattccacacatccacaaatctctgattgggaagaaaggacaacagaagactgtctaaaggatgcctggattccttgttatctcaagactctaaatactctaacagctgtccagtgttggtgattcc

SEQ ID NO: 24372 - DNA, 497 bp, Homo sapiens
  misc_feature (1)...(497): n = A,T,C or G
cgccccccccatcgcancgcctgcaggtagtaccgccntgacggccagctatgtggacgatttaattggnctcgtcaggagcttgactgtacgtgggtcagttacatgttgtttcttcagtttctagtttcttgaagtacgtggctggctccaagggatgtttaggtccagaagaaatgaaaagatttgccttaacattagttatgggagccctagaaagccccaaccccttgctgagatgtgcagctgcagagtcatgggctagattagcccaaatggtagatgatggagcttttactgctggattagctcaagttagctttgacaaattgaaatcagcaagggatgtggttaccagaacaggacactcattggccttggggtccctacataggtatttaggaggaataagttcttctcaacacctaaattcttgtattggaatcctttatactttggcgcaggacagcacttctcctgatgtgcagacctgggcn

SEQ ID NO: 24373 - DNA, 473 bp, Homo sapiens
  misc_feature (1)...(473): n = A,T,C or G
attgacgccttggaannnctgaaggccgtcactatntgcgcgntgncctggggctctttggaacgccatcttcctcccacttacctgcctcccctccttttcgcaaatgtacagaagccatttgtcacctcagcattcgctgccgaaatgagcaactccattcagtaacgtgggagctgatcccacgggcaggctctccctgctccaggagaagactaggaggaagaatgaggtgctcctgccgtgtccgccttgttccgggtcgcactggaacaggcagcaattcctaagtccggagcgtttgagcgtttgctatctgactgctgatctgcgtgacagaaacaccagcatatttgcaacgccaaggatattggtcttaagtgcaagagcacaaatgagagtgtgagagaaagtaccttctattttaataataatattattataaaaataataaatctttttaacttttatat

SEQ ID NO: 24374 - DNA, 485 bp, Homo sapiens
  misc_feature (1)...(485): n = A,T,C or G
nattgaccgccttcggaannntttgatcggcctgcacgaattcgccacgagcaatgctgtaacctggtgcctgctgctgtgcagccacatacacacaattgtagcctgatttttagaagtgtgggtaattttttaatgaatttcctccttgagtagcagctgaggtcattgacaactgaagtgatggtgtggacatagagagaggggaagggttggaaaggagtaagtgatacactgctggaatttgtttcctgcctatgaaataaaattatttttcagatttaactttgaaaacttgcactacagaactatgggtggagctttttcttttacaacagatttttttttttttttttttaaaccagagtttaaacctcctttagggaatttcctggcacttgaacaggtcaacattgggtcactttggcgattcttttgtggtaccccaacaaaaaagtcatggtattttttttctccttgacccg

SEQ ID NO: 24375 - DNA, 475 bp, Homo sapiens
  misc_feature (1)...(475): n = A,T,C or G
cattcgccccgctctgcaggcactgcggaagagcacagaaattcatagcaagacatctcatagtcaaacttttgagaactgaagacaaaaaagacttacaaaaagtcaatccagatgtccttcaaggggaagatgattaaaccaaccgtgatacatgcatgctaatagaaaaaaactactgatgcctggaaccacctggatgaatctctaaagaattatggagagtgacaaaaataattttaaaatgttacatagtatattggtttatttatataacaacatgattgaaataacaagatcatagaaatggagactcattaggggttaaggagggggaaggataagaaggaagagggagtggccataataggcagcacgaagtattcctgtgccgatagaaatatttcttatcttgacagtagcaatgtcaatatactgtttgttacactacagctttgcaagatgttagcattgn

SEQ ID NO: 24376 - DNA, 410 bp, Homo sapiens
attcggcacgagcctgccttgacctcacgtgcagcaattaggaccaccaaggagtgttcttcaaaccaccttctaccaccccgcgggacacgccagggctgattctggtgctcgcaccccgcttcctcctctgcgttcccctgtggcaaagataaggagtcaggccagggcgggatgacactcattgattctaaagcatctttaatctgccaggcggagggggctttgctggtctttcttggactattccagagagccaaaggaagacttctctgtaggactagcacacccagaggaagagagtgacccaaattggtgctaggagcgaatgaatgggagagtgaactagacctcagccattcccaggagagagatgctgctgcctgggaaaagaaggaatggctttgctt

SEQ ID NO: 24377 - DNA, 478 bp, Homo sapiens
  misc_feature (1)...(478): n = A,T,C or G
attgacgcctgggaannattgaacgcctgcggaatccgacgagctttttaacatggtattatcaactgggccaggaggtagtttctcatgacggcttttgtcagtatggcttttagtactgaagccaaatgaaactcaaaaccatctctcttccagctgcttcagggaggtagtttcaaaggccacatacctctctgagactggcagatcgctcactgttgtgaatcaccaaaggagctatggagagaattaaaactcaacattactgttaactgtgcgttaaataagcaaataaacagtggctcataaaaataaaagtcgcattccatatctttggatgggccttttagaaacctcattggccagctcataaaatggaagcaattgctcatgttggccaaacatggtgcaccgagtgatttccatctctggtaaagttacacttttatttcctgtatgttgtacaatcaaaacacac

SEQ ID NO: 24378 - DNA, 474 bp, Homo sapiens
  misc_feature (1)...(474): n = A,T,C or G
nattgacccgttgcccccgcgctgcaggaattcggcacgaggaattctgtctcttcagagactcatcctcaaaacaagacttgacactgtgtccttgccccagtcctaggaactgtggcacacagagatgttcattttaaaaacggatttcatgaaacactcttgtacttataagagagcactgggtagccaagtgatcttcccattcacagagttagtaaacctctgtactacatgctgcttcctgatacttattgaacagggaaatcagtgtgcacttcagaaaactgaagaatacccagcattttgggaggccgaggtgggtggatcacctgagatcaggagtttgagaccagcctggccaacatggggaaacgccatctctgctgttttacaaaaatagccacacgtggtggtgcacacctgtagtcccagctactcgggaggctgaggcaggagaattgcttgaatccg

SEQ ID NO: 24379 - DNA, 482 bp, Homo sapiens
  misc_feature (1)...(482): n = A,T,C or G
ggggnnaagggnnnnnaattggattgcatgcctgtcangaattcggcacgagatcaaatccaccacctatcagcaaccaggcaacaaaaggtaaacgtccaaaaaaaggaatggcaacagccaaacaacgtcttgggaagatccttaagttgaacagaaatggccatgcacgtttctttgtgtgacagagctgctgttgcagccattcttccctttggagaccagtctaggggtgcaggagcctggagcttccgctgtccccctgcctggagcagtttgtgtgtatagtaagaacactgcccgaagaacagaatgaacctgatgctgcattttcactgtgccacacccactcagcaataaccattttggacctggtgggggagaggaagaaggagggtagaaccttaaaaagagaccttgaactggaaagggtctcttgtcagggcttgaattttattttgttggtggtagtgtcttgatgt

SEQ ID NO: 24380 - DNA, 476 bp, Homo sapiens
  misc_feature (1)...(476): n = A,T,C or G
nnnngggtgggggnnnncctagacgatcgcggcatcggcacgagcacaagngaaancatctgggcttagagatatctttttgcggagattattggataactgattcaactcttaacacgtaaaggactattttaattttctatctatccttgaattagcgccacgaatgtgtggttttcaagaaacgtgtacattttacctaaatttttagatttaatggagtgtaagtatttataactttctcttattatattctgaatatctttacaaaatgtaataatgatcccttttttccaaaaggctaatttgagctttgcttctctcttttttttgtcccttactttctcctttcttcctttctctctgtctctttgtttctttcattaggcttactagtgctgctacttttccttttgaaagaacacacttttggctatcttaatcctttgattgcactctagtgattatattttatg

SEQ ID NO: 24381 - DNA, 477 bp, Homo sapiens
  misc_feature (1)...(477): n = A,T,C or G
attgaccgccttcggaatcgttgagagcccatcctggacctcacctctgaatggtgggacgacaaactgcacgccagaggcagctccaggtcttgggactccctgccgcccagcaagaggaagaaggcacctctggtttctggcccatacatcgtgtacatgcttcaagagatcgacatcctggaggactggacagccatcaaaaaggctagggcagctgtgtcccctcagaagagaaaatcggatggaccttgaccctgctgttcacagccagggggaccctcagagcagctggcactgcacccaggattctcgtcttcctcctgcagacaggcggacccacaggcccctcanggtctgcccagccaggctcctgtggtgctgctgggccctcccactccatctggcactggtctggactcctcctctgccctcctcgaggcctgcacagctgtggccgtggagctgacctgaccn

SEQ ID NO: 24382 - DNA, 449 bp, Homo sapiens
cattgacccgcgctgcatgaattcggcacgagtgacagtgtggcccagggcatccctttccacagcaccagtttgacaaaaatgtcttccaactggagcaggccttcgttctcagcaagcagaggtaccccagccagccgcgaggagacactgtggacctggccaagaagatcttcctcaaatattaccccggctgggtggccggctcttggtgatagattcgccaccactgggccttgttttccgctaattccagggcagattccagggcccagagctggacagacatcacaggataacccaggcctgggaggaggccccacggcctgctggtggggtctgacctggggggattggagggaaatgacctgccctccaccaccacccaaagtgtgggattaaagtactgttttctttccacttaaaaaaaaaaaaaaaaaaaaaaaaaa

SEQ ID NO: 24383 - DNA, 411 bp, Homo sapiens
attggcccacaccacgcagagagtcttgagcttgatgaagctcctacaccccagagggagtgacctggcaacaacctccggctctgatctggaaagtgacattgaaagtgataaagagacatttacagaaaatggtaaaatgttcaaagacaaagtaagccctcttcagaatctggcttcaatacataatatgaaagaatacagcaatcattccattttctcaccatctttagaggagcagactgcggtgtcaggagctgtgaatgattctataaaggctattgcttctattgctgaaaaatactttggttcaacaggactggtgcggctgcaagacaaaaaagttggagctttaccttacccttccatgtttcccctcccattttttccagcattctctcaatcaatgtg

SEQ ID NO: 24384 - DNA, 474 bp, Homo sapiens
  misc_feature (1)...(474): n = A,T,C or G
gggcccgcccattggccnccccnnnattgcctccgcgctgcaggattcggcacgaggaaacccctcctcccctagcttcactcaatgttagtaagcttgccagcaaagcacggacagagaaggaggagaagctgagccaggcctatgcaatcagtgctggtgtctctctagagggccagcagctcttccagaccattcacaagaccattaaagactgtaaatggcaagaaaaaaacatcgtagtcatggaagaagttgttattacacccccatatcaagtggaaaactgtaaaggcaaagaggggagtgcactgagccatgtacgcaaaatagttgaaaaacattttagagacgtggaaagccaaaagatactgcaacgttcacaagcccagcaaccacagaaggaggctgccctgtcatcctgagtccgtacacatggaggactcttccagcatccagccaaggaggcgctgg

SEQ ID NO: 24385 - DNA, 468 bp, Homo sapiens
cgcccccccccccccccccattgacccccctgtttgtaccccgctgcggcccgagtagcccttttagatacccaagacatggagaatatgagtgatgatgatggttgggaatttgtgaaccttggagatcagcaaagctttggtattaaaactgcaggactagaagaaaaatcaactgcttgccagatgttggtttgctatgctaaggagttaaaggaaggctttgtggagtacaccgaacaggttgtcaaactgatggtccctttactgaaattttatttccacgatggtgttcgagtggcagcagcggaatccatgcctcttctcctggagtgtgcaagagtccgtggtcctgagtatctcacacagatgtggcattttatgtgtgatgctctaattaaggccattggtacagaaccagattcagacgtcctctcagaaataatgcattcttttgcaaagtgcatt

SEQ ID NO: 24386 - DNA, 526 bp, Homo sapiens
  misc_feature (1)...(526): n = A,T,C or G
gaggggagagccccnngnnnnnnnnagnnnaattgcccgcccctcngaaccttgatncgcgtgcangaattcggcacgaggttttcctttgattggtatggtaagtctgatgacgccaccttgccttacaaagataccttcttggtatctttcatcaagttcataatcaggatattctggaaaaaaaggtagggtttcaatttagcatttggggtagggggactaagaaataagtctatggcaattattgcagaaagcaaatgatcatatgtctcaccaagcatttcagtgactttgactgttcctggtacctcagcaggctcaccaggtccaccagcattacaagctaggacgcggaacctgtattctgcaccctgaggtaggtgtgttagagtatactctcgaatcttggttggagtggtgttacacttggtccattcatgttgatctactttttgcatttcaatcaagtagcctgtgactttagatcctccttcatcttctggaacactccaggccagggaga

SEQ ID NO: 24387 - DNA, 476 bp, Homo sapiens
  misc_feature (1)...(476): n = A,T,C or G
atttgaccngcttgtcccgcgctgcaggaattcggcacgagcgcacacctgtgatctaagctactcaagaagctgatgcaggagaattgcatacttctgggaggcggaagatgcagagaaccaagagggcgccactgaactccaacctacggaacatgagcacaacttcatctacaaagataagaaaggaaaatcagggccaggtcgccattggggagagagcacacttaggaaccctgggatggtaaggttaaaagaaagctacaggagccagagattctcacgtttgtcccagaacccttttttctaagccccatataaaaggtagattaaaaaaacaaagtagcatgagtgaaattgagagagggacaggtaatgcctttcagcccctaacttctaacaatctggaagcacaacgtgaaaatcacgtagcccaaccctatcattttcatattatgaaactgaggccaggtaag

SEQ ID NO: 24388 - DNA, 474 bp, Homo sapiens
  misc_feature (1)...(474): n = A,T,C or G
cgggcnccattgcccgcctgcggcttgtctgcaaagctgtgggatgtgagcacagggcagtgcgtttatggcatccagacccacacttgtgcagcggtgaagtttgatgaacagaagcttgtgacaggctcctttgacaacactgtggcttgctgggaatggagttccggagccaggacccagcactttcgggggcacacgggggcggtatttagcgtggactacaatgatgaactggatatcttggtgagcggctctgcagacttcactgtgaaagtatgggctttatctgctgggacatgcctgaacacactcaccgggcacacggaatgggtcaccaaggtagttttgcagaagtgcaaagtcaagtctctcttgcacagtcctggagactacatcctcttaagtgcagacaaatatgagattaagatttggccaattgggagagaaatcaactgtaagtgcttaaagaca

SEQ ID NO: 24389 - DNA, 487 bp, Homo sapiens
  misc_feature (1)...(487): n = A,T,C or G
gcgggnnnnntttgaaatcgatcgccctgcaggaattcggcacgaggaaaaaaaaggtcttggtgaggtgccgccatttcatctgtcctcattctctgcgcctttcgcagagcttccagcagcgaatttgccattttcagtggaaaacaagtggtcgttactagctaagatgtgtttgtactttggatctgcatttgctacacccttccttgtagtaagacaccaactgcttaaaacataaggatgtttcagttcctccatttaacagatatgaagagcattttaagaggtgcagcctctggaagtggatcaaactagaactcatatgccatactagatatgtttgtcaataaacttatgacgtgagaaaaaaaaaaaaaaaaaaaaaaacctcgggggggggccgggccccaaattccccttatagggaggggtttaacaattcacgggccgcggttttaaaacggcgggacgggaagaaannnnn

SEQ ID NO: 24390 - DNA, 456 bp, Homo sapiens
  misc_feature (1)...(456): n = A,T,C or G
atttgcnccgcgctgcagtaattcggcacgagtggaaactgtgagtgtgtgggcttttctccgacgtcgagcgtggtcctagcgtaaacagatgcattcgcctctccggtttcaatctttttttacgtttgcgctttcctcaaggccggtgggtcaggagtggagccttagtcattctaacgctggaggtgtcagtaggaccaacagagtctggtgccgacacggcttactgttgcgcgctcttctaggcctcaacttcctctcaactgtgtggtcagttcagggccgggaatccaatcttttccgagctccatattttatccacttggtggcgtccagtcccaagtccggcagttgaattctgccctaaagatgggctttatttctatctttttttaggtaacaggacattcagttagtaatgatggttgcaggttgaatagtctcgccctagaa

SEQ ID NO: 24391 - DNA, 470 bp, Homo sapiens
  misc_feature (1)...(470): n = A,T,C or G
natttgcccgtcctgcangaattcggcacgagaaacaacacactccatgccctccaggagcccatgtttagtacagaagaaggacaactgaacaaatagtcactacataaaagttcactggtcaaggtttatacaaagtatgatgagcatacctggtatgtatgagtatcttccaagcagggaaaatttcttatgttttctgttgcaaaacaaatttcctctgttaaaaaaaaaaaataagttggcatcattcaaatcgtcaacccaaattaactggtctctaagttattgatgccctgtagctagaaagtctttaattctgttactgaaatctactgaaacatagccaagtctaatatcatacaacccaaaggggaaatatcacatttatctagatatgtaattgaaaaaaatctgtatacttagaaactatgatattttcactgcttaacaatttggggaaatcacat

SEQ ID NO: 24392 - DNA, 427 bp, Homo sapiens
  misc_feature (1)...(427): n = A,T,C or G
ggaaggtannanntttggacnccnnttttgacccgcctgcaggaattcggcacgagatgcattgttacaggaagtcccttgccatcctaaaagccaccccacttctctctaaggagaatggcccagtcctctcccaagtccacacaggggaggtgatagcattgctttcgtgtaaattatgtaatgcaaaatgggaaaaccagactacttgggagcaccgcctgtgaaataccaacctgaagacaccgttcattcaggcaacgcacaaaacagaaaatgaaggtggaacaagcacagatgttcttcaactgtttttgtctacactctttctcttttcctctaccatgctgaaggctgaaagacaggaagatggtgccatcagcaaatattattcttaattgaaaacttgaaaaaaaaaaaaaaaaaa

SEQ ID NO: 24393 - DNA, 498 bp, Homo sapiens
  misc_feature (1)...(498): n = A,T,C or G
gggggctnnnnnnnnttctgcncgtttgcangacctgggcacgagccaagccccgggccttcaagtcttgaccgagcgcatccccggcccttctgcgcccacacctgagtttttgtctgtaggagtttccgcagtttgctaagaatcgacatctagaggagtactcaccacttaattgatgatcaatacacgttccttgaaagaaccgatagcatgcgatcgatacagagcatctgcactgggattgtccgccccgcctggcagggaggcctcgggggctaatggagctgagggtatagtcggccttggaccctcgcttttttcctttcctgtactatgaagataactgccttatctccccctcaggactgttttggggattaaataggacgtttaaattaccaacgctctttgaaataaacatttcnnaattannnaannnaaaaaaaaaaaaaaaaaaaaaccctggggggggggccgggcccccatttccccttt

SEQ ID NO: 24394 - DNA, 517 bp, Homo sapiens
  misc_feature (1)...(517): n = A,T,C or G
aggagtnccngggggnntnnncttagaccgcctgcagtggctctggatttctggaggagtggaaagcagagggaagacatcaagctcaaagacattgaacacgcgttgtctgtgtcggttttcaataacaagaacagtggcttctggcacagcagcttaattgaccggaacctcattgattattttgttcccttcctccccctggaatacaaacacctaaaaatgtgtatccgagtggaaatgcagtcccgaggctatgaaattgatgaagacattgtaagcagagtggctgaggagatgacatttttccccaaagaggagagagttttctcagataaaggctgcaaaacggtgttcaccaagttagattattactacgatgattgacagtcatgattggcagccggagtcactgcctggaggtggaaagaaacaacactcagtcccttcacacttncacccccagcttctttccttggagaaagatccagtgaaatgtcctgttgattgacaggaa

SEQ ID NO: 24395 - DNA, 480 bp, Homo sapiens
  misc_feature (1)...(480): n = A,T,C or G
acggcncccattcgccatctgtcccgcgctgcaggaattcggcacgaggtctgcctgcctccctgtgcagtccagccctgccttgctgcagccccagcccagatggcactcagcgctctcccctgagggagtccctgggcctagccatcccctcactattcccgacccaaagggtgacttttcatctgaacttaaggtgggagatatttttaacttttttccactttggaaaatgtcactgtgacaaaagccagcatactttccctgcacccatctgctcaccagatctcaggcaggaaagcccctctctgttgaagtcaggggctatcttttggtatacttgtgtgaaagtggctggttgggagcagagctaagtggcttcccattaacctgaggtctctttctttactctgggtcagacctgaggttggggaaagcgactgagccatgctcagaatgtctggtcctggcttgggcctg

SEQ ID NO: 24396 - DNA, 498 bp, Homo sapiens
  misc_feature (1)...(498): n = A,T,C or G
gggtttcnngnnnaatagctcgccctgatggacattcagaaaagatgacaagcataaaaacaaagtgaagaaaagggccaaatctaaaagtaggagtaagagcaaagagaaatcaaagagtaaagaaagagattcaaaacataatagaaatgaagaaaagaggatgaggtcaaggagtaaaggaagggatcatgaaaatgttaaagaaaaagaaaagcagtctgattctaaaggaaaagatcaggaaaggagtagaagtaaagagaagtctaaacagttagaatcaaagagtaatgagcatgatcacagtaaaagtaaggaaaaggatagacgcgcacaatccaggagtagagaatgtgatataactaaaggtaaacacagttataatagcagaacaagagaacgaagcagaagtagggacagaagcagaagagtgcgatcaagaacccatgacagagatcgcagcagaagcaaggagtaccatagatacagagaaca

SEQ ID NO: 24397 - DNA, 498 bp, Homo sapiens
  misc_feature (1)...(498): n = A,T,C or G
aggggtccngnnnaattgaccggtctgctgcggctgcaggaattcggcacgagccaaggcccagcaggcaactcctgggggagcagccccaaccatcttctcccggatcctggacaagagcctcccagctgacattctctatgaggaccagcagtgtcttgtgttccgtgatgtggcccctcaagctcctgtgcacttcctggtcattcctaagaagcccattcctcggattagccaggctgaagaagaagaccagcagcttctaggacacctactccttgtggccaagcagacagcaaaggctgagggcctgggagatggataccgacttgtgatcaacgatgggaagctgggtgcacaatctgtgtatcatctgcacattcatgtacttgggggccggcagctccagtggactccaggttgaacctgccaactgattaaaggacaccacactctggatgcttggatggaaagggaaaaatggaccctgtgatgcta

SEQ ID NO: 24398 - DNA, 487 bp, Homo sapiens
  misc_feature (1)...(487): n = A,T,C or G
agtgggnnnnnattgacctcgatcgcctgtangaattcggcacgagcgaactcctgacctcaagtgatccacctgcttcggcctctgaaagtgctgggattacaggcgtgagacactgcgcccagcctcatccctgtgaatttcttattgtacacaagttctttcactatctgtgtgcagtgctctgaggggacagacaaggcttgggtgtatatgccaaccagatctcattgaagtatcagcttgtttggtactaggtgcaagtgtagcatgtcacatgtgaccatgttggatcattgacaatttttaggtatgtactgacctacatttatgatgaagatcctgagcggaggttaagatattaagttattttccatatgaatcagaattatattgattctgtgcaatcaaaacaaaaggcagaatagaatgctgagattggntaagtttgcaatgaccatcttgaaccacagatttctgctatgtg

SEQ ID NO: 24399 - DNA, 465 bp, Homo sapiens
  misc_feature (1)...(465): n = A,T,C or G
atttgcccccccctgcaattgaccngcgctgcaggaattcggcacgaggagagagagagagagagagagagagagagagagagagagagagagagagagagagagagagagagagagagagacacaccccccctctcttgtgtgcgcgcagaagagatcccttctatacctgaatatagatctctagagagagagtcctcctctctctcttgagagagggaggggacacacagagagagagagagggagagagagtgttatccctctctctcccagtgtgttttataccagagacgatttttactctctatctctcgcgagaaaaatagggggagaggccccgcgcgttatctctctccttacagatacagatcgagggatcgtcacacacagagagacactcctccacattgggcgcgagagacacagagcgctcagagagtgagggtctcgcggggagagaga

SEQ ID NO: 24400 - DNA, 476 bp, Homo sapiens
  misc_feature (1)...(476): n = A,T,C or G
gtgggggnnnnaattgaaatcgatccgcgctgcaggaattcggcaccagaagtgccgcgcacatgaggcaccttttgatgtcccagcagaccctgaggaatgtgccaccgattgtgtttgttcaagacaagggaaatgcagctctagctgagcttgatcagttactggcagtcgcagactttggaccccgggatgaaagagacaactttgtacaaaatgatttcagggaccctgatgccccacaaccctgcggcaccacagagccgaccacaagctccagtctgtgtgggatcgatcatgaggcgctcaacaagcagattatggagtacaaaaggaggaaagataaagggctcgggggcctggtgtggcaggggcaggtggctgagctgacaacgcagatgcaaaagggaaggaagagggccaagccccgcctggagcaggacagctccctcaagagttacctgtcaggcgaggag

SEQ ID NO: 24401 - DNA, 461 bp, Homo sapiens
cttgaccgcctgcaggattcggcacgagagagacctttgtaaccaatggaattattcatttttctctatcttttattttttcaaagatattatttgactctatcaaaagtctctcctttttaaaccttttcttatggatggctgtcaatcccgaggcagaagttttcaggtggagaccaagcggcctttgctcttcttccttcttcctgccacactctgctttcttcctgccatggacccctggaggagacctatggagggacagttttgacctgacccctagaggagacagttttgacctcttcagcaccaggaaggaagctctgaggatggttgcagtgaggaagcatgggtctttaaggacttctctctcttttttgctggacattattgagtttgtgggaccctgcctcttcctgctacctgggggctgccagagtccctgcaggcctgtccatgca

SEQ ID NO: 24402 - DNA, 478 bp, Homo sapiens
agggccccattcgccattgtccccgctgcaggaattcggcacgagaggaggcagaggttgcaatgagctgagatcgcatcactgcactcaagcctgggcaacagagcaagactgcgtctcaaaaaaacaaaacaaaacaaaacaaaaatccatgaacaagtggacctgcccagttcaaatcattgttgttcaagggtcaactgtatattattttcgctggaagttttgaaattccagaaatatgcttggaaatccccgcttgaaatctccttggttggaaaccagtccagtgggtgactggcccagaatgatgcttctcctcggtggaccccctgggctgagcagcctgtgttcctgcctcaactcccctgaaccctcctgaactttctacacacatgtgggcactggctttgatactggcatttggaagggcacttgggaaattcagagaagtacccattattaagataaatgatgt

SEQ ID NO: 24403 - DNA, 511 bp, Homo sapiens
  misc_feature (1)...(511): n = A,T,C or G
aaggggnnannntgacgggnnnnnnnnncctttgacncactgcccgcgctgcggaattcggcacgagccaacatgggccgcgttcgcaccaaaaccgtgaagaaggcggcccgggtcatcatagaaaagtactacacgcgcctgggcaacgacttccacacgaacaagcgcgtgtgcgaggagatcgtcattatccccagcaaaaagctccgcaacaagatagcaggttatgtcacgcatctgatgaagcgaattcacagaggcccagtaagaggtatctccatcaagctgcaggaggaggagagagaaaggagagacaattatgttcctgaggtctcagccttggatcaggagattattgaagtggatcctgacactaaggaaatgctgaagcttttggacttcggcagtctgtccaaccttcaggtcactcagcctacagttgggatgaatttcaaaacgcctcggggacctgtgtgaattttttctgtagtgctgcattattgtcaat

SEQ ID NO: 24404 - DNA, 488 bp, Homo sapiens
  misc_feature (1)...(488): n = A,T,C or G
gagcgnnnnnnattgacctcgatcgcctgtcggaattcggcacgagaataatttgtcagaggataaactcccaacctagacctttcacttaaaatagtgtgaatttgtatatgtttttaaaagaaccagtactggccgggtatgctggcttttacctgaaatcccagcactttgggaggccgaggcgagtggatcgcctgagatcgggagtttgagaccagcctggccaacatggtaaaatcctgtctctactaaaaatataaaaattagccaggtgtagtggcgcgcgtctgtaatcccagctactcgggaggctgaggcaggagaattgcttgaatccgggaggtggaggttgcagtgagcctatgtcgtgccactgccctccagcctgggtgacagagcgactgcgtctccaaaaaaaaaaaagggtaaatttaaatttaaaaaaattaatattacccggttttttgttactaaaataaaatgcc

SEQ ID NO: 24405 - DNA, 480 bp, Homo sapiens
  misc_feature (1)...(480): n = A,T,C or G
attgcccgcctgcagattcggtacgagatcaatgaaatgcacataattaactggttccatcaagactgtgcacccaggccttacagtccaacctttttctgtgtctggctaatatttaaaactagaaaaactattcctaatcaacatggagtggagagtttattcactgtcttatctgcagaaatttgctgtcaatatataacccgcctgcagtggaaagtgtatagtgttttgtaataaatggcctgatgctaatgtgtaaatggcaaaggtgtatatagtatattaatgttgactgttaattcttaagcaagaaacttttttcttgatgagactcacagatnaacacaaactacaaaagttaattttcttgttacacccactgcactctgcaaccagtgttgcctgcctcatggcaggtggatcagctcctttacaaaaaaaaaaaaaaaaaaactcgggggggggcccgggccccac

SEQ ID NO: 24406 - DNA, 477 bp, Homo sapiens
  misc_feature (1)...(477): n = A,T,C or G
ctagacgtttgtcgcctgcggtgacactgaagcgtgatgagacgctccaggatggctgtgatactcacttctgcaaggtcaatgagagaggagagtacttctgggagaagagggtcacaggctgcccaccctttgatgaacacaagtgtctggctgagggaggtaaaattatgaaaattccaggcacctgctgtgacacatgtgaggagcctgagtgcaacgacatcactgccaggctgcagtatgtcaaggtgggaagctgtaagtctgaagtagaggtggatatccactactgccagggcaaatgtgccagcaaagccatgtactccattgacatcaacgatgtgcaggaccagtgctcctgctgctctccgacacggacggagcccatgcaggtggccctgcactgcaccaatgagtctgttggtacccatgggttctcaatgccatggagtgcaaatgctccccccagaagtn

SEQ ID NO: 24407 - DNA, 354 bp, Homo sapiens
  misc_feature (1)...(354): n = A,T,C or G
cggatggananaanantttgcccggctgttgacccggctgcaggaattcggcacgagcaccaagatgccctggagggcggccactggctcatcgagaagcgacaccgcctgcaggccatccgggatggactccgcaaggggacccacaaggacgtcctagaagaggggaccgagagctcctcccactccaggctgtccccccgaaagacccacttactgtacatcctcaggccctctcggcagctgtaggggtggggaccggggagcacctgcctgtagcccccatcagaccctgccccaagcaccatatggaaataaagttctttcttacatctaaaaaaaaaaaaaaaaaaa

SEQ ID NO: 24408 - DNA, 510 bp, Homo sapiens
  misc_feature (1)...(510): n = A,T,C or G
tggggnnnnnnnnnaattgattgcctcggctgcaggaattcggcacgagtggagaagaaaacttcggttcgctcccaggaccccgggcagcggcgggtgctggaccgggctgcccggcagcgtcgcatcaaccggcagctggaggccctggagaatgacaacttccaggatgacccccacgcgggactccctcagctcggcaagagactgcctcagtttgatgacgatgcggacactggaaagaaaaagaagaaaacccgaggtgatcattttaaacttcgcttccgaaaaaactttcaggccctgttggaggagcagaacttgagtgtggccgagggccctaactacctgacggcctgtgcgggacccccatcgcggccccagcgccccttctgtgctgtctgtggcttcccatccccctacacctgtgtcagctgcggtgcccggtactgcactgtgcgctgtctggggacccaccangagaccaggtgtctgaagtggactgtgtgn

SEQ ID NO: 24409 - DNA, 463 bp, Homo sapiens
cctttgcaccgcgctgtatgaattcggcacgagagaaagcaagcccctcggtgtctgacgtatctggggacacttcaaggttcactgtagctgagccatggccgctggtaacagacatcagggttccagactagccctcttgagtaactgtcctagagctgggacaggtcacgcctgcctccacatctctgtttcttcagcgggaaagtggagctggtggaggggagggaggagacatctccctctttgtcagatacatcctggagtccagatgcagcttgtcaccatctgcattttctccgtgggttgggagcgtgagggccttcctatccctccacccaccgtttccctgcagtgcacgctggcagccaccaagctaggaagtggcaggagtttgccggttgtttgtgaggggaaaaatttttttttcagagttagcaaataacagtaactactgctttga

SEQ ID NO: 24410 - DNA, 376 bp, Homo sapiens
  misc_feature (1)...(376): n = A,T,C or G
attagaacacccttnttttgcaccgccctgcaggaattcggcacgaggaaagacattgagatgttccttgagtccagccgcagcaaatttataggttacactctaggcagtgacacgaacacagtggtggggctgcccaggccaatccacgaaagcatcaagactctgaaacagcactttgattttggacagggacaaggtaggaagagaagcttcccttaaccagaggggccatttttccttttggctttcgagggcctgtaaatatctatatataattctgtgtgtattctgtgtcatgttggggtttttaatgtgattgtgtattctgtttacattaaaaagaagcanaaataaaaaaaaaaaaaaaaaaaaa

SEQ ID NO: 24411 - DNA, 475 bp, Homo sapiens
atttgcaccgcctgctggtccatgtgggtcaaactaaaattagaaatgtcccctcactgcagatcaaatgtaaagcttccagttaaggagctaaatgaggtcctcagctgaatgaggaaccctgtacatccccttgcacagccctattctaaatcgcttaaactatgctgatagctgcttaggttcttgagtagttctgctcttaaacgtagggaggccctgagaactaaattttgccccaaaataaaaacagaaattatgagattgcctcctgtcattttggttaacccagtccttcacctgccctgtgtcagtgtcttctgagggcaattgcgttgctcaaatcactagcacagaggttccttaatttggggccttagaaaccattgtgggccttggggtccatgaaccccatgaaattatttgtagacttgtatgtacatttttctggggagaaggttcaagagattcataa

SEQ ID NO: 24412 - DNA, 473 bp, Homo sapiens
  misc_feature (1)...(473): n = A,T,C or G
ntttgacttcgctgcacgaattcggcacgagctcaacctggtgcgcattgctatccagaacctgctgtactacggcgttgtgacactggtgtccatcctccagtactccaatgtatactgcccaacgcccaaggtccaggacctggtagatgacaagtccctgcaagaggcatgtctatcctacgtgaccaagcaagggcacaagagggccagtctccgggatgtgttccagctatactgcagcctgagccctggcactaccgtgcgagacctcattggccgccacccccagcagctgcagcatgttgatgaacggaagctgatccagttcgggcttatgaagaacctcatcaggcgactacagaagtatcctgtgcgggtgactcgggaagagcagagccaccctgcccggctttatacaggctgccacagctatgacgagatctgctgcaagacaggcatgagctaccatg

SEQ ID NO: 24413 - DNA, 465 bp, Homo sapiens
  misc_feature (1)...(465): n = A,T,C or G
nttgaccgcctgcacactccaagtgataactctgtaccgggcgatgctgacatagagcaagcgcttcaccgcctacaattacagaacatatgctgtcacgaggataacagatgccttcagagaaaataaaaatgtgaaggatactgtacaaattcaaaccctactgaattaagccaagagagaccttggagtatttcgtggacaggtgccacattggccaactgtattcaactgacaagctgatcattgagaatcgagacatgcccatgacctagcaagccggggaccagccaccactggcggtcagggaccaccttcagcatacactctctgtgtgagatgggggctaccaaaaccagcttacaatagacttttgcgctgtctgtcctgtgggagctgatataccaagtcacatttgcattctgctgcaagcttagtgaaaaaggactgctgtgtttgcttggt

SEQ ID NO: 24414 - DNA, 473 bp, Homo sapiens
  misc_feature (1)...(473): n = A,T,C or G
ctttgcattgctcncgctgcaggaattcggcacgaggcgtgcagctcactgaactccaagcgagccagccctctcttggactagaaggcctactgtcagcccttcgcttacaaactgcaggctcaatccgaaggggacggccggcgggggctctcctagtgcccagagacaggcccagaggtttacaagttttctaagcttttgataatgtgaagctccaggccgagaggatgctgttgagcacattgcagctatgtaatttttggtgtatgtatgtaatatttaaggttggaaaaaaaactcaaaagcaaagatattaactcttattagaaaaaaagacaaaaaaaaagccaaagcatgatgcgtcttgtcagccttaagtgggctccacacctgtgctgtgctgtgaccgcccagccagcaaagctgcgggaggatggagccggaccacacaccgtggcatttggaaccga

SEQ ID NO: 24415 - DNA, 508 bp, Homo sapiens
  misc_feature (1)...(508): n = A,T,C or G
aaggggnnnnnnnnacgnnnnnnnnnnnnaattgatcnattcggcggcattcggcacgaggagactcaagaaacctctggggtcctgttttctggtcgtgtgatcccaggggtgcacatgggccccttgggtgtctgaacagaagggcatgggagggagggctgcacccctgcagtcttactctgctggtgtagcgggcagctgcccactcccaccccaccctgcaccgcgggctcctgagtcggcagattaagcattttataaattgtattttaaatacatgttttaaacttgtcaaaaaagaaaaaagaaaaacaattatcttgggggggggcccggcccccatttcgccattatggggggggattctaaaactatgggccggctgttaaaaatgggaggtggggggaggaaacncttcaggtcactcagcctacagttgggatgaatattaaaacgcctcggcgacctggttgaatcttttctgtagtgctgcagtattctcaat

SEQ ID NO: 24416 - DNA, 495 bp, Homo sapiens
  misc_feature (1)...(495): n = A,T,C or G
gaggaattganatcgcaccgcctgcaggcaaaataaaaaataaacatgatgatcacagatgcagtcacattttctgagttcttgtctctctgccagtgccacccagatagcctcacaaaactttgacccagccactgttagtgtcgccaccgcccataaaggagctgagcccagcaggggcactgcctggggccctgtagccaaaaggctacagcaggagctgatgaccctcatgatgcctggtgacaaaagaatttctgcctaccctgaaagccttatcaaatggacaccatccatgaagcagctggcacagtgtatgaagatctgaggtataagctcttgctggagttcctcaatgactacccacctttacgatgcacccacagtgaagttcctcacaccctgctaccaccctaacgtggacacccagggtaacatatgcctggacatcctgaaggagaagtggtctgccccgtatgatatcaggaccatcct

SEQ ID NO: 24417 - DNA, 493 bp, Homo sapiens
  misc_feature (1)...(493): n = A,T,C or G
cgaaggtgccnggggngnnnnaactgagnccctcaactgacggcctagcaangngcagaccctcactggcaaaaccatcacccttgaggtcgagcccagtgacaccattgagaatgtcaaagccaaaattcaagacaaggagggtatcccacctgaccagcagcgtctgatatttgccggcaaacagctggaggatggccgcactctctcagactacaacatccagaaagagtccaccctgcacctggtgttgcgcctgcgaggtggcattattgagccttctctccgccagcttgcccagaaatacaactgcgacaagatgatctgccgcaagtgctatgctcgccttcaccctcgtgctgtcaactgccgcaagaagaagtgtggtcacaccaacaacctgcgtcccaagaagaaggtcaaataaggtggttctttccttgaagggcagcctcctgcccaggccccgtggccctggagcctcaataaagtg

SEQ ID NO: 24418 - DNA, 508 bp, Homo sapiens
  misc_feature (1)...(508): n = A,T,C or G
aataagaaagcgctgtaggccnacgctgcaggaattcggcacgaggtcaaactcatctcttggccgctaagcgccctgcggcggtatggacgtgatactacgtggttcacttttgaggcacggaggatgtgtgagactggtgaagggctgtttatctttcagacccgagacggggaggccatctatcagaaagtccactctgctgccttggccatagccgagcagcacgagcgcttgctacagagtgtgaaaaactcgatgctccagatgaagatgagtgagcgggccgcctcgctgagcaccatggtgcccctgcctcgcagcgcctactggcagcacatcacacggcagcacagcacgggacagctctaccggttgcaagatgtttccagccctctgaagcttcatcgaacagagacttttccagcctacagatctgagcactgacagtaactggccatgaattgtaacacacttgtgatgtgtcangcacagattcacccaggag

SEQ ID NO: 24419 - DNA, 478 bp, Homo sapiens
  misc_feature (1)...(478): n = A,T,C or G
cgtgcgggnnnnnnaattgacnctcgctgcacgatttcggcacgagccatccccctctggcaaccctaatcttccttctccatctgggccctggggcgtcttccaccacccaggccggatgctttaaaaaaaattgctttttaaagtgtctgtcgttgaaagaaattagtcttacccttgaagtcaggggcgcgtcctcgcaatacacatcttgttagggaaagtgttcggctccagctagggttctacaaggcgtttcttgttcaccgccggagggaagcaggctccggagtgactgccttctgaaagtcggtcttgtaacaattggatggatgcctttgaagagcccctgtccctattctatgcttgaaaacagcgtgcagtcctaatgttcaagaaccacgaccacataaaaacattgctccccttctgctgctttgaaaacgacccctaaattccgtgtagaagttgccaggtn

SEQ ID NO: 24420 - DNA, 508 bp, Homo sapiens
  misc_feature (1)...(508): n = A,T,C or G
cgtggntttttaactgacgtctcgtatgcacaaagctgctgaaggtaagattatcaaaattataaagcatttttcacactcaagtgaaacaaggttgacaaactcacttcgcaggtcacatgcctatacatcacttattatatttgggtctgaaacttctcacatgtttgggaggttttatgtgtcctcattgggaaaatgggtgtaattcagcataaaacctcatatgattgtcctgcctcatggagctgttgtatagatcccagatccatcccatgatttgttcctgtctgaggcatagaggcaggcaagccgtggattttgcacatggtgactttcccactgtgccatgatacagtctgcatcttatagcagtgcctttgtctcagggcctctgctggcagtctagaccttttgggcagaaaggagcttcaaatggctgtgataaggaatattaaaaattgtggttctactttaattgtattggctgttcatgtatgtaggagtt

SEQ ID NO: 24421 - DNA, 503 bp, Homo sapiens
  misc_feature (1)...(503): n = A,T,C or G
aggcgccnnnnnnaattgaaagatcgagcgccatgcggaattcgccacgagcacagtgctgctctttctgaaaagtgtgcaggatgtttccttatatgtccgagaggctgacggaacagagaaactggtgtttagagtgacttcgagtgagagtaaggcactgaaacatgagcggccgaattctataaagattctgggaactgctataagtaactattgtaaaaagactccaagcaataacatcacctgtgtaacatatcacgtaaatattgttttagaagaggagagtactaaggatgcacagaaaacatcttggttggtgtgtaacagtgtgggtgggcgagggatcagtagtaagcttgactctttagctgatgaactgaaatttgtcccaatcattggaatagccatgcctttatcaagcagagatgatgaagcaaaaggagcaacgtctgatttctcaggaaaagcattttggttccttcctttaccacctggtgagg

SEQ ID NO: 24422 - DNA, 479 bp, Homo sapiens
atttgacccgcctgtttgacccgcctgcaggaattcggcacgagtcttactgtacataaagatgttccttaagtcgtacagaaggtggcgcggcaaagggcctcgtgcagtgtgttcagattgcccctggggatcttctgtgtcttcagcgcccagccctgcgtgttcctggtgaagcagtttcacatcagtctctccagatagcactacgatgtattccgcttctgaacaggatcccatgccagtgtggaacaccttcccaatcttagttcagaagtggcttgtatgacctgttcaggggtcacatgaggtctcgccagtttcctgggtcctcttcagaggccagaaagttctaagttctgagtccccggccagggtcccttaacacctcggcacagaggctgttggcaagtgtagaggctgcctctgtgtgtggtttaagtaaactggaaatgagacattgacgtgctgctcctcca

SEQ ID NO: 24423 - DNA, 485 bp, Homo sapiens
  misc_feature (1)...(485): n = A,T,C or G
catggtcgtnctcggaannatagaatcgccttgccgaattccccacgagctgcattgcattgacagcggagtgttgcttctcactgaaacagctgtcataacgctcatgaaagatctggataatacagagaaaaatgaaaaactgaaattcagtatcattgtgcggcttcctccgcttattgggcacaacatttgtacactttgggatcatcctatgagttctaacatcatttcgcggaaccacgtgacgcgactgcttcagaactataagaaacagcctcggaattctatgattaacaagtcatcgctcagtgtagaatttctgcctctgaactacttcattgaaattctgacagatatagagtcctccaatcaagccctgtatccttttgaaggacatgacaatgtggatgcagaatttgtagaggaagcagctctgaaacacaccgcgatgcttttaggcttatgaaaaagaaaacgcagtc

SEQ ID NO: 24424 - DNA, 472 bp, Homo sapiens
  misc_feature (1)...(472): n = A,T,C or G
gagggtannnnnnnaattgccctcgctgcaggaattcggcacgagacccataccactccggccgaactcccctagacagatgggtgacctgtctcctttgagaggatgctgaggcatctgtagcagctgtttcaaacaccaatgtcacctctcctcctggcccccgcccaatggggagaggaatttggggccctactctggggaccacctttcacccgtttgtactttctgggccacgccgacccctgggtcgcttgatgtaaaagccaaaagctgctgcctcccacttggatcatgtcgcctgggattttcatccctcgcacaaggactacgggttcacacggtgaactgggggaaaggaagtgttagggggcaagtcgcggcacccccccttccataaactcacgtcctaaccgggggggggtttaccaaggaaaaaattttgggaaccaaggggaattggggggggggg

SEQ ID NO: 24425 - DNA, 463 bp, Homo sapiens
  misc_feature (1)...(463): n = A,T,C or G
gtgcgcccccnnntttgcttcgcctgccgattcggcacgagcagtcggccctcatagcccttgcccgctcgggtatgaagatcgggcggattgaggatgtcacccccatcccctctgacagcactcgcacgaaggggggtcgccgtggtcgccgtctgtgaacaagattcctcaaaatattttctgttaataaattgccttcatgtcgaaaaaaaaaaaaaaaaaaaaaaaaaaaaaaaaaataaaaaaattaatttcttggggggggggccccggcaccaaacccccttttatgggtggaataaacaatcatgccgcccgggtttaaaaagggtaggggggggaaaagggacttgctgatatgtttggacaaacagccactgagcggaattggtactggtccaggagttatccaggatagattttcacccaccatgggacgtcatcgttctaatcaactccn

SEQ ID NO: 24426 - DNA, 492 bp, Homo sapiens
  misc_feature (1)...(492): n = A,T,C or G
gcgggttttggattcgatcggctgcaggaattcggcacgaggagagagagagagagagagagagagagagagagagagagagagactcgcgccgaattcggcacgagtgtcattttacctgttcatcacccctccaaaaacagtcctggacgaccacacgcacaccctctttcaggcgaacctcttcccgggcgctctggtgcacttgggagccgaggagccggcaggtgtctacctggagcctggcctgctggagcatgccatctccccatctgcggccgacgtgctggtggccaggtacatgtacagggccgccgggtccccttccccattgccagcccctgaccctgcacctaagtgtgagccagctgctgaggagggggcgctggtcccccctgagcccatcccagggacggcccagcccgtgaagaggagcctgggcaagccancaagaggagagagctgccagcctgaggtgctcactccgccagc

SEQ ID NO: 24427 - DNA, 458 bp, Homo sapiens
cttggaccccttttgccccgcgctgcaggaattcggcacgagagaaaactgttttaaggcactgtgacatgaaaagggctgccagggatgtgttcctccccccacttcacagccagcacataatcgcccctctccttgacgacgtatgtgacgttgtattgctggttgcctacatgcttcatggagacctcctcgcagggggtggtgggcccatggaccccgatcagcagcatgttggagccagctttgctgcagtccaccaggaaggaactcttctggcccacaaaggcctttgagagccctgcccccttagaggtcaccttgctggcgtccgaggatgccttgggaatggcgctatagcaggtctctgtagacgacctggtcactgactccaccaggatggatgaggtctcgttggctgagccagggctaactagacgctggcctgcaccttggcc

SEQ ID NO: 24428 - DNA, 498 bp, Homo sapiens
ggaaggccattgatcgcctgtggtatgaggcccgtcgacatggactgctattttgttcaagcggagcaccggcaaaatcctcatttgaggaataaaccttgtgcagctgtactgtacaaatcatggaagggtggtggaataattgcagtgagttatgaagctcgtgcatttggagtcactagaagtatgtgggcagatgatgctaagaagctatgtccagatcttctactggcacaagttcgtgagtcccgtgggaaagctaacctcaccaagtaccgggaagccagtgttgaagtgatggagataatgtctcgttttgctgtgattgaacgtgccagcattgatgaggcttacgtagatctgaccagtgctgtacaagagagactacaaaagctacaaggtcagcctatctcggcagacttgttgccaagcacttacattgaagggttgccccaaggccctacaacggcagaagagactgttcagaaagaggggatg

SEQ ID NO: 24429 - DNA, 480 bp, Homo sapiens
  misc_feature (1)...(480): n = A,T,C or G
nattgaccggctgaangacnctgcacgagcttcagntggacagtctggtttccggaagacatcaagattcgagacgcttatcagatgctgaagaaacaaggaattataaaacaagaccctaaactaccagtggataaaatcttacccccaccatctccctggcccaagagctccatctttgatgctgatgaagaaaagtccaagcttctgacaaggcttctaaagagcaaccaccccgaggaccttcaggctgcaaaccggttaatcaagaatttggtcaaggaggaacaagaaaaaatcggagaaggtgtccaagagggtcagtgcggtggaggaagtgcgaagccatgtgaaggtgctgcaggagatgctgagcatgtaccgcaggccagggcaggccccgcccgaccaggaggccctgcaggtcgtgtatgagaggtgtgaaaagctgcggcccacgctgttccggttggcgagtga

SEQ ID NO: 24430 - DNA, 509 bp, Homo sapiens
  misc_feature (1)...(509): n = A,T,C or G
tttgggggnnnnggggcttgannnccaatcgaccgcctgtcangaattcggcacgagggtcagggagcccccctcaccctcttggcccgttaccctttgtgactttccaccatggtgtcgtgtgaccctcagtcaggttggtgggggctgagtcctcactgagcagccactttccacatctgctagaggaacagtgacatggacacctgtgacagagagaggacagttaggagggacagacagctcttcctttcggagcctggctagtctaggacatcaccttgctgtgtcttctcaagcttttaaaattgaccctgaacgtgtgacagggtcctatggtgttactcaaagctgtgcagggtaaatgatgacatatttattctttttccatttgttctagaaacagtgcctttttcatcagttgcattttccaggctgagagctgtataaaacattttggactgtgaccatgtaccttcctttntaagaaaaataaactgctttatggn

SEQ ID NO: 24431 - DNA, 495 bp, Homo sapiens
cgccccttcgaccgccctgccgcaccatttgccccggctgcaggaattcggcacgaggaaaacccttacggcgaagaccatcaccctcgaggttgaaccctcggatacgatagaaaatgtaaaggccaagatccacgataaggaaggaattcctcctgatcagcagagactgatctttgctggcaagcagctggaagatggacgtactttgtctgactacaatattcaaaaggagtctactcttcatcttgtgttgagacttcgtggtggtgctaagaaaaggaagaagaagtcttacaccactcccaagaagaataagcacaagagaaagaaggttaagctggctgtcctgaaatattataaggtggatgagaatggcaaaattagtcgccttcgtcgagagtgcccttctgatgaatgtggtgctggggtgtttatggcaagtcactttgacagacattattgtggcaaatgttgtctgacttactggttcaa

SEQ ID NO: 24432 - DNA, 507 bp, Homo sapiens
  misc_feature (1)...(507): n = A,T,C or G
gggaagcaaattggangncccgtngatagcaccgcctgtangaattcggcacgaggaanaaacggccttcagcccaggctgggaagcgccttctccaggtgcctctccctcaccagctctgcacccctctggggagccttccccaccttagctgtctcctgccccagggagggatggaggagataatttgcttatattaaaaacaaaaaatggctgaggcaggagtttgggaccagcctgggctatatagcaagaccccatcactacaaattttttacaaattagctaggtgtggtggtgcgcacctgtggtcccagctactcgggaggctgtggtgggaggattgcttgagtccaggaggttgaggctgcagtcagctcagattgcaccactgcactccagcctgggcaacagagcgagaccctgtctccaaaaaaaaaaaaaaaaaactcgggggggggcccggcccccaattccccctatagggagcggataacaatccactgc

SEQ ID NO: 24433 - DNA, 512 bp, Homo sapiens
  misc_feature (1)...(512): n = A,T,C or G
aaggggnnngnntgccgggnnnnnnnnnnaattgaccgactgacgcgcgctgcaggagatccgcacgagtatcagggcatcgctgtggtcatggaggaactgctaaagattgtgaagagcttgctccaaggaaccattctccagtatgtgaaaacactgatagaggtgatgcccaagatatgccgcttgccccgacatgagtatggctccccagggatcctggagttcttccaccaccagctgaaggacatcattgagtacgcagagctcaaaacagacgtgttccagagcctgagggaagtgggcaatgccatcctcttctgcctcctcatagagcaagctctgtctcaggaggaggtctgcgatttgctccatgccgcacccttccaaaacatcttgcctagagtctacatcaaagagggggagcgcctggaggtccggatgaaacgtctggaagccaagtatgccccgctccacctggtccctctgatcgagcggctggggacccctca

SEQ ID NO: 24434 - DNA, 503 bp, Homo sapiens
  misc_feature (1)...(503): n = A,T,C or G
tgaggcggnnnngggcctgcccgccnctggaattccgcacgaggaatatgcaggttctgatgaagttgtagggccagaaggaatggagaaattttgcgaagacattggcgctgaacctgaaaatattattatgttaattatagcgcggaaattggaggctgaaagcatgggattgtttaccatcgaagaatggttgaagggaatgacttcattacagtgtgactgcccggtattgttacaaaacaaatttgactttttgcgctcacagctgaatgatatttcgtcatttaagaatatctacagatatgcctttgattttgcaagggataaagatcagagaaccttgatattgatactgctaaatctatgttagctcttctgcttgggaggacatggccactgttttcagtattttaccagtacctggagcaatcaaagtatcgtgttatgaacaaagatcaatggtacaatgtattagaattcagcagaacagtccatgctgn

SEQ ID NO: 24435 - DNA, 504 bp, Homo sapiens
  misc_feature (1)...(504): n = A,T,C or G
agtgcggtnnnnnattgacggctgtggaattccgccgagcctgcccagactaggaggcagcggggatagacagggaatggggagaagaaagacccccattggtttggaaatcaaggagagggcggtgacatattggaccagaagaggcactagccattttaaggagaggaaagagaaaactctggggtcagggagagaccctatccccacctaattatccagcatatatgtaagaaacatagcagcgatggtattcgatctgtgccatgactcttctgaatgtttggacaggttagagttggggacccctgttggccacttgttgacctctcatagtggtgcttgggccaggtcttctcaatggaaggggaatcccttataggggagagggaacagagcccagtgaaatggcagtcagaatgttaaccctggatccatctctaagtagagagagggtgcccattgcctangtgagtgtgccaagctcaggattccaactggtgg

SEQ ID NO: 24436 - DNA, 419 bp, Homo sapiens
  misc_feature (1)...(419): n = A,T,C or G
agagagggnnnnnattgacgcccatcgcccggctgcaggaattcggcacgaggtggatttgagggttaaatgcccacctacctatccagatgtagttcctgaaatagagttaaaaaatgccaaaggtctatcaaatgaaagtgtcaatttgttaaaatctcgcctagaagaactggccaagaaacactgtggggaggtgatgatctttgaactggcttaccacgtgcagtcatttctcagcgagcataacaagccccctcccaagtcttttcatgaagaaatgctggaaaggcgggctcaggaggagcagcagaggctgttggaggccaagcggaaagaagagcaggagcaacgtgaaatcctgcatgagattcagagaaggaaagaagagataaaagaagagaaaaaaaaaaaaaaaa

SEQ ID NO: 24437 - DNA, 502 bp, Homo sapiens
  misc_feature (1)...(502): n = A,T,C or G
agggcnggnnccctttcgaatcgctccgcctgcangaattcggcacgagcccaggtcagcaagggcacctgcgagcaaggtccttccatagtgacgccccccaaggacatctggaatgtcactggtgcccaggtgtacttgagctgtgaggtcatcggaatcccgacacctgtcctcatctggaacaaggtaaaaaggggtcactatggagttcaaaggacagaactcctgcctggtgaccgggacaacctggccattcagacccggggtggcccagaaaagcatgaagtaactggctgggtgctggtgagtaccagtaccaagagctggcaagagtttcattcttagcattagacataagcagacctggcaaaggtgcctgatgtaccgccagcctaaaggtgcttgctcttccacatctgtttggaatagccttaccatggagtcgctgctcctctttcagagaaactaaagggaaagtgctttattgcatgttttgaaa

SEQ ID NO: 24438 - DNA, 512 bp, Homo sapiens
  misc_feature (1)...(512): n = A,T,C or G
tgaggcgtgnnnnaggatttgannccccctcgcaccgcctgcangaattcggcacgagccagaggctctggcaagagttgagtcaattgcatgcctgcctagtccagctccgtccacatgaatgctctccacaagcttcagaggaaacaggataaaatggactcccaaatatttagggtggtgaaaatactctgcatgatactagaattgtggatacaggtgattatatatgtgtccaaacctacagaaggtacaacaccaagggtgaaccctcaggtaaactacagaggctgggtgaccatgatgtttcaatgtcggttcattagttgtgacaaatgcaccactccaccactctggtggggatgctgccagtgggggaggctatgtatgtgtggggacagagcgtatgtgggaagctctgtactttctgctcaaatttgctgtgaacctaaaactgctctaaacattaaagcctattcaaaaaaatgaaaaanaaaaaaaaaaaaaaaaaa

SEQ ID NO: 24439 - DNA, 469 bp, Homo sapiens
aaattgccccgtgctgcaggaattcggcacgagcagagccagttcctagcgcagagccgcgcccgccatgagggagatcgtgcacatccaggcgggccagtgcgggaaccagatcggcaccaagttttgggaagtgatcagcgatgagcacggcatcgacccggccggaggctacgtgggagactcggcgctgcagctggagagaatcaacgtctactacaatgagtcatcgtctcagaaatatgtgcccagggccgccctggtggacttagagccaggcaccatggacagcgtgcggtctgggccttttgggcagcttttccggcctgacaacttcatctttgattggccagtatttcagaagctgctaagacctagtgttggtgaagggtttgggaaaataacagctgttcagagaactacttagtagattgagcaaatcaataatttccattctagagtgtcagtt

SEQ ID NO: 24440 - DNA, 468 bp, Homo sapiens
  misc_feature (1)...(468): n = A,T,C or G
nggcggcnnnnnnaattgccctcctgcggcacgggacctaagagagtctctgcagccagatagtacatggtgtctccacaaaactaggcattctggagattgcccagaaagggatgtgaggggaccgttaagatctgtcttgcttatctcatgcactcacattccttcagcctcctggagttcctgataaaaggaagccagggtgttgacattttttagctattgatttcccaatagcttgtggatcagttgtacacccacacttccttctctgcctaattccgtttttctggaaaaagtagtatgcccatgtatgtgtgtttttcttaacacaggtccatgaaagtttggcttcctggtttgatgtctggtgcgtggcctggaaaccagggagcagcaactattgagatggttctgtggtcagtgaaaaattctatttcattgagacaattttttctttatccacag

SEQ ID NO: 24441 - DNA, 443 bp, Homo sapiens
attgaccagtctgcaggacttcggcacgagccggcgagacgttgaggaggaatcattatagattctaaaaatatattttcccttctctgtggacttggtataaaacgtagctttttttctgcttggatttattttctaaaaatcaacaccgtaaacccatatcagatacaacaaaattggggtagttaaaaccatgagttgtggaaatgagtttgtggaaacattaaaaaaaattggttatcccaaagctgataatcttaatggagaagactttgactggttgtttgagggcgttgaagatgaatcgtttctgaagtggttttgtgggaatgtgaatgaacagaacgtgttgtctgaaagagaattggaagcttttagcattcttcagaaatcaggcaagcctattctagaaggggcggcattggatgaagctcttaaaacgg

SEQ ID NO: 24442 - DNA, 478 bp, Homo sapiens
  misc_feature (1)...(478): n = A,T,C or G
gcaggttnanttggaccgctgctgattcggccgagcctatcgagcccaccgcccatgaggggtccacagtgaccgtgagttgcatggctggggctcgagtccaggtcacgctggacggagttccggccgcggccccggggcagccagctcaacttcagctaaatgctaccgagagtgacgacggacgcagcttcttctgcagtgccactctcgaggtggacggcgagttcttgcacaggaacagtagcgtccagctgcgagtcctgtatggtcccaaaattgaccgagccacatgcccccagcacttgaaatggaaagataaaacgagacacgtcctgcagtgccaagccaggggcgacccgtaccccgagctgcggagtttgaaggaaggctccagccgggaggtgccggtggggatcccgttcttcgtcaacgtaacacataatggtacttatcagtgccaagcgtccagctcacg

SEQ ID NO: 24443 - DNA, 456 bp, Homo sapiens
  misc_feature (1)...(456): n = A,T,C or G
atttgcaccgcgctgangaattcggtacgagcagacatcaactggcaaggcctagaggagctacacagtgcgaatgaaaacatctatgagtacagacaaaactacagacttagtctggtggactggactaattacttgaaggatttagatagagtatttgcactgctgaagagtcactatgagcaacataaaacaaataagactcaaactgctcaaagtgacgggttcttggatgactctgctgagcacgctgtgtcaatggagatggcctctgctgactcagatgaagacccaaggcgtaaggttgggaaaacacctcatttgaccttgccagctgaccttcaaaccctgcatttgaaccgaccgacagtaagtgcagagagtaaacttgcatggaataacgacattccagatgcttgtcatttgaattctgaacactggagaaacaccgacaan

SEQ ID NO: 24444 - DNA, 502 bp, Homo sapiens
  misc_feature (1)...(502): n = A,T,C or G
ggggngttnccnnagaaaaannaaaaatcgatngccnctccactgantcgccctgcggcaaagnccgacaggcttgtctgtttactagctgcgtggccttggacgggtggctgacatctgtaaagaatcctcctgtgatgaaactgaggaatcgggtggccgggcaagctgggaagagcaaagccagagctgcgctgcctcaatacccacaaaagaccattcccagtatacataagcacaggatgtttttctcaagagggatgtatttatcacttggacatctgtttataatataaacagacatgtgactgggaacatcttgctgccaaaagaatcctatgcagtggctcattgtatgtgaggttgaaccacgtgaaattgccaatattaggctggcttttatctacaaagaaggagtttcatggggttcagcctaacagttatggaaactacagtccttataaaccattggcatggtaataaacagatcttaagtataaaa

SEQ ID NO: 24445 - DNA, 480 bp, Homo sapiens
cggacacatttgcccgcctgctgaattcgcctcgagcaggacattgccagccgctgtaccagagagaaaagcgagtcctcaagtggctagcattaacaaataaattcttagccagagagagacacacattacttcagctcacaactcactggcttgagctaaccagaagtcccagccacctacaaggaggccaggatgtgcagtcctaccttatgcccagtagacagagagccgcaggcattcagtgagtagcccacaaggaggctttcatctgctggggtcatgatggattcgtatcttccccctctagttgggaaactaaagcaccagttacagaaacctgaaatatatcgattttccattcatttaacaaatatttattaagcactgctgtgagtaaggccatgctggtggttgtagatacaatggtgaccagatacagtccttccttcaaagagctcccagtctaatggagaagag

SEQ ID NO: 24446 - DNA, 322 bp, Homo sapiens
  misc_feature (1)...(322): n = A,T,C or G
atgnggggtcccatctgcctgcctgcctcttaggagtccttatagagccttctgtgcccctggccagctgataatcctaggttcatgacccttcacctcccctaaccccaaacatagatcacaccttctctagggaggagtcaaatgtaggtcatgtttttgtcggtactttctgttttttgtgacttcatgtgttccattgctccccgctgccatgctctctcccttggttccttaagaactcagcatctgtccctgttcattacatgtcattgagtaggtgggtagccctgatgggggtcgctctgtctggagcataacc

SEQ ID NO: 24447 - DNA, 507 bp, Homo sapiens
  misc_feature (1)...(507): n = A,T,C or G
agtgtnacctganactgacggcgtggcanaggcacaggcgacccagcctcactgtggtggcagaggccagaaacatacccacaccatacagtgtgatgtgtgtgagaagggatggccaggggacagagcaaggtgaaatgtctgtccaaagtgcatgagagcagtctgcagcaaggatggcaggaggcatgacagtaaggtcatcccgctcactgcagtaggtctcctctttaaccatacacacacgcacacaattttctgtatgtttccttagcacccagaagttattcactttcaaaatgatcagactttttactgaagcttactggctttccaactagtcctaaattgtgaggctttactgaagtacttgagcatgtgaagtgaactgaggaggaaaatggctttgccggcagagtttgagatgcaacgagtacaagccatttgcctatgaagaggctgtttcctccctctctcagggaggacaagtagccagtctgtggtgaa

SEQ ID NO: 24448 - DNA, 506 bp, Homo sapiens
  misc_feature (1)...(506): n = A,T,C or G
ngaanttgaaaattttgaacngccctnattagctccgcgctgcaggaattcggcacgaggtccagggagctagtgttaaaaactagaagaaaacagatgcccttagtgtctgaccactgggcaggacaggatattccaaacttaaaatgaagagaagaaatcacacatgtgcacacacacccacacacacaccatatgaagtttgaatacaaaggttagtatcctgcatgtggaaagcaaaattaaactttgagcagcagaataaactttacaatagatatgaaggaaaattcgtcagtgtatatgaggaatactaaaatctatcaggaaaatataaaactccccagaggaaaataggagcaaagaggccgggcacagtggctcatgcctgtaatcccagcactttgggaggccaaggcgggcagatcgcatgagctcaggagtttgaaaccagcctaggcaacatggcaaaaccctgtctccatttataaaagaaagaaagagag

SEQ ID NO: 24449 - DNA, 458 bp, Homo sapiens
  misc_feature (1)...(458): n = A,T,C or G
acttgaccgccttcggaattcggcacgagattctcaatcccatcccagatctgctgaatcagaaactctaatgagaggacccggcaatccacgttttaataagccctcctggtgattctgatgcacactaaattcaactgttttaaagggaaagccctttatagtattggagttcccacactgagaggctttggggcccaaaataagaaggttctaggttgtcattcagactttaacattaatttcaaagtcacctttctcatgcttccttgtgtttctgtttttccatttatgattttaacaaagaaaggtatgtgtgcttttgggtggaagttaggagaatgtttgtgtctttcctagttgaatacaaccttcagagaaaaaccttatgccttggaaattactacctggcacacaaaggggcttcaacaaggaaaagcagttggaggtctcttccn

SEQ ID NO: 24450 - DNA, 490 bp, Homo sapiens
  misc_feature (1)...(490): n = A,T,C or G
agaagtttccngggtngnnnnnactgaggccntcactgantgcctagcagacacccaaccnggagcggtacgcctcctacgtttacctgtgcatgtcttactactttgaccgcgatgatgtggctttgaagaactttgccaaatactttcttcaccaatctcatgaggagagggaacatgctgacaaactgatgaagctgcaaaaccaacgaggtggccgaatcttgcttcaggatatctagaaaccagactgtgatgactgggaaagcgggctgaatgcactggagtgtgcattacatttggaaaaaaatgtgaatcaggcactactggaactgctcaaactggccactgaccaaaatgacccccatttgtgtgacttcattgagacacattacctgaatgagcaggtgaaagccatcctagaattgggtgaccacgtgaccaacttgcgcaagatgggagcgcccgaatctggcttgacggaatatct

SEQ ID NO: 24451 - DNA, 509 bp, Homo sapiens
  misc_feature (1)...(509): n = A,T,C or G
tgggnntnnnnnnattcatcggctgccgtgcagggaggagcttcccaccatctacaagtgtccttaccagggctgcacggccgtgtaccgaggcgctgacggcatgaagaagcacatcaaggagcaccacgaggaggtccgggagcggccctgcccccaccctggctgcaacaaggttttcatgatcgaccgctacctgcagcgccacgtgaagctcatccacacagaggtgcggaactatatctgtgacgaatgtggacaaaccttcaagcagcggaagcaccttctcgtccaccaaatgcgacattcgggagccaagcctttgcagtgtgaggtctgtgggttccagtgcaggcagcgggcatccctcaagtaccacatgaccaaacacaaggctgagactgagctggactttgcctgtgaccagtgtggccggcggtttgagaaggcccacaacctcaatgtacacatgtccatggtgcacccgctgacacagacccaggacaagg

SEQ ID NO: 24452 - DNA, 491 bp, Homo sapiens
cttcgaccgcgtgcaggaattagacacgcgctcattacagcgcaatctttatttattgtaaaattttttaagtgtacttatgtactaattttcccttgtagcatgttatatttttgtgttttatacttttgtaattttaggtcagtcttgttccttggcaacatctgtagtattattaatcttctgacattttcttatgtttttaaaaagataagagcatctagtgcattaaatgccaaaaaaaaaatacattatcagtgattgaaacgtttacatgtacccaaaaaccataatcatctcttggaagaaaatgctgagatcaatgaattattctgtgtgcctatattgacgtagtgggtactagagagttctgtattttattattgactataatacttagtttaattagcttttgcaactgatggcatcaagggaaatatatttttgccaaaggtctggcccttccaaaactcaccccctaattaaatggg

SEQ ID NO: 24453 - DNA, 496 bp, Homo sapiens
  misc_feature (1)...(496): n = A,T,C or G
gggagttgccnaggggngnnnnaaactgagaccntcgcttancgtcctcggaagnaccgncggaggngctggccacttgcttgggatcctttatcctggtcatcttctatttccaaagtatgttgcacccagtcatgcggaggaatccctttggtgtggacatctgctgccggaaggggtcccgaagccccctgcaggaactctacaacccaatccagctggagctctcaaacactgctgtcctgcaccagatgcggcgggaccaggtgacagacacgtgccgagccaacagcgccacaagccgtaagcggagggtgctgacccccaacgacctgaagcacttggtggtggatgaggaccacgagctcatctactgctacgtgcccaaggtggcctgcaccaactggaagcggctcatgatggtcctgaccgggcgggggaagtacagcgaccccatggagatcccggccaacgaggcacacgtctccgccaacct

SEQ ID NO: 24454 - DNA, 503 bp, Homo sapiens
  misc_feature (1)...(503): n = A,T,C or G
nggcgcccggggcccngttgaaattactganntactgaccggccgtacgctggtgtgtccgtttctctggtgaatccccagccatccaatggccacttctcaaccaaaattgaaatcaggcaaggagataactgtgattccataatcaggcgtttaatgaaaatgaatcgaggaattaaagacctttccaaagtgaaactgatgagatttgatgatccactgttggggcctcgacgagttcctgtcctgggaaaggagtacaccgagaagacccccatttctgagcatgctgttttcaatgtggacctcatgagcaagaaaattcatctgactgagaatgggataagggtggatattggcgatacaataatctatctggttcattaaactcatgcacattggagatttatcctggtttcttaggaatactactactctgattgtgtctactgattggctatcagaaccttaggctggacctaaatagattgatttcatttcta

SEQ ID NO: 24455 - DNA, 502 bp, Homo sapiens
  misc_feature (1)...(502): n = A,T,C or G
tggtagtgnnnngggggnngnnnnaaatgatggccntcaactgagtgcgctgcaggaancggcacgaggaaaatcgcatcttttcctactgctaagtatataactgagccagaaatggtctttgaagaacatgaagtaaatgaggatattcaacccatgacagcttttgaaagtgagaaggaaatagaattgcctaaggaggtgccagaaaagcttccagaggctgctgattttggaactacgtcttctctgcattttgtccacatgagaggattacctttccaagccaatgcccaagacattataaacttttttgctccactcaagcctgttagaatcaccatggaatacagctccagtgggaaggccactggagaagctgatgtgcactttgagacccatgaggatgctgttgcagcgatgctcaaggatcggtcccacgttcatcataggtatattgaactgttcctgaattcatgtccaaaaggaaaataagactcta

SEQ ID NO: 24456 - DNA, 493 bp, Homo sapiens
  misc_feature (1)...(493): n = A,T,C or G
ggcgccgggnnattttaaattgatgactgagaacntgcacgagggaaatactaaagcaagactactctatgaagccaatcttccagagaactttcgaagaccacagacagatcaagcagtggaatttttcatcagagataaatatgaaaagaagaaatactacgataaaaatgccatagctattacaaataaagaaaaggaaaaaaaaatggaagagaaaaagagagaaaaggagccagaaaagccggcaaaaccacttacagctgaaaagctgcagaagaaagatcagcaactggagcctaaaaaaagtaccagccctaaaaaagctgcggagcccactgtggatcttttaggacttgatggccctgctgtggcaccagtgaccaacgggaacacaacggtgccacccctgaacgatgatctggacatctttggaccgatgatttctaatcccttacctgcaactgtcatgcccccagctcaggggacaccc

SEQ ID NO: 24457 - DNA, 443 bp, Homo sapiens
aactgcccgcctgaggaattcgtgcgagccgacgggcactgggcgactctgtgcctcgctgaggaaaaataactaaacatgggcaaaggagatcctaagaagccgagaggcagaatgtcgtcatatgcattttttgtgcaaacttgtcggtaggagcataagaagaagcacccatatgcttcaatcaacttctcagagttttctaagaagtgctcaaagaggtggaagaccatgtctgctaaagagaaaggaaaatttgaagatatggcaaaagcggacaaggcccgttatgaaagagagatgataacctatatccctcccataggggagacaaaaaagaagttcaaggatcccattgcacccaagaggcctgcttcggccttcttcctcttctgctctgagtatcgcccaaaaatcaaaggagaacatcctgtgctgtacat

SEQ ID NO: 24458 - DNA, 489 bp, Homo sapiens
  misc_feature (1)...(489): n = A,T,C or G
nattgaccccccntnnnnaanncattgacccgcgctgcaggaattcggcacgagctgtttcatttcctcatggagccttggattaccttttatgcagttaagtcaacattaaaaagtttcagtaggctgggtgcggtggctcacgcctatgatcccagcactttggggtgaattgtggggtgattcaccatgaggagggtgaatcacttgaggccaggagttcaagaccagcctttccaacatggtgaaaccccatttctactcaaaatacaaaaattagccgagtgtggtggtgggtgcctgtaatcccagctacttgggaggctgaggcaggagaatcgcttgaacctnnnttcgggaggttgcagtgagttgagatagatggcgccactgcactccagcctgggtgacatagtgaaactgtgtttcanacaaaaaacaaaaaaaaaccacctcttttataaacccccggaaagcctttgcctcctt

SEQ ID NO: 24459 - DNA, 471 bp, Homo sapiens
  misc_feature (1)...(471): n = A,T,C or G
nactgagaccctcactgacggcntagagaaggccttatacccatctagtgttgggcaaccattccaaggggcttacctggaaatcaacaagaaccccaagtataagaaactcaaagatgccattgaagaaaagatcatcattgctgaagtcgtgaacaaaattaaccgtgctaatgggaagagtacatctcggattttcctcttaacaaacaataatctccttcttgctgaccaaaagtctggacaaatcaagtcagaggttccactggtggatgtgaccaaggtatcaatgagctcacaaaatgatggcttcttcgccgtccacctcaaagagggctcagaagcagctagtaaaggagactttctcttcagcagtgatcacctgattgaaatggccaccaagctctatcgcacaactctcagccaaaccaaacagaagctcaatattgagatttccgatgagttcctggt

SEQ ID NO: 24460 - DNA, 474 bp, Homo sapiens
  misc_feature (1)...(474): n = A,T,C or G
ccttgcaccgcctgcatgcgctgaccttcattgaggtccctttggaaccagatgtcttgttacagacaccttcctctgtgtaagtctcctcaccttgaggggtctttagtaatgcatctgggtagcatctcaactgctggtagcatttatctgacttggaaagttggagaagaggcattcctactggagaaaaatgtcagtgttttcctataagctctgtgttagctattcattatatttgtgcttaaagatgttccttcattcatcaactaggggaagtccagatgcgggttatcttgaaagaaacaaactgacattctaggcagacagttgtctatgtggtctgagggtcagcagctggtagtctccttcctttggctcttgagacccacacatatcactttagccctaacaagggctcctcccacctccacctgttgccccagntgaaaagcatccattatgagctgaggc

SEQ ID NO: 24461 - DNA, 476 bp, Homo sapiens
  misc_feature (1)...(476): n = A,T,C or G
naatgaggccccctaaggttagtgctnggaaanancgcacgagagttgactctggccctgaaggaatgccacagacgaagtgatggtggtcataccgtattgcatcgggatctgaaaccagccaatgttttcctggatggcaagcaaaacgtcaagcttggagactttgggctagctagaatattaaaccacgacacgagttttgcaaaaacatttgttggcacaccttattacatgtctcctgaacaaatgaatcgcatgtcctacaatgagaaatcagatatctggtcattgggctgcttgctgtatgagttatgtgcattaatgcctccatttacagcttttagccagaaagaactcgctgggaaaatcagagaaggcaaattcaggcgaattccataccgctactctgatgaattgaatgaaattattacgaggatgttaaacttaaaggattaccatcgaccttctgttgg

SEQ ID NO: 24462 - DNA, 436 bp, Homo sapiens
  misc_feature (1)...(436): n = A,T,C or G
ngagccgggaaagtttaaatcgacgctctagaacctgccgagctgcatagatttggctgtctccgctcatagctgcttttggcgcgaaagatgccgggtctggttgactcaaaccctgccccgcctgagtctcaggagaagaagccgctgaagccctgctgcgcttgcccggagaccaagaaggcgcgcgatgcgtgtatcatcgagaaaggagaagaacactgtggacatctaattgaggcccacaaggaatgcatgagagccctaggatttaaaatatgaaatggtggtctgctgtgtgaataaataattcctgaagaatgaagaagattaattttgggagttctttgacgaactttgatatgtggaaaaagtatttataatttattgtaagaagaaagtaaaatattactagtggaaaaaaaaaaaaaaaaaa

SEQ ID NO: 24463 - DNA, 488 bp, Homo sapiens
  misc_feature (1)...(488): n = A,T,C or G
ggggaatcgcctgcctgcangaattcggcacgagaagacactgacttgngggaaacatcatctgtggctcacgctcttgtgccagcaccccaggagccgccaccttccttcccgatacaaaagatgcagatagatgaaagagaagagttcggcccgcggctgcctcccgtcttctgccccaatgctcgtcagacacttgaggttcctcaaaaagagaaacataaaaagaacaaagacaagcacaaggccaagaaagagcacaggcggaagaaagagaagaaaaagaaacacaggaagcacaaacacaaaggcaaaaaaaaaaaaaaaacttggggggggggccgggcccccatttccccttatggggggcggaataaaaatcccgggcccggggtttaacacgggggggaggggggagannnnnttnntnnnnnnnnncntctnncntggtttggactctcttngctttcagacgttcttgtttgatt

SEQ ID NO: 24464 - DNA, 500 bp, Homo sapiens
  misc_feature (1)...(500): n = A,T,C or G
aggcggccggggccggtgnaaaattganttacctgacggctcgtacgaattcggcacgagggaacgcgtcccgctgcttgggtcaggttcgccggtcgcgggagccccgccgtgcagtcggaggaacacgtggccatcagtaatcatgagcaacccattcgcacaccttgctgagccattggatcctgtacaaccaggaaagaaattcttcaatttgaataaattggaggattcaagatatgggcgcttaccattttcgatcagagttcttctggaagcagccattcggaattgtgatgagtttttggtgaagaaacaggatattgaaaatattctacattggaatgtcacgcagcacaagaacatagaagtgccatttaagcctgctcgtgtcatcctgcaggactttacgggtgtgcccgctgtggttgactttgctgcaatgcgtgatgctgtgaaaaagttaggaggagatccagagaaaataaaccctgtctgcc

SEQ ID NO: 24465 - DNA, 511 bp, Homo sapiens
  misc_feature (1)...(511): n = A,T,C or G
agcgtccaattgacctcgacggccgtatgaattcggcacgaggttctttntataatttcagaataaagtctcatttcagtgcagtgggctgggtggtgggggagagggttgaaagccccacttgggtccccgagggtccattgagccctctcaggccagctccaggaatcctggcctggtcacagagcagagttgcttgcagggtcctagtggccatcgggcctgggcaggacatcatctctcagagggtcagaggctcagagctggtgcagctcagcaggtcacggccctccaccagctctgggttctcccgcatcatgtggtggctgcttttcccccaccagggcctcagctccagcagctggtgggtgagctgagcacagcgtacagcaaacacgttctccgccacgcagagcactagggcgatgccccagaggcacaggctggagctataaatgcgtgtggggtcgaagggacagtcaggtgcgagggccagtagttcagagctccc

SEQ ID NO: 24466 - DNA, 475 bp, Homo sapiens
aatggccccgcctgcaaggattttgcccccgcgctgcaggaattcggcacgagctcagctctccaacctccagtctcaccagcgccagcacaacaaggacaagccctacaagtgtcccaactgctaccgggcctattcggactccgcttctttgcagatccacctctcggcccacgccatcaagcacgccaaggcctactgctgcagcatgtgtgggcgggcctacacctcggagacctacctgatgaagcacatgtccaaacacacggtggtggagcacctggtgagccatcactcgccccagaggacggagtcccccggcatcccggtgcgaatctctctcatctgagcccactggaggcgccgccccacccggcccactggcagacacagaacccagacagccctgccaaagccataccaaagacactcaaagacagccaataaattctgttcaatcatttaataaaaaaaa

SEQ ID NO: 24467 - DNA, 464 bp, Homo sapiens
aatttgcaccgcgctgcaggaattcggcacgagcaaagttctgcagaagaaggtaagatggagcttcatcttcagagactttcttgttgcatgtctgcttgtttgaacccacaagggactttgaggagctgtcttcccggcgtagacacctcctttctctctgcttcttatgctcttggcctgcagcaggtgttttcacagataggagagtaggctttggggttggaccttcctgtgtcacattctaactctgccctcactggcttcatgacttgggcaacttccttaaactcttacttctcagtttcttcccctgtgaaatgaagacattcatagttctccttcctgaggtattgtgagaattaaatgagtggtagatagctagatagagatagaaatatactgagtgtacatgcctaccacgtagtaaaggcttatgaaccccggtgtagtaataatagaaa

SEQ ID NO: 24468 - DNA, 483 bp, Homo sapiens
  misc_feature (1)...(483): n = A,T,C or G
gaatggnnnnnnnttttgatttcgatcgcgctgcacgaattcggcacgaggcaactaggccttcagtaaatgtgattcacctcttctttccctccttttcccaaagcatccctcttagtctaggtccttgttgtttcttgcctgaactcctgccatagtcttaactggtctccttgcttcctgtcttatcctccaccgtctttcttttatactgacacaagaatggtctttctgaattgcacatgtgagcatgtcacttccctgcttaaatttctccagtggattcccagggacttcaggatcaagtcctagttgttcagcatggcatccaagactctttatgatctggcccttgcttacctctcagccttagctctcccaactcttgcacagtcactgctcttcagccatagtggatcactcaccattcccagatgtaccaggctctcgcacacctctgcacctttgcacgtgctgtttgcn

SEQ ID NO: 24469 - DNA, 494 bp, Homo sapiens
  misc_feature (1)...(494): n = A,T,C or G
agcggccgcccccnnttagacccgccctgttttgacccgcctgcaggaattcggcacgagcggcacgagcggacacggacaggattgacagattgatagctctttctcgattccgtgggtggtggtgcatggccgttcttagttggtggagcgatttgtctggttaattccgataacgaacgagactctggcatgctaactagttacgcgacccccgagcaaatgacacaaaatatatatcaaatggcgacatttggaacaacagctggtttctctggaatattctcaaacttcctgttcagacgctgcttcaaggttaaacatgatgctttgaagacatatgcatcattggctacacttccatttttgtctactggtggtactgacaagctttttgtaattgatgctttgtattcagataatataagccaggaaaactggtgtttcagaagctcactgattggcataggttgggggggtttctatcccaggtc

SEQ ID NO: 24470 - DNA, 474 bp, Homo sapiens
  misc_feature (1)...(474): n = A,T,C or G
attgaccccgctgcggaattcggtcgagctctgaatagtccgcgcactccaaaaaagccggttaacagcaaacttggcctttcaccatatctgacaccatataatgattctgacaaactgaatgactatctttggagggggccatctcccaatcaacaaaatattgtccagtctctaagggaaaaatttcagtgtctcagttcaagcagctttgcttaaggttcttcataataactgcttgaatcaacttcttattttgctcataaaacgttacagatactgatgaggtgttttatgtataccagattaaaacaattttgtaagaaccagaggngnnnnnatactttcttttacagcacaacttttggaaatggctgacgatgcagcccggattgtactgtagcacatgttggcatcaacagtatattttctcatgctgagtgtcttcatgtttcatgtaagtcaatcttactt

SEQ ID NO: 24471 - DNA, 403 bp, Homo sapiens
  misc_feature (1)...(403): n = A,T,C or G
cgcgtttcaattganattcgatcggctgtgngacaacggcacgagtctaagcacagctctcttctcctattttcatcctgcaagcaactcaaaatatttaaaataaagtttacattgtagttattttcaaatctttgcttgataagtattaagaaatattggacttgctgccgtaatttaaagctctgttgattttgtttccgtttggatttttgggggaggggagcactgtgtttatgctggaatatgaagtctgagaccttccggtgctgggaacacacaagagttgttgaaagttgacaagcagactgcgcatgtctctgatgctttgtatcattcttgagcaatcgctcggtccgtggacaataaacagtattatcaaagagaaaaaaaaaaaaaaaaa

SEQ ID NO: 24472 - DNA, 494 bp, Homo sapiens
  misc_feature (1)...(494): n = A,T,C or G
gggtgtnnaacttgagactcgtgaaacgcacgagcttttggtcggggcgggtgaagagaggaggcctttggttaaggacaccgcgggaaacagaaaaggaaagcgaattctctctgacaccaagaccaacgctctagcaaagctcctccggcggatattttgctttcccagcaggttctgccttaacaataaggtcctttgtaggccaaaatgtgcagggcataaaagcatgtgatttgggactttccaaaggggaagtgaacagaaactgccacagacccggacgtgaacagggagttaccctcggctggtgaatgtaggcaggcctggctgagggtggtgagactgcgagggacaggtgagagatgaagctcagaagacatctttgcagagatgtggagaagacaggaggaagtccttcctaaaataaacctgacctcctgtgggttcccaaacactaacttgtttccctgggaatttggaggtgggttcan

SEQ ID NO: 24473 - DNA, 445 bp, Homo sapiens
  misc_feature (1)...(445): n = A,T,C or G
nttagtcccgtctgcaagacttcggcacgagtgatagaccaaaggctgatcacgcggcaccacctcaagaagcgggcgtccagtgcacgtgccaacattacactgtcagggaagaagcgcataaaactcctccagcagatccggctggcccagaaagagaaaacagccatggaagcggaagccccttcaaagccagcctggactagtgaaccacagctcataaggcatatgaagacaaaagccccccaggatgtagaaatgaaggaccttgaagatgagagctaaacctcttccactagaagattctcaactggagccagccttcacactcagtggctgtttcagaggactttgacaaaagcaaggccccttttcactctccagatttgctcctacctaatggcctactgacctcccctagagggatgtctttgggagggaagaa

SEQ ID NO: 24474 - DNA, 480 bp, Homo sapiens
  misc_feature (1)...(480): n = A,T,C or G
tggccgtgnntttgannaattgatcggctgtcggaattcggcacgagtggccatctccctccccagaaacagtgtgcatgggttattttggagtgtaggtgacttgtttactcattgaagcagatttctgcttccttttatttttataggaatagaggaagaaaggtcagatgcgtgcccagctcttcaccccccaatctcttggtggggaggggtgtacctaaatatttatcatatccttgcccttgagtgcttgttagagagaaagagaactactaaggaaaataatattatttaaactcgaaaaaacggcatcctgctccgtctgcaggttgtgcttccggtgcggaggtcagggacaagatggtgccaccggtgcaggtctctccgctcatcaagctcggccgctactccgccctgttcctcggtgtggcctacggagccacgcgctacaattacctaaaacctcgggcagaagag

SEQ ID NO: 24475 - DNA, 481 bp, Homo sapiens
  misc_feature (1)...(481): n = A,T,C or G
cttggacccgcgntgttatgccccgcgctgcaggaattcggcacgaggagaagcccaagctaactgagctgggtgaaggcttgtgcatcacctggcttgagttccttgctgtcacagatgataggttcatgtacacaacattaatgtttgataaggaaagcattttttttttgttaaaattgaattgtcagtactttactttttccccccaaataggttagactgcagaagcttcagtcccatatataaacgttcatgtcattttagaggattatatggttgtctccagagaaattaacttacattatcaaaaaattctttgtctaatatattggagtctttaaaagcgttgaagaataaaatattaattagaacaacttcaaatgctaaggtgatgttttaccgggacttaattaaatacaactttttcctttcgaaaaagactgttcacatttgcttccaggtgaattattgctttctt

SEQ ID NO: 24476 - DNA, 480 bp, Homo sapiens
  misc_feature (1)...(480): n = A,T,C or G
aacggccnnnnaaggaccttcagtggcgatttcggcacgagtggacggggacaccctcagccctcataacagattccaaggagagggcaccctcttggccttatctttgccccttgcgtctgtctcacacacatctgctcctcagcacgtcggtgtggggaggggattgctccttaaaccccaggtggctgaccctccccacccagtccaggacattttaggaaaaaaaaaatgaaatgtggggggcttctcatctccccaagatcctcttccgttcagccagatgtttcctgtataaatgtctggatctgcctgtttattttggtgggaggtctttactaccttccctaccacccatgccccccttctcagtctgcccctggcctccagcccctaggggactatctggggtggagttcctcgggccttttctctcctccctcttttctttccgttgaatgtcgctccagcatgctggat

SEQ ID NO: 24477 - DNA, 478 bp, Homo sapiens
  misc_feature (1)...(478): n = A,T,C or G
cgcgcccccctttgcattgatcccgctgcaggaattcggcacgagccccactgtatggtcatcgtcagggcttgccccaaagagtctatggactggtggatgtaactactccacctgcccttgggacccatcccagttttcatcattgagccccagaccctctgagcagcaccttgaagagggcagataatcagacttgaggaaactgaaagccccaggttgagagaacagaggcctagggacctccagaccattggaatcactgtttgccagctgtgtggccttggtcatatcatcagcctctgggaagcctagttcccacatctggaaataaggatgatcatagctacctcacggttacattgcaaagccttactctaaaagctcccagcctccagaggctctcaatgaagagtcaccttcatggtcgtcttcaggaacaagacggatgaaaangggtgggggttagactcanggg

SEQ ID NO: 24478 - DNA, 497 bp, Homo sapiens
  misc_feature (1)...(497): n = A,T,C or G
ggcgcccggggnngtganaccttgaagactgcacgactgtgcgaaancggcacgagatgcattcttggcgctgggcggccgcggcggctgctttcgaaaagcgccggcactccgcgattctgatccggcctttagtctctgttagcggctcaggtccgcagtggaggccacatcaactcggcgccttgggaaccgctcgagcctaccagcagattccagagtcattaaaaagtatcacatggcagagattgggaaaaggcaattcaggacagttcttagatgctgcaaaggctctccaggtatggccactgatagaaaagaggacatgttggcatggtcatgcaggaggaggactccacacagacccaaaagaagggttaaaagatgttgatactcggaaaatcataaaagcaatgctttcttatgtgtggcccaaagacaggccagatctacgagctagagttgccatttcgctgggatttttgggtggtgcaaag

SEQ ID NO: 24479 - DNA, 406 bp, Homo sapiens
  misc_feature (1)...(406): n = A,T,C or G
gcggaattgccatccatcgcctgcangaattcggcacgaggtcaccctttgctgtgaggctgtcctgtacattgtgggatgttcagcactgtcccttgcctcaatgccagtaacgcgtcttcctgagtggtgccaaacaaaaaggttctcaggtgttgccaaatatgtcctggggtataaaactttcctcgcctgacaaccactggtctgtagggatttttggctacacacaaaccagtatcgctcatagatcagcaaaccggggcctactagagtctgaacagctgtaatctatgaattctaagtgaaattttaaaaattgttaatttttcctatattgcattaattttaaaaaataaatctgaggcaaaaaaaaaaaaaaaaaaactcaggggggggcccgggc

SEQ ID NO: 24480 - DNA, 502 bp, Homo sapiens
  misc_feature (1)...(502): n = A,T,C or G
gggaaggagcnnncccnagttgnccccgatgatcgccgtggaatgccccagngacccggagtctgctgcagcgctggggcgccagttttaggagaggcgccgacttcgactcttggggccagctggtggaggcgatagacgagtatcagatattagcaagacatctacaaaaggaggcccaagctcaacacaataattctgaattcacagaagaacaaaagaaaaccataggcaaaattgcaacatgcttggaattgcgaagtgcagctttacagtccacacagtctcaagaagaatttaaactggaggacctgaagaagctagaaccaatcctaaagaatattcttacatataataaagaattcccatttgatgttcagcctgtcccattaagaagaattttggcacctggtgaagaagagaatttggaatttgaagaagatgaagaagagggtggtgctggagcagggtctcctgattcttttcctgctagagttcccgg

SEQ ID NO: 24481 - DNA, 496 bp, Homo sapiens
  misc_feature (1)...(496): n = A,T,C or G
tggcnncncnnnagcggggnnnntttgaggtcatcggcattcggcacgagcacagngggcccccggaacaagacttgcgtcacccgccacgcggattttgttcagactccaatcaccgtcatttttggtggacacatcaggcctgtggttcaccagcagagttcaaaagaatctgccactttgcagccatttttcacgttgcagttggatatccagtcagacaagatacgcacagtccaggatgcactggagagcttggtggcaagagaatctgtccaaggttataccacaaaaaccaaacaagaggttgagataagtcgaagagtgactctggaaaaactccctcctgtcctcgtgctgcacctgaaacgattcgtttatgagaagactggtgggtgccagaagcttatcacaaatattgaatatgctggggacttggaaattagtaaagaactgctttctccaggggttaaaaataagaattttaaatgccacc

SEQ ID NO: 24482 - DNA, 471 bp, Homo sapiens
  misc_feature (1)...(471): n = A,T,C or G
cgtgtggcnnaattgacgttctgtaggactcggcacgaggaaagttaaacgttttaaacatggtagtactggaaattttacaagacttttacctagcacttaaatatgtataaatgtacataaagacaaactagtaagcatgacctggggaaatggtcagaccttgtattgtgtttttggccttgaaagtagcaagtgaccagaatctgccatggcaacaggctttaaaaaagacccttaaaaagacactgtctcaactgtggtgttagcaccagccagctctctgtacatttgctagcttgtagttttctaagactgagtaaacttcttatttttagaaagtggaggtctggtttgtaactttccttgtacttaattgggaaaagtcttttcccanaccaccatctattttgtgaactntgtaggcatctttatttgggtaatatgaactggngtaaattgtacagtcaa

SEQ ID NO: 24483 - DNA, 463 bp, Homo sapiens
atttgccatcgctgcacgaattcggcacgaggtgggtggctccaatggtaggaggactgagaattcaaccattagatctggcagtgtggatgtcatttgtgaccttgatgagagccatttcagtaagaatgagagcgaagacctggagtaaattcagagagaatgggaggagagaagaggagtcagtgagtatagacttgtgctgtcccttatagcagccactagccacgtgtaggtatttaaatttaaattaatgaaataaaaccaaagtgctgggattacaggcgtgagccaccacacccggcctggatatactttttttttttttaaatattgaattattcctttcagaattagggctgggagaccatggttttaaataaagcagaggaaattgttattggacgcttctgttaatttgggctgagatatggggattgggtcatggactaagttgaggttc

SEQ ID NO: 24484 - DNA, 482 bp, Homo sapiens
  misc_feature (1)...(482): n = A,T,C or G
gtggttnnanaaactgacgcctcggaattccattaggcgactgtgaggacgtggcctaggccggcctgcgggacctgggttgtcatgatgagctccgagagctgtggacagggcacaggggcaacctggcgccatgaccccaggcccagtctgggccgtgactctgggtgagtcgtgtgactcaggaatgggggtagatccatgtcctccactgtcccccattagttctgtccccttcacaatgagaagtgttttctggcaggccctaggtaaagggtcgggggaggggggagccttgtagggaggcctctacacagaagaaagcagcccccatgtcccagccacttctgggtcccagccagcagcacggatgttactgtcctgctccttcccccagccccacgccctaccagagggggcaaagggcacatcccatcactcactgccctgtctgaaatgtggcagccactgtgggccaggcn

SEQ ID NO: 24485 - DNA, 506 bp, Homo sapiens
  misc_feature (1)...(506): n = A,T,C or G
ggaaggaaggatggccnanttnnnnntactgacgctttatgatcgcctgaggattacgcccgagcttaaatcaatggcaaataagtcaagatgacattttgtgaatgtagactatggatacactcctaatagattgatgtagtcataaaagggggtcaagtagatgtttttctgttatgtaagcaataatttttccgtgtcttattgagtatggctagcgattatttattacatgctagatgggttctttgcatgtgggttccatataggtgcagaaatttcctcagccactggagggatttcgaccatatttgtcatttggatgagctgttattagattgaaatctacacatcatttcattaaaaattgtgccttagaaaacgcanagctgttgcacatggcgataaattatggatgcagtacattgaagagagatgaagtcactttcaagtttccaagacttctcaatggaggtgtttgctgttntacagggaaaaaaaaaaaa

SEQ ID NO: 24486 - DNA, 475 bp, Homo sapiens
  misc_feature (1)...(475): n = A,T,C or G
gggcagtngccaaagaaccgcctgcatagacccgcgctgcaggaattcggcacgagcagactctgccccaggttccaggaatccgaaccccggagtgctgacgcggttccccaacttccgccttaagaaaacaggaccagccggcaccaggcccgtctctcacgtactttaacacatccttgaaagcccctcatttaatgagaaaagcgaacactgcggtccttgccaaagtaaaatgaagctgccccaggacaaggggttaccatgaataaaaaaaaaaaaacaaaaaaaaaaaaaaaaaaaaaaaaaaaaaaaaaaaaaaaaaatttccggggggggggcccgcccccccattcccctttaagggggggctttaaaaattcggggggggggttttaaaaagggggggggggggaaaaaaccgnncnnncnnncctcnnnntctttncctggtgcatccattacgaggcctttt

SEQ ID NO: 24487 - DNA, 440 bp, Homo sapiens
  misc_feature (1)...(440): n = A,T,C or G
tgggggtaaggatggccnnagttgnnnnttactgaacgcttgtactgattcgccatgaggattacatgacacagtgtgccaaagtgacttactgcggttgcgttagtttttaatcatcaggactatctcaccctcccactcctgtttttaaaactcagaattctttcctaagagcccttcgagcaaagcgtgccgaagttagttgtcttctctgtgctggtcctttcttatgtcctcataaaagctcagatgatggtatctgtgagtatgttttgcaaattcaaaatatagtttggtaatttttttttccagttgatttttaaaaagaactgctgtacagagcttgtactttgtccattttatagatggaaaccatccttgaaaattgtttaacttaaataaagagaagatactttctagaaaaaaaaaaaaaaaaaaaa

SEQ ID NO: 24488 - DNA, 464 bp, Homo sapiens
attgccctctgcccggctgcaggaattcggcacgagaaatgcaccatcttaccttaaggatgttttaggagaagctccactacacaaggcagcaaaagttggaagcctggagtgcctaagcctgcttgtagccagtgatgcccaaattgatttatgtaataagaacgggcaaacagctgaagatctcgcttggtcatgtggatttccagactgtgccaagtttcttacaacaattaaatgtatgcagacaataaaagaagtgaacaccctgacaggaatgattgtgttgccgtgctcagacagaaacggagtctcggaagtgtagaaaataccagtgggaaaaggaagtgctgatgtcacgtgggttatgaagaagtctgaagaacgccttcatttcatgcaaatctataagctcctgcttttggctttaccatatgttgtgtctaatctccttctgagaaggg

SEQ ID NO: 24489 - DNA, 459 bp, Homo sapiens
  misc_feature (1)...(459): n = A,T,C or G
natttgccccgcgctgcacgaattcggcacgagagaagccccacgggagccaggatgggactggtcgtgtttgtgcttttctccaagtcagcacccaaaggtcaatgcacagagaccccgggtgggtgagcgctggcttctcaaacggccgaagttgcctcttttaggaatctctttggaattgggagcacgatgactctgagtttgagctattaaagtacttcttacncattgaaaaaaaaaaaaaaaaaaaaaaaaaaaccctggggggggggccgggcccccattcccccttatgggggggggtttaaaaattccggggccgggttttaacaccggggggaggggggagaaaaannnnnntgggnnnnnnnnnnnctnnnnnncgntntnnttgctgctnnttttttgcttctgttttggcctttgcctttggtggggtatctgctttttcccggg

SEQ ID NO: 24490 - DNA, 489 bp, Homo sapiens
  misc_feature (1)...(489): n = A,T,C or G
ggggaaaaagaattgatcccctnnnaaaancttttgatcgcctgcaggatcgaccccccaacaccctctacgaaggcgggtacttcaaggcgcatattaaatttcctattgactacccctattcaccacctaccttcagattcttgaccaaaatgtggcaccccaacatttatgagaatggagatgtatgcatttcgattcttcatccgcctgtagatgacccacagagtggagaactgccttctgaaaggtggaatcctactcagaatgtgaggactatcctattaagtgtaatctcactgcttaatgagcccaacaccttctccccagccaatgtcgatgcttcagttatgttcaggaaatggagagacagtaaaggaaaagacaaagaatatgctgaaattattaggaaacaagtttcagccactaaggccgaagcagaaaaggatggagtgaaggtccccacaaccctggcggaatactgcatcn

SEQ ID NO: 24491 - DNA, 468 bp, Homo sapiens
  misc_feature (1)...(468): n = A,T,C or G
gccccgccccaataganccgcgctgcgatagacagcccttgaactgtctgcatgtgatcacgatgtacaaccgcattaagaaagaccctaagaagttattcgtgccaaggacagttatcattggtggtaaagctgccccaggatatcacatggccaaaatgatcataaagctgatcacttcagtggcagatgtggtgaacaatgaccctatggttggaagcaagttgaaagtcatcttcttggagaactacagagtatctcttgctgaaaaagtcattccagccacagatctgtcagagcagatttccactgcaggcaccgaagcctcggggacaggcaatatgaagttcatgctaaatggggccctaactatcgggaccatggatggggccaatgtggaaatggcagaagaagctggggaagagaacctgttcatctttggcatgaggatagatgatgtggctgctt

SEQ ID NO: 24492 - DNA, 490 bp, Homo sapiens
  misc_feature (1)...(490): n = A,T,C or G
tggggnnnnnagcggtnnaactgacatcgcgcatcggcacagcaggtgcaacttccttcggtcgtcccgaatccgggttcatccgacaccagccgcctccaccatgccgccgaagttcgaccccaacgagatcaaagtcgtatacctgaggtgcaccggaggtgaagtcggtgccacttctgccctggcccccaagatcggccccctgggtctgtctccaaaaaaagttggtgatgacattgccaaggcaacgggtgactggaagggcctgaggattacagtgaaactgaccattcagaacagacaggcccagattgaggtggtgccttctgcctctgccctgatcatcaaagccctcaaggaaccaccaagagacagaaagaaacagaaaaacattaaacacagtgggaatatcacttttgatgagattgtcaacattgctcgacagatgcggcaccgatccttagccagagaactctctggaaccatn

SEQ ID NO: 24493 - DNA, 501 bp, Homo sapiens
  misc_feature (1)...(501): n = A,T,C or G
ngagcgtnnnnnnattgaggactgaggacntgccgagagnggaataaggaagagccccaaatatgcgttattgagctgggaggcaccattggagacatcgaaggaatgccgtttgtggaggcgtttagacaattccagtttaaggcgaaaagagagaatttctgtaatatccatgttagccttgtcccacagctcagtgctaccggagaacaaaaaaccaaacccacccaaaacagcgtccgcgcactgaggggtttaggcctgtctccagatctgattgtctgccgaagttcaacgcccattgagatggccgtgaaggagaagatttctatgttttgtcacgtgaaccctgaacaggtcatatgtatccatgatgtttcttccacataccgagttcctgtgcttttagaggaacaaagcattgtgaaatattttaaggagagattgcacctgcccatcggtgattctgcaagtaatttgctttttaagtggagaaatatg

SEQ ID NO: 24494 - DNA, 493 bp, Homo sapiens
  misc_feature (1)...(493): n = A,T,C or G
tggggncnnnagcgtnnaattgaattgacggctgcggaattcggcacgaggaaacatgaaatgcttccaagcatgacaacttttaaagaaaaatatgatactctcagattttaagggggaaaactgttctctttaaaatatttgtctttaaacagcaactacagaagtggaagtgcttgatatgtaagtacttccacttgtgtatattttaatgaatattgatgttaagaggggaaaacaaaacacaggttttttcaatttatgctgctcatccaaagttgccacagatgatacttccaagtgataattttatttataaactaggtaaaatttgttgttggttccttttagaccacgggtgccccttccacaccccatcttgctctaatgatcaaaacatgcttgaataactgagcttagagtatacctcctatatgtccatttaagttaggagagggggcgatatagagactaacgcacaaaattttgtttn

SEQ ID NO: 24495 - DNA, 459 bp, Homo sapiens
  misc_feature (1)...(459): n = A,T,C or G
agcgganattgaactgactcgcgctgcaggaattcggcacgagtttcataccaggggatgatagtaacgtgtaacttgcaatagattccttcatcttagtaataagatgatcagtctagttaggacaaaatagagattgaataaattaacttttccaagtttacagagtaaaaatgagcagatctctgcctggttttgtgaaaaagagttagcactggtaaatagaatatttctactcctacaccattctttcagtatatcatcactgaagacaggaagataggcacacagattcttcctcgtagtaattcatagtgcactaggtgaaagagatgaagtatgtattaaaagtacaatgtgatggcatttattattcagataatcccaggattctagaagaaaataaagaagagtgacagttcagttagggtgtgaacttccagaggagcactgcttaag

SEQ ID NO: 24496 - DNA, 501 bp, Homo sapiens
  misc_feature (1)...(501): n = A,T,C or G
tggggnnnnnnnagcggggnccttgaactgcatcgcctgtcagcgcttgtgctgcagccatgtctctagtgatccctgaaaagttccagcatattttgcgagtactcaacaccaacatcgatgggcggcggaaaatagcctttgccatcactgccattaagggtgtgggccgaagatatgctcatgtggtgttgaggaaagcagacattgacctcaccaagagggcgggagaactcactgaggatgaggtggaacgtgtgatcaccattatgcagaatccacgccagtacaagatcccagactggttcttgaacagacagaaggatgtaaaggatggaaaatacagccaggtcctagccaatggtctggacaacaagctccgtgaagacctggagcgactgaagaagattcgggcccatagagggctgcgtcacttctggggccttcgtgtccgaggccagcacaccaagaccactggccgccgtggccgcaccgtgngtg

SEQ ID NO: 24497 - DNA, 485 bp, Homo sapiens
  misc_feature (1)...(485): n = A,T,C or G
gtgctgaacacccaattgagcgccttnatagatcgcatgagatactatgccagagtcactcctgcagtctgctagggatgggccttcttatcccactctcgcacacatcccagtctagtctttgccttcacagagtcctccttgacacccctgacttaatgatagatgctgttttggagtagaattgatcatgtttaagtcatcctgctcaggttgggcatagtggctcatgcctgtaatctcagcactttgggaagccaaagtgggaggattgcttgagcccaggagttccaaaccatcctgggcaacagagggagaccctgtctctaccaagaaaaaaaaaaaaaaaaaggttaaaaaaccaattagctggacctgggggggcacactcagtaggctgaggggaagggattcttttaacctgggaaactgaacctgcagggagccatgatcgggccactgcactccagtctgggggacaaagg

SEQ ID NO: 24498 - DNA, 466 bp, Homo sapiens
atttttcccgcctgcaggaattcggcacgaggaaatgcaagcaaaaattgatgaggagagaaaagcacttgaaacaaagctcgacatggaagaagaagaaagaaacaaggctagagctgaattagagaaacgggaaaaagatcttcttaaagcccaacaagagcatcagtctttgctggaaaaattatctgccctggaaaagaaggtaattgttggtggggttgacttgttggccaaagctgaggaacaagagaaacttcttgaagaatctaacatggaactggaagaaaggaggaaaagagcagagcaacttcgcagagaacttgaggaaaaagagcaagaacgcttggatattgaagaaaaatataccagtttgcaagaggaagcacagggaaagaccaagaagttaaagaaagtttggactatgctgatggctgcaaagtcagagatggctgatctccaacaa

SEQ ID NO: 24499 - DNA, 480 bp, Homo sapiens
  misc_feature (1)...(480): n = A,T,C or G
cccccccccgccccgcccatagcncgcctgcatagacccgcgctgcaggaattcggcacgagggtagatggaattcggcgcgaaaagacattgctttctccgggagctctttagtcgtctaggagatgtgcgttttcaactgtgtctaccatcttttaaaagaaggaagagaaaagagcaaagcttgcagaggctgcagagagaagacaaaaagaggctgcatctcggggaattttagatgttcaatctgtgcaagaaaagagaaagaaaaaggaaaaaatagaaaaacaaattgctacatccgggcccccaccagaaggtggacttaggtggacagtttcataaagcataacatgagtagaagaatctactgccaataactgtttattatctgcaatcaagtgggcttcatcaatttaatttcttctctttgagtaaatgaagattcagactttgtaatattattgcccttaagtgcan

SEQ ID NO: 24500 - DNA, 483 bp, Homo sapiens
  misc_feature (1)...(483): n = A,T,C or G
gtgggtaanaagacctgatcgcctcggaatcgcgtttgactaccatcttattgacagntatttttgggcattgtaaaataccttgcttcataccccaaagaataagatatgacaatctgacatcgattgtctgaaagtactaattgcatttaaaattctttaagttaactacaacctcccagactgcaaagcaaatttccaaaccccaggtcatacttttgtatgtatgtaaaagctttagcattttagggaaaaaaatcaatctgtatttcaaaaataaactttgaggtttgaaaataataacaatattcataatggtagtattaacatctattatgtataacttaatctcaacataatttattgaattagaatgaacctggaacactttttgatgaattggtatcctagaggctgtttccttgggccttaactgctggaggattaggtaatcagggattccaagtgttgtgatcttttttn

SEQ ID NO: 24501 - DNA, 476 bp, Homo sapiens
  misc_feature (1)...(476): n = A,T,C or G
nttgacccgcctgcaagggaatcggaaaccggtatctggagcaacgtgcgcttaagattagcctcttgggacggggctccgagtcgcgtgggctggagtcccgcccaagctcgcccttgtttacaactcggaggctgtctcaatgtcaagtactcctggccacaaactgtttccaagagtttggactccgcgtgctcattggtccttgctcagagcagggcttttacagtagccaacaagctgcgttcaaaagtatgggcttctctgccactggacagagagaaaggaataaacaacctaaagacctgcgcccccacccccaccgcccccttttcttcacaagagaccggcacatggcaggaactgtacgttccttttgctgagacttgaggggctgcccagatacatttactttttcctgcggtaataaaaggccatcaattcgttcttctgcggcaacacattctttccgttag

SEQ ID NO: 24502 - DNA, 483 bp, Homo sapiens
  misc_feature (1)...(483): n = A,T,C or G
cggggatggggnagggcnggnaaattgagnnccaactgatcgcgctgcaggaattcggcacgagccaacgagcgtggaaggaagcgtgcagaacggcttacctaaaagccggctgggcaataacgaaggacactcgaggagccgaagagcttatttagcctacagagagagacagtacaacccaccccagcaagacagcagcgatgcttgtagcacacttcccaaaagtagcagaaattttgaaaagccagtttcaaccactagtaaaaaagatgcgttaaggaagccagctgtggttgaacttgaaaatcagcaaaaatcttatggcctcaacttggccattcagaatggaccaattaaaagcaatgggcaggagggacccttgctcggtaccgatagcactggcaatgttaggactggattatggaaacacgaaactactgtgtaacattgctgggcttcctaggcagaaattcatataan

SEQ ID NO: 24503 - DNA, 473 bp, Homo sapiens
  misc_feature (1)...(473): n = A,T,C or G
gggaatgggggggnnggaaactgagtgcattgagtgactctgcacgaggccacgcacaccaggttctcattgggccagccatccaggtctgtgtcctccccgcagatgatgccattgccagcgtagccaggcttgcactcgcagcggtacatggggtcgctatagtggcccaggtagttgcacttggcgttcttgttgcagtcgtgggtcccatccgtgcaggggttacggggcttgcacacctgtttgttggccgtggcatgttcgacaccctggccgaagggctgtgagccggtgaagcgtggggggcagggcaggcagttgtagccggggtccgtgttctcacaccggtgctctacattgtggttgaagcaggcatcaggcacttctttgcactcatcaacatctgtgcactggatgccatttccactgtaaccagggggacaagcaccacatttccagctgccatcagg

SEQ ID NO: 24504 - DNA, 502 bp, Homo sapiens
  misc_feature (1)...(502): n = A,T,C or G
ggggnnnnnnnnagaggggnnccttgactgtcttctgcattcggcacgaggtggcggnggcggtggcagcagccggccaccagccccccaagagaacacaacttctgaggcaggcctgccccagggggaagcacggacccgagactaccgctatgaggaagggctcctgacacacagcgaggaagagctggaacacagccaggacacatgacgcggatgatggggccttgcagtaagcagcctgacaggagcaatggccaccatctggtgaagggcatcgctgccccaagcctcaagccgggcacccaaccctggatgccaccccccagcgggtaccagaggaaagctggtagcaagcgcctgctcccccaacgcatgccagccagtgccatgtcctctgcaggtggagttactggcctactccttccccatgagccctccctgtctgcactgcccaggccagagggtagagcacaggggtttccccatactacctgcgctc

SEQ ID NO: 24505 - DNA, 467 bp, Homo sapiens
atttgccccgcgctgcaggaattcggcacgagatagaagggtggcgagaagaagaagggccgttctgccatcaacgaagtggtaacccgagaatacaccatcaacattcacaagcgcatccatggagtgggcttcaagaagcgtgcacctcgggcactcaaagagattcggaaatttgccatgaaggagatgggaactccagatgtgcgcattgacaccaggctcaacaaagctgtctgggccaaaggaataaggaatgtgccataccgaatccgtgtgcggctgtccagaaaacgtaatgaggatgaagattcaccaaataagctatatactttggttacctatgtacctgttaccactttcaaaaatctacagacagtcaatgtggatgagaactactcgctgatcgtcagatcaaataaaggtataaaatttgccttcaaaaaaaaaaaaaaaaaaacttcggg

SEQ ID NO: 24506 - DNA, 479 bp, Homo sapiens
  misc_feature (1)...(479): n = A,T,C or G
agtggggccttganctcgatcggctgcangaattcggcacgagcatgctcaacagcaacatcaatgaccttttgatggtgacctacctggccaacctcacacagtcacagattgcactcaatgaaaaacttgtaaacctgtgaatggaccccaagcagtacacttgctggtctaggtattaaccccaggactcagaagtgaaggagaaatgggttttttgtggtcttgagtcacactgagatagtcagttgtgtgtgactctaataaacggagcctaccttttgtaaattaaaaaaaaaaaaagaaaaaaaacctcgggggggggcccgggccccaattcgccttatagggaggggtataaaaataaaggggccggggtttaaaaaggtggggatgggggagagnnnatttgnnntggntatcggtgtggcccgtgacgaaagaacctgcacttcgttgaacgtataagagggggggag

SEQ ID NO: 24507 - DNA, 457 bp, Homo sapiens
  misc_feature (1)...(457): n = A,T,C or G
agattgatnncccctnnnnaannnccattgacccngcgctgcaggaattcggcacgaggaactggaggtaacgatgcaccatgctctcttacaggaagtggacgttgtggtagcaccatgccaaggcctccggcccacagtggatgttctgggtgacttggtgaatgatttcttgcctgtgataacctatgcactccacaaagatgaactctctgagagggatgagcaagagcttcaggaaatccgaaagtatttctcctttcctgtattctttttcaaagtgccgaaactgggctcggagataatagactcctcaaccaggagaatggagagcgaaagatcaccgctttatcgccagctaattgacctgggctatctgagcagcagtcactggaactgtggggctcctggccaggatactaaagctcagagcatgttggtggaacagagtgaaaag

SEQ ID NO: 24508 - DNA, 342 bp, Homo sapiens
gggaggcaatgaccccgctgctactatcgcactagcccagacacttccagatgccctggcacctctagggaccaactgggactcattatggaagaatggggtgagaggagacatgaggaaagaccctcttatttgtgattctctgtgttcatgttgctgtttatagtttgtggaaagtgggggaccatcccccttctcaccactgttcctcttgcacgtttcccctcattcatgtggctgtacttaaccttctccaacatacatcctgcattacatgaatggattattcctaataattaataaaaaggtattttttctactaaaaaaaaaaaaaaaaaaaaa

SEQ ID NO: 24509 - DNA, 484 bp, Homo sapiens
  misc_feature (1)...(484): n = A,T,C or G
attggaccgcactgaaaaaattttgaccngcgctgcaggctggacagcctggagcagaaggagactcatgagcaaacgtcgggccagctagtcatgctgaggaaggcacaggagttctttcagacctgtgatgctgaaggcaagggcttcatcgccaggaaggatatgcagaggctgcataaggagctactgctcagcctggaggaactggaggatgtgtttgatgccctggatgctgatggcaatggctatctgaccccacaggagttcactactggatttagtcacttcttcttcagccagaataacccaagtcaggaagatgcaggtgaacaggtggcccagcgccatgaagagaaggtgtatctgtccagaggggatgaggatctgggcgacatgggcgaagatgaggaagcccagttccggatgctgatggacagacttggagcccaaaaggtgttggaagatgaaagtgatgtcaagn

SEQ ID NO: 24510 - DNA, 469 bp, Homo sapiens
  misc_feature (1)...(469): n = A,T,C or G
agggnncattgccattgcccgcctgcggaattcggacgagaacccgagctgcacaccaaggagcagattttggagcttctggtgatggagcagttcctgaccatcctgcccccggagatccaggctcgggtcaggcatcgatgtccaatgagcagcaaggagattgtgaccctcgtggaagattttcacagagcatccaagaaaccaaagcagtgggtggccgtttgtatgcaggggcaaaaggtgctcttggagaaaactggatctcagcttggagaacaggaactgccagactttcaaccgcagactcctaggagagatctcagggagagctctccagcagagccttcccaggcaggagcttatgaccggctgagcccccatcattgggagaaatccccactcctccaagaaccaacccccaaattggctgggacagaacttcttatagaanagacagatcctaata

SEQ ID NO: 24511 - DNA, 476 bp, Homo sapiens
  misc_feature (1)...(476): n = A,T,C or G
agggtnttattgacgtctgtangacttcggcacgagccaagttttgggaagtgatcagcgatgagcacggcatcgacccggccggaggctacgtgggagactcggcgctgcagctggagagaatcaacgtctactacaatgagtcatcgtctcagaaatatgtgcccagggccgccctggtggacttagagccaggcaccatggacagcgtgcggtctgggccttttgggcagcttttccggcctgacaacttcatctttgtcacattcctaagagccacaggagccgggacagtgtcaacttctgctcaccacattgcaacccccgcttgaagacagagcagacaacgaaacatcagaacgaacggacccatgggagtgtagcttgcttcttgagtgactgcagcgagcatctgctcacccatgcactggctgcctagtgcagctaccctgcttcacctttaaaagcgggtctgc

SEQ ID NO: 24512 - DNA, 401 bp, Homo sapiens
  misc_feature (1)...(401): n = A,T,C or G
cggcnccgccgttgcccgtcataaactgagaccatcgcaaaancncanaaagngaagatcgaggtgaaggagagtggcacggtggcctcctcatccacagctgtcatagtctcagcccgcatggcccccgaggagatcgtcatggacagacccttcctgtttgtggtccggcacaaccccacaggaacagtccttttcatgggccaagtgatggaaccctgaccctggggaaagacgccttcatctgggacaaaactggagatgcatcgggaaagaagaaactccgaagaaaagaattttagtgttaatgactctttctgaaggaagagaagacatttgccttttgttaaaagatggtaaaccaaaaaaaaaaaaaaaaaacctcgggggggggcccggac

SEQ ID NO: 24513 - DNA, 513 bp, Homo sapiens
  misc_feature (1)...(513): n = A,T,C or G
gggacccccccccgccccccccnnnttttgccccgcctgaggttngagagaaggactatttaaaactgtcagatcctgaccagcaagcccccccccagccccccttccaagtgactccgtgccttgagtgtgtctgcgtgtttacacccgtccctctgctggccgcccccgtgcgagcggcacccctgccctgccctccacagaattgggttccaagggctgttccagacaactgccaacgtcactgagggccctgccccagcggccctggccccaggctctattaacctaaaatgtagctccctagcgctaacctaggaaccgccgctgcctgctggggggccacgcccctcatgcccttgtcccaggcccggggccttcagcgttgaacacttccttgcttttttcacatgttttatggaattgttcacctggtttgaaataataaaatgtngaaggaaagannnaaaaaaaaaaaaaccctcaggggggggcccggccccaatttgccct

SEQ ID NO: 24514 - DNA, 468 bp, Homo sapiens
  misc_feature (1)...(468): n = A,T,C or G
cctcgaccgcgngtagacncgccgtgcaggaattccgcacgagatgaatgatatgggggaaatactgaactgctcatatttccttttttggcaataaagcactgttatatgtaaatgtaagtgaaaaagaggttcaagactatacaacagcttatgtgtagtatatgttgacatccctaaggtattttgaaacatgaggtgacagacaaggacctcaaatttccagggaaatatttatttcacaacattaggagtgtagctcttcataatgaaatatcttctttctgctaaagattacaatttttcatttagggaactgtgaatattttctgtgaggtttacagaaactagtgtatccttttcactatgttgaaaagacaatctgaactttagctatttatatttcagtattaacacaccttcactgattgagagtcttgagcccttctctacttttataaagtgaat

SEQ ID NO: 24515 - DNA, 471 bp, Homo sapiens
  misc_feature (1)...(471): n = A,T,C or G
nttttgacccgcgctgcaggaattcggcacgagaagactttgattttattttgtgatctgtgtcaaactgcctcattctcagtgcaggtgatccctcctccccagaaacaagaactgacaggtagggtctttgtgaagtcatggcttccacaaggccccagggaaaccccacacagttctgagagttgatgggaatcccagcaaagatggggtggtgggagacagtgacaagaaggggtggtggtcaccagtcaagaggctgggggttggaaaaccctgtctttggccttgctcagctttggggctgccatgttcatgatggagatgggggactgaaatttcccctgacctggaagtaccccttcggccaggcatggctttgattctctgctaagggctcagctgagagaggagcaggaaaatgtcatgggctggcttcttcacaaggcattgctgctgatgctccggagt

SEQ ID NO: 24516 - DNA, 486 bp, Homo sapiens
  misc_feature (1)...(486): n = A,T,C or G
agcggtnnttatgattgcgtgtgcgattcggcacgaggtgagcattacgatgttgcccgtggggtgcaaaagatcctgcaggactacaaatccctccaggatatcattgccatcctgggtatggatgaactttctgaggaagacaagttgaccgtgtcccgtgcacggaaaatacagcgtttcttgtctcagccattccaggttgctgaggtcttcacaggtcatatggggaagctggtacccctgaaggagaccatcaaaggattccagcagattttggcaggtgaatatgaccatctcccagaacaggccttctatatggtgggacccattgaagaagctgtggcaaaagctgataagctggctgaagagcattcatcgtgaggggtctttgtcctctgtactgtctctctccttgcccctaacccaaaaagcttcatttttctgtgtaggctgcacaagagccttgattgaagatatattctt

SEQ ID NO: 24517 - DNA, 474 bp, Homo sapiens
  misc_feature (1)...(474): n = A,T,C or G
ggggtggnnnttttcccgtgctgcaggacttcggcacgagcctccctggaccagccaacacagacagtggtgatgcaccgcactgagcccactgcccagcagaacctggctctgcagctggccgagaagctgggcagcctggtggagaacaacgaacgggtgtttgaccacaagcagggcacctacgggggctacttccgagaccagaaggacggctaccgcaaaaacgagggctacatgcgccgcggtggctaccgccagcagcagtctcagacggcctactgagctctccactctgtttcccgcctgggccatccaaccttgaagtcctaaaccacacctcagtcactaaaggtctggttaaagttaaaaaaaaaaaaaaaaaacttaagggggggcccggaccccaatcgccctatagggagcgtattacatcactggccgcggtttacaccggcggactgaaaaaaaann

SEQ ID NO: 24518 - DNA, 497 bp, Homo sapiens
  misc_feature (1)...(497): n = A,T,C or G
tggggnnnnnnagaggggnnattgaattgcatccgattcgcacgagacctcccccaggagaccgttgcagtcggccagcccccttctccacggtaaccatgtgcgaccgaaaggccgtgatcaaaaatgcggacatgtcggaagagatgcaacaggactcggtggagtgcgctactcatgcgctggagaaatacaacatagagaaggacattgcggctcatatcaagaaggaatttgacaagaagtacaatcccacctggcattgcatcgtggggaggaacttcggtagttatgtgacacatgaaaccaaacacttcatctacttctacctgggccaagtggccattcttctgttcaaatctggttaaaagcatggactgtgccacacacccagtgatccatccaaaaacaaggactgcagcctaaattccaaataccagagactgaaattttcagccttgctaagggaacatctcgatgtttgaacctttgttgtg

SEQ ID NO: 24519 - DNA, 483 bp, Homo sapiens
  misc_feature (1)...(483): n = A,T,C or G
gcggtnaaattggatcatcgcatgtagctcgatcacagaagctgccatcaagtatttcctcacgcaagcaaccgcatccataatccttctaatagctatcctcttcaacaatatactctccggacaatgaaccataaccaataccaccaatcaatactcatcattaataatcataatggctatagcaataaaactaggaatagccccctttcacttctgagtcccagaggttacccaaggcacccctctgacatccggcctgcttcttctcacatgacaaaaactagcccccatctcaatctcgtgccgaattcggcacgaggagtggaatgattaatgatgttttgcagcagttttctacgtctgaaattttttatgtctctggaacccagaatttgctaagagatggaggaacctcagaaaagctatgtgaacacaatggaccttgagagagatgaacctctcaaaagcaccggccctcag

SEQ ID NO: 24520 - DNA, 459 bp, Homo sapiens
  misc_feature (1)...(459): n = A,T,C or G
agctgcaacatgaattgcgtcgcgctgcagcaatncggcacgagaaaattactccacaaaagctcccaagtcttaaaggactggtaaatttacagtctggagcccccaaaccagaagagaatccgagcctcaacatacagtttaagatccagcagcttgctatttcaggcttaaaagtaaaccgtttggacatgtatggggagaaatataagccatttaaaggagtcaaatacgtcacgaaagctggaaagttccaagtgaggacatgagaagaggccaaaattcctcaggaccagtttgttttccaagtgtcattacgatgtatcactattaggtaccaagtgagtgggaatacatattctagttaaagcatttgtgtctagctacacaccgctaacaaagttacttagttatcaatgtaggattcttaaggagctttaagctaaggaaaccttttag

SEQ ID NO: 24521 - DNA, 467 bp, Homo sapiens
  misc_feature (1)...(467): n = A,T,C or G
tggggnnnnncccggttannnnaaaactagcagctacggaagaatcggcacgagccagctgcaagtccgacctgggcgagctggaccacgtggtggagatcctggtggagacctgagcaggagccctgagtgctcacagccgcctctgacgcattgacacgtgagcactggctcccacggagggtgcgcctgccgccagcggcccagccttgctgccctgtctgctgattctgagaaatcccagaacagcccattaccagtggggctgcagccctaggcccgtcccactcacctcccccctgtggagcgccaggcagaggctgttctggaaggcttcttgtcttctgacgtccccacagccctgggcccctcgtgtctctttgtgtcccccactgtagaggacggtgagccgcagctgcatcaacctccttttacctttagataggtgaatttttacaattcagttt

SEQ ID NO: 24522 - DNA, 508 bp, Homo sapiens
  misc_feature (1)...(508): n = A,T,C or G
aggggtgccccnaataggancgccnatttgcaccgcgctgcaggaattcggcacgagggccacccacgaccaggccgtgcaggcgctgaagcgcgcgggcaaggaggtgctgctggaggtcaagttcatccgagaagtaacaccatatatcaagaagccatcattagtatcagatctgccgtgggaaggtgcagccccccagtcaccaagctttagtggcagtgaggactctggttcgccaaaacaccagaacagcaccaaggacaggaagatcatccctctcaaaatgtgctttgctgctagaaacctaagcatgccggatctggaaaacagattgatagagctacattctcctgatagcaggaacacgttgatcctacgctgcaaagatacagccacagcacactcctggttcgtagctatccacaccaacataatggctctcctcccacaggtgttggctgaactcaacgccatgcttggggcaaccagtacagcaggaggcagt

SEQ ID NO: 24523 - DNA, 475 bp, Homo sapiens
  misc_feature (1)...(475): n = A,T,C or G
gagttcccnnnagagnnnnaatgaccgcctgctgattccgtcgagattttcgaagccttggctacaggctgcaccagcaccacagcctatataagcatccacaacatgtgtgcctggatgattgatagcttcggaaatgaggaacagaggcacaaattttgcccaccgctctgtaccatggagaagtttgcttcctactgcctcactgaaccaggaagtgggagtgatgctgcctctcttctgacctccgctaagaaacagggagatcattacatcctcaatggctccaaggccttcatcagtggtgctggtgagtcagacatctatgtggtcatgtgccgaacaggaggaccaggccccaagggcatctcatgcatagttgttgagaaggggacccctggcctcagctttggcaagaaggagaaaaaggtggggtggaactcccagccaacacgagctgtgatcttcgaagact

SEQ ID NO: 24524 - DNA, 457 bp, Homo sapiens
cttcgcccacccttagacccgggctgcaggtttctgtttcccagtccagcagtgtcgtgggataggttttgctttcttttactgtctccatcctacttacacctccctgatcctggggtctggggactccccatggtttccttccttctgcaggcccaaaatgatggcccctcttaacccaaggcaggggatcttcctcccaactccctggaccaaggtggcatttcctgcacacccctccaggccaagatgatgctcgctctcaactctgtaggccaaggtggcgtctcctcttgactctccagacctaaagtgacacccttcaggcacttcgggcccaattcagcccagtcctggtgctttcagcgccagatgacagcactttgcagataagaacgatatgatgtgtggatttcactacatttggctcctggatgctataaaaggacttggattt

SEQ ID NO: 24525 - DNA, 490 bp, Homo sapiens
  misc_feature (1)...(490): n = A,T,C or G
aaagaaaaacaanaagaaattttgatgcctagaanttcgaagacatgcgggngaagataactctactgcacaggacacagaagaattagaaaaagagattagagattaccttccagtgaatacctctaaaacccgtccaaaacaggaaaaagctttttccttgaagaccataagcactagtgatccagccgaagtactcgtcaaaaatagccagcctatcaagactcttccacctgctacttctaccgagccatctgtaatcttatcaaaaagtgattctgacaagagctcttcccaagtgccgccaatactacaagagacagataaatccaagtcaaataccaagcaaaatagtgtgcctccttcacagaccaagtctgaaactagctgggaatctcccaaacaaataaaaaagaagaaaaaagccagacgagaaacgtgaaattttttttcctgaattggacatgtgtttgcaaacacttgtcttgan

SEQ ID NO: 24526 - DNA, 478 bp, Homo sapiens
  misc_feature (1)...(478): n = A,T,C or G
atgggggaattganctcgatcggcttcaggaattcggcacgagtattcccctggtagcctacttccttacccccgaatattggtaagatcgatcaatggcttcaggacatgggttctcttctcctgtgatcattcaagtgctcactgcatgaagactggcttgtctcagtgtttcaacctcaccagggctgtctcttggtccacacctcgctccctgttagtgccgtatgacagcccccatcaaatgaccttggccaagtcacggcttctctgtggtcaacgttggccggctgattggtggaaagtagggtggaccaaaggaggccacgtgagcagtcaacaccagttctgcaccagcaacgcctccgtcctagtgggaggtactgtttctcctggccctgggtgggctagggcctgattcccgaagacgcctttgcaaggaggggaggactagtgggatctaccaatcgattctggc

SEQ ID NO: 24527 - DNA, 487 bp, Homo sapiens
  misc_feature (1)...(487): n = A,T,C or G
ggaggncccnnnnaggaggggnccttgatncccctttatgatccgcctgcaggaattcggcacgagcagtgggcgtcttgggccccggctctattctgggctgcgggcctgggaagggctcgccgggtgccaaatgagctgtcctaactctgcggggctgcagcttcctgcatgatgctggggagcttggcgcctgacccaggatctagaaggcactctgggcaggccgcgctccgcccacgaaggtttaaccaccaaggactctgagagctggcaggtctgagtaaccctggtaacaattctcttcaccttatcaaaacctgagctaaaaccaatgcatcagctgatgatgacagcagagagtggcagggctgaggacccaaagtcatttcccaggctggcggagaataaactgccagggagaagaatgagaagacaggagacaaactgtttggaaagctaaatcttccctcttaatgaataaagg

SEQ ID NO: 24528 - DNA, 483 bp, Homo sapiens
  misc_feature (1)...(483): n = A,T,C or G
aggagtnccnnnnnagagnnnnnaactgaccgcgctgtggaattccgtacgagccggaaagtgataacagaattcattgaagtggagaatttttactgaaggtagcataaagagaaagaaaatgccgaaaccaatcaacgtaagagtaactacaatggatgctgagctggaatttgccattcagcccaatacaactggcagacaactttttgaccacgtggtgaaaacagatggtttgcgcgaggtctggttttttgggctgcaggatgtagacagcataggttattctacatggcttaaactaaataataaggtaacacagcaggatgttataaaagagaatcctttacaggtcaagtttagagataaattctttcctgaagatgttgctgaggaattaattcaagaaataaccaagagactattcttcttgcaagttaaagaagccatcttacatgatgagatatattgcccgccagaaac

SEQ ID NO: 24529 - DNA, 489 bp, Homo sapiens
  misc_feature (1)...(489): n = A,T,C or G
agcggtnnnaattgtattcatgagcaattcggcacgagcagagcccagcgcgcctcgtcgccatgcctcggaaaattgaggaaatcaaggacttcctgctcacagcccgacgaaaggatgccaaatctgtcaagatcaagaaaaataaggacaacgtgaagtttaaagttcgatgcagcagatacctttacaccctggtcatcactgacaaagagaaggcagagaaactgaagcagtccctgccccccggtttggcagtgaaggaactgaaatgaaccagacacactgattggaactgtattatattaaaatactaaaagtccccanaaaaaaaaaaaaaaaaaaagaaaaaaaaaaaatccctggggggggaaaatttttttttttttgttttgaccccccacttaaaaaacccctaaaaattgtttaacctgcaaaaatattttttttttcccaaaaaacctgggggtttttttttgcccaaagggt

SEQ ID NO: 24530 - DNA, 459 bp, Homo sapiens
  misc_feature (1)...(459): n = A,T,C or G
cttcgaccccccngtatcccccgcgctgcaggaattcggcacgaggaaccactggcctgggcacctgtcctcctgctgtgccgtcaccctggcaagggccgtgagggcgattgctttgtggtgattctcagtggctcatctaatattttggctggaataaatcagagacttccataatcaagtaaattttaattttcatcattccatggagattcagtctgtctggaatcccggaacccctccacagaatcgtgtctggatccacactgtggtgtggctgccacggcctcctggctccagaggcagctgggccgggccaaggcaggaaggcgcccccatgtgtgtggcctcagtctcagcatctgactgtgctgccctgtccccagggaagagaatgaggaccacgtggactccgcccacacagagctggctgctgtgcccaccctcangggcgtcagg

SEQ ID NO: 24531 - DNA, 477 bp, Homo sapiens
  misc_feature (1)...(477): n = A,T,C or G
cgagaggggnnnnaccttgatctctctgcaggaattcggcacgagctggcttcccctcggctgtgtagggacaaagccgaagcccagtgccatgactgcccgcggattgaaaaacagaaacacaaaactttgacttgacttgcgaagtgaagcagggttttcatttttactctccttggtttaggtctagaaagaagaatactgacctgagaggaggcccagtgagattctgaaacctaattcttcgaaggcgtactggcccttagttcagttattttagttgtataagttgatattttttttctggaatgtagccatttgctgttatctgggaaacaagattctaacaggaaaccagcctaagacacttcaggttgagcgctgcctcggagtctgtgcccgtcgcgtcccctgcttgagttttgcacttggaagaaccctgcaccggctggcgtgtgcgacggcccagtcccatcc

SEQ ID NO: 24532 - DNA, 455 bp, Homo sapiens
cctttgcccggctgtaggaattcggcacgaggcgacatggccaaacgtaccaagaaagtcgggatcgtcggtaaatacgggacccgctatggggcctccctccggaaaatggtgaagaaaattgaaatcagccagcacgccaagtacacttgctctttctgtggcaaaaccaagatgaagagacgagctgtggggatctggcactgtggttcctgcatgaagacagtggctggcggtgcctggacgtacaataccacttccgctgtcacggtaaagtccgccatcagaagactgaaggagttgaaagaccagtagacgctcctctactctttgagacatcactggcctataataaatgggttaatttatgtaacaaaaaaaaaaaaaaaaaaaaaaaacccgccccggggcccaaaggttttgggggaaacaaaatgggaagccccccccttgcc

SEQ ID NO: 24533 - DNA, 444 bp, Homo sapiens
gatcgaccgcgctgcggaattcgtcgcgagtcatgatgggcggcaagattaaatcatggaagaagcgctggtttgtcttcgaccggctcaagcgcaccctttcctattatgtggacaagcatgagacgaagctgaagggagtcatctatttccaggccattgaggaagtgtactacgaccacctgcgcagtgcagccaagagcccgaacccagccctcaccttctgcgtaaagacccatgaccggctgtactacatggtggccccatctgcagaggccatgcgtatctggatggatgtcattgtcacaggggctgagggctacactcagttcatgaactaactgccgtgggcctcctggcagagcacaactggggcttttgtataagaagactttaatattctgtaaaaaaaaaaaaaaaaaactcgagggggggcccggtacc

SEQ ID NO: 24534 - DNA, 255 bp, Homo sapiens
caggctctggcccacagcaggggctgttgccgaaaggctgtggagcaacaagttgacatctgacctgacatttgcctatgaacgtttgtcacacttccgctgtgagttgctgaggcgaggcgtccatgcccaacccctcaatgtaggcttctgtagcaggagtttgatcagacctgagccccatgcaccgaggagggtgctgtgtgtaagtgaatggtagtggagccaggcttacactgcattctggccagggga

SEQ ID NO: 24535 - DNA, 501 bp, Homo sapiens
  misc_feature (1)...(501): n = A,T,C or G
aggggcgagcagggccnnnnnnnttttgannaatcgcaccccctgtacgaattcggcacgaggggaggncgcccggcggntgtcctcgctgtctgcgcctccatgtcatcggcccttcgtggccaacacagaggtgatctcagtttactttaaccagggatgtttgtaccatattgcacctcggaataaagaaaaatggaatttcaatcccgaaatcacttcaaccccaaaaacggccacgtctccaagaagaaccagtaaactagtcttgctgccccaaggaggctggagcctggaggtcttgctgaaatccctaaccttgtttttactctaactcgttactttgaattttatcctgcttgtctctttaatcacctagccttgcttctcatgtaaataagactctctctagctgggaaagccggacaaactccagttgaccccttaatttacaagacactaagggctccttacccaacccccttccgcaaggagttgacc

SEQ ID NO: 24536 - DNA, 347 bp, Homo sapiens
  misc_feature (1)...(347): n = A,T,C or G
ggaggtccnnnnagatntnnnttatgaccccctgtggaattccgcacgaggtaaaaggcagcctggcctttgctactgaggagaaagatggagcctgggtctcaagcccaccttcgctgtacctttgccacatggtactgtatgcttgccagctagaaggagggtcagggattttttacagtctgagaatgagtgtgtgtgagtgaggcggtatccacattctcaacttcaagtcattgcagtttctttttcccagaaaacaaggggttagatgttgcatttcataaaactaaccgaagttctgtctactgatgcagcacaagagatgtaaaaaaaaaaaaaaaaaa

SEQ ID NO: 24537 - DNA, 494 bp, Homo sapiens
  misc_feature (1)...(494): n = A,T,C or G
cattcgccccggctgcaggaattcggcacgagcccggcagtctgaagaccaccctcatcgccggcgtcggcggngcttggagtgtgatggcaaggtcaacatctgctgtaagaaacagttctttgtcagtttcaaggacatcggctggaatgactggatcattgctccctctggctatcatgccaactactgcgagggtgagtgcccgagccatatagcaggcacgtccgggtcctcactgtccttccactcaacagtcatcaaccactaccgcatgcggggccatagcccctttgccaacctcaaatcgtgctgtgtgcccaccaagctgagacccatgtccatgttgtactatgatgatggtcaaaacatcatcaaaaaggacattcagaacatgatcgtggaggagtgtggtgctcatagagntgccagcccagggggaaagggagcaagagttgtccagagaagacagtggcaaatgaagaatttttaag

SEQ ID NO: 24538 - DNA, 477 bp, Homo sapiens
  misc_feature (1)...(477): n = A,T,C or G
gctggtnnnnnaattganatcgatccgcgctgcacgaattcggcacgaggtgaggcagtgcccacaaggcttatgttgtatgcctttgataaggccatcttggctttgagtagcagtgttcctcgtcacccatttccccctcaggattacaacacctgctatcaaatcatctaagctgaaaacatgagatgcgcttggaaaggcctagtcagaagccatttcctcttatcatttccctctcctatgcaccagtaaggcccgtccagagccccagcagggagtgggccctgagtccacactgtccctgagtgatccaggaggctgcccacatccccacatgtgcactgtggttccagtgtagctgctgtgagcccactgccactgcctcagaagggagccactgtgaacctctcgagtggctccaaagagcagtggctttttgagaatggcccatacttctggcccggctggatgaag

SEQ ID NO: 24539 - DNA, 487 bp, Homo sapiens
  misc_feature (1)...(487): n = A,T,C or G
aatagaaaaagccctgnaggaantttgaccccgcgctgcaggaattcggcacgagcttggaggggctccaaactgagaggggagggaagaccgcagggaaaggcggacctcagtgtctgaaaagccagcttagagtgggagggcctgggagtagaagctgctggttgcgcagccacctcgggatactgcacacggagaggagggaaaataagcgaggcaccgccgcaccacgcgggagacctacggagacccacagcgcccgagccctggaagagcactactggatgtcagcggagaaatggctttgagctcagcctggcgctcggttctgcctctgtggctcctctggagcgctgcctgctcccgcgccgcgtccggggacgacaacgcttttccttttgacattgaagggagctcagcggttggcaggcaagacccgcctgagacgagcgaaccccgcgtggctctgggacgcctgccgcctgcg

SEQ ID NO: 24540 - DNA, 496 bp, Homo sapiens
  misc_feature (1)...(496): n = A,T,C or G
gcgcccccnntttgaccgcatggagatcatgcacgagtggcagcgagtggacagtgtgctttctggaagtccaagttcccagcagagaggaacctggggactgttttggggtttccaatctctgctgtgctcacagcctaggggtgactaaagctggccaccttgccctttcctgagaacacactgggtctggtatacatgtgcccagaaggggccctgagagccccttctaccccctcatactgtcccctcacctagccttcttgtacagatggatgtcattaaaagttaaactgttggccgggtgtggtggctcacgcctgtaatcccagcactttgggaggctgaggcaggcagatcacgaggtcaggagatcgagaccatcctggccaacatggtgaaaccccatctctactaaaactacaaaaattagctgggcgtggtggcgcgtgcctgtaatcccagctactcangaggctgaggtaggaaaatcgct

SEQ ID NO: 24541 - DNA, 477 bp, Homo sapiens
  misc_feature (1)...(477): n = A,T,C or G
nttagancgtctgaggtgctggactccaaacctcaccctaccctacactttgggagcacaaatttggtgttgaaacaagcttaaatttcattttagggcatactgggcttactctcctcccagctgtctgtggattgatttgattttaatgttcgagttttacagcaacagctgaaaaccatgaactattctaggaactgtgttggaactctttaaaataaagaaaagaggaggaggaggaggaagaaagaaaaccaacttaagaagccttgactttggaggacagaaagccaccagccaatggagaacaaagagatgtttccctttcctttctttcaccttgtcattctgggtttccttctgcttcactctttccttcccccttaaaagaggtattcctggttggtctgtctgtctgtccttgtccttgtggtgatcctggcatggtgatatgctccactttgcattatccatggt

SEQ ID NO: 24542 - DNA, 521 bp, Homo sapiens
  misc_feature (1)...(521): n = A,T,C or G
cccccccccccccgcccccccccccaattgcnncgcctgaggcatgcctcacgaggtggagacggggtttctccatgtcggtcaggctggtctcgaactcccgacctcaggtgatctgcccacctcggcctcccaaagtgctgggattacaggcatgagccaccgcgcttggccagactgcgtcctttttaagcgaacattttagggcctgggagtttgtcaagtaaggaagtctcaagcccaaagagcagcgtcctgaccatggtggtttcattacgagcccttctgctggctctcaggcagaagccccacagcaccgggaccattcatgaggtcactgcccagctcatgatgtccgtgaggctgtccttttggccagtagccgtgtgcagctgtgtggcacagatggcttcgttcatcctgatcaaggccccacctcagccacagcagtccccccaacctgtgttggccaccctattattcatggtacctgcaggccctgctagatagcaccnccgagc

SEQ ID NO: 24543 - DNA, 484 bp, Homo sapiens
  misc_feature (1)...(484): n = A,T,C or G
gcggtnnnattgcattcatcgcctgcggaattcggcacgagaataatttgtcagaggataaactcccaacctagacctttcacttaaaatagtgtgaatttgtatatgtttttaaaagaaccagtactggccgggtatgctggcttttacctgaaatcccagcactttgggaggccgaggcgagtggatcgcctgagatcgggagtttgagaccagcctggccaacatggtaaaatcctgtctctactaaaaatataaaaattagccaggtgtagtggcgcgcgtctgtaatcccagctactcgggaggctgaggcaggagaattgcttgaatccgggaggtggaggttgcagtgagcctaggtcgtgccactgccctccagcctgggtgacagagcgactgcgtctccaaaaaaaaaaagggtaaatttaaatttaaaaaaattattattacccggtattttgtttactaaaataaaaggcct

SEQ ID NO: 24544 - DNA, 521 bp, Homo sapiens
  misc_feature (1)...(521): n = A,T,C or G
ccccccccccccccccccccccatcgcnccgccatatgcacggctgcaggattcggcacgagattaatttaatagatcaataaattaatcaagaatatgatttttttctcatctttctctgtagtcatattttatacagactttttgtttaagtaatctctctttatgggcagacaatgatttcagaaacaccacaaattattctcaaagagaaaagatgaggattttttttttttaaaaaatgtaactcttttcagtagctcttggcagacctaccctcacattttcttgactaaaaacagtcattaaaaaaagtcagtcacaaacaggggaatttaaattatcatggtttacctatgcttaacaagctttatcctcagaggtaaggataggggtactttcctgaattttagatatgtggaaatatttggagttatgtcaataaatgaaaaagtgtgatggatatagtgcttgccatggaatataccaaatacagatattctgaaacacttaagttcagt

SEQ ID NO: 24545 - DNA, 474 bp, Homo sapiens
  misc_feature (1)...(474): n = A,T,C or G
tggggccancnncntttgacatcgtgccgcgctgcaggaattcggcacgaggagaaatctgttagttaccattgagaatgatactcctctagaggaactctcaaaatatgtagacatcagtattattgcccttactcgaaatcggaggacaaggagatggtacacttgtccactgtgtgggaaacagtttaatgaaagttcttacctcatttcccaccagaggacccacactggagaaaaaccctatgactgtaatcactgtgggaaaagcttcaatcataaaacaaacctcaataaacatgagcgaattcatacaggagagaaaccttattcctgttctcagtgtggaaaaaacttccgtcagaattctcatcggagtcgtcatgaaggaatccatataagggagaagatatttaagtgtccagaatgtgggaaaaccttcccaaagaatgaggagtttgtgcttcatctgca

SEQ ID NO: 24546 - DNA, 508 bp, Homo sapiens
  misc_feature (1)...(508): n = A,T,C or G
gggaaatggaagggaaaanaaaacttgancgccnttttggacccgcctgcaggattcggcacgaggagctgctaagccgtactggcatcagtcaatgttctggagtgatttgggccccgatgttggctatgaagctattggtcttgtggacagtagtttgcccacagttggtgtttttgcaaaagcaactgcacaagacaaccccaaatctgccacagagcagtcaggaactggtatccgatcagagagtgagacagagtccgaggcctcagaaattactattcctcccagcaccccggcagttccacaggctcccgtccagggggaggactacggcaaaggtgtcatcttctacctcagggacaaagtggtcgtggggattgtgctatggaacatctttaaccgaatgccaatagcaaggaagatcattaaggacggtgagcagcatgaagatctcaatgaagtagccaaactattcaacattcatgaagactgaagccccacagtg

SEQ ID NO: 24547 - DNA, 447 bp, Homo sapiens
  misc_feature (1)...(447): n = A,T,C or G
nattgacctcgctgcacgaattcggcaccagcctgtttgaccaccagatggtcctctgcaagaaggacctaatccggagagacatcctgtactacaaaggccgcattgacatggataaatatgaggtagttgacattgaggatggcagagatgatgacttcaatgtcagcatgaagaatgcctttaagcttcacaacaaggagactgaggagatacatctgttctttgccaagaagctggaggaaaaaatacgctggctcagggctttcagagaagagaggaaaatggtacaggaagatgaaaaaattggctttgaaatttctgaaaaccagaaaggcaggctgcaatgactgtgagaaaagtccctaagcaaaaaggtgtcaactctgcccgctcagttcctccttcctacccaccaccgcaggacccgttaaaccacggccagta

SEQ ID NO: 24548 - DNA, 522 bp, Homo sapiens
  misc_feature (1)...(522): n = A,T,C or G
ccccccccccccgccccccccccatcgcnncgccatgtggcccgcgctgcaggaattcggcacgagaatgtttggcatccttgttgggcaaatgtttcatttaaatgtgtcttatctagctagtatactctgaaaatttgagtatttaatattaggcatatgaagtggttgttgggaaaggagattccttcagaatatttagaatagcgtttaaggctctcaaggcttaggtatttaccatgagatggttgtggtcagttgcacctgataccatgtatccctgaatcatgtgtatttttattagtaatgcagccactaccattgctgatggggtctgtgtcctagtccctgtgggattggccttctgaagaaaagcacatttatggtacacaaggttgattctcagtttggtaggctctatagttccatcccagctgtctaattctgaagtgctccagtcttattggtgcccaatggggtaatctgtgcctcttccccaaaagcaatgacaggcaccagtgg

SEQ ID NO: 24549 - DNA, 461 bp, Homo sapiens
  misc_feature (1)...(461): n = A,T,C or G
cttcgcccccccctttagaccccgcgctgcaggaattcggcacgagccaccaccaggtcggttcccgaggcctggcctttccctctcctgctgagaaccagaacccaccaggagcaccacagagtcctcctcttggaaggcagaactccctgaaatctggaatcagggtggaaacagcctgtatttcccatttaaacaggagtcctcttcaacttcagctgattacaataacaaaaggcggaattgaattgtgcgatgccaacggccttctcatttacaggtttttttcccccacattggcctttatttactacttccttggaaccatctctgaattctgaatagctgacaacccccaatgttatccactctgttgcttttgtctggaaaactctacagtgtttgtgggatgtccccaaaggaaagctatgttctaattttatcatttccatctgtctggn

SEQ ID NO: 24550 - DNA, 493 bp, Homo sapiens
  misc_feature (1)...(493): n = A,T,C or G
ggggcannnnaattgccgcctgagaatcgacgagcttgggcccctgggagggagaagaccaaggtcatgcttttgaacctggatgccagaagagaacagctgtggggaaaagcatgcctggaaccaagaaaaacatgtttaccaggggccattcctcacaccagctgcaggcagggtcaggaaagccacaggctgcactgtagttgcaaccttgcatgcggacgcaaggctcagaatgttcctcaaagatcctaaaatgttcccagagtcaggctgagtccattcaaatgttcactcaccctggccacactcactacacctgacttccctgtatcatgagttagagaaatagtatagagtctggttgatgctggcaggtgggagggaatgggataggaaggagagagagagagagcaagaaagaaggctggttgggtttttgtctataacatatgtatatacactcatcaagtccattatttagaacctcttg

SEQ ID NO: 24551 - DNA, 502 bp, Homo sapiens
  misc_feature (1)...(502): n = A,T,C or G
gggggggcccccaattgcccgccatttgcccgcgctgcggatgagtccttcattgatgtctatgccatccggagtgctgaaggagccccccagaaggaggtctacttcatgggcctcattgatatccttacacagtatgatgccaagaagaaagcagctcatgcagccaaaactgtcaagcatggggctggggcagagatctctactgtccatccggagcagtatgctaagcgattcctggattttattaccaacatctttgcctaagagactgcctggttctctctgatgttcaaggtggtggggttctgagacacttgggggaattgtggggatattctagccaccagttctcttcttcctttgctaaattcaggctgcaggctccttccatccagataactccatcctgtcgagtaggctctttctgaccctcagaaatacattgtcctttttcctctttgcccatttttcttccctctcttcctccccatgagaagtn

SEQ ID NO: 24552 - DNA, 464 bp, Homo sapiens
  misc_feature (1)...(464): n = A,T,C or G
agaaaaaacttgacccgcgctgcaggaanatcgactngcgctgcagagaattcggcacgagcagtctttctacttttatatggacaaatcacctgtactctttgagactaccagagattcctatttcagtgtcaatggggtgtgtgtgagtgtgtgtgtgctcattcatcttcatgctttcttccatggtgttaattcacgctctcctaataaaggtatccaaagagtactgagaagtgaccataggtatttggcatgagtaaatgtaattccttttgccaaaaaaactctcaaaagttacaactggagttcttcgcgataaaagggtggggaaatcagccatggctttagccttgttcccaagtacacattttcttatacacaaggatgaaactctgtagggctcaccctgagggctcatgtgtggcattgagagggtagcagtgaccagaacaccacaaggt

SEQ ID NO: 24553 - DNA, 474 bp, Homo sapiens
  misc_feature (1)...(474): n = A,T,C or G
ntggccaccccctcngattgccccgcctgcaggaattcggcactatagatgtaatttatagatagatcagttgctatattttctggtgtagggtctttcttatttagtgagatctagggataccacagaaatggttcagtctatcacagctcccatggagttagtctggtcaccagatatggatgagagattctattcagtggatcagaatcaaactggtacattgatccacttgagccgttaagtgctgccaattgtacaatatgcccaggcttgcagaataaagccaactttttattgtgaataataataaggacatatttttcttcagattatgttttatttctttgcattgagtgaggaacataaaatggcttggtaaaagtaataaaatcagtacaatcactaactttcctttgtacatattattttgcagtatagatgaatattactaatcagtttgattattctcag

SEQ ID NO: 24554 - DNA, 469 bp, Homo sapiens
  misc_feature (1)...(469): n = A,T,C or G
ntttgcccgcctgcagatttcgcacgagagaccttgggcagtacctacagtcttgctgtttctgtttcatctgcaagaattatgacccacacactccagctgcagcccagggcactgtgatattttatacgtgtgtagatgtttttgtccacagttcctggttcatcactcccataaccctttgttataatgttgggacactgcaggcctcagaaaacggaatctctgtctgtgaccttctgctgccccatttcacttgttcaacaccagactttaatctgactgtagctcataagaccctcattccagagagggtgctgccccatacccggaaggaggaacgctgcacagagaggccaagaagcatctggacagacaggccttgctgggtttagaccttatgctttttgtccagtttcatctcaacacagctgccatgcttcagccatgcctatccaatgacgtctcg

SEQ ID NO: 24555 - DNA, 477 bp, Homo sapiens
  misc_feature (1)...(477): n = A,T,C or G
tgtgggggnnnnaattganatcgatgcgcgctgcacgaattcggcacgagggaaattcaccattccacttaccttacttctggaaaccatcatacttgggaagcagtattcactcaacatcatcctcagtgtctttgccattattctcggggctttcatagcagctgggtctgaccttgcttttaacttagaaggctatatttttgtattcctgaatgatatcttcacagcagcaaatggagtttataccaaacagaaaatggacccaaaggagctagggaaatacggagtacttttctacaatgcctgcttcatgattatcccaactcttattattagtgtctccactggagacctgcaacaggctactgaattcaaccaatggaagaatgttgtgtttatcctacagtttcttctttcctgttttttggggcttctgctgatgtactccacggttctgtgcagctattacaatta

SEQ ID NO: 24556 - DNA, 484 bp, Homo sapiens
  misc_feature (1)...(484): n = A,T,C or G
catcgancgccccnattcgaccggctgcaggaattcggcacgagactgtcttggtcttcttatacattgattcccaaatcacgtgtggtaacagcatctcaatttttcatgatgacggtttgaaccattaatttaattcctcaggctatctacttttttgttaaacatactgtgtagaccatcttttttttttcccatcatgatagtcaaaattttagtctgtgtattcaagggagaaaatttttagtcagcattatacaagtagtatttattatgtatacattcaggggagttgtttctacaaaagtatttcggaatgactattctgctgcaaacttttgtgtaagcgcttcaccttattcctacaataaggagaagtgcactaacaaaatgaacaatgcagcaggggcttcagtcgcagctcaggtcttatcaaacaccagagaaccctcaatgggagaagccttatgagtgtgacaactgg

SEQ ID NO: 24557 - DNA, 472 bp, Homo sapiens
  misc_feature (1)...(472): n = A,T,C or G
nattgccctgcttgcgcaattcggcacgagccaaaatgacgaacacaaagggaaagaggagaggcacccgatatatgttctctaggccttttagaaaacatggagttgttcctttggccacatatatgcgaatctataagaaaggtgatattgtagacatcaagggaatgggtactgttcaaaaaggaatgccccacaagtgttaccatggcaaaactggaagagtctacaatgttacccagcatgctgttggcattgttgtaaacaaacaagttaagggcaagattcttgccaagagaattaatgtgcgtattgagcacattaagcactctaagagccgagatagcttcctgaaacgtgtgaaggaaaatgatcagaaaaagaaagaagccaaagagaaaggtacctgggttcaactaaagcgccagcctgctccacccagagaagcacactttgtgagaaccaatgggan

SEQ ID NO: 24558 - DNA, 468 bp, Homo sapiens
  misc_feature (1)...(468): n = A,T,C or G
nattcctccgcgctgcatgaattcggcacgagccgttctcgaagcaggtcacgggagcgggcggataatccgggaaaatacaagaagaaaagtcattactacagagatcagcgacgagagcgctcgaggtcgtatgaacgcacaggccgtcgctatgagcgggaccaccctgggcacagcaggcatcggaggtgaggcggggttgcagtgactggtggccgcaagcccttccctggggagtacctgatggctgccctttgacccccggtggctgccctttgacccccgggtgtgctctcagcgcaagtggtcctagaacaggattctttttggaaatgtctgtcgactggaccttggtggatttggaaatggaactgagggaccggtgacacgtgcttcagaccggtctggggtgcggcgcacacctgggcccgtgcagggctcagctcggcagcagctctgagggcg

SEQ ID NO: 24559 - DNA, 474 bp, Homo sapiens
  misc_feature (1)...(474): n = A,T,C or G
cgcgggccggngggatttgagatccgatggctgcggcagngnccgaccccaccccgtctacccctccagtcagcccagcgcccatcctgcagctcagctgggagcatcattctcctgctttgtacatagggtgtggtcccctggcacgtggccaccatcatgtctaggcctatgctaggaggcaaatggccaggctctgcctgtgtttttctcaacactacttttctgatatgagggcagcacctgcctctgaatgggaaatcatgcaactactcagaatgtgtcctcctcatctaatgctcatctgtttaatggtgatgcctcgcgtacaggatctggttacctgtgcagttgtgaatacccagaggttgggcagatcagtgtctctagtcctacccagctttaaagttcatggtaagatttgacctcatctcccgcaaataaatgtattggtgatttggaaaaaaaaaaaan

SEQ ID NO: 24560 - DNA, 468 bp, Homo sapiens
  misc_feature (1)...(468): n = A,T,C or G
atgtgccatcgacncngcgctgcaggaattcggcacgaggtcagcaggggcaggacagaagttacaacaggctggagggagcagtgggtgtcaccctcaactggagatgagtcccaccaggccagttttacccccttagttacctgccctgcacctgcagacaatggtcgatgccttgcatataatacttatagactctgtttatgttgagggatgtttttaaagcccacacgtgaggtggatgtggaagactgatcactgtctctgtttttagctaagcacacagcagctgaaaagactgcatttcccagattcctttgcagctagatgtggccttgtgactgatttctggctaaattcctgggtagaacagtcaagcttaagaaagggacggctgggcacagtggctcacgcctgtaatcccagcactttgtgaggctgaggccggtggatcacctgaggtcagga

SEQ ID NO: 24561 - DNA, 452 bp, Homo sapiens
  misc_feature (1)...(452): n = A,T,C or G
aattgactttcgatccgcgctgcaggaattcggcacgagtagatctgtgattcggtaaacaggcagccatgttcacgatgccttctatgtcttaccatatttttaattaacctgttaaatacagcttaaaatatttttattttatttattctatttttactgaaatatactgcattattgtgttaatgtattatctttcctggatattatctcccagtgtatccagatctaagtaatctcagtgaactatacattgcctaaaaagtggttttgtaatgatttgtagtcacatttctattgggatatgtagaagaaaaggcaaaatgcttaaagttccttttattttttaaaagcagctagatagacacagactttgccacctcatacatctgcttctttgcaaccatccanggggaaccacataacccaccgtgcttatgtctaaaaacttt

SEQ ID NO: 24562 - DNA, 517 bp, Homo sapiens
  misc_feature (1)...(517): n = A,T,C or G
gtgcgaccacncncnaatggcccgccctgcagaattcggcacgagcaatagtcccgccctcgcggaattcggcacgacgtcttgagaacataattttatataatccattactaaatgctaaactattaccacacagcccataaaacagcatttgcgtttattgagagagaggatgtgccatcatgattaatgaaaactatcttttgagtttgaaaagaaattaatttgcagtgtttggattgtatatatggtgctaaaaataaattaatttactttataaaccttatctgtacattatacgatgtgatgaaatttgctttttatccaaatattttgtatcttgtaaatatggctaattataggaatgcctataatacatcttagattccttatatctaataagagttcaaagagttatgagttgaagtcttgaatgcaggaaactatctgatagtgttctaaaatttggttacttgggtttggatacccttagtgggatgatgtaaatagaggctan

SEQ ID NO: 24563 - DNA, 505 bp, Homo sapiens
  misc_feature (1)...(505): n = A,T,C or G
tgcgcccccccncnaattcgaccgcatgcaggaattcggcacgagcgttcgggcgccttcattgtgatcgatgccatgatggccatgatgcacgcggagcagaaggtggatgtgtttgaatttgtgtctcgaatccgtaatcagcgccctcagatggttcaaacggatatgcagtacacgttcatctaccaagccttactcgagtactacctctacggggacacagagctggacgtgtcctccctggagaagcacctgcagaccatgcacggcaccaccacccacttcgacaagatcgggctggaggaggagttcaggaaattgacaaatgtccggatcatgaaggagaacatgaggacgggcaacttgccggcaaacatgaagaaggccagggtcatccagatcatcccgtatgacttcaaccgagtgatcctttccatgaaaaggggtcaagaatacacagactacatcaacgcatccttcatagacggctaccgacagaagg

SEQ ID NO: 24564 - DNA, 511 bp, Homo sapiens
  misc_feature (1)...(511): n = A,T,C or G
aggggnnnttttgaangcantaaatcgaccgcctgcggattcggcacgagggcgagtgcatcgcttgctgcgcaaaggcaactacgcggagcgagtgggggccggcgcgcccgtctacatggctgcggtcctcgagtatctgaccgccgagatcctggagctggcgggcaacgcggctcgggacaacaagaagacgcgcatcatccctcgtcacctccagctggccatccgcaacgacgaggaactgaacaagctgctgggcaaagtcaccatcgcccagggcggcgtcttgcctaacatccaggccgtactgctccctaagaagacggagagtcaccacaaggcaaagggcaagtgaggctgacgtccggcccaagtgggcccagcccggcccgcgtctcgaaggggcacctgtgaactcaaaaggctcttttcagagccacccacgttttcaaataaaagagttgttaatgctggccaannnnnacnnnnnnaaaaaaaaaaaaaaaaa

SEQ ID NO: 24565 - DNA, 509 bp, Homo sapiens
  misc_feature (1)...(509): n = A,T,C or G
ggaggaaactgtcgcctgtagttagtaggcacgagctaacttcagtacccttggcctgcacagtagcaatgctgggagctagaggcaggcagggcagttgggtcccttgccagctgctatggggcttatgccatgctcagtgctggggacaggagttttgcccaacgcagtgtcataaactgggttcatgggcttacccattgggtgtgcgctcactgcttgggaagtgcagggggtcctgggcacattgccagctgggtgctgagcattgagtcactgatctcttgtgatggggccaatgagtcaattgaattcatgggccaaacaggtcccatcctcttcataannnanaaannnaaaaaaaaaaaaaaaaaaaaaaaaaaannanaannnnnnnnnnnnnnnnnnnnnnnnnnnnnnnnaactaggggggggggccccccccccccccccccttgggggggggagaaaaacacccgcgggcgggggaaaaacaacggggggggaga

SEQ ID NO: 24566 - DNA, 473 bp, Homo sapiens
  misc_feature (1)...(473): n = A,T,C or G
tggcggncannnnnntttcaccctcgctgcaggaattcggcacgaggaccgctcctctgccaacctgctcctgggaggaggcatggtgctggcagtggctggcggccacctcggccctgagggccgctctgtggctggtcaggcaatgctgttggtggtcgcagtgaccatcctcattgtagctgtcttcacggccaacacttatgggatgtgggggggggcgatgctgggtgtggcaggcctcctgagccggctggaggaggacaggctgctgctgctaccgaaggaggatgtctgtcgctgggccttggctgtaggcagctgggcttactgccgggccctgcatacacagcgcctccagtgggagtgacagttggatacagccaggcagggtttctgccctgccgaacactttccctcccacctgcctgctcctggcgccttctccctaggggtagactcttctgcctacn

SEQ ID NO: 24567 - DNA, 519 bp, Homo sapiens
  misc_feature (1)...(519): n = A,T,C or G
cggcgcncccccnnattttgaccgcccttaggaattcggcacgagccgtacgcggcgcgctgcaggaattcggcacgaggtttttaaggacaaaacaataggacaaaagtgctgtatattgtccttaagatgacacatgaatttaaaatgcatagtgtttggattattcatgagagccccgcaagaacgatgtcccaggggtttttgccaggaacatgcctgagattgtagataagaatcaagcatctggggctgccgcacaatggaaaactccagcactccatggaacttttccatctgcagcagtcggaggatttgcctgagaacatacgcggcatgaagacactctcagccctcaagggcacccagtcagcgctgtttaaggacggtttttctgttcacagcatacttcatgattacagcttcactccattggatacaactatttactgagcatctcctgacaccagagaggacgcaacaaaaatcacaactcctagaactgcacagtctaaatgg

SEQ ID NO: 24568 - DNA, 337 bp, Homo sapiens
  misc_feature (1)...(337): n = A,T,C or G
taaaacagatcgcccggctgggccaggatatctacaacccagaggccgtgtattactgggcccacaagaaccacatccctgtgtttagtcccgcacttacagacggctcgctgggcgacatgatcttcttccattcctacaagaacccgggcctggtcctggacatcgttgaggacctgaggctcatcaacacacaggccatctttgccaagggcactgggatgatcattctgggcggtggcgtggtcaagcaccacattgccaatgccagcctcatgcggaacggggccgactacgctgtttacatcaacacagcccaggagtttgatggctctgn

SEQ ID NO: 24569 - DNA, 501 bp, Homo sapiens
  misc_feature (1)...(501): n = A,T,C or G
ngagaggnnnnnntttcccggctgttgaattcggcacgaggccaccctccctgtaagtctatttaaaaacatcgacgatacattgaaatgtgtgaacgtcttgaaaagctacagctttcaacagcctaaagcaactgtagctttggcaagacggccctgatgtacaagcttgagtgaaattcactgctcacttgatacgatattcagaaacccaaggaatggctgtccccatcctcatgtggctgtgtggagctcagctgtgttgtgtggcagtttattaaactgtcccccagatcgacacgccgaagaaaaaaaaaaaaaaaaaaaatcttgagggggggccgggccccaattcccccttatgggggggggaataacattccccgggccggggtttaacaagggggggagggggggaaaaaannnncccgnggggggccccggcccccctttgcccctttgggtgggcgttttcctttccctggccgccttttcccccgg

SEQ ID NO: 24570 - DNA, 511 bp, Homo sapiens
  misc_feature (1)...(511): n = A,T,C or G
agaagaaaacttgaccgccctgangtatgtcggnccgatgcgaccttctgcaacaatacaagaccctagcgtatccattccagagtcttctgtacttgcttttggctctgagtacaatttcagcttttgacaggattgactttgctaaaatatcagtagcaatccgaaattttttggccctggatcctacagctttagcatctttcttgtactttactgctcttatactatctctgagtcagcaaatgacaagtgacagaatccacctttacacaccttcttctgttaatggtagcctctgggaagcaggaattgaggaacagattctccagccatggattgtggtgaatctcgtggtggctcttctggttggattatcttggctatttttgtcttataggccaggcatggatcttagtgaagagttaatgttctcctcagaggtggaagaatatcctgataaagagaaagaaatcaaagcctcttcataataccagctcacctttggagg

SEQ ID NO: 24571 - DNA, 469 bp, Homo sapiens
cattcgcccgcgctgcatgaattcggcacgagagaaggtgttctgtgagaagaaaaatgtacaataatggaagacaggcactctctcagactgtactcaattaaggtaaaagaggaccattaatgagtctcacaactacagagagaatataaatgcatattggctgggctgaatatatagacgtcagcaggtcccaagaggccttgccattctgttgatacatctttgactgtttctgctgtcatgtaagaaaatccagctggactacctaatgaagaaactgcatgatgaaagcggctcacacaacagccatcaccgaggcaccagacaggaatccagaagtttctgcctaaacccacagggagcatggaagatagctgaggagagagtcagaggcttgcactgaagaggcagtggccaagtggcataaaggaagctgaacccaccacatcagagacacctgcgccag

SEQ ID NO: 24572 - DNA, 469 bp, Homo sapiens
  misc_feature (1)...(469): n = A,T,C or G
ctcgcattcatcgcctgcggaantacaggatttgcaacctctttatcgataatattatcaacattgatctcctatttttggcttcaagattttgtgccaaccagtgtctttttccttggagccatccttgtaataacagctacttttttgtatggttatgatcccaaacctgcaggaaatcccactaaagcatagttgtatactatctttaactggtttttcacgatggggcactaggaatctcgacattaatcttgcacagaggacttctacagagtctgagaagatatcatcatgctgaatctgatcatactgttttttaaaagtttaaggataagacatgtgtatatgtaacaaaacacattgcatctagaaatcaaaacttgaaagtatttccagggattaggattagaaggaatattagaggaaacttgaaatctgagtttaaaaagattntacctttntgatn

SEQ ID NO: 24573 - DNA, 503 bp, Homo sapiens
  misc_feature (1)...(503): n = A,T,C or G
gcgcggtcacncanaattgcaccgccntgaggaattcgccacgagagaaagagatatcatcactgtaaaagatacacaattataaaatcaagtaagtaaaaactctaatattacatttaattgggaatatcagaattaactcttatttttaaagtgcaaaagttttaaattttcattaagtctgaccaatttttgttcttttattgcttgtacttttggtgttgaatctaataaatcattgattaacctcaggtcctaaaggtttacttttgttttcttctcaggattttctaattagaaaattaggtctgtcattttgagttaaattttgtgtatggtgtgaggtaggggtccaaattcatccttttgcacatggatattcatttgcttcagcaccacttgttgaacagactttttttcctattgaagtgtcttgtcactttttttcaaaaatcagtatttcatggatgtttggggttatttctggactctctaatttattg

SEQ ID NO: 24574 - DNA, 471 bp, Homo sapiens
  misc_feature (1)...(471): n = A,T,C or G
natttgacattcgaccccgcgctgcaggaattcggcacgagatcaggtctgggccaccccaaacttgggctgcctcccttatacatacgttagagtgagagacccaactgtttctaccgaagcctcgtcttcatgccccagacacctgagtgtcccaatcaggtgtcagacttgcttgctctttgaggtccccctgtgctgccaagtgttttcattgtaaacagacacatcgccatgtttcagggcttcaacgggattgtgttttggactttgaccgtattttttttctcttaacctactgagactcttccttaagaacaggatctatagctgtaacatgtcttgttttatgggaaattacctgccaagccagggcactaaactctttcatcattagagctttcctgaaggccggacatatactgagtacctgctctgtgttctgggcagcttacaatatcttagacagag

SEQ ID NO: 24575 - DNA, 492 bp, Homo sapiens
  misc_feature (1)...(492): n = A,T,C or G
cattgcccgcctgcacgaatttggcacgagtgatttcttaaggcctatatccaatgaaaccattttaaaagctctatgaggagtggaattttagatgtctattacacttgtcttttaaaagaaaaatgcttaaatttcagaatgagcaagattcacttttgtaggtagaggccctgcttcttcatgatcttcagttttagatctaacaaccacaagagaagaagctggatatctgtttagcttttgttcattcataaactccaagtcaccatagatactcagcttctcagagggaacatactgctccacagctgtagcaacagttgcacaacaaatccaaagcaataccatcaccgagaggacaagagttgtagttaaaatccacccagagttaagagagaggcatcttanaaagccatcactttctccatcttcaagaaaattcctgtgcgcttgtgaatttctcatttgcagataggacattntgcttan

SEQ ID NO: 24576 - DNA, 472 bp, Homo sapiens
  misc_feature (1)...(472): n = A,T,C or G
natcgcaccttcttgcggaattcggcacgagtgtatctctctctatctctctgtgagagaagccttacacgtgctttgagtgtgggcgaatctttaacctcacggccgctcttagtgtacatcataggatacactctggggagaagccttatgcatgcacggagtgtgggcaaggctttatcacgaaatcacagctgatcagacaccataggacacacacaggagaaaagccttatgtctgctgacagagggggcgaggctttatagctcagtcaaccctccactaccaccggagtacacactccaaggaaaaaccttatgtgtgcagccagtgtgggcgaggcttttgtgataaatcaactctccttgcacacgagcagacacattcaggagagaagccttatgtgtgtggggaatgtgggcggtgatttggccggaagatactcctcaacagacactggaggacacacan

SEQ ID NO: 24577 - DNA, 490 bp, Homo sapiens
  misc_feature (1)...(490): n = A,T,C or G
attgcccggctgcggattctgcacgacggctccttgaccagcaatcggccctgggagccaccaggtgggaaaagcgcctctgccagagtccaggccttgggatgacagacagcttgcccgcacactcgggccccactcaaggatgtagggccttttctggcccctgacccctccctggcatgggagcgtggggacggggctggccttgggaggagcggcaggggcatcacctccttctgctgcttctccctgctcctaccctcaagggcctgggggctgcccagctgcctctatgcccttctgggggtctcagcccactgctgacacttctgcaatccagagaaacactaaataaagcaatacgtgtttgccnnnnnnnaaaannnaaaaaaaaaaaaaaaaaaaaaannccttgggggggggggcgggcccccaatcccccttaaggggggggaaataaaaaatagggggggggggtttaaaaagcggg

SEQ ID NO: 24578 - DNA, 422 bp, Homo sapiens
  misc_feature (1)...(422): n = A,T,C or G
ggggnncacttgctcggctgtagtttgtcgacgagcttccctggttgcttagctgggtctcggccacggcgtggagagcggcaagatcaccccttctgtgtcattctctgaggaaaacaagttcttctcaaggaggaaagtctgaacttgtcaaacagtcccttaagaagccgaagttaccagaaggtcgttttgatgcaccagaggattcccatttagagaaagaaccactggaaaaatttccagatgatgttaatccagtgaccaaagaaaaaggtggacccaggggcccagaacctacccgatatggagattgggaacgaaaaggacgctgtattgatttttaagtcgcatattctttaacttcaatattggtttctgaatatgtacatctgaattaacttanaaaaaaaaaaaaaaaa

SEQ ID NO: 24579 - DNA, 407 bp, Homo sapiens
  misc_feature (1)...(407): n = A,T,C or G
nttggaccccctttgcccccgcgctgcaggaattcggcacgaggcgagatgacgaagggaacgtcatcgtttggaaagcgtcgcaataagacgcacacgttgtgccgccgctgtggctctaaggcctaccaccttcagaagtcgacctgtggcaaatgtggctaccctgccaagcgcaagagaaagtataactggagtgccaaggctaaaagacgaaataccaccggaactggtcgaatgaggcacctaaaaattgtataccgcagattcaggcatggattccgtgaaggaacaacacctaaacccaagagggcagctgttgcagcatccagttcatcttaagaatgtcaacgattagtcatgcaataaatgttctggttttaaaaaataaaaaaaaaaaaaaaaaa

SEQ ID NO: 24580 - DNA, 477 bp, Homo sapiens
  misc_feature (1)...(477): n = A,T,C or G
gaagggnnggttgcccgctgctgattcgccgagctgaatgatggcgaaaggagtccttagggctttcagcctcaaaggtcacatagggtggcaggtgactctccggaggcctcgagggaaatgcacactgtgccatagactcattgggctcccagacgtgctggaaaggttgagcccagagtggccgaggctggaccctgtggcaccaagtggggtcggctgaccgtgtggcagggatcgttgcactggactcttggcgtgtgggaagggatgctttctctttgtcgcccactcttcattcctgtttctcctcagttcccctgtgcagatgggctgtgaaattaaattggagtcttgataagaacattttaatttgacttaatattttaaagattgaatccagatcacttgttgctgtcttaatggaatgggtttctacaggagctgtaacatacttaaaaatatgaatgtattatg

SEQ ID NO: 24581 - DNA, 474 bp, Homo sapiens
  misc_feature (1)...(474): n = A,T,C or G
agggcggnntnnnaattgtatctattactctcggaattcggcacgagccatcgggaagggggtgaccgtgggtgagggtgtgcggctccgggagagcatcgtcctccatggagccactttgcaggagcacacgtgtgttctgcatagcatcgtgggctgggggagcaccgtgggacgctgggcccgcgtggagggtacccccagtgaccctaaccccaacgatccccgagcccgcatggacagtgagagcctcttcaaggacgggaagctgctgcctgctatcaccatcctgggctgccgagtccggatccctgccgaggtgctcatcctgaactcgattgttctgccacacaaggagctgagccgaagcttcaccaaccagatcatcctctgagtagggctgccagaaggcccccagctcctacccactccccttgaggctgctgcctgcttggccagcctctgtccanaaag

SEQ ID NO: 24582 - DNA, 483 bp, Homo sapiens
  misc_feature (1)...(483): n = A,T,C or G
aattgaccgctntgnnnggaannncaattgacgccgcgctgcaggaataccgcacgaggcaaatgccaactgttggaattcactttattgtagaaaaacccaaactgagactcttaagttttgtttagcaatgtgtttctggtatgaaacaaactactgtgtcactgtccaggtaggaaacaattctttcaactgggttttcagcataaatgggaactgatgtagaaggcaggatttagcccttctaggcaaaagaaaagctcagttgggtttcacgagtgttcctgtgcttatattcagtctgtgcctacatgttctcatgcatgtctaacctgatttacctcttacctgtaacctaccttatcatgtggcttttaattggcagtcactcgccatttctaagcagatatagtactacctttcagaactcacattggcaagtgtaaaaagatgacttaaggtgaagtgaggacaaaatcacat

SEQ ID NO: 24583 - DNA, 450 bp, Homo sapiens
  misc_feature (1)...(450): n = A,T,C or G
ntttgaccngcgctttgacccagcgctgcaggaattcggcacgagtgggagtttcgtgaagctgagggtgagttcctgtgattcttgttcgcttcaacaaaaagtgggagaccaagtttttatagcaaaagaccaaattagctgtatagtcttgaatgcataaaaaaattaccctagctttcttaacacttaaggttttgtgaggattcagtgcttagcacagtgcttggcacatagtaagccctaataaatgttaaatattgttattagtgcttcgtataacttgagaaatagagctgagctcattcccttcctgttgattcaaaaataatacctacatgaaaacatgattccaagttgattgaatgttgtaggaattactggtttagagtagcccagttctcggcctaccctgctggttgggatcttactgtattcttgaatgcactg

SEQ ID NO: 24584 - DNA, 512 bp, Homo sapiens
  misc_feature (1)...(512): n = A,T,C or G
cgangnnatttgatcgccttaggtagacgcgcctgtctgaattcggcacgagctctgaggaggaaccataaggactccaatggcagcagcagcgtttgcagagaagtgatcgtgacagttggtagacaacatcgggtactccaggtctctccaaactgactatatatttatttgttattttaaaaatacaactatattttgggtagtttttttttttttttttttgaaaagtgggggaagggttttgtgacttgataaaaacaaaggcggggcctttaaataaaggggatctttggaaataaaggtggttggaaataactatctgattttgggggtcccagtttttttgggaaaatcaaacaaaaactctttgaaaacgggtttggatattcagcccccttagggaaaatttttaaggtcttttatacttgggaacctcccctgattttggaccaaccccagaccagaggagagccccttttataaacccccattgccctgttgttgaacat

SEQ ID NO: 24585 - DNA, 475 bp, Homo sapiens
  misc_feature (1)...(475): n = A,T,C or G
nggnggggggnagccggaaaatgagntccctgagatgctacgcggaattcggcacgaggaagatctctgcccttcagagtgcaggagttgtggtcagtatgtctcctgcacagctgggaaccacgatctacaaggaatttgaaaagaggaagatgctatgaaagaaaaaaaaaattcctaaaactgtggaatggatcacgtagacatgtaacccagcagcagtttgcttctgttgtccactgattaatcagcctatgtgcctgacactggtcttgcagtacaactggaagccaaaacaaggtggaagatgtcctgaattaagacgttttcaccacattgtattacagagacagccaataaatctactatttgatttcaaaaaaaaaaaaaaaaaaacctcggggggggcccgggacccaatttccccttatagggggccgaataacaatccatggcccgcggtttaacaacgcgg

SEQ ID NO: 24586 - DNA, 499 bp, Homo sapiens
  misc_feature (1)...(499): n = A,T,C or G
gaaggaactgaggccgtggctgcgggcttcgaaancgccctactntccgcgcctgctttgcgacgagctccaggttatatttgggccgatgcttcgtgtcctccaccagcttatagacgcgatgtctccggtgcaggcgcggcttccggccctccccggccagcggtaccttccaccagcgctccacgatgaccgtgccctggcggccaggaaagcgacgcatcacttatacggaagaggaggacttgacactccagccccgttcctgcctccagtgctcctgagtccctagtaggcctccaggagggcaaaagcaccgagcagggtaaccacgaccagcttaaagaactgtattcgattgactgcaaccctggagtacgtggaagagaagacaaatgtggactctgtgtttgcgaacttccagaatgatcggaacgacagaggtgccctgctgcgggccttcagctacatggngcttgaggtggtcagaccagatcac

SEQ ID NO: 24587 - DNA, 471 bp, Homo sapiens
  misc_feature (1)...(471): n = A,T,C or G
agcgggnttttttactgatagcctaggcattcggcacgagcctgtctgggtggaaacgtttactgggttaacacatttttcctgccgcggtctttctgagggctgtaatattcctgcctgtctgtgtaggccccataccagcttggccactgtggggtcacttggaaagggagcctttcggcaggcctcccctcccactgggaggatgcttcagtccctctgcactcagacgtgttggaagcacattccacacgcagagtgtgtctcttctcccggctgctcctgctgctggcctggacagaggagcctgttccatggcagggggtcctgagtgctgccacttgtagtatcgtggggaggctgctcggctcccagcctctctcatgcccactgcccatgggctgcactgacagatgtgtctcctcacttccccttccccgcagaaatagaaatagcctagaactggaaaaa

SEQ ID NO: 24588 - DNA, 466 bp, Homo sapiens
  misc_feature (1)...(466): n = A,T,C or G
attttgcctcgctgcacgaattcggcacgagaactttgttactgaagaagacaagaggattcttcgtgacattgagactttctacaatactacagtggaggagatgcccatgaatgtggctgaccttatttaattcctgggatgagagttttggatgcagtgctcgctgttgctgaataggcgatcacaacgtgcattgtgcttctttctttgggaatatttgaatcttgtctcaatgctcataacggatcagaaatacagattttgatagcaaagcgacgttagtcgtgagctcttgtgaggaaagtcattggctttatcctctttagagttagactgttggggtgggtataaaagaaggggtctgtaaaatctttctttcttagaaatttatttcctagttctgtagaaatggttgtattagatgttctctatcatttaataatatacttgtggactaaaagan

SEQ ID NO: 24589 - DNA, 470 bp, Homo sapiens
  misc_feature (1)...(470): n = A,T,C or G
aaggcgtgtgnnattgaactgatggcatcggaggctccctagggcgataaactggacaatagcagaagcattcttaagaggagatattacagacagcactgcactttggagttgggcagctacatcaaggacctctctgtggtccacagtgacctctccagcattgtgatcctggataactccccaggggcttacaggagccatccagacaatgccatccccatcaaatcctggttcagtgaccccagcgacacagcccttctcaacctgctcccaatgctggatgccctcaggttcaccgctgatgttcgttccgtgctgagccgaaaccttcaccaacatcggctctggtgacagctgctccccctccacctgagttggggtgggggggaaagggagggcgagcccttgggatgccgtctgatgccctgtccaatgtgaagactgcctgggcagggtcttgccctccc

SEQ ID NO: 24590 - DNA, 475 bp, Homo sapiens
  misc_feature (1)...(475): n = A,T,C or G
aggagggngtgnaattgaactgcttggctgtcangaattcggcacgagcagaaaacgtggcacacactgaccacacattaggctgtgtcaccattgtgtggtgtacctgctggaagaattctagcatgctacttggggacataatttcagtgggaaatatgccactgaccgattttttttttttcctctttgcaggggggctaggacagttgattcaacaaagaatttttttcttttttctcagccctaatttgaacaggtcaaagatgtgttcaggcattccaggtaacaggtgtgtatgtaaagttaaaaataggctttttaggaactcactctttaaatatttacatccagcttctcatgttaaatatttggccttaaagggtttgagatagacatctttcatttcgaatttctcataggctatgccatgtgcggaattcaagttaccaatggaacactggccagcgggccc

SEQ ID NO: 24591 - DNA, 455 bp, Homo sapiens
  misc_feature (1)...(455): n = A,T,C or G
gctgggacatgacttgctctgacgaattcggcacgagcattgttctgaacatcctgtattgtaaaccatggctggggtgctaaagtgcctgtgaatcccgatgtggaaaaagctggaggtgaaagctcagcataccatgtatttactttaaaaacagaaaaaaagacatgtatggatatgtctattttttttttattggcacattgtatttttgtgttgacttgtttttagaaatgatgtgtccacacacgtacccgtgtctcttctgcatttctgtgtcatggttctgtttcttaatcacgtgcggcggtgtctaagtggtgttaccagtgtacgcgcagtgaccttggatgacagtggctctttctcacagcctcccctgagctgtgagaaacagctttctctgtacatatgcaactcctaataaaaggcatatttcttcctgttcaaaaaan

SEQ ID NO: 24592 - DNA, 468 bp, Homo sapiens
  misc_feature (1)...(468): n = A,T,C or G
ggggggtgncctgttagatggcttcaggaattcggcacgagggctgatctgtgcttggagcctcaggtggcaaatgctgaaagattcaaggtggatctcaccccctaccctaccatcagctccatcaacaagaggctgctggtcttggaggccttccaggtgtctcacccctgccggcagccagatacacccactgagctgagggcctagctcccaaatcctgccccgttggcacagggccacaggagcagaagctgggtgggctgaagaggcctggaaacgagagtcttaattgaggagatgggagactcgaactctagccctggatctgccttcctgctgaaacttgttccacctcagtcccctcatctgtcacacgcatgtggggtggagtaaggagatgcggngagcagggtgggcaggaatactgttatctatgtgacggggcagtcgtgaggctgagataaa

SEQ ID NO: 24593 - DNA, 503 bp, Homo sapiens
  misc_feature (1)...(503): n = A,T,C or G
cgccggccaattgancggctgtagganggagncgccttaggaattcggcacgagcctaaacaggagcacctgctggcgctaaaagtgatgcggctgactaagcctactttattcaccaatatcccagtaacatgtgaagagaaagacttacctggagatctctttaaccagctgatgagagatgatccttcaaccgttaatggtgcagaagttttaatgttgggagaaatgctgactttaccacagaattttgggaatatatttttgggagagaccttttccagttatatcagcgttcataatgatagcaatcaagttgtaaaagacatattagtaaaagctgatcttcagacaagttctcagcgtttaaatctttcagcctccaatgctgcagtggctgaacttaaaccggattgttgtattgatgatgtcatacatcatgaagtcaaagaaattggaacacacatcttggtatgtgctgtgagttatacaactcaggctgg

SEQ ID NO: 24594 - DNA, 470 bp, Homo sapiens
  misc_feature (1)...(470): n = A,T,C or G
nggggtggggagcngnatccgaaantctggacntgctggcaaaancgcacgagggaacacttggcaaagcctttggttgtgttggagggtacatcgccagcacgagttctctgattgacaccgtacggtcctatgctgctggctgcatcttcaccacctctctgccacccatgctgctggctggagccctggagtctgtgcggatcctgaagagcgctgagggacgggtgcttcgccgccagcaccagcgcaacgtcaaactcatgagacagatgctaatggatgccggcctccctgttgtccactgccccagccacatcatccctgtgcgggttgcagatgctgctaaaaacacagaagtctgtgatgaactaatgagcagacataacatctacgtgcaagcaatcaattaccctacggtgccccggggagaagagctcctacggattgcccccacccctcaccacaca

SEQ ID NO: 24595 - DNA, 480 bp, Homo sapiens
  misc_feature (1)...(480): n = A,T,C or G
gaggcccggnaaggaaagcattgaccagcgctgcaggaggcggcgtcaaaggtgaagcaggacatgcctccgccggggggctatgggcccatcgactacaaacggaacttgccgcgtcgaggactgtcgggctacagcatgctggccatagggattggaaccctgatctacgggcactggagcataatgaagtggaaccgtgagcgcaggcgcctacaaatcgaggacttcgaggctcgcatcgcgctgttgccactgttacaggcagaaaccgaccggaggaccttgcagatgcttcgggagaacctggaggaggaggccatcatcatgaaggacgtgcccgactggaaggtgggggagtctgtgttccacacaacccgctgggtgccccccttgatcggngagctgtacgggctgcgcaccacagaggaggctctccatgccagccacggcttcatggtgtacacgtaggccctgtgg

SEQ ID NO: 24596 - DNA, 470 bp, Homo sapiens
  misc_feature (1)...(470): n = A,T,C or G
ntttggccctctccgccgcgctgcaggaattcggcacgagccgccatcatgggtcgcatgcatgctcccgggaagggcctgtcccagtcggctttaccctatcgacgcagcgtccccacttggttgaagttgacatctgacgacgtgaaggagcagatttacaaactggccaagaagggccttactccttcacagatcggtgtaatcctgagagattcacatggtgttgcacaagtacgttttgtgacaggcaataaaattttaagaattcttaagtctaagggacttgctcctgatcttcctgaagatctctaccatttaattaagaaagcagttgctgttcgaaagcatcttgagaggaacagaaaggataaggatgctaaattccgtctgattctaatagagagccggattcaccgtttggctcgatattataagaccaagcgagtcctccctcccaattggaaata

SEQ ID NO: 24597 - DNA, 511 bp, Homo sapiens
  misc_feature (1)...(511): n = A,T,C or G
gagcngggnnnnnnnaccgccggctgcaggaatgcggcaccagagtacttacgtattgggattcctgtgtcttacagctctccctctccaaataatacacagaatcctgcaactttttgcacagctggtatctgtctggtagcagtgagaccccttgtcttggtgatccttactgggtttccaagcagaggagtcacatgattacaattgccagtagagttgttgtttggggtacaagatgagaagaaagaaaaacctacagcctttctacattctgacatgctaacagtggtttaagtttctaaagtgtttaccagatgctgaaggcaaggggagggagcagaagcacttatgtttacggatattttaaactctgttagagagcagcctttgaaaatccccaatttggttctgctttttgacctctctctaccttttcagggtaatctttgtggcacaaacgatagcatttccaagctttagagttttctgaattcctgcgccttcctgn

SEQ ID NO: 24598 - DNA, 514 bp, Homo sapiens
  misc_feature (1)...(514): n = A,T,C or G
agcgggaggggnnttttgacgcctgcnngatctgcccgcctgcaggaattcggcacgagaaataagatcctcactttggcagtgcttcctctcctgtcaattccaggctctttccataaccacaagcctgaggctgcagccttttatttatgttttccctttggctgtgactgggtggggcagcatgcagcttctgattttaaagaggcatctagggaattgtcaggcaccctacaggaaggcctgccatgctgtggccaactgtttcactggagcaagaaagagatctcataggacggagggggaaatggtttccctccaagcttgggtcagtgtgttaactgcttatcagctattcagacatctccatggtttctccatgaaactctgggtttcatcattccttcttagttgacctgcacagcttggttagacctagatttaaccctaaggtaagatgnctgggtatagaacgctaagaattttcccccaaggactcttgcttccttaagcc

SEQ ID NO: 24599 - DNA, 484 bp, Homo sapiens
  misc_feature (1)...(484): n = A,T,C or G
cgtgtggccgngnaattgannccttttgaccagcgctgcaggaattcggcacgagcaggaattttgtaatctcataactttccaagctccaccacttcctaaatcttaagaactttaattgacagtttcaattgaaggtgctgtttgtagacttaacacccagtgaaagcccagccatcatgacaaatccttgaatgttctcttaagaaaatgatgctggtcatcgcagcttcagcatctcctgttttttgatgcttggctccctctgctgatctcagtttcctggcttttccttcctcagccccttctcacccctttgctgtcctgtgtagtgatttggtgagaaatcgttgctgcacccttcccccagcaccatttatgagtctcaagttttattattgcaataaaagtgctttatgccggcttttctcaaaaaaaaaaaaaaaaaatttgagggggggcccggcccaatttcactttaatg

SEQ ID NO: 24600 - DNA, 491 bp, Homo sapiens
  misc_feature (1)...(491): n = A,T,C or G
aggggttccgggngggnnnnaccttgagnccaactgaccgcntgcggaantcccacgaggaagattgtaaccctgaggagcctgaaaatgaagacttccacccttcctggtccccctcaagcctccccttccgcacggacaatgaagagggctgtgggatggtgaagacctcccagcagaatgaggatcggccccctgaagattcttccttagaactccctctggcagtgtgacaggcgctagaggtcctgcctcttacccattctctatttattcccttattttatctaacaccatttcaaaacaaaactgtagaagcagctgctgctcccatgttattttattggggtctttggggaatgggtgggaaaggattgtttgagtattttttaaaagggaaacagtaccaaggagaccagccctaccttgatctggggatagtcttggggcaaagaaagctgcgtagtgctgaacattaagctttctgggcg

SEQ ID NO: 24601 - DNA, 281 bp, Homo sapiens
  misc_feature (1)...(281): n = A,T,C or G
ggaggttgcccccnttnnnnaaattgaccgcaatagaaatncgtacgagcattgcggctccctccggttctgctgctgacaaagttgtgattgaggcctgcgacgaactgggaatcatcctcgctcatacgaaccttcggctcttccaccactgattttaccacacactgttttttggcttgcttatgtgtaggtgaacagtcacgcctgaaactttgaggataactttttaaaaaaataaaacagtatctcttaatcactggaaaaaaaaaaaaaaaaaa

SEQ ID NO: 24602 - DNA, 487 bp, Homo sapiens
  misc_feature (1)...(487): n = A,T,C or G
nggcggggnttttnnnactagatttgcatgaggcaattcggcacgaggaacctttgtgccaggacacctcctggtcccctgcacctctcctgttcggtttagacccccaaactggagggggcatggagaaccgtagagcgcaggaacgggtgggtaattctagagacaaaagccaattaaagtccatttcagacctgcggaaaaaaaaaaaaaaaaaaaaaaaaaaaaaaaaaaaaaaaaaaaaaaaaaaaaaaaaaaaaaaaaaaaaaaaaanttggggggggggggccccccccccattcccccttaaggggggggaaaaaaaaattcggggggggggtttaaaaaaagggggggggggaaaaaccccccnnnccccccctctggcccaccccntgtntngtgnantttnnaaaaaccgnnngaccatggtgatcacggaatactggtatctcattgtcggggcgagccggacggtcacatcacc

SEQ ID NO: 24603 - DNA, 469 bp, Homo sapiens
ctctttgactcgcctgcacgaattcggcacgagcaacgacatctttggagagtttttgttttctcttccaagggccgtcccgttgtgttaggaagggtgagtggctggttccagggtgggccggtgccagctccggggtggactgaacagcggcggctgtccctgtgcatcctttgattactctcatgctgcatttactgtttacatttgttttattgtacataggtttgtaaacattattgcctgagatatttgtatataacttgggctttgtagcttttatttattcagaacgcatacggcatgttaatgactctgatggtgtcctcctctgggcagctgtataggatcatcatgtggttacaaaaaatacttccctcaaaaaaattcttttaatgtggaaacaataaatttcacagaagaaaaaaataaaaaaaaaaaaaaacaaaaaccctggggggggggcccg

SEQ ID NO: 24604 - DNA, 465 bp, Homo sapiens
  misc_feature (1)...(465): n = A,T,C or G
nttgacccgcctgcangaattcggcacgagaccgattctgttcctctttaaagtgtatattagccacttagcaatctctatattctttcaagtaaccaagctgttgactttcttactacttgcagtagcctgtccccaacttttccatccagtgcttaacctaaaaaactccttaactctgccttgacctgaggaagaccatgctaactggtgttattttgtatgtaccctgtgcttaattctataacagtaaaccccatacgcaggtgggagggaggaacaccggtgcctcggtcactctgggggcagtttagatgctgtgaaattaaacctgttctaagtgtacttgtttgaattaattgtattgtaatattatttgttgaatgtagtaattaggtatttatgaatatattgctgtaatttctgacaacatccaaaaaataaaatcttcctaaattaaaaaan

SEQ ID NO: 24605 - DNA, 505 bp, Homo sapiens
  misc_feature (1)...(505): n = A,T,C or G
agacggccnngngangatttaanaaattggatgngtcgtcagaaccgtcacgaggntatgatggaggatatgtacaagactatgaagacttcatgtgacattttatcttttcttggtgtcatctttatgttgcccacaatcccttgaacatgtagcacaacttcctttcctttcagttctgccaaatgctacaatcagaagtgcagtatcttttgtgctggttatttaaccccttgacacttaggtgctaatgtgcaaatgagggaacttggatcttgctgccaaggggttaaaattgggaacctaagttgctactaaatcatagttcaaaacctaataatgttgtcgttgttgctatctgatttcatagcagcagtcactaaattggaaacaaaaggttgcaacgtgacaaaaaaaattgtgtagtatttaccagcaccattcagtaatacagccttaaccatacctccttgaactacttcataacttgtcaagaaaagcagnt

SEQ ID NO: 24606 - DNA, 470 bp, Homo sapiens
  misc_feature (1)...(470): n = A,T,C or G
aattgagngcanatcgaccgcntgcgggnnncnntgngttttcaacaatagtctgaaacataaaattaagtttgggtttaaaaacaattcttgaaactgtcataaacatatgatatctattgattaaacaggaataaaaagacacaaggtacaagaattgaggcttggctgttctggctgtatactaacttcatataccctgacagaataaactatcttttttaaaaagtgctttgtacactgcacaattatagctttaccaaataaaaactcaatgacatgtcgctgaaatttgcttcttctaaaatttgaaattatttaaaatactgcatgagaatatttttatcatattatataatatgacttcatcaacatgaagttccaggaccccagatgcctctctgagaagttcattatttgatagggttggatcaaatgtaaaggtccaggtgttcaaagatcttagatat

SEQ ID NO: 24607 - DNA, 469 bp, Homo sapiens
  misc_feature (1)...(469): n = A,T,C or G
nggtgcgggaaggnggaaatgagnggcttgagagcactcccgagngccannnacttcctgatgatgggagcgtcattcttttgtcttcatggatacttgtgtgatataacataccatctgctagagaaaatcacttctttctaggggagggaggtaaaaaagtatctttcaaacttggtttttgagtttgcgtcttgtcttaactttgtgttggctctaacttaaacatgctgatatgtgttttcaagaattttgtttaaagaagtattgtatggaagtccacaaaatgaaggaagttcatctaggttttaatatgtaagcaagataacacacaagtgtaccaagtgattattaactttgttgttttacaaatttgtatgaacttggagtatctgttggccattactatacatgtgcaaataaatgtggcttagaaaaaaaaaaaaaaaaaaactcgagggggggcccg

SEQ ID NO: 24608 - DNA, 467 bp, Homo sapiens
  misc_feature (1)...(467): n = A,T,C or G
aatgaaagcaattgaccgcctgcagaantncnccacaagaagccataactttatttatgatagaaacagtacaaatttcaaaccaagctgcagttactcctttgagacaccaaaaaaagttgcttccatatggatacattggtaattccataatcgcatttacaatatcattactgttgttcttcagggctcggactgcctttgctctcgacacatttgcttgtgacatgaccaattctatgtccttaacttgtacacctgtttgatcgacctattactcttcactctactcttgtacaggtggagtctgcgtgttttcttgaatgtttgagacagcttcaccttgaactttgaatttctcagcagctgctagttgtgcttgctgggataaatcttcgatcttggcttccccaaaaactatgtaagtatctgaagcagggctcttgtagacatctggttttgtgatg

SEQ ID NO: 24609 - DNA, 281 bp, Homo sapiens
aaattgagcgcccatagagacccctacgagcatcgcggctccctccggttctgctgctgacaaagttgtgattgaggcctgcgacgaactgggaatcatcctcgctcatacgaaccttcggctcttccaccactgattttaccacacactgttttttggcttgcttatgtgtaggtgaacagtcacgcctgaaactttgaggataactttttaaaaaaataaaacagtatctcttaatcactggaaaaaaaaaaaaaaaaaactcgaggggggacccggac

SEQ ID NO: 24610 - DNA, 461 bp, Homo sapiens
ctagaccccttagaccccgctgcaggaattcggcacgagggcctactctggtggagcagaggacctagagagggagctgaagaaggagaaacccaagcacgagcacaagtcctcaagcaggagggaggcaagagaagaaaagaccaggattagggacagagggcggagctcagatgcacattctagctggtataatgggcgttctgaagggcgtagttatagaagtagaagtaggagccgagataaatcccataggcataaaagggcccgacgctcccgggagcgggagtcttcgaatcccagtgaccgttggcgtcactgaagacttcagctgcacagtagatttggaaataattatgttttttaaatgcagtcaaattcagttgggtggttactatttttgtatctaaaacttctggggctggattcttttaatcccttgactatttagagtcattggg

SEQ ID NO: 24611 - DNA, 474 bp, Homo sapiens
  misc_feature (1)...(474): n = A,T,C or G
nggatgggnnnnnnnnnnnaaatgagtgnactgagaggcattccgcacgagctggtgcgcctgcccgggaacatcctcctggactcaatcatggcttgtggtctggacgccagcaacctgaatctcaaacctggagagtgccttctagtgcgaggcgaggtggctcctgacgctaagagcttcgtgctgaacctgggcaaagacagcaacaacctgtgcctgcacttcaaccctcgctataacgcccacggcgacgccaacaccatcgtgtgcaacagcaaggacggcggggcctgggggaccgagcagcgggaggctgactttcccttccagcctggaagtgttgcagaggtgtgcatcaccttcgaccaggccaacctgaccgtcaagctgtcagatggatactaattcaagttccccaaccgcctcaacctggaggccatcaactacatggcagctgacggtgacttcaag

SEQ ID NO: 24612 - DNA, 478 bp, Homo sapiens
  misc_feature (1)...(478): n = A,T,C or G
gtggggtnnaattgaccgccttgaggaactctgcacgagcctcacccagcctaggagggaggtgcattcagggtagatttgcctctcattcaaagttctggggctttgggtggaaaacagccagctttggcgctgttggggagactcctccagaccaggaaccccagaaggagacagagcctgccacatcctcccacgccaggccctgggccagggtgattggactgagaatttggccacaaccaaattgatgctggctggaaccagaggccagaaagcctggccttgtccccatgtgggagccctgtcctcagccctcttgtccccttgagctcagtgaattcccaccaggtgcccacagctcctggacttcaaattctatatattgagagagttggagagtatatcagagatatttttggaaaggagttggtctatgcaatgtcagtttggaatcttcttgaaagtttaatggttt

SEQ ID NO: 24613 - DNA, 471 bp, Homo sapiens
  misc_feature (1)...(471): n = A,T,C or G
ccttggacccgcgctgcagagattcgacaccagctgcaagctgcttgcccaagtcacacagctagtgaagaccagagcagtttcatctggttgtgactctaagctcagtgctctctccactaccccacaccagccttggtgccaccaaaagtgctccccaaaaggaaggagaatgggatttttcttttgaggcatgcacatctggaattaaggtcaaactaattctcacatccctctaaactactgttaggaacagcagtgttctcacagtgtggggcagccgtccttctaatgaagacaatgatattgacactgtccctctttggcagttgcattagtaactttgaaaggtatatgactgagcgtagcatacaggttaacctgcagaaacagtacttaggtaattgtagggcgaggattataaatgaaatttgcaaaatcacttagcagcaacctgagacattatcaacn

SEQ ID NO: 24614 - DNA, 470 bp, Homo sapiens
  misc_feature (1)...(470): n = A,T,C or G
ntttgaccctctccgccgcgctgcaggaattcgacacgagcagaatcgctgcccggcgtctggaggtccaattgcccgccctgttcttgctgacatgaaacccatagctatcaattaaacgctgtcaaacgctgtccagactggcaaatggaaatatggtcaacatgcatgcttctgtcaaaaacaaggttctggaaacaactgggcatatggttactctgttcatggacccaggcatgaagaatctataatgaacataatccggaaggaagtggagaaatgtgactctttcagtggtttcttcatcataatgagtatggctgggggcacaggatcaggattaggagctttcgttacacagaatttagaagatcagtactcaaactcattgaaaatgaatcagattatttggccttatggaactggtgaggttattgttcaaaactacaactccattttgacactttctc

SEQ ID NO: 24615 - DNA, 467 bp, Homo sapiens
  misc_feature (1)...(467): n = A,T,C or G
ntttgcaccgtgctgcaggaattcggcacgagcagatcccacccccagccccactggttgccaaacactaaatctgccgacacccatctgccccacctcctgccatggccatgaaccgcgacccccactaaatttctagattggggatagggagaaagggaggcccaggaaggtctcccctgattttttttcatagtaatttttttccccagagtttgaattttttggtcttctcctggttttttggcaaattaggggggcccggggctcaagtgcgggaagggggctggcccgaggatcccatggctctcacaccatgtttttgtacagaactgatggttgaatctttgttctcttgaaataaacagaagaaaatgaaaaaaaaaaaaaaaaaaaaaaacctcgggggggggccgggccccactttccccctatagggaggggaataacaatccaggggccgcggt

SEQ ID NO: 24616 - DNA, 330 bp, Homo sapiens
  misc_feature (1)...(330): n = A,T,C or G
tggggggtnnnnagggagaaaaatttgatnnccctnattgacccacgctgcaggaattcggcacgagggcccaccagggactgcagctgcaccagcaggtgccatcacgcttgtgatgtggtggccgtcacgctttcatgaccactgggcctgctagtctgtcagggccttggcccaggggtcagcagagcttcagaggttgccccacctgagcccccacccgggagcagtgtcctgtgctttctgcatgcttagagcatgttcttggaacatggaattttataagctgaataaagtttttgacttcctttaaaaaaaaaaaaaaaaaaa

SEQ ID NO: 24617 - DNA, 503 bp, Homo sapiens
  misc_feature (1)...(503): n = A,T,C or G
aggcnnnnnncaattgacaatcgaccggctgtagcatttttaatgataaaccatgacaaaggattttacgtttataaaattatgacagaagccatgtgcattatcctttacggacgcagcctagctctacagcaatcatcctgaaataagcatacctaatttcaagcaattgttgtattttcatgactgaccttaactgtactttttctagcaagagatgctttattctgcagcatgaacagatttaaaatggctggtgttaaatatcagctcctaataagatgtggactgaaaacactatcacaacactatgagaagcccctagcactggttaacgctttcctagcctagtctctggatttggggagcttgtcttcagtggctgagactgtgagctgggagcagttctctcagctggagagactcgggatggggtaacctggggaccagtctagcccctgcaccctcttccctgcctctgctccttgggagcgggtggagaa

SEQ ID NO: 24618 - DNA, 467 bp, Homo sapiens
  misc_feature (1)...(467): n = A,T,C or G
ntagaccgcctgcaggagagccactgaggacgtctggaccatgggtgcctatgagacccattctcgtgtttccctgttgtaccttttgcctgcagggcagagagatctggtttctaacaaattcccagtaggatgtcatgtaagttccttccccctcttagagattgaaggctgtaagagtccagatggtggagccaggctgtctgggttcaaatgccatctttgacacttgcaagctaaatgacattactcaaattaatcgttctgcacttcagcttccttgtctatcaaataaaaagaatagtacctgcccaaaaaaaaaaaaaaaaaactcgggggggggcccggtcccaaattccccctatgcggattcgttttaaaataaatgggccggggtttaccaccggtgggacgggaaaaaccgggctccttttacaatatatttctttgtgcaaaagactcttttt

SEQ ID NO: 24619 - DNA, 478 bp, Homo sapiens
  misc_feature (1)...(478): n = A,T,C or G
aatgacncccctgcggaattcttcgcgagcggcaacagagcaagactgcgtctcagaaaaacaaaacagaacaaaacaaaaatccatgaacaagtggacctgcccagttcaaatcattgttgttcaagggtcaactgtatattattttcgctggaaggtttgaaattccagaaatatgcttggaaatccccgcttgaaatctccttggttggaaaccagtccagtgggtgactggcccagaatgatgcttctcctcggtggaccccctgggctgagcagcctgtgttcctgcctcaactcccctgaaccctactgaactttctacacacatgtgggcannggnaagatactggcatttggaagggcacttgggaaattcagagaagtacccattattaagataaatgatgttntatcaatgaagcagacttttcatttctttctattgatcttcatgttttcacatcttgagatgcaa

SEQ ID NO: 24620 - DNA, 486 bp, Homo sapiens
  misc_feature (1)...(486): n = A,T,C or G
agtgtgccnnagtagaaatctagctcctcctacgttaccntangacacaccnganatctaccgggacctcatcagccacgatgagatgttctccgacatctacaagatccgggagatcgcggacgggttgtgcctggaggtggaggggaagatggtcagtaggacagaaggtaacattgatgactcgctcattggtggaaatgcctccgctgaaggccccgatggcgaacgtaccgaaagcacagtaatcactggtgtcgatattgtcatgaaccatcacctgcaggaaacaagtttcacaaaagaagcctacaagaagtacatcaaagattacatgaaatcaatcaaagggaaacttgaagaacagagaccagaaagagtgaaaccttttatgacaggggctgcagaacaaatcaagcacatacttgctaatttcaaaaactaccagctctttattggtgaaaacatgaatccagatggcatggt

SEQ ID NO: 24621 - DNA, 479 bp, Homo sapiens
  misc_feature (1)...(479): n = A,T,C or G
gtgggctnnnattgaccgtctggaggaactctgcacgagtaaaatataaatttttatttagaattaaagcagatacttcagtatcacaaacacaatattaaacttcaagaaatacaccgctaattcggagtgagcgtttatttgcacgattacaacatgcggacaaacccaggcgagatgagcgagtctacggttcctacccacccggctgacaaggggtggccccaggggccggatgcccagccccgaggcggccctactcctcctcctctcccgaagactctctctcgaacgtgtaggccatgaagcaagcgtcgggtctcttggggacaaggggatgccccggtctcacaatctcaaagcccaaaaagctgaaggttcggagcaaggcggctctgtcctcgcggttcttgtggaagcaaatgaagacatggtcggctcgcagctgctcctcagcgaactccaggagaactgcaaan

SEQ ID NO: 24622 - DNA, 495 bp, Homo sapiens
  misc_feature (1)...(495): n = A,T,C or G
ntttagacccgcgctgcaggaatttggcacgcgcctactcctaccctcatctcatccttaaggcccagaggtagcttggacaagccctccttttcataatcatttgggaggcatggctgtaattctttagctttctccacttctgtctcccacatatactaaaattcttaggtactaggctgtgtgtcttgggatcttaagatcaatgaacctttccccaatatctagtctttgcaaattctagtagaagatttccacagtgaaatcagtgagccagaccaactctacatctcctgcctaacctactgcctaagtcattanggctgagggctcggctgtaggggcttccttaagctgagagtgcccccaggctgacatctgtgttggcttttgttcagaaccattactctggcacatgctcaatggtatattgcagggaggagaggagtagatttagatttgagtanatgccaatcactttacacatgaaggtgg

SEQ ID NO: 24623 - DNA, 545 bp, Homo sapiens
  misc_feature (1)...(545): n = A,T,C or G
aggaattcgcggctgggattcgcacgagtgccatactcatctaaatttctgcatttcttgccaagataattgctatcaactcctaataattttttctagttctgcacattcccctgatgtattctcaatgtagcagccagagagagcctgcaaaagtgcaaatttgatcatgctgttcttctgctccagatttttcagtggcttctcaactcattcagagtaaggccaaaatccttacgaagtcctataatcatttgaatgatctgtttttgtctgcctgtctgtcctaaaacacacctggctcatcccatgctagcaacattggcctttgtgtcacttcttgaatatgccaagcattgcctcagggacttcatacttgtgtcctttcttcttggaatgctctttctcagatatcaacactaaacactaccactcctcanatatcactaaatcactaaatcaatcctgccttatttaaagagaaatctcacttctctctgcagttttaaattttttttagattntattttaggttcagaggtata

SEQ ID NO: 24624 - DNA, 480 bp, Homo sapiens
  misc_feature (1)...(480): n = A,T,C or G
gatactaaaaactgaaagcctcgctgatgccactagccaccctctgtccttgcagtggaactagaggaggatggaagagcccgacctctggtcctgcacatgtccaccctcctgcggatgatcccaaccatggcagaggacaaagagagagtcagcactggaaccaagtttgccctcaagctctggctgcaacatctgggcagaacacccccaccgtgtaaaagtgcagcttacctggacccagggccagcaaaggaagaatggaacatggaccctcttcccccaaaccaggggtctggaaagtgaagtgtaaaatcccctccctagcccatctccatgacactcacagaacattcacaacctttattatgggtgagagcttcactacaactttagaaataaaaagtaaaattacaacataggtcctaggccttggcgagcctgaaaaagaagattgggaaggagggcacagggtccttn

SEQ ID NO: 24625 - DNA, 491 bp, Homo sapiens
  misc_feature (1)...(491): n = A,T,C or G
atgtgtccnnnagttanaaannttgggacctgcggctgnngcctncgnaanaacaccgnagntgngngacgctattctgcttgcatgtcttctggttgggatgtggagttgttgctggactctcaggcgaagctgaagtcattgaagtgtgtgaagctctgtgcttgcatgagggcaagcaaggaatggctgtgcctgaggctgctctgggaaactccttgccccttgacctcttttgagagcattcacgtggtcttcttgctcatccccttataaatgtgctttgcctgcctcagcctcatggtcagagcagtggagactggagccctgtttgcacgttctggttgttcggagaaagcctaggttctgggctcaggtccagatgcagcggggattctgttctctgactgtggcgaccttgctttggttcttgttgaagtgaaccaagcccggccaccacgcatggcatgctgtgcttggctccccataag

SEQ ID NO: 24626 - DNA, 485 bp, Homo sapiens
  misc_feature (1)...(485): n = A,T,C or G
gaggggccntttgaacncccccnatcgcccgcctgcggttttttttcctcctttactcagacatagagcatcaaaatatcacgagtaaagccaaaccccagcttttcactggggctgatatcttcctccccatggcccactgccccctcatattccccagcacttggactgtgtcacatgggtattgattgtatacttgttgtcttggcctcatgcaaaaaggcctgggtctagatctagtcagatgagttttttttagagcatgttgatgatacaacacctgtttaaatgtctgccttatatgttatttggtcccactgttaataatagatttattactatgtatatttactattgaagatgggaatgtgaaaaaaaaaaaaaaaaaaaaaactcgggggggggcccggcccccaattccccttatagggagccgaataacaattcatgggccgccgtttaacaacgcggggaaggtgaaaaac

SEQ ID NO: 24627 - DNA, 551 bp, Homo sapiens
  misc_feature (1)...(551): n = A,T,C or G
aggagcttgcacgcctcgacggctgcangaattcggcacgagaatatgcttaatctgaggatgagacagggttttttcatttttgtgggggctagaaaaaacataaaatgaggcagttaaataataatagttaatgaaggtgtgctacagaaaataatctggtgttcttgctaactttgcccttcactgttgcttaattgtgaacagccaaaagctatatgttatggcttattgtgtgaaggtaactaagaagtggtgttccatgacttcagagtacatccatgcggagtccattatttgagtttgacatttaataactttgctggaaaatctgtaaaaaagaaaaacaagtttgctagtgactaagccccgcatatgtgagtgaaagtacttcatgcacgctgcctcctggtaacagctatgcacggagggaggacccacactgctacacttctgatcccctttggttttactacccaaatctaaatagatacttttgataatagataactgctcttttactaagacatagtctctacctatagaaatgc

SEQ ID NO: 24628 - DNA, 489 bp, Homo sapiens
  misc_feature (1)...(489): n = A,T,C or G
ggagtncccnnnaggagntnnnnaattgacccgcgctgctggaattccgtacgaggcttatggacctcggccagctcagaggggtgcccgcataccgagtccacgtataaagagtcggatcactgctcactggtgatgcctttacacatgtgtgactgggagaaaggacaggaagatttattgtacagacctaagaaaccctgacattcgggtgctaatttgtgaagaaaaagcaccagttctcaagatggagcttgatagatcagctgatcctcctcctgcaatttgggttgcaacaactaagtctacagtaaataaatggactttgaaaggaattcataattttagagcctctggagattatgacaatgactgtacaaatcctataacacctctttgtacacaacctgaccaggttattaaagggggtgctagtattattcagtgccacattcttaatgataagagacatatattaaccaaagatac

SEQ ID NO: 24629 - DNA, 492 bp, Homo sapiens
  misc_feature (1)...(492): n = A,T,C or G
agaggncccnnnaggagannannatagatncccctgtagacccgcgctgcaggaattcggcacgagggaagctgctggaaggcgaggagagcaggatttctctgcctcttccaaacttttcctccctgaacctgaggggtaagcattttatttccctttaggaaaaacgtcagctgcttgtaaccactgtgtttatgtcaaagcattcattttttttaggatatctgaaaaaatgccatataagagaaaactctataaaacatctataattttcgaacccaagtacactcttgcattctatgctttaagttaaatgcaaactcctttttccttcttcctgctgcaagtactatctcatcctgatgctcaagagtgtcagggcctgggtttccaaacagagactaccctaaaattatttggggagtagtactttacacaattgcctctcccccacaaatcataattgtttcagtaaaatggttacttggtttt

SEQ ID NO: 24630 - DNA, 487 bp, Homo sapiens
  misc_feature (1)...(487): n = A,T,C or G
gtggacgtnagccacaattgaccgcccttatagatcgcatgangagttccgcacgagggagttctcttatggccctgggggccgcatgactgtccaggaatacagtctccaggtgagatcttacttgaaacactcgtttgatatagcacagctataatggcatctacttgggctatccaggcccacatggaccaggatgaacctttggaagtaaagatagaggaagagaaatataccaccagacaggattgggacctgcgtaaaaacaacacccatagcagagaggtcttccgtcagtacttcagacagttctgctaccaggagacatctggtccccgtgaggctttgagccgactccgagaactttgccatcagtggctgaggccagagacccacaccaaagaacagattctggagctgctggtgctggagcagttcctgaccatcctacctgaggagctccaggcctgggtgcaggagcagcatc

SEQ ID NO: 24631 - DNA, 489 bp, Homo sapiens
  misc_feature (1)...(489): n = A,T,C or G
ngcgcggantttaacctgatgactgagaacntgcggagcnccgngctgggattacaggcatgagacactgggcacagccctaatagcttatttttaaagctatatcaaaatgtcatgcacctgaacatttgaagtaacctctctgatagtacggatatttatcccctcaaaatctcatgttaaaatgtaatcttcagtgttggaggtggggcaaggtgtgaggtgttaggatcatgggggtggatccctcatgaatggcttggtgtcctcccccatggtaatgagttcactcaagagctggttgtttaaaaggtgacgtggacctaatccctgttggactgaacaaaaggggacgaacacagcaataaagataaagaccaaagagtatatttggaagaaggggtcagggggctccttgcttctagtgaaaaagggccctgagctttagtgccctttgtatttattgggtaaaggagatagggagaaggg

SEQ ID NO: 24632 - DNA, 456 bp, Homo sapiens
actgaccgcctgtggaattcgcacgagctcatccatcaagtgctggaggcccctggtgtctacgtgtttggagaactgctggacatgcccaatgttagagagctggctgagagtgactttgcctctaccttccggctgctcacagtgtttgcttatgggacatacgctgactacttagctgaagcccggaatcttcctccactaacagaggctcagaagaataagcttcgacacctctcagttgtcaccctggctgctaaagtaaagtgtatcccatatgcagcgttgctggaggctcttgccctgcgtaatgtgcggcagctggaagaccttgtgattgaggctgtgtatgctgacgtgcttcgtggctccctggaccagcgcaaccagcggctcgaggttgactacagcatcgggcgggacatccagcgccaggacctcagtgccattgcccga

SEQ ID NO: 24633 - DNA, 459 bp, Homo sapiens
  misc_feature (1)...(459): n = A,T,C or G
natagaccgcgttgaggaactctgcacgagcctttctcctgccagagggccctgtacagaagtgtgatgttggagaattttgggaacctgactgctttggggtacccagttcccaaacctgcactgatctcacttttggagagaggggacatggcttggggcctggaagcacaggatgatcccccagcagagaggaccaaaaacgtctgtaaagatgttgagaccaacattgacagtgagtccacattaatccagggaatttctgaagaaagagatgggatgatgtcacatggtcagctgaagagtgtccctcagagaactgacttcccagaaacacgtaatgtggaaaagcaccaggacatccccacagtgaaaaatatccaaggaaaggttccaagaatcccctgtgcaaggaaacctttcatatgtgaggagtgtgggaaatccttcagctacttt

SEQ ID NO: 24634 - DNA, 500 bp, Homo sapiens
  misc_feature (1)...(500): n = A,T,C or G
gcccggggccnnnnaaaattgannttctgaccggccgtacgaattcggcacgagctgagagtgaactcagctgtcatctgcagcctctgcctccagcccggcagctctggggaggcatccgtgtgccggccctgcagtgcctgcccacggtcaggcattgaaaactaagcccaaccactctgcactttgtttcccactcccattagccctgggccacctcctccagttcttcctcttttactaattagttggtcagtttggagagttgactggcaccatggagggtaggcaggtgggggctgggtgggggactgcccacaggagcatgtacatatggaaaaacagaacaacagtggactttttatgatataataaatgtcttagtaccagcaaaaaaaaaaaaaaaaaaaaactcgggggggggccgggcccccaattccccctatagggagccgaataacaattcacgggccgcggtttaacaacgtcgggacggggga

SEQ ID NO: 24635 - DNA, 485 bp, Homo sapiens
  misc_feature (1)...(485): n = A,T,C or G
cattgcgacccctcgcaccgccctgcaggaattcggcacgagctacactgaaggctccagatacatttgctctttgagttctaccatggtttttagagtttttcttttccctcacttttatctgtcatttatctctcccattactgtgcctacctctaggaagctttctctaatttgccctggggttgggaaattgtgtaactgcatactatatgttgaataagagtagagaggatttgaatgaggttttgagaggctgttctagcaataaaaatgaatgtactttgctacattgacttggtgacattatttcagtggctcaactctcttcccctaacttacttctttatcctcatctgcagttgtcatatttgtgaactcgcggcaagtgagatattgctagaaataatttctcttgatcaataaaccattgtctcccccagctgtgttagtgtttttgtgtattcagttctataatgtgaaan

SEQ ID NO: 24636 - DNA, 462 bp, Homo sapiens
  misc_feature (1)...(462): n = A,T,C or G
natagaccccattgaccccgctgcaggaattcggcacgaggatggctggagctattcctctggtcacagctggctcccagaagaagcttcaaatggcagaaaagcttggagcagctgctggattcaattacaaaaaagaggatttctctgaagcaacgctgaaattcaccaaaggtgctggagttaatcttattctagactgcataggcggatcctactgggagaagaacgtcaactgcctggctcttgatggtcgatgggttctctatggtctgatgggaggaggtgacatcaatgggcccctgttttcaaagctactttttaagcgaggaagtctgatcaccagtttgctgaggtctagggacaataagtacaagcaaatgctggtgaatgctttcacggagcaaattctgcctcacttctccacggagggcccccaacgtctgctgccggttctggaca

SEQ ID NO: 24637 - DNA, 462 bp, Homo sapiens
  misc_feature (1)...(462): n = A,T,C or G
nattgacccgcgtttgaagaactctgcacgaggctggaaaggacagtgggaaggccaaggctaaggcagtatctcgctcacagagagctgggctacagtttcctgtgggccgcatccacagacacttgaagactcgcaccacaagccatggaagggtgggtgccactgctgccgtgtacagtgctgcgattctggagtacctcactgcagaggtgctggagctggcaggtaatgcttctaaggatctcaaagtaaagcgtatcactccgcgtcacttgcagcttgcaatccgtggtgatgaagagttggattctcttatcaaggctaccatagctgggggtggtgtgatccctcacatccacaaatctctgattggaaagaagggacagcagaaaactgcttagagggatgctttaaccaaccctcttcctccccgtcattgtactgtaactgggacagaan

SEQ ID NO: 24638 - DNA, 485 bp, Homo sapiens
  misc_feature (1)...(485): n = A,T,C or G
ggagtcccnnnagtagaanaattagatncccctgttgacccgcgctgcaggaattcggcacgaggttttctcctatttctaaaaatgttctcttctttcctaagtgacagttttgaagtattggataaccaagagctcaggtcacacagaccttggagccccatctttgcttgcagcttagctttgagatactaagcaagcgagggacttcactcttgagcctgttttttcctcatctgtaaagtggggatagtggtacggcctacctcatagggttgtaatgagcactaaatgtgaagtgcttggcacagtgcctggcacatggtgagccacagctactgtgagtttctgtttatcccccttttttttttttaagccacttgttattctttgagaatttgttgtaacttcttcaggataacacctgagtccacaggctgagcagctgtggcccaaacagaactgctccgcctggctgttccaca

SEQ ID NO: 24639 - DNA, 501 bp, Homo sapiens
  misc_feature (1)...(501): n = A,T,C or G
ggatgtcccaggatgccnctaagaaaggcctcagtattgctagcgggaannncgcacgagagccagtgctctaagacctcagcttttatctcagaaccccatgggttccagaccaagagtacaggaaatcaaattgttgtcctgtctgtctatagcttggaacagggagctttgattactgactccggttccacacactgtaagatcaaaaaaccatctccacatttgaaagagatgtaaggtgtattcatagggatggtggctcaacaaatcaagcaaactggaatcaaggggagggggaagggaatgaaatggaaagggaggctgattcccttcccctgacttaccactaatttactaggctacctactttcatgagtaacctctcacagctacccagcacatgccacaatcctatgctcttgccttcttttatctgcactgtgtgaagggactcttttaaataaatgagcaagtgtcctaagctatgtcatccaaaga

SEQ ID NO: 24640 - DNA, 502 bp, Homo sapiens
  misc_feature (1)...(502): n = A,T,C or G
gacgccgnnnnnnttttnacattgatngcatgaagaactctgcacgagcccaaaagaagatcaaaggccagccctgcccaaaaaggctttttaccttcagtcttgtgaactcctatggaacagctgacataaattcacttgcagctgatggaaaactacttaaactcaactctcgatctacactggccatggattgggacagtgaaactcggagactttactatgatgagcaagaatctgaggcctacgagaagcatggacaccaactaatgctgactccacgatcctgccaccctgtagcgccagtgtaatcccccaggagaacatctttgacactctgcagactgctagtgttctgtctaaaaaccagacaaggaaatacccttcttttatgagcagaaggaaacaaaaaaaaaaaaaaaaacctcgggggggggcccggaccccaattccccctatagggagtggtataacaatccactggccgcggtttaacaacgtc

SEQ ID NO: 24641 - DNA, 405 bp, Homo sapiens
  misc_feature (1)...(405): n = A,T,C or G
ggagtccccnnnagtagnnnnnttctgatncccctctctgaccgcgctgcaggaattcggcacgagcaggaatgaatcaatttcagcataaacaagcacaaaaatttagtctgctggctgactggaagcaaaaaagtcaagatggaatatgatgaattccaacacaatggggcaccaaggcctttaggcctctctttttattttgctttggttttgtttgtttttctttagagacatgctctttctcatgggacttgaagtggactcatctttgtgcagtgctggttttgccatactcatttcaagtattatagacatatgtaatggtgaaaatatatgaactgtggcctttttcattcttgttacttgtgatgcaattaagtgaagataaaaaaaaaaaaaaaa

SEQ ID NO: 24642 - DNA, 511 bp, Homo sapiens
  misc_feature (1)...(511): n = A,T,C or G
cgcggggtnnnnatttgaccttgctcggctgtacgaattcggcacgagcagacctgatgaagctgaggactccagcgagtttgcgagtttctttccagactttatttggactgttcgggattttaccctggagctaaagttagatggaaaccccatcacagaagatgagtacctggagaatgccttgaagctgattccaggcaagaatcccaaaattcaaaattcaaacatgcctagagagtgtatcaggcatttcttccgaaaacggaagtgctttgtctttgaccggcctacaaatgacaagcaatatttaaatcatatggacgaagtgccagaagaaaatctggaaaggcatttccttatgcaatcagacaacttctgttcttatatcttcacccatgcaaagaccaagaccctgagagagggaatcattgtcactggaaagcggctggggactctggtggtgacttatgtagatgccatcaacagtggagcagtaccttgtctggag

SEQ ID NO: 24643 - DNA, 502 bp, Homo sapiens
  misc_feature (1)...(502): n = A,T,C or G
agcgccgtggnngtgaaaactggagaactgcacgacntacgaaancgcacgagagaaggaagatggtaagggatactggagtgactggagtgaagaagcaagtgggatcacctatgaagatagaccatctaaagcaccaagtttctggtataaaatagatccatcccatactcaaggctacagaactgtacaactcgtgtggaagacattgcctccttttgaagccaatggaaaaatcttggattatgaagtgactctcacaagatggaaatcacatttacaaaattacacagttaatgccacaaaactgacagtaaatctcacaaatgatcgctatctagcaaccctaacagtaagaaatcttgttggcaaatcagatgcagctgttttaactatccctgcctgtgactttcaagctactcaccctgtaatggatcttaaagcattccccaaagataacatgctttgggtggaatggactactccaagggaatctgtaaan

SEQ ID NO: 24644 - DNA, 338 bp, Homo sapiens
  misc_feature (1)...(338): n = A,T,C or G
agggggccnnnaggagnnnnttatgcccccctgttgaattcgcacgagccggagccagagccaaaggccaggacagaaacgccgagaggaaccaagatgacccttgttggggcattgagaatatcatgagtgccacggggaaggggagtagggatgtcttttcccccccagcagtgatgagtggggctagctgaagcccattggtttccacgatttcaattggctgagaaggcagagagctagctcctccctttctttctttttccacctgagacttgtttataaaaaacaaaacaataaaaagagtctgatcagaaaaaaaaaaaaaaaaaactggg

SEQ ID NO: 24645 - DNA, 390 bp, Homo sapiens
  misc_feature (1)...(390): n = A,T,C or G
ggagggcncnnnaggaaggggnntttgatnngcctgattgaccnccgctgcaggaattcggcacgaggttcctggcagccccaggcttgctgtgggaaggggccgtgccgtcactttctcatcattccatggggtgtgtctgcctgggccaactctgcatggagaggccagggctggggacagtccgcactctgccaccctcctgccccttccacccaccccagctctatgtctgtgtctgaattgtggatcgtgcagccatggttattgtggaactgtggaacctgcagccatagttatttgactatatcttgaccgagggcttgcagtgcaaagccaggccagtgttgcgcattacttacaataaaagggatcatttataaaaaaaaa

SEQ ID NO: 24646 - DNA, 495 bp, Homo sapiens
  misc_feature (1)...(495): n = A,T,C or G
ngggttctcagnaggttagaaatttcatttaccctcctacgtatagcantagcaaaggccttcacccctggatgttccaagacacacctgccagggtttgtggagcaggctgaggctctgaaggccaagggagtccaggtggtggcctgtctgagtgttaatgatgcctttgtgactggcgagtggggccgagcccacaaggcggaaggcaaggttcggctcctggctgatcccactggggcctttgggaaggagacagacttattactagatgattcgctggtgtccatctttgggaatcgacgtctcaagaggttctccatggtggtacaggatggcatagtgaaggccctgaatgtggaaccagatggcacaggcctcacctgcagcctggcacccaatatcatctcacagctctgaggccctgggccagattacttcctccacccctccctatctcacctgcccagccctgtgctggggccctgcaattgg

SEQ ID NO: 24647 - DNA, 485 bp, Homo sapiens
  misc_feature (1)...(485): n = A,T,C or G
attgacccgcgctgcaagaannnctttggacncccgctgcaggaattcggcacgagaggacacacacacatctcctccatgttcctgccacagggccccttccttaagtaatgacttatctccttccagttgccacctgttggagccaagaatgtattagtttgtggtgacactgggttagctcagcatggatttcccttatccgatgatttttctacatttacttggccaatttggggaacagacctccactgtgattccatactctctctttgctttcactatcccagggatgggaggcggagggtagagatgaactcactgagcagccagagccaaatgcaatcnnnnncaatcttataaggaaggagggggagcccaggtatgagaaagaaaaaaccactaagaaaatacctccctgggaggatgagctggggccctttttcttttgctggatggntcctttatgcagcttggccctgtct

SEQ ID NO: 24648 - DNA, 491 bp, Homo sapiens
cgcgccccccattgaccgcctgcattagtacggcacgagcaaagcttcaggcctgaccacagctggccctctaggttgtttggtgttgcgggcacagaggtgacagtgtctctgcaggcactcaggaagctgttctaccttggaactccatgcaactatccgtctcgaataccagggcagggcaaggcggactgatgccgtccaaccaattatctcacttgttttgtgttctgtcatccttgtttttttttaaaaaatacactcccctcccccaccgccacacaccttacagttcaaaaggttggattatttgtattttattttcaaattccctattccaaaaatagtgccgggtggcccaaagataacatctgaagggaaagaatgagaaagctcccatggaagcaggggatggggcgctgaggcagggttgttagaggactgtgtcatcctcaccaagctcattacatctgccagggcctgcctcaaga

SEQ ID NO: 24649 - DNA, 492 bp, Homo sapiens
  misc_feature (1)...(492): n = A,T,C or G
attgcccgcctgcangaatttggcacgacaagaagtgaaaatggcctgttcctgccttaactgatgacattaccttgtgaaattccttctcctggctcatcctggctcaaaagctcccccactaagcaacttgtgacacccacctctgcccgccagagaacaaccccctttgactgtaattttcctttaccaacccaaatcctgtaaaatggtcccaaccctatctcccttcactgactgtcttttcggactcagccagcctgcacccaggtgattaaaaagctttattgctcaaaaaaaaaaaaaaaaaaaaaaaaaacccttgggggggggcccgggccccaattcccccttaaggggggggaaaaaaaattccctggccggggttttaaaaaggcgggaaggggaaaaaaacccccctccncttnncttccccnctcccnnttccttcttgctggttcctttccttcccctcctcnctnttactacttg

SEQ ID NO: 24650 - DNA, 511 bp, Homo sapiens
  misc_feature (1)...(511): n = A,T,C or G
cgcggggttnnnaattcgccgtgctgtatgcattcggcacgagcgactatcgcgtccacctcgcatgtgcgccagaactaccaccaggactcataggacgccatcaaccggcagatcaacctggagctctacgcctcctacggtgacctgtccatgtcttactactttgaccgcgatgatgtggctttgaagaactttgccaaatactttcttcaccaatctcatgaggagagggaacatgctgagaaactgatgaagctgcagaaccaacgaggtggccgaatcttccttcaggatatcaagaaaccagactgtgatgactgggagagcgggctgaatgcaatggagtgtgcattacatttggaaaaaaatgtgaatcagtcactactggaactgcacaaactggccactgacaaaaatgacccccatttgtgtgacttcattgagacacattacctgaatgagcaggtgaaagccatcatagaattgggtgaccacgtgaccaacttgn

SEQ ID NO: 24651 - DNA, 498 bp, Homo sapiens
  misc_feature (1)...(498): n = A,T,C or G
agcggcgggnnntttaaaattgatgcatggagaacntgcacgaggagcagagctgcgctgcgggcgtcctgggaagggagatccggagcgaatagggggcttcgcctctggcccagccctcccgctgatcccccagccagcggtccgcaacccttgccgcatccacgaaactttgcccatagcagcgggcgggcactttgcactggaacttacaacacccgagcaaggacgcgactctcccgacgcggggaggctattctgcccatttggggacacttccccgccgctgccaggacccgcttctctgaaaggctctccttgcagctgcttagacgctggatttttttcgggtagtggaaaaccagcctcccgcgacgatgcccctcaacgttagcttcaccaacaggaactatgacctcgactacgactcggaaggactatcctgctgccaagagggtcaagttggacagtgtcagagtcctgagacagatcagcaan

SEQ ID NO: 24652 - DNA, 539 bp, Homo sapiens
  misc_feature (1)...(539): n = A,T,C or G
ggggaatganaacttcgccggctgcaggaattcggcacgagagaaggttcccctagcacactcaaacaagacccccttgtcttctggtgtctttgaaatgtcaagataacagccactgggtgtctgcggaaccacctctccagccctaaagcaaatctgtctcatgttgccttataaaagagaagctcataatgaatgtttagcctttatcagttacatccaatcttggaataagtcatagagaataacaagtctgggactgacgtaggaaaaacagtagtctgtttaagttgagaggaggaggaggtggacgagagaagggaggagagggaagaactgaaatgtctcctcacccagggtggttattgggcccaacttgggatggggttgagtacgaaggttaaaaaacatatactttggtattatattgggcattgtaatagcagntggaaaatatgggggggaaagggatcatttgcttcctttcatgggggtaatgggtgcctgatctatagccgctaaatgaaggctgtccaccn

SEQ ID NO: 24653 - DNA, 474 bp, Homo sapiens
attagaccggcttcaggaatccggcacgagttaaagcaatacttgagggaagtttgtatcctaaatggatatattagtttaaaacagaaaggggagaggagatgaacgtcagtgatctatgcttctatctcaaaaagctagaaaaagaacaaatcaaaaccacactacattgagatatttttcacccatcacactggcaaaaattcagaagttttataagactaaaacctcttagactgtggggaaacacactgccatacattgctaatgaaaatgtgaaatgggccgggcacagtagctcacgcctgtaatcttaccactttgggaagccaaggcaggtggatcacttgaggtcaggagttctaaaccagcctggctaacatggtgaaaccccatcttcattaaaaataaaaaaataaaaataattagctaggcttggtggcaagcacctgtagtcccagctacttgagaggt

SEQ ID NO: 24654 - DNA, 533 bp, Homo sapiens
  misc_feature (1)...(533): n = A,T,C or G
aggagattcgccggctgcagattcggcacgagaatctttctgagacaggaaagagggtgcattcgtttggtggagaataccttgtctctgtgtgttccatcaatgccatgcacccaactcggtatattttggctggaggtaattccagcgggaagatacatgtttttatgaatgaaaaaagctgctgagtttttggtttaggaacatcaatttgttcaaattgaccactgtctaaggagcctagtaatcggcgtgccttagtgtgtttatgtggtaatgtgttacatttagcaattataacattgttttattaataagactataagaagagtgtacttttagtaagggagaagtcttggagggttgcttctgcaggacggngagggaatttgaggggaggctgagagtgccgtcaggactttttttttttttttttttggcaatgagtttctctcttgttgcccaaggtgtagggagctgcgatgatttggctacgggcactgtggtttctcgatgaacctaatttactgctg

SEQ ID NO: 24655 - DNA, 463 bp, Homo sapiens
  misc_feature (1)...(463): n = A,T,C or G
nttgacnatcgacgcctgagattcgcacgagctccgcctaggatgctcttgtttattctgggctcagaccctcctcttgtacgtctcatcacagctggtagagacccacgagtgcctgattgtcccacaggggtggcgcacagctctgggaccactcagaagatgggatgtgtgggtggaggatgccttgtctcggtcagctcattcctgcctccttcctgagccagttcagggcctgggggagagccagcttggggtaggaagttaataatactgttaatttgggttgttgttggatttactttgctagattttctctttcaccacgtgtgaactgtgggtgaggtttcaaagtagcttcaccccacgtggcttggttcccagggacagtcagggcctcgggggcccagctatgtacaacgaatctgtctgaggagaagacaataaagtcgctccgcagctg

SEQ ID NO: 24656 - DNA, 475 bp, Homo sapiens
atttggccctcgcctcggcctgcaggaattacccacgagggcacttatgtaccccctaaccagactatcgagtccccagataatgctctgcaatttcacctctatggcacggactacaatgtctacacacatagcttcttgtgctatgggaaggatcatgcactctggcataaactgggcaaggacattcaggttgcaagtaatgaaactctcagggacccatgctttcatcctggatataagaaggtagggaacgtaagagacctttacaagaccccctgcaccaggagatttgagatgactcttccattccagcagtttgaaatccagggtattggaaactatcatcaatgccatcaaagcatcctggagctcttcaacaccagttactgcccttactcccagtgtgccttcaatgggattttcttgccaccactccagggggattttggggcattttcagctttttactttg

SEQ ID NO: 24657 - DNA, 475 bp, Homo sapiens
  misc_feature (1)...(475): n = A,T,C or G
nttgcccccgctgcggaattcggtcgaggtcgtccgaatcagtggtgggaacgacaaacaaggtttccccatgaagcagggtgtcttgacccatggccgtgtccgcctgctactgagtaaggggcattcctgttacagaccaaggagaactggagaaagaaagagaaaatcagttcgtggttgcattgtggatgcaaatctgagcgttctcaacttggttattgtaaaaaaaggagagaaggatattcctggactgactgatactacagtgcctcgccgcctgggccccaaaagagctagcagaatccgcaaacttttcaatctctctaaagaanannnnnnccgccagtatgttgtaagaaagcccttaaataaagaaggtaagaaacctaggaccaaagcacccaagattcagcgtcttgttactccacgtgtcctgcagcacaaacggcggcgtattgctctgaagagcagc

SEQ ID NO: 24658 - DNA, 484 bp, Homo sapiens
  misc_feature (1)...(484): n = A,T,C or G
aggggctaaaggagtcncnnnnntttgaaaaaactgaccgcgctgcagaattcggcacgagaaaacttcttcagagtcagtttcaaaaatggatcccaaagtcagacccactcgctacaagccaatgacactttcaacaaacagcagtggcttaactgtattcgtcaagccaaagaaacagttttgtgtgctgccgggcaagctggggtgcttgactccgagggatcgttcctaaatcccaccaccgggagcagagagctacagggagaaacaaaacttgagcagatggaccaatcggacagtgagtcagactgtagtatggacacgagtgaggtcagcctcgactgtgagcgcatggaacagacagactcttcctgtggaaacagcaggcacggtgaaagtaacgtctgacagaagcatgtgcacttcgggaagcaggcctgcatcttacctgtacagtatttgcattccacagatggaacgg

SEQ ID NO: 24659 - DNA, 461 bp, Homo sapiens
  misc_feature (1)...(461): n = A,T,C or G
nattgaccngcgctgcaggaattcggcacgagcaggctacatatgtgcaacggcttaggattggcatgctctgatgagcacgaggtccacctgctgtgactaggagctcagcaccagtattaggtggttccatcagcttcagggtccagccttgggccagcgacatgcaggctcttcctctctgtaggattctaaggagcactttctgctgaggccgtgcctcttcaattatggcttatttcctatcttggctttgatgatagggttgcagattaggtctctcagcaacaggtcacaattgactagagcatccgcgggcagcagcncccggagttgctccactgtcttttgataagccattttttcttgttccagggtccggattaaagacttcattttggtctctctcgtcacaagattttccaaggttgattccaaggcctggattttagtatgagctc

SEQ ID NO: 24660 - DNA, 481 bp, Homo sapiens
  misc_feature (1)...(481): n = A,T,C or G
gtagaagtagatnggcttcgaccggctgtcagaattcggcacgagatagccccagagaggaagagagagaggaggtgggaggggaggggaggggaggggaaaataacacatgatagctatctttactgtttattgaacacctactgtgtgcaccttttacaagcagtgtctcattcacatctcacaatggcctatgaggttggtgctattccctgcccatttctgggatgaggaacctggcaccaaggtcacatatgtgcagtggggaagctgagatttgaacccaggctggctgactccaaagcctgtgctttgagactgttctggaggtggctgataagagtagagtttcaaaatctctttaaaccttcctaaagcaatgattgttttatgtttaaagctatttctagtatgaggaaaaaaagtgatttggcaatagacgtcaagagtctttaaaaaaaaaaaaaaaaaaaaaaaaaaa

SEQ ID NO: 24661 - DNA, 446 bp, Homo sapiens
  misc_feature (1)...(446): n = A,T,C or G
ntttgacctgcctgcacgaattcggcacgagctggtgttccccacatggaagcatatgccgtctctcccggccgcatgcggcaatttgacgacctcttccggggtgagacgggcaaggacagggagaagtctcattcgtggttgagcacaggctggtttaccatggtgatcgcggtggagttgtgtgaccacgtgcatgtctatggcatggtcccccccaactactgcaggtgagccctccttgccagcgccctcccaggacaacacccaggcactggccgcaggatggagctctaggggctggaaaccttggctgaaggtgcctttgagggcctctgcttcattgttttcaaactgttcttcagagatctaggcttcttcttctttcttaaggggccttccattccaagctcncgcagagtttatttattaataataactattag

SEQ ID NO: 24662 - DNA, 508 bp, Homo sapiens
  misc_feature (1)...(508): n = A,T,C or G
cgcggggtnnnnaattgagattgcatggctgtacgaantcggcacgagttttcctagtgcttgtcggatgcagagacaatgttgaaatcccctaaacacagttctcagtggcaaaacctaggaaggctcatgttcccagagaagggaccacatgagccttctcccatgcaaagcttcccccagcttaaatagttgataaggactaattgtttaatgagtttatttatctacagtaggttagggatcctgggttctgtttatatgaagttcttcccagcttgtgaattctagtacagcagccatgcagccaccttatttcatagatgccatctgtgtgtcctcttgactaccttctatttagaggaagaatgagagctttgtgtgtttaactgagcttatagtaggacttctttgcatatgtatggtactgaaaaatcttaatatacatctttaatcctttntaagttgcctttaaagagtcttgactacgttctttttcttgacagcc

SEQ ID NO: 24663 - DNA, 263 bp, Homo sapiens
  misc_feature (1)...(263): n = A,T,C or G
cgcgggtgnnnattgcccttcgtgcaggaattcggcacgaggatttggtggggctggggctgaatgatatgctttgtctctgtgtccccacccatatctcatcttgaactgtactcccataattcccatgtgttgtgggaggaacccgggggagaaaatttgaatcatggaggaggtgtcccccatactcttcttgtggttgtgaataaatctcatgagatctgatggtttcatcaggggtttcaaaaaaaaaaaaaaaaaaa

SEQ ID NO: 24664 - DNA, 477 bp, Homo sapiens
  misc_feature (1)...(477): n = A,T,C or G
cttganccctnnnnannnncttttgaccgccctgcggaattccgcacgagggcgggtgggctgcagctatggagggcgagcctccacctgtggaggagcggcggcggctgcaggaggagctgaacgagttcgtggagagcggctgccggacgttggaggaggtgaccgcgtccctgggctgggacctagatagtctggatcccggggaagaggaggcggcggaggatgaagttgtgatatgtccatacgattccaatcatcacatgcctaaatcatctttggcaaagcacatggcatcttgtagattgaggaaaatgggctataccaaagaagaagaggatgaaatgtataatcctgagtttttctatgaaaatgtgaagataccttcgattactttgaataaggactcacaattccagataattaaacaagctagaactgcagttgggaaagacagtgattgttataatcaaatan

SEQ ID NO: 24665 - DNA, 377 bp, Homo sapiens
  misc_feature (1)...(377): n = A,T,C or G
ntttgatccggctgcaggaattcggcacgagctgcggctagagtgggctaggccctggctttgcccgtcagatttgaacgaatgtgtgtcccttgagcccaaggagagcggcaggaggggtgggaccaggctgggaggacagagccagcagctgccatgccctcctgctccccccaccccagccctagccctttagcctttcaccctgtgctctggaaaggctaccaaatactggccaaggtcaggaggagcaaaaatgagccagcaccagcgccttggctttgtgttagcatttcctcctgaagtgttctgttggcaataaaatgcactttgactgttaaaaaaaaaaaaaaaaaaaactcggggggggcccggga

SEQ ID NO: 24666 - DNA, 490 bp, Homo sapiens
  misc_feature (1)...(490): n = A,T,C or G
ntttgatccgcgctgcaggaattcggcatgagccaccttctgacagctccagctaatgggactgccatgatgcttgacatacatcgccggaatgagcaacctttagatggggacagcatgatgtgcttggtctttgtccagccaaagctgacatttaaaaatccctcaatgcttctgtggattcacctgggcatcgacgacattagggaagcctttgtgaccacaagggcagggcttgtgccctgagtggcgaggtggtgacctgaggccagtgtgatgtggttggatctcagcgtgtactgaatgccagtctggccggcacactcgaacgctaagagaatggtccaatttgatgatcttatttctatttcgatcaagttttgactttttgtagatgaaaactaccagggaaaaggggaagcaggtacccaataaagtttagaaagatccagtctgtgaaacccttatagatgggctgaaagttaagtcg

SEQ ID NO: 24667 - DNA, 496 bp, Homo sapiens
  misc_feature (1)...(496): n = A,T,C or G
gtcagttgggaatnnngngngaggaannnanaattgacccgcctgcaggaattcggcacgagcacaaatcttttggtactaccatttggggaagccaagcaaggatagtaaattgaccagaacacagttgtgggaatttggtctgaagttagtgaaataaaactttaaagagtgtctgcctagtgttttgtgcttacatctttcggggggaagcctttgcaagaaaattgcatacaaggctttgtaacgatcaagtgctaatcgatggaaatgttaaggtagattaacatatatgcagttatattgatcacattggtccaaccagtccttttttgaagtaagggacaaggagtaagtattttcttttttaagtttctgccaaatgatttttgacgctttctggaatcaagtaatttaatagtatagcttaattctagacaatgtttaagttggtctacctttattacaaataagatatttggggtatattcaagtg

SEQ ID NO: 24668 - DNA, 543 bp, Homo sapiens
  misc_feature (1)...(543): n = A,T,C or G
aggggattgacgncttcgccggctgcaggaattcggcacgagcacccttcgggacttcagcctcctggaatcccgcccctcgggggcagtgccggccttcttgcgctgtctagtgctctgagtgggcagtctcacttggcaataaaagatgacaagaagcaccacgatgcagagcaccacagaggtgagaggccgggcaagccagattaggactttgtcctcatactcttacagtgctgcaaagttgtgtgcatcgctaaagagagccccaacctatacagagagcaaacaatgagataagaggaactgtcgcaaagctttccactgaaacacaggtcaccctggaagtttgcagggtttgctgtgggcatctgtagatttctcgatctcgttagattgcaggcatcttgacatcttggcaactgcctagttaatgccagtggcctgtaccatattatggaaaactgttaactgcttaattgggtaattntcaaagaaaagaatggtggtaaatgggggcgaaatagaagtaaatttgaaggg

SEQ ID NO: 24669 - DNA, 319 bp, Homo sapiens
atggggtaaaaccccagacgccatgaaagctgccatggccctggagaaaaagctgaaccaggcccttttggatcttcatgccctgggttctgcccgcacggacccccatctctgtgacttcctggagactcacttcctagatgaggaagtgaagcttatcaagaagatgggtgaccacctgaccaacctccacaggctgggtggcccggaggctgggctgggcgagtatctcttcgaaaggctcactctcaagcacgactaagagccttctgagcccagcgacttctgaagggccccttgcaaagtaatagggcttctg

SEQ ID NO: 24670 - DNA, 480 bp, Homo sapiens
  misc_feature (1)...(480): n = A,T,C or G
aatggcccgctctgnggaannccnaatggacccgcgctgcaggaattcggcacgaggctccaacgagtaccagctgattgactgtgcccagtacttcctggacaagatcgacgtgatcaagcaggctgactatgtgccgagcgatcaggacctgcttcgctgccgtgtcctgacttctggaatctttgagaccaagttccaggtggacaaagtcaacttccacatgtttgacgtgggtggccagcgcgatgaacgccgcaagtggatccagtgcttcaacgacgtgactggcataatattcgnggtggccagcagcagctacaacatggtcatccgggaggacaaccagaccaaccgcctgcaggaggctctgaacctcttcaagagcatctggaacaacagatggctgcgcaccatctctgtgatcctgttcctcaacaagcaagatctgctcgctgagaaagtccttgctgggagatg

SEQ ID NO: 24671 - DNA, 472 bp, Homo sapiens
aattgaccgcctgttgaattgcgccgagacctagtgcactgtttggccagtgtccacagcctgttttctggctgtgttttagagaaagggatttgagctataggctcgcctgctgttctcattctcacaaagctgacttgactgtggcctgcaaccacgagtgccatgctttcaggtcttctgtggcctactggccttcaagacagaggcctgccccagtgtgccacagatccatgtggatggagccttcttcacaggggtcacaggtctttgagactcagcctgggctttaatgtgtaggaaaagccttctggtcacccagagagccggagccctgcttgctgtattctctgctcccttcttcctgctgggttttagccataatagggcccggtacgatttgggagtgacatttctgtaaagaagaggaaaaatcatttttctataatttgtaaagctgtgaaagagccac

SEQ ID NO: 24672 - DNA, 483 bp, Homo sapiens
  misc_feature (1)...(483): n = A,T,C or G
gtgcggtaaaaaaatttgatcgccttcggaatncgctttagaggcatatacctgcagcctggatggcatcgtgcgcctctgggacgcccggaccggccgcctgcttactgactaccggggccacacggctgagatcctggactttgccctcagcaaagatgcctccctggtggtgaccacgtcaggagaccacaaagcgaaagtattttgtgtccaaaggcctgaccgttaatggctgcagcccctgcctgtgtgtctggtgttgaggggacgaagggacccctgcccctgtctgccagcagaggcagtagggcacagagggaagaggagggtggggccctggatgactttccagcctcttcaactgacttgctcccctctccttttcttctctttagagacccagcccagggccctcccacccttgcccagacctggtgggcccttcagagggaggggtggacctgtttctctttcactttc

SEQ ID NO: 24673 - DNA, 461 bp, Homo sapiens
  misc_feature (1)...(461): n = A,T,C or G
atttgccccgctttcccccgcgctgcaggaattcggcacgagaaggtgcagaaggagcaggccgataagttggctcgagagcatggaatccgatttttcgaaactagtgctaaatccagtatgaatgtggatgaggcttttagttccctggcccgggacatcttgctcaagtcaggaggccggagatcatgaaacggcaacaagcctcccagtactgacctgaaaacttgtgacaagaagaacaccaacaagtgctccctgggctgaggaccctttcttgcctccccaccccggaagctgaacctgagggagacaacggcagagggagtgagcaggggagaaatagcataggggcttggagggtcacataggtagatggtaaagagaatgaggagaaaaaggagaaaagggaaaagcagaaaggaaaaaaaaggaagagagaggaagggagaanggagagg

SEQ ID NO: 24674 - DNA, 492 bp, Homo sapiens
  misc_feature (1)...(492): n = A,T,C or G
aggagtgccnnnnnaatagaaaccatagcacccgcgtgcaggaattcggcacgaggtttcaccatgttggccaggctggtctcaaaccccagacctcaggtgatccacccacgtcggcctcccaaagtgctgggattacaggcgtgagccactgcacccggcctctgtttactttttgtacaacggtgatagcagctcttaagtatatccatttgactggatcataaatcagtacactgccagtgagacagtggtatatgcttatttgtaagagaacaacaaatgatatataaaatactagttctagggctaagttcactattaatctaatttaatttgtgactaaacactctggatagacaaaaaagtattctttgatatgacatgttgcaaaagtcacctgtagctatgactatagttgagtgttcttaatagcaaagataactattcaaatttttaaaggtcttatttaggctatttgatgataaaggg

SEQ ID NO: 24675 - DNA, 504 bp, Homo sapiens
  misc_feature (1)...(504): n = A,T,C or G
aatagannagcgntgttgacccgcgctgcaggaattcggcacgagaccacccccacatgaactgaggggagggccattacccgagcccagacctctaatggcagaaccaagaggacccatgctagatcagaggggtccacccttggatggcagaggtggaagggatccccgaggaatagatgcacgagggatggaggcccgagccatggaggcaagagggttagatgccagaggattagaggcccgtgcaatggaggcccgtgcgatggaagctcgtgcaatggaggcccgagcgatggaggcccgtgcaatggaagtccgagggatggaggccagaggcatggataccagaggcccagtgcctggccccagaggacctatacctagtggaatgcagggtcccagtccaattaacatgggggcggttgtcccccatggatccagacaggtcccagtcatgcagggaacaggaatgcaaggagcaagtatacagggtggaagccn

SEQ ID NO: 24676 - DNA, 472 bp, Homo sapiens
  misc_feature (1)...(472): n = A,T,C or G
aattgaccgctctgcaggaattccgctcgagccccgatggaggaagtggaccatgagtcaaaggatgtaagtggcctctggaacctacaaagggctcataaacagaagagacttgcttgtctcagatgaaactttggactgtggacttttgagttaatgctgaaataagactttgggggactgttggggaggcatgattggttttgaaatgtgaggacatgagatttgggagggaccaggggcaaaatgatatggtttggctgtgtccccaccaaatctcatcttgaattgcagctcccatgatccccacatgtgggagggacccggggggaggtaactgaatcatgggggtgggattttcccatgctgttctcatgatagtgaataaatctcatgagatcttatggttntataaagggcagtttccctgcacgggctctctcttgcccgccaccacgtaagacatgtgttt

SEQ ID NO: 24677 - DNA, 488 bp, Homo sapiens
  misc_feature (1)...(488): n = A,T,C or G
gtgggaaaaaagantttgancccctnggaannncatttgaccgcctgcagtgggagcttcgaaaggaccctgggtttagcaaagtagacagccctgttctttggtagactgggaatgtagagctagccaacatatcacattctgaatgaataaataactatgcacaattatgtttcttatagctatgtgtggtttctgggtcgactgaaaacctaccatttgcttttctattcatctttataatggactttcagaagtgcattagacaaggcccctaaccactttgggatcctttctgttttgctgcaaccatattccttaaaaaaaaaaaaaaaaaaaaaaaaaccctcgggggggggcccgggccccaattccccctataggggggggttttacaattcctgggccgcggttttaaaacgctgggagggtgggaaaaaccnggngggcccttnnnnnnnnnnnnnnnnnnnnnnnnntnnnncnnc

SEQ ID NO: 24678 - DNA, 498 bp, Homo sapiens
  misc_feature (1)...(498): n = A,T,C or G
aggaagggcccaggacgggnnnnnnttttgaacgcccttgagagtcctgcaggatagaatatccccgagtaggcggctgagctggagcagctgtgctccattagtgaggctgaccagagccggttgacttctctgctagaagagaccttgaacaagttcaattttgccaggaacagtaccctcaactcagccgctgtcaccgtctcctcttagagctcactcgggccaggccctgatctgcgctgtggctgtccctggacgtgctgcagccctcctgtcccttccccccagtcagtattaccctgtgaagccccttccctcctttattattcaggagggctgggggggctccctggttctgagcatcatcctttcccctcccctctcttcctcccctctgcactttgtttacttgttttgcacagacgtgggcctgggccttctcagcagccagcttctagttgggggctagtcgctgatctgccggctcccgcccag

SEQ ID NO: 24679 - DNA, 486 bp, Homo sapiens
  misc_feature (1)...(486): n = A,T,C or G
gtgggtaaanaaaaatttgatcgcctgcagaattcggattgagggcgcccgcgctgccacctcagggttcacctttagatgttcttaaagatgaaagggttcagtactggattgagaattatagaaatttattagatgcctggaggttttggcataaacgagctgaatttgatattcacaggagtaagttggatcccagttccaagcctttagcacaagtttttgtgagttgcaatttctgtggcaagtcaatctcctacagctgttcagctgtgcctcatcagggcagaggttttagtcagtatggtgtgagtggctcaccaacgaaatctaaagtcacaagttgtcctggctgtcgaaaaccacttcctcgatgtgcgctttgtctcattaatatgggaacaccagtttctagctgtcctggaggaaccaaatcagatgaaaaagtggacttgagcaaggacaaaaaattagcccaatttaacc

SEQ ID NO: 24680 - DNA, 477 bp, Homo sapiens
  misc_feature (1)...(477): n = A,T,C or G
nattgcacncccttgcaccgcctgcaggaattcggcacgagcttgaatgttctcttaagaaaatgatgctgggcatcgcagcttcagcatctcctgttttttgatgcttggctccctctgctgatctcaggttcctggcttttcctccctcagccccttctcacccctttgctgtcctgtgtagtgatttggtgagaaatcgatgctgcacccttcccccagcaccatttatgagtctcaagttttattattgcaataaaagtgctttatgccggcttttctcanaaaaaaaaaaaaaaaaaaaaaaaaaaaaaaaaaaaaaaaaaaaaaaaaaaaaaaaannanggggggggggggggccccccccccccccccccttaggggggggttataaaaattggggggcggggttttaaaaaaggggggggaggaaaaaaannnnnnnnggnttnnnntttnttttctgtttttttcttt

SEQ ID NO: 24681 - DNA, 538 bp, Homo sapiens
ggagattcacggctgggattcggcacgagcctccaagacttcatatgctccagatctcctacttccgcgacccctatcacgtgtggtaccagggcaacgcgtcgatggggggacacctaacgcacgtgctggaaggcccagacaccaacaccacgatcattcagctgcagcccttgcaggagcccgagagctgggcgcgcacgcagagtggcctgcagtcctacctgctccagttccacggcctcgtgcgcctggtgcaccaggagcggaccttggcctttcctctgaccatccgctgcttcctgggctgtgagctgcctcccgagggctctagagcccatgtcttcttcgaagtggctgtgaatgggagctcctttgtgagtttccggccggagagagccttgtggcaggcagacacccaggtcacctccggagtggcaccttcaccctgcagcagctcaatgcctacaaccgcactacgtatgaactgcgggaattcctggaggacacctgtgtgcagtatgtgcagaaacatatt

SEQ ID NO: 24682 - DNA, 504 bp, Homo sapiens
  misc_feature (1)...(504): n = A,T,C or G
aggggnnnnnnnnacnnnnnnnnnnnaattgaccgcgtgcagacttcggcacgaggcgccctgtactttggagagacggtatgctttttgaaggaattggatagaactcttgctggtttctttcccatctctatcaattgctaaacgcatttgtgtgacgacagaagccttctcctccattgtcactaacagctttctcctgccaggatcacttactaggtccacagttagtgaccatgatgtcacagttgttcccatggagactagctgtcccgtcaagctccagcttgggacgtccatgagtggatcctacagtggtctgataaggctgtcaaaagcacctgttgacacacaagtaacttggaaattagacagcagtgggaaaccttcagcatgtgtctctacatgtgtatatatatgtatgaaaaaatatatatatataaaattttaaaaacaagtctgtatagtttgacccaaatacaatgattattggtgaaaaaaaaa

SEQ ID NO: 24683 - DNA, 506 bp, Homo sapiens
  misc_feature (1)...(506): n = A,T,C or G
tggggnatggannaggannnaanaaattttgaannacctttttgcaccgcctgcaggaattccgcacgaggagatggacacatggggatgaagtaattctttaacataacatctgtgtgcagaagcacagtatacagagataagaatttacaatatagtgtgtgtgtcagtaatttttaacagagccttataacagaaaacacagcctttccataacctatgattagcaagatattaatcagcagtaacaggtgcagcataagctgggtacaaacaatccatagaaacaggccatgaagctagacagtcagctagaccagaaattctcagaagggagtatgccttaaccctaaagaggcctagaaggcacgatgagggcgtctatagccctgtcttatccatatgaacaggcaccccccatgcgtccgtttataggctctccacaagggtcacgtgccattcccagagctatgaacatatgcttttctgggataggaatcttggtg

SEQ ID NO: 24684 - DNA, 483 bp, Homo sapiens
  misc_feature (1)...(483): n = A,T,C or G
cgagaggcaattgacggctgtangaattcggcacgagccacagcccccctaccgacctggtgtggaaggcacagaacacctggggctgcgggaacagcctgcgtacggctctcatcaactccactggggaagaagtggccatgcgcaagctggtgcgctcagtgactgtggttgaggacgacgaggatgaggatggagatgacctgctccatcaccaccacgtgagtggtagccgccgctgaggccgagcctgcactggggccacccagccaggcctgggggcagcctctccccagcctccccgtgccaaaaatcttttcattaaagaatgttttggaactttatatannaaacatgaagaaaaatgaaaaacctggggggggggcccgggccccatttccccttatgggggggcgtttaaaatcccttggccggcttttaaaacggcggagtgggagaaaannnncnctannaaaaaacttg

SEQ ID NO: 24685 - DNA, 447 bp, Homo sapiens
  misc_feature (1)...(447): n = A,T,C or G
nattgaccctcgctgcacgaattcggcacgagcggcgacgcggttgctgcggggctcgggttcttggggctgttcgcggctgaggtttggacctcctgcgtacagacggtttagtagtggtggtgcctatcccaacatccccctctcttctcccttacctggagtacccaagcctgtttttgctacagttgatggacaggaaaagtttgaaaccaaagtaaccacattggataatgggcttcgcgtggcatctcacaataagtttggacagttttgtacagtaggaattcttatcaattcaggatcgagatatgaagcgaaataccttagtggaattgctcactttttggaaaaattggcattttcggtcagtacccagttttgtaattttttagactatacttttgaaggatgtttgagatttttcttggctataatggtaatttn

SEQ ID NO: 24686 - DNA, 350 bp, Homo sapiens
  misc_feature (1)...(350): n = A,T,C or G
nattgaccgcgctgcagaattcggctcgaggagcacagtatgggaccccctcaccaggcctggaacacctccagccacaaagaagccaaaggtcagtccctctgctccccagcaaacggtgcctcccaggcattctcagtgccagggcttcatccctgtgaaggcacagggcctgctagtgggcacaggggtggctagttggggcctggggcagaggagggctgcaccaggcgtcctggggaatgtgctcagtgaagacgacactgggctttgcacagcctggtgtcgctgtacagaaactgtcaagggaataaagtgttctttgttttttaaaaaaaaaaaaaaaaaaa

SEQ ID NO: 24687 - DNA, 485 bp, Homo sapiens
  misc_feature (1)...(485): n = A,T,C or G
ggggagggcaggagagccnnnnnattgannnaatagacccgcgctgcaggaattcggcacgagctggcacgtgacctaagaccggctcaccgggtcgcttggtggctccgtctgtctgtccgtccgcccgcgggtgccatcatggcggacgcggccagtcaggtgctcctgggctccggtctcaccatcctgtcccagccgctcatgtgggatatgagcctcttcctccaacaataggacgaaatatttttgggcggcaagtgtgtcagcttcctggtctctttagttatgctcagcacattgccagtatcgatgggaggcgcgggttgttcacaggcttaactccaagactgtgttcgggagtccttggaactgtggtccatggtaaagttttacagcattaccaggagagtgacaagggtgaggagttaggacctggaaatgtacagaaagaagtctcatcttcctttgaccacgttatcaan

SEQ ID NO: 24688 - DNA, 496 bp, Homo sapiens
  misc_feature (1)...(496): n = A,T,C or G
attcgacccgccttgtacgccgcgctgcaggaattcggcacgagccggaaaccgtgtgtacttatcctggatgatgccaccagtgccctggatgcaaacagccagttacaggtggagcagctcctgtacgaaagccctgagcggtactcccgctcagtgcttctcatcacccagcacctcagcctggtggagcaggctgaccacatcctctttctggaaggaggcgctatccgggaggggggaacccaccagcagctcatggagaaaaaggggtgctactgggccatggtgcaggctcctgcagatgctccagaatgaaagccttctcagacctgcgcactccatctccctcccttttcttctctctgtggtggagaaccacagctgcagagtangcagctgcctccaggatgagttacttgaaatttgccttgagtgtgtacctcctttccaagctcctcgtgataatgcagacttcctggagtacaaacacagg

SEQ ID NO: 24689 - DNA, 480 bp, Homo sapiens
atttgcccgcctgtatgaattcggcacgagcttaggttagcctaagtgttggggaaaatcatctaacacaaaacctattttataataaagtgtggaatatctcatttaacttattgaatactgtgccgaaagtgaaaaacagaatggttgtatggatactcgaagtacagtttctactgaatgcggatagctttagcaccattgtaaagtcggaaaatcataagtcagggaccgtctacaattgcttttgctgtattctcgttttcagcaatataaagacatacccgatactgagcagtttacaaaagaaagaggtttaatggactcacagttctacgtggctggggaggcctcacaattatggcggaaggtgagaaaggtggcaaagatacagataaagcactgttcctgaataacatttcaagtcttgaccttttttttttttttttttataactttacagacttacctattccctgg

SEQ ID NO: 24690 - DNA, 452 bp, Homo sapiens
  misc_feature (1)...(452): n = A,T,C or G
ctttgccctcgctgcacgattcggcacgagaataaaaacaaatgtttaaaaggggagtaaaatgtaatgtttaaaatggtgtatacccatcatgctttctgccttgttaagaactaccacattgaaactgccaaatttattagtgccatctagaaaccctaacatctgttgataacagatcttggtaagggagaggtgctgggacaggtcttaggagtggccctggaacacaccaggactgacttccagggaatcttgggctcctagggtgaaatttaaagcagttcataatttgctttattaataatttgattttgatgcaagcatattagcacttttctctgaaggagttttgaagcaggaataaagaatgtgttgtatagtcacttgggaattttctttcatgccttttctcagtgtctcaattagttcacttagtaagaagaacatan

SEQ ID NO: 24691 - DNA, 506 bp, Homo sapiens
  misc_feature (1)...(506): n = A,T,C or G
gtgcggtcaccnannaattgcaccgccctgcangaattcggcacgagagatcaatattttattcctacaggagtagaaaagtagaagacatgaacagaaataaaaattctgaccaaatcttaaggagtgtgaatgagaactgaatgtatgataaatgttgcatgttcagttcaatgggaaattgatcgcttatttaataagtgattgtggcacaaaggctgtcttcagcaaacaccaaataactctgtgctctgctttgagacacttttctgaatctgttagcaagagaaatgctgaagctttctcagatgtctgctgtgtctagggaagatgggggatggcttcagagcaagaggccacaggtcggctgtgagcatctgtgtctagctgttgagcatctccaacagtggatgagtgtccaggtagacctgaggctgtgccctgagatttctgatcatctcccagcactgtctccaccagctgtacttcccgcccctcttcggaga

SEQ ID NO: 24692 - DNA, 441 bp, Homo sapiens
  misc_feature (1)...(441): n = A,T,C or G
aatttgaacaacctnnnnaannctcgacccgcgctgcaggaattccgcacgagcagggtttcaaccatgttgcccaggttggtctcaaactcctgagctcaggcaatccacccgccttggcctcccaaagtgctaggattacaggtgtgagccaccacacccagctattttttctttcgttttttaattttaaagttggggggggtctcaatttgttaccctggctggtctcgaactcccggacttaagcgatcctctggctccaagcccactaccagtctcaggtttctttactaaaagatcactacctttttttctcttatctgctgccatgtgagatgtggctttcaccttccgccatgattgtgaggccttcccagccacgtggaactgtaagtccaataaacctcttttgtaaattaaaaaaaaaaaaaaacggca

SEQ ID NO: 24693 - DNA, 475 bp, Homo sapiens
  misc_feature (1)...(475): n = A,T,C or G
nattgacccgccctgcaggaattcggcttgaggcccgctcgagggtgttttcgacgttggctgtggggaaacagcaagcggcgtggacgaccgttgctgagctggtgtggaacgtctgtgatcagattcattgggcttttgccagctctttttagattgtcctcttgagacctgtttacagaggaatggccagagaccacaggcactgcctcctgagaccatccacctgatgcgaagaaagctagaaaagcccaaccctgagaaaaatgcttgggaacacaacagcctcacaattccgagtccagcatgtgcttcggaggccagcctggaagtgactgatttattgctcactgctttggaaaatccagtaaaatatgctgaggacaatatggaacaaaaggacacagacagaattatttgttcaactaacattcttcataaaactgatcagacactccgaaggattgtatctcag

SEQ ID NO: 24694 - DNA, 481 bp, Homo sapiens
  misc_feature (1)...(481): n = A,T,C or G
cattcgcccgccttgaagaattcggcacgagcggaccatgcagcgctntgggccccccgtttcccgctaagcctggcctgggcaaatggagcgaggtcccactttgcgtctccttgtaggcagtgcgtccatccttccctagggcaggaattcccacagttgctactttcctgggagggcctcatgttttatctggttcttaaatgtttgttactacagaaaataaaactgcgctactatnaaaaaaaaaaaaaaaaaaaaaaaaaaaaaaaaaaaaaannnngggggggggggggggcgngaacacaaaaaaaaaaagaaaaaaaaagaggggggggggggnnnannggggggggggggggggaaaggaaaannnnntnntnnntnnnnnnnntggngcggccccanngacgcgaagggacaaggaaagaaacnncnnnccnncnccncggggggggcnacacccggaggccaaaccagg

SEQ ID NO: 24695 - DNA, 408 bp, Homo sapiens
  misc_feature (1)...(408): n = A,T,C or G
ggaattcggcacgagctcaccaggtggccagataccgcccacgtgcccccatcattgctgtgacccggaatccccagacagctcgtcaggcccacctgtaccgtggcatcttccctgtgctgtgcaaggacccagtccaagaggcctgggctgaggacgtggacctccgggtgaactttgccatgaatgttggcaaggcccgaggcttcttcaagaagggagatgtggtcattgtgctgaccggatggcgccctggctccggcttcaccaacaccatgcgtgttgttcctgtgccgtgatggaccccagagcccctcctccagcccctgtcccacccccttcccccagcccatccattangccagcaacgcttgtagaactcactctgggctgtaacgtggcactggn

SEQ ID NO: 24696 - DNA, 526 bp, Homo sapiens
  misc_feature (1)...(526): n = A,T,C or G
tgggtgccngggannnaaannagagaattgatcgccntnggaaaattgatcgcccttaggaattcggcacgaggagccgtgtgccctggcactgagcggccgcggccatggcgtacgcctatctcttcaagtacatcataatcggcgacacaggtgttggtaaatcatgcttattgctacagtttacagacaagaggtttcagccagtgcatgaccttactattggtgtagagttcggtgctcgaatgataactattgatgggaaacagataaaacttcagatatgggatacggcagggcaagaatcctttcgttccatcacaaggtcgtattacagaggtgcagcaggagctttactagtttacgatattacacggagagatacattcaaccacttgacaacctggttagaagatgcccgccagcattccaattccaacatggtcattatgcttattggaaataaaagtgatttagaatctagaagagaagtaaaaaaagaagaaggtgaagcttttgcacgaga

SEQ ID NO: 24697 - DNA, 473 bp, Homo sapiens
agaaaatttgccccgcgctgcaggaaactttcgccaccggctgcatgaattcggcacgagccaacatgggccgcgttcgcaccataaccgtgaataaggcggcccgggtcatcatagaaaaggactacacgcgcctgggcaacgacttccacacgaacaagcgcgtgtgcgaggagatcgccattatccccagcaaaaagctccgcaacaagatagcaggttatgtcacgcatcttatgaagcgaattcagagaggcccagtaagaggtatctccatcaagctgcaggaggaggagagagaaaggagagacaattatgttcctgaggtctcagccttggatcaggagattattgaagtagatcctgacactaaggaaatgctgaagcttttggacttcggcagtctgtccaaccttcaggtcactcagcctacagttgggatgaatttcaaaacgcctcggggacctggttga

SEQ ID NO: 24698 - DNA, 301 bp, Homo sapiens
  misc_feature (1)...(301): n = A,T,C or G
cttcgcccgcccttcncnaatagacccgcgtgcaggaattccgcacgagaagaagctgaggaatataaagaagcacgtttagtactggattcagtgaagttagaagcctgaaacttttctcgtatggggtggtttttgcattaaatcctggggtccattttacaatccattatttttgaccactgctatgtgttcaagtagtatgagaatgtgattgtttttatctggttacatatatatttctttgtctaatttaatatgtcaaataaatgagttcatctaaaaaaaaaaaaaaaaaaaa

SEQ ID NO: 24699 - DNA, 412 bp, Homo sapiens
aagaaaaaaaattagcccgcctgtttgcccgcctgcaagaattcggcacgaggctctgcttcctcctgcctggatacttctaatgaccctgacgacctggacgtgctcagaacccggcatgccaggcacacccggaagcggaggcggctggtgtgagcagcaggacaagcactttctcagaagcccgtggccctgctgacgagagacagcccacccccagcctgcaagagaggcagccagaggccaggtatctgctggccgctgaccgaccaggtccgcagtgaacagaggcgggcctgccgactgactgtgtggcatggagcatggctgttccccaagtgcacacctgaacacttggaggaataaagttctgtttttaattgtggaaaaaaaaaaaaaaaaaaaaactcag

SEQ ID NO: 24700 - DNA, 471 bp, Homo sapiens
  misc_feature (1)...(471): n = A,T,C or G
nttctgtccgcctgcangaattcggcacgagcctcactgagctcatgtttgacaatgcactgagcaccctgcggcctgaggagattgctgccttgctctctggcctggtctgccagagccctggggacgctggggatcagctcccaaacaccctcaagcagggaatagaacgtgtccgggctgtggccaagcggattggtgaggtccaggtggcttgtggcctgaaccagacggtggaggaatttgtgggggagctgaattttgggctggttgaggttgtatatgagtgggcccggggcatgcccttctccgagttggcagggctctcagggacccctgagggcctggtggtccgctgcattcagcgcctggctgagatgtgtcgctcactgcggggggcagcccgcctggtaggagagcctgtgctgggtgccaagatggagacagcggctaccttgctacggcgggaca

SEQ ID NO: 24701 - DNA, 408 bp, Homo sapiens
tttgatcgcctgagaattttgtgtccgtttgaggcatcctacaaggttgcctacagtaatgacagtgcgaactggactgagtaccaggaccccaggactggcagcagtaagatcttccctggcaactgggacaaccactcccacaagaagaacttgtttgagacgcccatcctggctcgctatgtgcgcatcctgcctgtagcctggcacaaccgcatcgccctgcgcctggagctgctgggctgttagtggccacctgccacccccaggtcttcctgctttccatgggcccgctgcctcttggcttctcagcccctttaaatcaccatagggctggggactggggaaggggagggtgttcagaggcagcaccaccacacagtcacccccaaaaaaaaaaaaaaaaaa

SEQ ID NO: 24702 - DNA, 471 bp, Homo sapiens
  misc_feature (1)...(471): n = A,T,C or G
cctcgaccgccnttcggtagctccgcgctgcaggaattcggcacgaggaaacactctttttgtagaacatacaaatggacatttctaagcacattgaggcctataatgaaaaatcaaatatcccacaatgaaaactagagggaagctatctgtgataatgctttgtggtgtatggattcatctcactgactgaaacctgagttttgattcaccaggttggaaactctttctgcagaatctgcaaagaaatatttctgagcccattgaggcctacagtggaaaactgaatattctgtgataaaactagaaacaccctatctgtgaaaatgctttgtgatgtgtggatttttctcatcgaatggaacctctgttttgactcacaagggtgaaacactattttagtagaatctaggaagaaacatatctgagcccatttatgcctacagtgagaaactgaataccctgcaatan

SEQ ID NO: 24703 - DNA, 317 bp, Homo sapiens
  misc_feature (1)...(317): n = A,T,C or G
ntttcctccgggctgcaggaattctgcacgagggactgctcccgctcctgagttcactgctactcagcctgaggttgcagactggtctgaaggtgtacaggtgccctctgtgcctattcagcaattccctactgaagactggagcgctcagcctgccacggaagactggtctgcagctcccactgctcaggccactgaatgggtaggagcaaccactgactggtcttaagctgttcttgcataggctcttaagcagcatggaaaaatggttgatggaaaataaacatcagtttctaaaaaaaaaaaaaaaaaaaaaa

SEQ ID NO: 24704 - DNA, 338 bp, Homo sapiens
  misc_feature (1)...(338): n = A,T,C or G
gtgggncattgacctcctgcagcattcggcacgaggtggcccatgcagaccaggcgcacgtggctcatggggcagaattgccaaggacagctcacgacagtgccaccttctcaccattccagccaaggagagatgtgacgttggaactgctctggcacttctgtcaagcctcccccgccccaattgccttgagatctctgctctttgtcagagatttgcaaagactcacgtttttgttgttttctcatcattccattgtgatactaagaaactaagaagcttaatgaaaagaaataaaatgcctatgttgttgttctagaaaaaaaaaaaaaaaaaaa

SEQ ID NO: 24705 - DNA, 460 bp, Homo sapiens
  misc_feature (1)...(460): n = A,T,C or G
agggttctgannnaagtttgnagngcatttncgccgagccctggaagaagaggctgcctattgaaaaggttgtgtcacacttttctacctttttgccagtttgaagctttgcatcaggtggcaaaattcattctatgtgccgttttgttgttattcacattttattgtaacttangaggtgaacgacctaagattacgttattgggtttggatatttgaggcaaaaatttatttttatttctatagtgatgactgttttggtttgaaatgaacagattggtaacctaatttgtggcctcctgacttttaaggaaacgtgtgcagccattacacacagcctaacgctgtcaagacattgcttcaacattgccttcattccttaaaaacctacaaaaggtggtgtaaattaatatggataattttatttacctccaggtctaaaaggtagtgtgacccanat

SEQ ID NO: 24706 - DNA, 326 bp, Homo sapiens
tacataatagaagcatcctttttaaagagaagttgccttggtccacacactaagcagaaaaccaagttatcaggacagagatatttcccagttactcctaatcaatgaagaaagtgagttggatatttttaaagcagttaactaattttttcttacctaatcttttgggagttttgcttgttgatataacctttttagttaacctgaaagattccaaaaattgttcttaagtgcttgagactggaaccaaaattaaattgtacttcataaaatcctcttatagagttactcttgccctagattgtaaattaagtttggcattattg

SEQ ID NO: 24707 - DNA, 481 bp, Homo sapiens
gaaaaaaaaattggcccgcctgctgtcgcctcgtcctcctagcagccaagatgatgtccgcggcggccattgccaatgggggtggagttgcctcgggcagccttgtggctactctgcagtcactgggagcaactggactctccggattgaccaagttcatcctgggctccattgggtctgccattgcggctgtcattgcgaggttctactagctccctgcccctcgccctgcagagaagagaaccatgccaggggagaaggcacccagccatcctgacccagcgaggagccaactatcccaaatatacctggggtgaaatataccaaattctgcatctccagaggaaaataagaaataaagatgaattgttgcaactctaaaaaaaaaaaaaaaaaaaaaaaaaaaaaaaaaccccgggggggggcccggcccccaattcccccttttggggggggattaaaaatacccgggccgcgtttt

SEQ ID NO: 24708 - DNA, 541 bp, Homo sapiens
  misc_feature (1)...(541): n = A,T,C or G
nggatgattcgctggctgtggaattcggcacgagacagataccactgctgctcccgccctttcgctcctcggccgcgcaatgggcacccgcgacgacgagtacgactacctctttaaagttgtccttattggagattctggtgttggaaagagtaatctcctgtctcgatttactcgaaatgagtttaatctggaaagcaagagcaccattggagtagagtttgcaacaagaagcatccaggttgatggaaaaacaataaaggcacagatatgggacacagcagggcaagagcgatatcgagctataacatcagcatattatcgtggagctgtaggtgccttattggtttatgacattgctaaacatctcacatatgaaaatgtagagcgatggctgaaagaactgagagatcatgctgatagtaacattgttatcatgcttgtgggcaataagagtgatctacgtcatctcanggcagttcctacagatgaagcagagcttttgcagaaaagaaatggtttgcattcattganacttccg

SEQ ID NO: 24709 - DNA, 477 bp, Homo sapiens
atttgccctcgccgcacggctgcaggaattcggcacgagaaaatactttactgagtcaggacttgtgggattactggaacaagcagctgcttccttctctatggctggcatgtatgaagcagttaatgaagtttacaaagtacttattcctattcatgaagctaatcgggatgcaaagaaactatccacaattcatggtaaacttcaagaagcattcagcaaaattgttcatcaggatggtaagcggatgtttggcacctattttcgtgttggtttttatggaaccaagttcggggatttggatgaacaagaatttgtttacaaggagcctgcaataaccaaacttgcagagatatctcacagattggagggattttacggagaaagatttggagaggatgtggttgaagtaatcaaagactctaatcctgtagacaagtgtaaattagatcctaacaaggcatatattcagattaa

SEQ ID NO: 24710 - DNA, 471 bp, Homo sapiens
attgaccgcctgcggaattcggcacgagcttcagaagagcacacacctcttgataaggaagctgcccttcagccgcctggcaagagaaatatgtgttaaattcactcgtggtgtggacttcaattggcaagcccaggccctattggccctacaagaggcagcagaagcatttctagttcatctctttgaggacgcctatctcctcaccttacatgcaggccgagttactctcttcccaaaggatgtgcaactggcccggaggatccggggccttgaggagggactcggctgagctcctgcacccagtgtttctgtcagtctttcctgctcagccaggggggatgataccggggactctccagagccatgactagatccaatggattctgcgatgctgtctggactttgctgtctctgaacagctggagtgcagcagcacgatctcggctcactgcaacctccaactcccaa

SEQ ID NO: 24711 - DNA, 476 bp, Homo sapiens
agggtgcactgtctcgtccgcctgcaggaattcggcacgagaaaacacaagaaacataaaaagcataagaagcataagaaacatgcaggcactgaagtggaattggaaaaaagccaaaaacacaaacacaagaaaaagaagtcaaagaagaacaaagataaagagaaggagaaggagaaagatgaccaaaaagtgaaatctgtcactgtgtaaaaagacagattttttaaattgacttaattactaagtcatctgtattaaattttgttataatgtaaagagattcaagccttgtaaataatgacatggaagaccctgtgctgcacttaaaatattgctgcttgattatttgatttttacatcagagctttataacacgaacttttgtacagaattgtgagttgtgaccatgtaacatgagaggttctgctagggcctattatttttaaccaccattaattagttggggtggagtt

SEQ ID NO: 24712 - DNA, 460 bp, Homo sapiens
aattgacccgcgctgcagtaattcggcacgagatcttctgctcctaatcagtttgtcgggcataggggtaggagaacgcataacttctaaactttttctcttaagagcggtcagagaaatccaggaaattcaccagaggcaatgtgcacaaacaccactactaaaaacaaaccctgcacatagttcacattaatgcatttttttaatttaaagaaaaagaaaattagcagtatctgcaagcaattcagattaaatttgtttttgttctgtgaatgaactttattttaataactttggacgccttggatccagggctttaaaaaaaaaagatattatatatacactctgtttgattaattgtatgatcttaatgaagtaggttttcttgtattttggtattacatacccagtgtataatttgtataattcctcacccccaatccttatcaattctcaccac

SEQ ID NO: 24713 - DNA, 443 bp, Homo sapiens
attgacttcactgcggtaacagccccgcgcctccacgcccaggcctgtgtggctttggacaagttatataaccaccgccgccaccccagtttcttctcctgtaaaatggagctttagtgccgcccagcagggttgttgggataattcagtgactctgtggactgcccagcacctgtgaattgctttcctggatgttgggtgaaggcctgtgagcttccccatggctgggggttatggagtgatgggtgacgatggttctattgattatactgttcacgaagcctggaatgaagccaccaatgtttacttgatagttatccttgttagcttcggtctcttcatgtatgccaaaaggaacaaaaggagaattatgaggatattcagtgtgccacctacagaggaaactttgtcagagcccaacttttatgacacgataagcaaga

SEQ ID NO: 24714 - DNA, 486 bp, Homo sapiens
  misc_feature (1)...(486): n = A,T,C or G
agctggtnnnaattgaccttcgtgcagcatttcggcacgagctgagacgacgtttgggagcaatgctctttaccacgttcaccaagtcgtctggggcaggggttgtgagctgcagcagttgctggtgccttgtgggaaggtggggcagggaggaggctgcccgccacctctgcccccagtcacttcctgcttgacctgactcttcacatgtggctgcttaattcctgcccctctccccccagctgcttctcctttactaacacacctgctacattttacacatgtgttggtaagtgagaaacagaaacgaaaaataaattaaaatgcagaaatacaaaaaaaaaaaaaaaaaaacctcgggggggggcccggaccccaattccccctatagggaggcgttttacaatcccctgcccgccgttttacaccgccgggatgggggagagannnnnnnncnctcnnnnncctcncntcccgttctgtttg

SEQ ID NO: 24715 - DNA, 301 bp, Homo sapiens
cattgcccgcctgcagaattttcacgagcttgtggtgctgaccttgacccactatcacatgctgatgctgttgggaaaactcgataaagaacacgaattgctcaatgcatgaatctgtacccttcgggagggcactcacatgccgcccccagcagctcccctgggggctagcagaagtataaagtgatcactatgctgttttaataattatgtgccattttaataaaatgaaagggtcaacggccctgtttatattgcgtcaaaaaaaaaaaaaaaaaaaacctcgggggggggcccgggc

SEQ ID NO: 24716 - DNA, 493 bp, Homo sapiens
  misc_feature (1)...(493): n = A,T,C or G
nggggccattgccccgcgctgcaggaattctgcacgagctagtcctagtgaacctcaccccgaggccctgcatgggccagcccctccatctgtacttggtccaactgcaactcatcatcggtgactggttatcacaccatcgctggcccctttgggccctgcatgtagtgtgggaggctcctgttagctcctcactgtggtaaatgccacacacctttaagtagataagcagacgatagttatctgttcttttgacttaatctcatttggtttgattttccctctactaaggctttcctaccttcttcaggctgcctaagacatgtaacgaaacacttcaataattgtccatgaggagaaaaaaagcatgtgtcatgcatgaaggaaactgaacttgaggtggcctccttgcttgttacatancctgggatgtgtaggcagtttagtgcatctttgcctctcggttgaaacctgtataaccctgttacaaaga

SEQ ID NO: 24717 - DNA, 491 bp, Homo sapiens
  misc_feature (1)...(491): n = A,T,C or G
gccttcggaaancccccgaggnanannattgacccgctctgaagaattcggcacgagcaccgcccaggcctcggaaggtgtcagggagaactttccgtggtttcagcgtcgtcgcctggagcggcggtttagagagccgagcctgatgggcgccaaggccggctggctgcttggagcgctgcctcgaagggactgcgtgaaggaagctaatccggagaacccaggccagagcctggaaatatggcgacctgcatcggggagaagatcgaggattttaaagttggaaatctgcttggtaaaggatcatttgctggtgtctacagagctgagtccattcacactggtttggaagttgcaatcaaaatgatagataagaaagccatgtacaaagcaggaatggtacagagagtccaaaatgaggtgaaaatacattgccaattgaaacatccttctatcttggagctttataactattttgaagatagcaattn

SEQ ID NO: 24718 - DNA, 490 bp, Homo sapiens
  misc_feature (1)...(490): n = A,T,C or G
ngtgtgcncccattgacccctcgatagatncgcctgcaggaattccgcacgagctgactgggttggctggtgcacctaaataatacatatatcctcctcaaccccatcggtctctctgattcctaaatcatccccaaacatttctggtggcccatatggggattggagataacagatttactgtctcctttgcccatgggactagggccctggggctgtggaagacctggcatccaaggcatgccatgggggagtttcacccggatggagactggctctccccgcatcctgcccagcagtgcaactgaacctgagatggggctgcaggatgacaccagcacttcaggaaccgcggtgtcacaccttggattcaccatagctggctgaaactagcagcagcagtgactcccgactatgaccagtggattaaccaacaagaccctgattgccccacccgaatagacctacggcgaatcccaaccaccagtan

SEQ ID NO: 24719 - DNA, 466 bp, Homo sapiens
  misc_feature (1)...(466): n = A,T,C or G
aggggngtttaactgacataaggcgtcgtgcgntncgtgagagagaaaactggagatagcagaagcattcttaagaggagatattacagacagcactgcactttggagttgggcagctacatcaaggacctctctgagggccacagtgacctctccagcattgtgatcctggataactccccaggggcttacaggagccatccatacaatgccatccccatcagatcctgggtcagggaccccagcgacacagcccttctcaacctgctcccaatgctggatgccctcaggatcaccgctgatgttcgttccgtgctgagccgaaaccttcaccaacatcagctctggagacagatgctccccctccacctgatttggggagcaggggaaagggagggcgagcccttggcatgccctctgatgccctgtgcaatgtgaggactgacttgggcagaggttgccctcc

SEQ ID NO: 24720 - DNA, 496 bp, Homo sapiens
  misc_feature (1)...(496): n = A,T,C or G
tggcgntnnnnnnnatttgaacgtctgcaggacttcggcacgagcattttcaattttcagagtctattgactgtaatcttgctgcttatatgtacctgtgcttatattcgatccttggcacccagcctcctggacagaaataaaactggattgttgggtatattttggaagtgtgccagaattggtgaacggaagagtccttatgttgcagtatgctgtatagtaatggccttcagcatcctcttcatacagtagctggggaaaatgccagaatgtagttgccatcagatttgattgtgaacaaggactgactgcagaaaataatggaaaggatgtttaactcttttatctccgaacattgaatgagataaatttccagatgctgttctctattttaatgttattggaccaatgttctgtataaacaattaagatgtaaccatttaatagtctgtaacaatcaacctcagtactgtcactacaatattacattctg

SEQ ID NO: 24721 - DNA, 504 bp, Homo sapiens
  misc_feature (1)...(504): n = A,T,C or G
agggggggggntttcccggctgcagaattcggcacgaggtgttctccacgctggttcgcaggtgaagagatggcgtttgtgaagagtggctggttgctgcgacagagtactattttgaagcgctggaagaagaactggtttgatctgtggtcggatggtcacctgatctattatgatgaccagactcggcagaatatcgaggataaggtccacatgccaatggactgcatcaacatccgcacggggcaggaatgtcgggatactcagcccccggatggaaagtcaaaagactgcatgctccagattgtttgtcgagatgggaaaacaattagtctttgtgcagaaagcacagatgattgcttggcctggaaatttacactccaagattctaggacaaacacagcgtatgtgggctctgcagtcatgaccgatgagacatccgggtttcctcacctccaccatacacggcctatgctgcaccggcccctgggtagggagaaccct

SEQ ID NO: 24722 - DNA, 486 bp, Homo sapiens
  misc_feature (1)...(486): n = A,T,C or G
agcgggtgnnaattgaattctttaggcattcggcacgagccacgccctgccttaagaattgttccaagagaatctggtgccacttgcaggtgcccattgaagtgcaatgggcactgttgatcactgaggaggtagtgggtgctgacccggtgctggggcctgtcccctagtctctgctttgcccttggctagctaggtggtgtgccaagtggggagagaagctaccttattaaggggcatggatcagcttcctgaaaggagggcctgcctctgtaagatatgggaagtcgctgagaatgttacagaacggccctagagatggggcagataacggcccccatttgtgagaagtgagttgggaggcatgtttggggcctctgatgtttgggaggctgtgggtaattaacatgagttttggggtccagcagcagaattcaggtttcctcttccactcagtaacctcagcatccgtatctgtaatgggaa

SEQ ID NO: 24723 - DNA, 493 bp, Homo sapiens
  misc_feature (1)...(493): n = A,T,C or G
gggatgggcccggggttnttnnnaatcgacccgcgctgcaggaattcggcacgagaccacattacaggctcggggctgctccgttccctcctccctggctgccagtctgtcatctcccgccttagtggggcccaggctgacttacacattgaggatggagactccatccgcttcgggcgcttcgcgttggagaccagggccagccctggccacaccccaggctgtgtcaccttcgtcctgaatgaccacagcatggccttcactggagatgccctgttgatccgtgggtgtgggcggacagacttccagcaaggctgtgccaagaccttgtaccactcggtccatgaaaagatcttcacacttccaggagactgtctgatctaccctgctcacgattaccatgggttcacagtgtccaccgtggaggaggagaggactctgaaccctcggctcaccctcagctgtgaggagtttgtcaaaatcatgggcaacc

SEQ ID NO: 24724 - DNA, 493 bp, Homo sapiens
  misc_feature (1)...(493): n = A,T,C or G
cgatgtgcnnccaattgacccccctcgatagatccgcctgcaggaattcgccacgagggaaaaactaacgcaaaattgtattttcttacctagtggaaatctgaaatgactgcaaattcctagtgaatgtacaggtttgctttcgtgtccctcttctggttgctttacaagtgacgtgtaatttctgaacccatgtttcatctgtataaaagaacatctgcaccagtttttctcctgcccctcacaagagccaaactttgagttttatgtctgtttgtcattgataaatttcaataaatctttttatacaatctttttggggatggcttctttgagtccaacaggccattgatcttttcaagatgcattccagatgaactgctaggtgagggggaagcttcatttttgttacctgatagaatagctcttcttatgagatatatataatgtgatactatgtttggatatttttggtcttaaagcaagactcagt

SEQ ID NO: 24725 - DNA, 436 bp, Homo sapiens
  misc_feature (1)...(436): n = A,T,C or G
tggggnnnnnnagggtnnnnnnnccttgcccggcatgaggaatccggcacgagagtatttgctgtaataactaagaaaaaagaagaaaaaccacttgactataaatacagatattttcgtcgtggtccctgtacaagaagcagatcagagttttcatgtggggctacagctatgttccagtggtcaccagaggttcaacaaactcatctggatacatcattcttgtcacattacttacaaatcaactggtgagactgcagtcagtgcttttgagattgacaagatgtacacccccttgttcttcgccagagtaaggagctacacagctttctcagaaaggcctctgtagagcctcaagtccagtcctctatcacttttgcatgaattaaagtatatagcgcaaaagagcacctaagttaaaaaaaaaaaaaaaaaa

SEQ ID NO: 24726 - DNA, 481 bp, Homo sapiens
  misc_feature (1)...(481): n = A,T,C or G
ggagtccnnngnagttnnttctgaccgccttttgattccctggagagtctgactctgttgcccaggctggagtgcagtggcgggatctcggctcactgcaagttccgcctcccgggttcacaccattctcctgcctcagcctcccgagtagctggcactacaggcacccgccaccatgcccggctattttttttgtatttttagtagagacggggtttcaccatgttggccaggatggtctcgatctcttgacctcgtgatccacccaccttggcctcccaaagtgttgggattacaggcgtgagccaccgcgcccggcctcagtgcctttttttaacttgagggtgtagaggtcctccacgcttgtttgcctgaaagtaatataatgatgctgtctgaacaggttttactgcttgctttccaagtaaaggttaattatgataataaaaaaaaaaaaaaaaaactcgagggggggcccggc

SEQ ID NO: 24727 - DNA, 516 bp, Homo sapiens
  misc_feature (1)...(516): n = A,T,C or G
gggttntcnncnaggtggnnnnnnnaattgannnnctactgcaccgcctgcaggattcggcacgagcgatgttggataatgagatctgctctcttctgaagtggttagatttgaaaagccagcgaagctgtcattagcaaggcattttcttttcatttcaaccatttcattatatcctttaccaaatttgagtttatgaaatatttgacaggcctcctgatgttttcagttttcttgagggagattcctaggagtagaattgctgggctgtgtggtaacttccaggcctccttaaagctttagcctggactgggtagagcatggtttccactgcattctcttagtcacagtgagttgcaggttcaccccagcgtcagtggcgggcgggaagtggggatgacacaaggacctgagtgtccaaggggggcttatggagccctcatgtgaagtccccagcatggaccctgacacatcgtaggtcctcaacaaatgtcactccctgttgtcactctgttt

SEQ ID NO: 24728 - DNA, 470 bp, Homo sapiens
  misc_feature (1)...(470): n = A,T,C or G
natggaaaacccattgaccgccctgcagaanncggcacgagcaagaaagagcgggaagaatccttgcctaacctgctacagtatgtgcggatgcccctactaacccccaggtatatcacagatgtaatagatgctgagcctttcatccgctgtagtttacaatgcagggatctggttgatgaagcaaagaagtttcatctgaggcctgaacttcggagtcagatgcagggacccaggacaagggctcgcctaggagccaatgaagtgcttttggtggttgggggctttggaagccagcagtctcccattgatgtggtagagaaatatgaccccaagactcaggagtggagctttttgccaagcatcactcgtaagagacgttatgtggcctcagtgtcccttcatgaccggatctacgtcattggtggctatgatggccgttcccgccttagttcagtggaatgtctaga

SEQ ID NO: 24729 - DNA, 501 bp, Homo sapiens
  misc_feature (1)...(501): n = A,T,C or G
ggccattagggaagtnnngnaggagaaaanananatttgccccgcgctgcaggaaaaaatttaaattagccaagcatggtggcacacacctgtcctagatactcaggaggctaaggtgggaggatcacttaagcccaggaggttgaggcagctgcgagccatgattgcactgctgcacaccagccttggggacagagcgagctctgtccaaaaaaaaaaaaaaaaaaaaaaaaaaggggggtttgggggttattttttccaaacgggaaaaaagggggggtttaaaaatttttttggaagggccccaaaaaagggggggcccctaaattccaccccaattaaattttttttaaaggggggaaaaattttaaaaaaaaaattttctttaaaaaaaataaactttttccaaatggcctctttccgaaatttggaaaaaaaaattcccccttttttttttttggcccaagaattaaaacccccttttttcaaaagctttaaggg

SEQ ID NO: 24730 - DNA, 477 bp, Homo sapiens
  misc_feature (1)...(477): n = A,T,C or G
cgcgtcccattgccctgctgcagcctgcggaataccgcacgagcagctgcggaatttgcggctttggcagacccagctgagtcactgtcactgcctaccaatctcgaccggacctcgaccggctcgtctgtgctgccaatcgactcggcgtggcgtcggtcgtggtagataggcggtcatgcatacgaattttcagctcttgttctggtgaccttttgaatacgtcttgtctataaaagaaattcatgcctttgtaaaatacacagattgaaatcatggcaggtccagaaagtgatgcgcaataccagttcactggtattaaaaaatatttcaactcttatactctcacaggtagaatgaactgtgtactggccacatatggaagcattgcattgattgtcttatatttcaagttaagggccaaaaaaactccagctgtgaaagcaacataaatggattntaactggctacgggtct

SEQ ID NO: 24731 - DNA, 510 bp, Homo sapiens
  misc_feature (1)...(510): n = A,T,C or G
gggtntncccnggggtnnnnnnnaattgaccgccttaggaatccgtacgagccgcaccccagtttacatgcttaaccgcattataagattgcaggcagtactagaaatcattaccaatgaaactgcaggggccttgaatctgcttgcccagcaagccacaaaaatgagaaatgtcatttatcaaaatagactggccttagactacctcctagcccaggaagagggagtatgcggaaagttcagccttactaactgctgcctggaacttgatgacgaaggaaaggttatcaaagaaataactgctaaaatccaaaagttagctcacatcccagttcagacttggaaaggatagtctccagattcccttttcagaggttggttcttatcccttggaggatttaaaaccttagtacaaatagtcctagccatattgggagtttgccttatactcccttgtctcttacccctcattgtcaaaaatatccaaacagccatagaggctcttgtgga

SEQ ID NO: 24732 - DNA, 518 bp, Homo sapiens
  misc_feature (1)...(518): n = A,T,C or G
gggggtnnnncnaggatgnnnnnnnnatttgannncctatgcaccgcctgcangaattcggcacgagccactctacgccaggcacctggcttgccaccagctgagtatgggccctgaacaaacacagcagaggcaggcagggggttccatcaccacccccttaccccccacagggcactgccaggcttagggctcaacccagaggtctgacgcacatgaagatcccacccaccctgctgcctttatacaaagaaaagcctctgaacaatctggcatgtgtccttgtacagcaaactaaagtcaaagaagcactaggctgcgactcaggagtcccggattccagtcgcagtgctgctactgagtggctgctgttaacttcaggttatgacttcccacctatgggcctcttcttcctcgtctatcaaatgggaagatggggtgatcatttccagcactaccgttctatagttctgtggtcctcccactaggtgataagatatgcagcacgtcagagtttc

SEQ ID NO: 24733 - DNA, 480 bp, Homo sapiens
  misc_feature (1)...(480): n = A,T,C or G
ggtgctttaaatgatggccgattgatnnccatgagacggatctgctccccgccgtctgctccctctccactctcttctcaaatggctgacttctggttctccctcaagtgttttttacactgggtgttcaaatttattttaagagatagggagggaggggacataaagggaatgcatacattgctagtcacatttttaaaattaacattttggaatagtgtttatggaaatctttagcttttaatcatttttaccaatttgaacagtttaataaactggttctgctctcttctgaatctcatgcctttggcaccttggtaggtgcaggaggagctcagtgcaaaaatcactttggggcctcattaaccctttagagacaagctttgccccaggctgcggaccagacagatgcttatggaaggttgataccagcttcagtctctactggattagccctactctttcctttcccctccatta

SEQ ID NO: 24734 - DNA, 484 bp, Homo sapiens
acttcgacccgcgctgcattttgaccccgctgcaggaattcggcacgagaagaaatgttaaaaagtccctgttttgtcctgaaattttagtctattctgggtaaataggattttctgacacagatatgagaagttgtagctctgatgtctagctgtagtctccttgatctgctgattgcattattttaatttgcttttctgggaaagcagttttgctaaaagctgtacagactttttcttttgtacctagcagtactttatatagtatagctttgggccatgtagcattttaagactcaattttaaaaaattattaatctgttgctgactcttaattcctatttcaatatgtgtttccttgaagaattcaggatacaacttcttgtgtatgacagctttccttcacacactatttttgtgggtgtgtatatatctgatttgggaagaatttaaaaaacacatagctttttaatttgtttgaaac

SEQ ID NO: 24735 - DNA, 477 bp, Homo sapiens
ctagaccgcctgcggtagtcggcactagccgaatcttcgatcgtactcgtgcgcgtgggtccgggtttcctacgcaaccttgagtgactaacccgacatggcagtgaccgagaaattacatcggccggaacggaagaacacagagacgcaagagaaaaatccactgccttccaaagaaacgattgaacaggagaagcaagcaggcgaatcgtaatgaggcgtgcgccgacaatatgcactgtacattccacaagcattgccttcttattttacttcttttagctggttaactttgtaagatgcaaagaggttggatcaagtttaaatgactgtgctgcccctttcacatcaaagaactactgacaacgaaggccgcgcctgcctttcccatctgtctatctatctggctggcagggaaggaaagaacttgcatgttggcgaaggaagaagcggggtggaagaagtggggtgggacga

SEQ ID NO: 24736 - DNA, 524 bp, Homo sapiens
  misc_feature (1)...(524): n = A,T,C or G
agtggtggnnaactgtgccttagaaaactgagagccctcggaagngccacgagcctagagacctactagtttgcctttgaacaccaaaaattccacagaagacctctggctaaaatttggcagcctgcacaaatcaaacttgatacaagtcgatactggagttgccaagatgaatacaatctatgcagcagaacctcatgtggtgacagtcaccatgaatggtgtggcaggtagaaaccacagagttaactcccatgctgccacaacccaatatgccaatgggacagtactatctggccaaacaaccaacatagtgacacatagggcccaagaaatgttgcagaatcagtttattggtgaggacacccggctgaatattaattccagtcctgatgagcatgagcctttactgagacgagagcaacaagctggccatgatgaaggtgttctggatcgtcttgtggacaggagggaacggccactataaggtggccgaactaattccaataacaacaacagcaatn

SEQ ID NO: 24737 - DNA, 477 bp, Homo sapiens
atagaccgcctgcggttgccgcccgatgagttgcacgatctccagggcaaagaagtgccccaggtctcctacttggactctccaagtctccagccattccaggtagaagaaagaaggaaacgtgaggagctgcaggtgccatagttccaggcctgcccacagacggtggtgcctcaaaacacctacccagaagcaacaagtgcagaatcaaggcttcagcagagctggtgtcttccaaggcctttctcgtcttggagacggctcccatcttgctgtgtcctcacagggtccttccctctgttgaagtctgcctccagtctcctcctcttagaagaccagagattttggattggccccaccatctgacttcattttgacttaattacttcttgaaagaccctatctccaagtaatcacattctgaggccctatgggttagggcttcatcatgtaaattgtcagggggacacaatttcg

SEQ ID NO: 24738 - DNA, 511 bp, Homo sapiens
  misc_feature (1)...(511): n = A,T,C or G
ggggttnccccagcccnnnnnnnaattgaacgccatagagtggcatgttngaagngctgnnacaatgcagcagattttacattttgccctctttgcaaacctattagcggacactgctgaagttcccacaccggtttctaatgccaaacatttaggagccactctaaatgcgtcactgcagttggcctgagtgtaaaagcacacacaaaaacaccctcaccaaatgatgggggttcttcatgacctgtttgatgccagcaattgtgaggattgctgtgccctctttgtactggctgggcttacccctacaagtggcagcattgcagagataagggcagccatttttatatctgccgtctagactcgttatcttcactctcattaatctgtccagctctgggctagaaagagatgaattcctggtttgccacctagatatgctccctgactccaaatcatctcacccaatttgccactcatcagctctaagacagccagtgaggaacaaaga

SEQ ID NO: 24739 - DNA, 327 bp, Homo sapiens
  misc_feature (1)...(327): n = A,T,C or G
accccttcgtgtgacttcatttggacaccttacctgaatgattttgttaaagccatccaagaattgggtgaccacgtgaccaacttgcgcgggatgggagcgcccgaatctggcttggcggaatatctctttgacaagcacaccctgggagacagagatattgaaagctaagcctcgggctaatttccccatagccgcggggtgacttccctggtcaccactgcagtgcatgcatgttggggtttccttctaccttttctatactttgtgcacagcatccacttacgttctttgaattgtgccattccttccaataaagaaatttgn

SEQ ID NO: 24740 - DNA, 499 bp, Homo sapiens
  misc_feature (1)...(499): n = A,T,C or G
ccgcccccccnaanntttgatngccctcngaattttgatagccttcggaattcgccacgagcaagcatgcgcacaattgccagctcaggctaaggactgcaggatgttccaggtgggttgcggtcttcgggcaggctatggtgaggggtcctgagggccttggtgaccgctgcagggagttggactttttgaagcgtggctcaagaaaaacccatgtttaattcctgcctttcgcttcctcagcagcctttctgggcccaggcaggggcctcgagccagggaaggatcctttgatgaccacaggggacagcagggagggcacagcgtggtcgtccacggtcacttgcgcacgagccagtgctgctgctggtgttagacaacaacttttatcaaagtggtttaatgtacagcagcaacaaagctgctttgtggagcagggctcccaatatgcagtgtgcccagagtagcagctcggaagcagtactgcaatcacatttat

SEQ ID NO: 24741 - DNA, 470 bp, Homo sapiens
  misc_feature (1)...(470): n = A,T,C or G
gggggggcgcnannnttaatgtaaattagaggcatnggcacgaggcngctgggtctctggtttgctgcagagccgtaggacactcctggctcctcagtaggacagacagacgcaggcgggtttattttggaggggtacttgtggcattttcctgtattgtcttggacatgggatgtggggaggtggaaatgatgagcagtagcatcatttctccctgttgggttttagccagtttgccagcaagcgcatcctagcagggtccccgagcagcaggttgtgtggatgaagggacaggcacttgcatccagctgatctaggtcacacctggctcttggctgccatgtggcttattaacagcttccagtggaagtcgcaataaacagtttttggtaaatctcaaaaaaaaaaaaaaaaaattcggggggggccccggcccccatttccccttaaagggaggcgtattacattcg

SEQ ID NO: 24742 - DNA, 497 bp, Homo sapiens
  misc_feature (1)...(497): n = A,T,C or G
aggcgcncnaattgacaatgatggctatcggaannccgccgaggccccgccccactcgggctgaaggcagtgatgtggccaatgcagtcctggatggagccgactgcatcatgctgtctggagaaacagccaaaggggactatcctctggaggctgtgcgcatgcagcacctgattgcccgtgaggcagaggctgccatctaccacttgcaattatttgaggaactccgccgcctggcgcccattaccagcgaccccacagaagccaccgccgtgggtgccgtggaggcctccttcaagtgctgcagtggggccataatcgtcctcaccaagtctggcaggtctgctcaccaggtggccagataccgcccacgtgcccccatcattgctgtgacccggaatccccagacagctcgtcaggcccacctgtaccgtggcatcttccctgtgctgtgcaaggacccagtccaagaagcctgggctgaagacgttgacctc

SEQ ID NO: 24743 - DNA, 490 bp, Homo sapiens
  misc_feature (1)...(490): n = A,T,C or G
ggtgccctatagacactgaagacatatcagctacactcnaaactctcccaggaatctttagtaaaaggtgaaagatttatatgatctgaagagaaaccagagtatcacctggtttatttttattagtagggttgaggcgactgactaaccactccaatagaggagagaaacaaggggctgtaaacagtgaccagtcgtcaccaagaaagaagttttgactaggaaacttcttagggaagttcctaagtcacctcttggggagaggtgaatgagaaaagggcaaatgtcctctgcctgcccctgggtagacatgcatcactttggtcttagctatgggatgaaccctgggaaggtttgcggtgaagataggtctgtgacttcatcaacacaaaccccacccactttaccccatacaacagttatcttgtgtccaaatatagaataaaagattgtagaagtaaaaaaaaaaaaaaaaaaaactcgagggggg

SEQ ID NO: 24744 - DNA, 493 bp, Homo sapiens
  misc_feature (1)...(493): n = A,T,C or G
agcggccaatgacaatgatgctctcggaanccccccgagcttaacagagtcaaaactggggtagaagggattttattttttcccaaaagggttccatctttgctatctgttgatcagccttagaaaatctaagtatgatcaataaattttaatggttgatggcatcctgtgtcagctggagtagttggttgtgaatattaaaacctagtactattttccctcagtaacatgtaattgctacattttttataagaaggtatggttagaaaaaaatgtgaaagatcacttaaaccaaagccagttacaaggagtaatctctcctgttggtttaccttcacctcagaactacaagaatattacaatacatagtgaatagttgtctgtaacatttctaccagttgtttcagtagcatattggtcttggcatttcttggcactgtggttctgctgtattatttgngatgtcttattggttgtgagcttttgttttttt

SEQ ID NO: 24745 - DNA, 493 bp, Homo sapiens
ccccccattgctcgcctgcaggaattcggcacgagccgacgccacatggcggcgcccagtggcgtccacctgctcgtccgcagaggttctcatagaattttctcttcaccactcaatcatatctacttacacaagcagtcaagcagtcaacaaagaagaaatttcttttttcggagacaaagagatatttcacacagtatagttttgccggctgcagtttcttcagctcatccggttcctaagcacataaagaagccagactatgtgacgacaggcattgtaccagactggggagacagcatagaagttaagaatgaagatcagattcaagggcttcatcaggcttgtcagctggcccgccacgtcctcctcttggctgggaagagtttaaaggtggcgtctcaccaagcctcagaacgacttacataaggggcaacaaacactcctctttttttccttctccttaactcttcttttaggttgacatctaatt

SEQ ID NO: 24746 - DNA, 475 bp, Homo sapiens
  misc_feature (1)...(475): n = A,T,C or G
ctagtaccgcctgcgtttgtccgccgtgagagattccagncacggtggcttcgtaggcttttagcttctgaaatccgctaaaagcggcggttcattcatcttcaagtacctagcctgactggtagggatgatcggggacccgcaccatttccttctggcgcggggggcggtggggcaagactaccctgtgctgacagggccctttgctttgcccctgctttgaacgctttatgtattaacggaatgccgaacatttgtgtcctacttgctgacagcgcacaggatccttctaacagaatttctcaagtacttaacaaaaagatgaaaacttgaagtccaagccgtgctgctgattccgtctcacagtttaaagactgtccagaaactttaagctttcaaaactgtacattttaaaatcctgtgcgtttatcttcattttgctgggcagaaagccaaagtactggactgcctggtg

SEQ ID NO: 24747 - DNA, 506 bp, Homo sapiens
  misc_feature (1)...(506): n = A,T,C or G
cggggnncnnnagggggnnnnnnattttgcccgcgcttaggaattcggcacgaggaacaggggcagctggataccccaggtgttcataatgtgacagccctgagcaacctcataacgtggcagaaggtggattatgacttcagctaccatcagatggaattcccctgcaatattaacgttttcattacttcggaggggaggtcactcctcccggcagactgccagattcacttacagccccagctaattccaccaaacatggaggagtacatgaacagccttctctcagcggtgctgccttccgtgctgaacaaattccgcatttatctaactcttttgagattcttggaatatagcatatctgatgaaataaccaaggcagttgaagatgactttgtggaaatgcggaagaacgaccctcagagcatcactgctgatgatcttcaccagctgctcgtggtggctcggtgtctgtctctcagtgctggtcagacaacgctgtcaag

SEQ ID NO: 24748 - DNA, 431 bp, Homo sapiens
  misc_feature (1)...(431): n = A,T,C or G
ccgccccccatggncgcctcgngantatagatgcgcctgcaggaattcgccacgagattcaggatacagaggagagccccagcgtatgccttggagaggcctcttctcaagcccaggagtcccattacctgccgtgtgactggcgagtcacctaagttctctgaacctcagctgcgtgtctcatgtattaaatgggcgcgacaacactggccttcagaggggatgtgggagtaaaaacaaaagcatctccagaggcccagtagacatgcaccacctgcttgaacgtttgctgagtgaattcaccttggccagggcctgattgggctgggctagtgtctgtcctcccccgacagagacgggcacacccagggatggacaagagtttggtccaaagttggcactaatctccctttaaaaaaaaaaaaaaaaaa

SEQ ID NO: 24749 - DNA, 478 bp, Homo sapiens
  misc_feature (1)...(478): n = A,T,C or G
agaaaagacctgatncccctcnnnanatcctantcggnntgcggaattccgcacgagagagagagagagagagagagagagagagagagagagagagagagagagagagagagagagagagagagagagagagagagagagagagagagagagagagagagagagagagagagagagattctctctctccccgcgcccgctctctctctctctctctctctgtgggagctctgtgtgtgtcgctgtctctcgcgcgcccccctcttttttttttctgagacaccttccccccgggggggtgtcgccacgcgctctctgtgtgtggcgcgtgtgggggggtatctatagatattctctcttttgtgggcacgccccccccccctctctgtgtcccgcgtttgtatctctctgtgagagagcgccccccctccctctgttttttcagtcactgtgtgtgttgtgctcctcccccccccct

SEQ ID NO: 24750 - DNA, 448 bp, Homo sapiens
  misc_feature (1)...(448): n = A,T,C or G
aatgantttgtgagcactcggaaagcgacgagaaattacataaactatatgtcctggcactccatcgcggctgaggacattgtctactccaacgatgttataccactgatagctcttctacactgctggtatgagcatatcatacacctgtataacttctttgaaaaacagtttagtattatttagtaaagctactcatgcatatactctcatttctctctcgggcatatgccctatagaaactctgctacatgtgcaccaggagacacattcatagatgttcatactctgtatgatccaaagcttttaaaattgattcagacttgttttatggcccaacatatggtctatgttggtaaatattcgatatgcacttgaaaaaaatgtgtattgtgtagttgttggatgttgtgttacataagtgcaatttaaataagttggttaatag

SEQ ID NO: 24751 - DNA, 490 bp, Homo sapiens
  misc_feature (1)...(490): n = A,T,C or G
ncgtgctttaaaaagattnccccattgatcggcngtcngaatnnggcacgagaaatgaggaaccgctccttgaatgttctggacagagcacagaattgcttcttaagtcagcccggcgcggttgcaatagacagcaaaaaggtaaacgtttgcctgaaatccgcacgccagctccaccgccccgcccgatggtcccagttcctctgggaatcgtcctgtatgcaacatcttcacaagagtggcaggcagttgaatctctggccttcgtgggaccactggacatctggcagagaaccaggaaaccacggttcccttctgtgagtccctcagccggaaaactacaagatccaaatcctgtcttcactggcttcaagaatcctgtcttcactggcttcaaaactgggatgaaggaggctccttattggagagcaaagcaaagagaaactcanattggatccatattaaagaagagaaggatggatttgtttag

SEQ ID NO: 24752 - DNA, 469 bp, Homo sapiens
aggggcaatagatctcgtgaagcattccgcacgaggggaaatatatagacaagtgagacacagtttcagtgtcattcacgtgcccgctccgacttcactcatccacactgctggctctgtgcttgtgttggacacagcaattctcatgataggtcatgtgtgttgagctctcactatgtgctaggcagcatcctttacaaatcacaaatcacaactgtgtgagacaggccctgctactgccccatttcataaataaggcaagaggggcttggtgacttacccagagccccgcagctgggaggtgggaatgccgggatccaaacccaggtcacaggctgcccttcaaatgctctgccaaaggccagagcccacacctgtaattccagcactttggaaggctgatgcgggaggaccacttgagctcacgagtttgagacctgcctgggcaatgtgacgaaaccccgtccct

SEQ ID NO: 24753 - DNA, 462 bp, Homo sapiens
atttgaccgcctgcggaatttggcacgacatggagtcagcgctcacctcattcacacaattatcatagagctccctggacactgaacctctaaagggaaaaggtctaccctggagccaggagcatcagggttggcttgggagcatgagaggtgagcccagggctaggcctgggccaggccccggcagcactgctacttgggaggagccacttcacctttgtattagttattaaaaaatataatttgggctgggcgcagtggctcacgcctgtaatcccagcactttgggagtccgaggcatgcggatcacttgaggtcaggagttcgagaccaccctggccaatatggtgaaaccccatctctactaaaaatacaacaaagttagccgggcgtggtggcaggcgtctgtaatcccagctgcttgggaggctgaggcaggagaatcacttgaaccctggaggt

SEQ ID NO: 24754 - DNA, 489 bp, Homo sapiens
  misc_feature (1)...(489): n = A,T,C or G
agtggcccatagacactgaggacntcgccgagacatctttgtctgttcactttctatcttatatacttatcagggccatactggtaagcttgtgtaggaggagttagagggaagttgaaagccaacatctggatcaatgtaatgtcaagatcacaaagagagagactgcaggggtccactgtgagaggtgacactgttggggaccttcctgattcattcttcttgggctttgctagcctgtacaacctacatgtcttttcttccactgcctgaaagacttgggttgaactataactgttggagagagatgttcctctttaatcatgaaacaccttaagaagtctataatgcaatccttagtcctaccctgaacctatgtgtcctctaagtcaggccctgatctagtgcagtaaaggggaaggtggggcttaatgggagctttgcctgggacctgaacctggagcacttaccgattangaggaaaggact

SEQ ID NO: 24755 - DNA, 516 bp, Homo sapiens
  misc_feature (1)...(516): n = A,T,C or G
aggcggnnnnnnnnatttgttcngcccgcctgcaggaattcggcacgagctcccacaagaacattaaaggatgtcgtttggggattaaactctttgtttactgatcttttgaattttgatgatccactgaatattgaagctgcagaacatcatttgcgggacaaggaggacttccggaataaagtggatgactacatcaaacgttatgccagatgataaaaggggacgattgcaggcccatggactgtgttacagtttgtctctaacatgaaacagcaagaggtagccccctctcccgtcctcatgctccctctcagtcccctggattgccccagtcctgtgaccatgttgccctgaagaagaccatcttcatgactgctcattgtagatggagaattcaacataaatacagcaagaaaatgtgtttgggcttctgaagagttgtctgcttaccttaacatgtttacttttttgaacttgtactgtataggctggtggtgaaattctttagaagtt

SEQ ID NO: 24756 - DNA, 480 bp, Homo sapiens
attgcccgccttaggaattcggcacgagagagaacccactttatccctagtcccccaacaaaggctggtctaggtgggggtgatggtaattttagaaatcacgccccaaatagcttccgtttgggcccttacattcacagataggttttaaatagctgaatacttggtttgggaatctgaattcgaggaacctttctaagaaattggaaaggtccgatctagttttagcacagagctttgaaccttgagttataaaatgcagaataattcaagtaaaaataagaccaccatctggcacccctgaccagcccccattcaccccatcccaggaggggaagcacaggccgggcctccggtggagattgctgccactgctcggcctgctgggttcttaacctccagtgtcctcttcatcttttccacccgtagggaaaccttgagccatgtgttcaaacaagaagtggggctagagcccgagag

SEQ ID NO: 24757 - DNA, 316 bp, Homo sapiens
  misc_feature (1)...(316): n = A,T,C or G
gaaaaaaacctgattcccctccnnanacctgatccgccntgcaggaattccgcacgaggagagagagagagagagagagagagagagagagagagagagagagagagagcagtggcgtggttcgtgccaaattccgaagcaatttttctgctggggccattgcacacacaatccgagtgatgctgcccccctcagggatttactctaacgaaaaatctataaataagtgtggatttgcgctcttgtttttttaagtggattaaaaaactctctaccttaaaaaaaaaaaaaaaaaacctcgggggggggcccggcc

SEQ ID NO: 24758 - DNA, 490 bp, Homo sapiens
  misc_feature (1)...(490): n = A,T,C or G
nttgcccgcctgcggaatttggcacgcgcttttgccatctgctgaggtggcaaaactataatttattcctggttggctagaactgggtgaccgacagctatgaaacaaatttcagctgtttgaagttgaactttgaggtttttctttaagaatgagcttcgtccttgcctctactcggtcattctccccatttccatccattaccccttagccattgagactaaaggaaatagggaataaatcaaattacttcatctctaggtcacgggtcaggaaacatttgggcagctgctcccttggcagctgtggtctcctctgcaaagcattttaattaaaaacctcaataaagatggccctgcccacaaannnnnnnnnnnnnnnnnnnnnnnnnnnnnnnnnnnnnnnnnnnnnnnnnccgggggggggggccccgccccccacccccctttgagggggggttaaataaatcgggggggggggtttaaaaggg

SEQ ID NO: 24759 - DNA, 497 bp, Homo sapiens
  misc_feature (1)...(497): n = A,T,C or G
aggccccnaatgacaatgatagcatgcggacgcccccctgcagccgcccgctcttccctcccagccctgccaggcaggcctggaggctgatactaaatcaaaaccttaaagaggtgactggcagtctggggaggggagaagaggtctgcaacgaaaatctaattaagaacattgagatgttcacaaccaagttcagcttgcagcttccggggaaatgcaaccgacctctatgccatctctagctgggtaatcttcgaggccctgaaatgcaattttctgaacctctaagtcacttttattttatgtcatgtgataaagacacaagtagtcacgcactattggaaataggttgggagggaggtctttaagatcgcttttaaaatagtttccaggacttgtctaaaaatgatgacaaactttgaatccagagggcctgttggtcaatgtgttggaaaggacatttcaggccggcagagtaattggataattcacaggcn

SEQ ID NO: 24760 - DNA, 483 bp, Homo sapiens
  misc_feature (1)...(483): n = A,T,C or G
aggatgtccnaggagcnccctatgatcgcctgtggaattccgccgaggagacttgagctagtctctgttttcccctgtctttccccattggcaagactttctcatgtcaggagcatggacacagcttcctgcttcagttctatgggtaggttcttggttgtaggactgaggtgtacatactgccctactcctttcttggagcagccccagcacctgctttactgcaggctcccagggagggattcccagtcagaagcccaccttgttagtcctgtggatgtttgggtgtccttgtccagatttcaggttcctgtgtacccacagtctacttcctttctctagctgctattttcttatgccttcctgtggcaggaattgccttcacagactacatcactgcctatatagaccagaggctgttcttgcaagatcttctttagaaattctccttcaaatactcagttgttttctctcatgggctga

SEQ ID NO: 24761 - DNA, 301 bp, Homo sapiens
ctcgacattgactcgcgctgcaggaattcggcacgagccacaacctgcgcctctgatgccaggctcagccacgcacactgctgccatcagtatcagtcgagccagtgcccctctggcctgtgcagcagctgctccactgacttccccaagcatcaccagtgcttctctggaggctgagcccagtggccggatagtgaccgttctccctggactccccacatctcctgacagtgcttcatcagcttgtgggaacagttcagcaaccaaaccagacaaggatagcaaaaaaaaaaaaaaaaaa

SEQ ID NO: 24762 - DNA, 483 bp, Homo sapiens
  misc_feature (1)...(483): n = A,T,C or G
aatagcacaaccaataaaaaaantttgaccccgcgctgcaggaattcggcacgaggtcaactgcttcatgctggacccggccatcggggagatcattgtggtggacaaggatgtgaagataaaaaagaaagggaaaatctacagccttaacgagggctacgccaaggactttgaccctgccgtcactgagtacatacacaggaagaagttccccccagataattcagctccttatggggcccggtatgtgggctccatggtggatgatgttcatcgcactctggtctacggagggatatttctgtaccccgctaacaagaagagccccaatggaaagctgagactgctgtacgaatgcaaccccatggcctacgtcatggagaacgctgggggaatggccaccactgggaaggaggccgtgttagacgtcattcccacagacattcaccagagggcgccggtgatcttgtgataccccgacan

SEQ ID NO: 24763 - DNA, 481 bp, Homo sapiens
  misc_feature (1)...(481): n = A,T,C or G
gacgggnnnnnaatcgcctgcctgcaggaattcggcacgagatttggcttaggactgatccacttccatgttacttacatctgtgggtttttgttgttgctgttagaaaatttttggctggtgaaaacagcactcctttggctggagcacttgtgtccatgcatgtacttgggtgtttccctccatcctttctgatatgaccaaaaatcaagttgttttgttttttgtcaccttcactggcatgggctaaccacttctttttcaaaccctctgaacacctttttctgatgggtaacttgcaggaatattctattggaaaagataacaggaaagacaagtgcttcttgaccccttnctcaatgttctagccttcactctccaattgcttttctgggctgattacaggcctctgtggatcttacactctgctggctncactgtgatgcagcagtccaactgtacttgcaagtggctgcttctt

SEQ ID NO: 24764 - DNA, 472 bp, Homo sapiens
cctagaaccgcgctgcaggaatttggcacgcgcttccgcacactgaagagtacgtcttcgggtctacccctaatcacataatggctgtgtttaatcagaagtctgtctcggatatgattaaagagtttcgaaaaaattggcgtgctctttgtaactctgagagaactactctatgtggtgcagactccatgctcttggcattgcagctttctatggcggagaacaacaaacagcacagtggagaatttacagtctctctcagtgatgttttattgacatggaaatacttgctccatgagaaattgaacttaccagttgaaaacatggacgtgactgaccattatgaggacgttaggaagatttatgatgatttcttgaagaacagtaatatgttagatctgattgatgtttatcaaaaatgtagggctttgacttctaattgtgaaaattataacacagtatctcctgggtc

SEQ ID NO: 24765 - DNA, 502 bp, Homo sapiens
  misc_feature (1)...(502): n = A,T,C or G
gatagtggcnnnaggggngnnnnaactgaggacccctcaactgagtagccctgcggaannccgcacgagccttagccccattgctccattcactcccaggtgagaattcaggcaaacgtccacaaaggtcacaggcagcgtacatacggttctgttataccccatatattaccccttcatgtcctaaagaagacattttctcttagagattttcattttagtgtatctttaaaaaaaaatcttgtgttaacttgcctccatctttttcttgggtgaggacacccaggaatgacccttttgtgtctatgatgttgctgttcacagcttttcttgataggcctagtacaatcttgggaacagggttactgtatactgaaggtctgacagtagctcttagactcgcctatcttaggtagtcatgctgtgcattttttttttcattggtgtactgtgtttgatttgtctcatatatttggagtttttctgaaaaatggagcagtaa

SEQ ID NO: 24766 - DNA, 362 bp, Homo sapiens
  misc_feature (1)...(362): n = A,T,C or G
attgcccgcctgcaagaattcngtatccccgggctgcaggaattcggcacgagatccagtgtccagacgccttgccactggggtcagcatggcatccagcatccaacgccagctgtggctgtgacaaacgcagcagcactgggcgttcagcagcagcagcactgaggctgtcctcacctatctggctctgtgatggaatttggtgtaattctaggtacctggtctctgtttctgcttttttcccaagccttgtttctacagccttcaagtgattctgtaacttactcaatgtgctttcaataaaattcatttcctgatttaaaaaaaaaaaaaaaaaaaaaacctcgggggggggcccgggc

SEQ ID NO: 24767 - DNA, 462 bp, Homo sapiens
  misc_feature (1)...(462): n = A,T,C or G
actgaccgcctgaggaanttcgacgacctttagtgcaacaaaaagtactatgcgcagacacatatgctgtggatgatgaagaagctgctgaagtaaacgctaatgagcagccagaggcgccaaagcttgttctgcagtctctgttttcacttatacgaggcgaagttgagcagttggattcaagagcacttaccctttgccttcatcagatagcagaatcctatttccaggaggaggactatgagaaagcaatgaaattcattcagctagaacgattgcatcatgagcaattgctcgcaaatctttctgccattcaagaacagtgggaaacaaaatggataactgtgcaaccacatacagttacggctctaaggaattcagaaaagggatttaatggtgaagattatgaacggcttacgaaaatttgtgcaacacatcgagatcctcttttatgcaaacata

SEQ ID NO: 24768 - DNA, 470 bp, Homo sapiens
  misc_feature (1)...(470): n = A,T,C or G
aggggcnatagacctcgtgaagcattcggcacgaggcaaattgggatctggaaatgattttgaggtgttcttccaacgacttggaattgcttcaggcagagcacggtatactaaaaattgggaaacaaacaaattcagcggctatccactgtatcacagtgtctatgaaacatatgagttggtggaaaagttttatgatccaatgtttaaatatcacctcactgtggcccaggttcgaggagggatggtgtttgagctagccaattccatagtgctcccttttgattgtcgagattatgctgtagttttaagaaagtatgctgacaaaatctacagtatttctatgaaacatccacaggaaatgaagacatacagtgtatcatttgattcacttttttctgcagtaaagaattttacagaaattgcttccaagttcagtgagagactccaggactttgacaaaagcaagc

SEQ ID NO: 24769 - DNA, 470 bp, Homo sapiens
  misc_feature (1)...(470): n = A,T,C or G
cggcgnannnnnnattgccctccatgaagaattcggcacgagccggcgatctccaacgccagcgccgcctctcgctcgccgagctccagccgaaagagaaggggggtaagtaaggaggactctgtaccatggctcgtacaaagcagactgcccgcaaatcgaccggcggtaaagcacccaagaagcaactgggtacaaaagccgctcgcacgagtgcgccctctactggaggggcgaagaaacctcatcgttacaggcctggtactgtggcgctccgggaaactagacgttatcagaagtccactgaacttctgattcgcaaacttcccttccagcgtctggtgcgagaaagtgctcaggactataaaacagatctgcgcttccagagcgcagctatcggtgctttgcaggaggcaagtgaggcctatctgggaggcctttttgaagacaccaacctgtgtgctatccat

SEQ ID NO: 24770 - DNA, 422 bp, Homo sapiens
  misc_feature (1)...(422): n = A,T,C or G
ncttgatcgccttaggaattggcacgcgctcatgtctgcttatgcggtggctcgctgctcagaacaggtaacgagacccttaatcgctgggttgaagtttctaatcaagaagatgctcatctatgtattcaacaaagcagcttcccttgcttctgaaatgcttccaaacaacatctcatatttcctgaagaagataatgcctggacaagcagcacaagtcattcaggaggaagagggtaatctggaagagtttcctgacctactctgctgctgtgattaaacaaccaccaggaaattttgatgacactgttctcctgagctcctccctttcctcggggaagaaaagcattgaaactacaaaaataaagtgttatttggctggaaaaaaaaaaaaaaaaaaaaactcgggggggggcccgggc

SEQ ID NO: 24771 - DNA, 508 bp, Homo sapiens
  misc_feature (1)...(508): n = A,T,C or G
gggaggaaggaaaaccccnnnnnnaactgatccgcnctgcaggaattcggcacgaggacaaaccaaagcctttgttctttcttattgtggagcgtccccttccatcaagcagcctgccctcaagccaaggatcatcccctggaacccagtatgcacccagaggggactcagcttcaaagctgctccaccatgctgggtcccaggcagctttcctctgaaaagcaacctctcctgccacccagatcccatctcaagagctcgcccatgttacgagcatgtaaaggactgacttcctagtaactgttgcagtttacaacctgccctccagggacacgtctccatggtttttcctacacatgaatgcgagaaatggctgataagcacagtaatttaagattgcgtattcatgtagtgagatttagtcattaaccaacccggtctttgtgatgtgtgaagccttcccttcagttatgtcccatttttatgatgccaaaagctggcactgtgt

SEQ ID NO: 24772 - DNA, 498 bp, Homo sapiens
  misc_feature (1)...(498): n = A,T,C or G
ggggggagcannnattgcacgccctgcaggaanaatagatccggcctgcaggaattcggcacgagctcaggctgagctcaagtgccccgtgtgtcttttggaatttgaggaggaggagactgccattgagatgccttgccatcaccttttccattccagctgcattctgccctggctaagcaagacaaattcctgtcccttgtgccgctatgagctgcccactgatgacgacacttatgaggagcacagacgagataaggctcgaaaacagcagcagcaacaccgactggagaacctccatggagccatgtacacgtgaggaggatggggctgagtgctggacctctgcgtcttccttattaaccttgaatactcattaaaggtttctttacccacaaaaaaaaaaaaaaaaaaaaacctcgaggggggcccggtgccccatttttccctatggggggctgatgtacaatacgacgggccgcggtttaacaacgncgg

SEQ ID NO: 24773 - DNA, 502 bp, Homo sapiens
  misc_feature (1)...(502): n = A,T,C or G
cccccccatcgcccgccctgcaggaatttgagacgccgtagggcgcatacccgagacgattgtatgaagaaaatatggaggaactgttacatgttcggtactaagtcattttcaggggattgaaagactattgctggatttcatgatgctgactggcgttagctgattaacccatgtaaataggcacttaaatagaagcaggaaagggagacaaagactggcttctggacttcctccctgatccccacccttactcatcacctgcagtggccagaattagggaatcagaatcaaaccagtgtaaggcagtgctggctgccattgcctggtcacattgaaattggtggcttcattctagatgtagcttgtgcagatgtagcacgaaaataggaaaacctaccatctcagtgagcaccagctgcctcccanaggaggggcagccgtgcttatatttttatggttacaatggcaccaaaatattatcaacctaactaaaacattn

SEQ ID NO: 24774 - DNA, 485 bp, Homo sapiens
  misc_feature (1)...(485): n = A,T,C or G
atttgcccgcgntgnattgactccgcgctgcaggaattcggcacgaggaaattccaactaatggattccattcttccagttaagacatcatctccagaaaactgtgctagttggcatccagcagtgcccaagtattatttaacccactagaacctgtgactgtatcagctttatatcctggacctcagcctggaacaaaggagagctacacttggatactaaacacaagtggtctggatagattatgctgggaaaagaagcctggagcaggcagtacagtgggagaacaagacagaagtgcttgccttggtgatccaaaaaaggcaggatccggccgggggcaaggtgattattctgtctgatgaggagaataagagccagtttgtggtattgacagaagaatgaaagataaggcccccaaaagatgaaactccatctgctgccctaaaagcattctccactggtctgaagatgtgcacaggcaa

SEQ ID NO: 24775 - DNA, 507 bp, Homo sapiens
  misc_feature (1)...(507): n = A,T,C or G
ggggngatttggggccccnnnnnnaattgatcgcgctgcaggttggaggttaaaagagccttttggacagaaaactgggccaggaaaaggcatctcagaccacaaatagagaatttgattcctcatttgccacataagtcatctgcttagcttttcctttcctttttttgtttttttttttttgggggggcaaagtttccttttgtccccaggtgggagggcaggggggccttttgggttaatggaagaattgtttgggttaatggaaccctccgcctcccgttttaaagcaattttcttgtttaaccctccggagaagcgggaactacggggggcgcccccccccccccggttatttttggtttttttagaaaaaacggggtttcattgggtgggccgggaggggctaaatttcgacctcgggacccgcccccttgtgcctccaaaagggtgggaataacgggcgggattcaccatgcccagcccttatatttttttttattccac

SEQ ID NO: 24776 - DNA, 468 bp, Homo sapiens
atttgccccgcgctgcacgaattcggcacgaggttttacccatcttagaagggagattagatgctaaaaactgcaagcgcatcaatcttggaggaagccaagcagctggttacctccagcgtctcctccagctgaagtaccctgggcacctggcagccatcaccctcagccgcatggaggagattctgcatgagcacagctacatcgctgaggattatgtggaagaattacacaaatggcggtgtcctgattattatgagaataatgtccacaagatgcagctcccattttccagcaagctcctgggcagcactctgacctctgaggagaaacaagaaaggcggcagcagcaattgcggcggctgcaggagctcaatgcccggcggcgggaggagaagctgcagctggatcaggagcgtctggaccgactgctatatgtgcaggaacttctagaggatggccagatgg

SEQ ID NO: 24777 - DNA, 418 bp, Homo sapiens
  misc_feature (1)...(418): n = A,T,C or G
cgcgcgganaanantttgaccccgcttagggtcgcttcttctccttggatttgttaaggattccaagtaactcttatttggagagaagacgatctgcacttcgcattttggcattgacatttaattttagggtcctttatatagaagggagagtaggcactgttctaggtaagcactaagtgggctttaatacagcatattccaatggggaatcccaggaaccaaaagactaattgtccaagtccacaactagaagtggcacctctgcagaaacaagcatcaaattccctgctcaggaagaagccagatgagtcagccccattcgtctgtatgcccagtcccatccgtgtcctgctgtaactacatagatctcacctgagtaaagtgattttttttctgaaaaaaaaaaaaaaaaaaa

SEQ ID NO: 24778 - DNA, 487 bp, Homo sapiens
  misc_feature (1)...(487): n = A,T,C or G
gtggggtggggnaatgcccgcctgcggaattatgcacgagcatgggccagtggcagcttgaagtaggagacccagcgcccctaggagcagggaacctggggcctgaactcatcaaggaaagcaatgccaatcctatcttcatgcgcaaggacaccaagatgagtttccagtggcggattcgaaacctcccctatcctaaggatgtctatagtgtctctgtggaccacaaggagcgctgcatcattgtcagaacaaccaacaagaataccagaagccaaaggaggttgtggtggccgagtctgagctacagaaggaactaaagaaggtgaagacagcccacagcaacgatggggactgcaagacccagtagttggcccctgagccttatacctccaccacagggggtgccgtgagacttcaaggcttggcccttcttgaccacggcagcctcctgtcttctaggagctatcaagggtctctaagaact

SEQ ID NO: 24779 - DNA, 482 bp, Homo sapiens
  misc_feature (1)...(482): n = A,T,C or G
atttgcaccgcgctgcatgaattcggcacgaggaacaacgttaatgtggtatatacgccgtggtctaacctgaagaaaacagctgacatggatgtggggcagataggctttcacaggcagaaggatgtaaaaattgtgacagtggagaagaaagtaaatgagatcctgaaccgattagaaaagaccaaagtcgagcggttcccagacctagcagcagagaaagaatgcagagatcgtgaagagaggaatgagaaaaaagcccaaattccnaaaaaaaaaaaaaaaaaaaaaaaaaaaaaaaaaaaaaaaaaatctttgggggggggggggggggcccctttttcccttttgggggggtttttaaaattttcgggggggggtttttaaaaggggggggggggggggagnnnnnttgtnnggnccggccttgcntttcccccccgttcctttctctttcctggctcgggggggggcccggtccc

SEQ ID NO: 24780 - DNA, 476 bp, Homo sapiens
cgccgcccccccccccatcgacaatcgagccgcgctgcaggaattcggcacgaggaagattatatgtaaggctctgaagggagagggagatgtacattctgccaggctcctggggaccttatccgagtcatgaaattgatgactgttgatccagtggtgcaagaagctacactccatgtgtcatcacgcttatgactcctaatgtatttttaaggcaaaaaatgtcagccgactccatcttcacccctcgattcctcgagtccagcctttctgtgccagtgcttcactgagccacaacgctctcgccatcgggacccggctgggcctggagtctcggggcacagttgccatggagccctcctgggtcattctacaaatgtgctgagtgccagctgaaaaccccacaggagatggagtaccttggccaagcttaaagagaagattttctcagggtatttattagtgtgtccagcagg

SEQ ID NO: 24781 - DNA, 450 bp, Homo sapiens
  misc_feature (1)...(450): n = A,T,C or G
ntttgcaccggctgcaggaattcggcacgagcacccttcaggataatacaaatcaaactgaaaacaggtttcaaaagacagatgcttctgtgtcacacttgtcaggtttgaatattggcagcggtgcattcgagacaaagacagctaacaaaattgcttcggaagctagtttttcatctagtgaaggaagtcctttgtcaaggcatgaaaacaaaaagaaacccgtgatcaatttaaaatctaatggtgagagagataatcggacactagattttctttttctgttttaaccaaaaaactctgtgacatgcatttgttgtttgcaccctcatgtgagtcctgaagcgggcatgctcacagggactgccattgcagctgtccctggggtggaacctgagggcttctggaggctcagttcttcacagacaggaccacacgggtgccatggag

SEQ ID NO: 24782 - DNA, 493 bp, Homo sapiens
  misc_feature (1)...(493): n = A,T,C or G
ggcggacgcccngaagcccgcctgcaggaaaattgacgcgcctgcgcgaattcgccacgagctcattgccggcctggcccttgtgcccatccttgatgctcggacacgggtgccagccaaaaagttggagtgaaaagaccctggcacccgcccgacacctgcgtgagccctaggatccaggacctctctcacctctgacccagctccatgccagagcaggagccccgggcaatatttggactctgcaccccctctcctcttaaggggccagacttggcagcatgtgcaccaggttggtgttcaccagctcatgtcttccccacatctcttcttgccagtaagcagctttggtgggcagcagcagctcatgaatggcaagctgacagcttctcctgctggttccttcctctattggactgagtgggtacggccagccactcagcccattggcagctgacaacgcagacacgctctacggaggcctgctgataag

SEQ ID NO: 24783 - DNA, 470 bp, Homo sapiens
  misc_feature (1)...(470): n = A,T,C or G
gtgcgttnnannnaattgagatcgntgagcaattcggcacgagcgatttcctatgtctcttcttgactgatttcttctcctcggtccttcaatgaacaagcctactgtaggaaaaggaatgttgtccactttataatgagatcatttgaggatatgacttagaaacttgagggagaattgaaagatttgggttctatcccattactggtttgaataaagtagtttgaaaggaaaaggttcactgttgtcttgttcagtgttgtctggtaattgagagaggtgccttcgagtctgcagagagtcttcagctttcggaagttaatgaagccgtgaaggttgatagccataggggcccacgtgaaaggcatttacataaaatattcactttaggtaattaatttattcaacaaatatgtacattgaatgcctattgtatgtcaggagactgagaccttactgttgaaagaagn

SEQ ID NO: 24784 - DNA, 509 bp, Homo sapiens
  misc_feature (1)...(509): n = A,T,C or G
ngagaggtnnnnnnatagacggccattgcccggctgcaggcttccactctagggcaggcagagcagtctatactctcccaagcctgcttgacctccaagtagagctgatacagagatctgtgaatattgtgatagaaattctttggtattcatacatttcagctgcaagtcagcaatttcccaggtaccatgtaagctataaaacagtcattcttaaagacagaggatagctgtgactcatgggatcatgaggtccatggctggttgcaggttccctttttccttcctcaggttttgtctcttcctgtgttgtccccagcaagggagagactgtggggtggattgggagaacagattaggagtatagcaaatgaacccagaatggaacagtggggagctaactgtgaatgaggagagtacctgctgcaggaccntgaggtcaggtgtgaatgctgtattggcacaggngaataaatatcctggcgtctggagccttcacctctccgtca

SEQ ID NO: 24785 - DNA, 470 bp, Homo sapiens
  misc_feature (1)...(470): n = A,T,C or G
nattgcactttcgacccccggctgcaggtttaagtcttccttccagtgctgtggggcataacgatgaggcgctggccttgggggccacaccaggtcgcagcaaatggcttcagcctgggacgccagtgttttatgctcttagttcagtaaaatacgcccccgaaattcaagattgagtgtcaggctttatatatattcagcattcctcattacagaaatcttctattgaatgggaaaggtttaaatgctaaccaaagcaatttatttttaattaatatttttagactctgtgctgtcatactgaactcactgctagctaagagacctatcagagatttagatatattttctccaggttttttgtgggttttctttgttgttgttgttgttctagccatgtgacagaggctctttctaaaagtatgtagttcgctgtgtgtcggctccagcagtaaccgtcctcactgcgc

SEQ ID NO: 24786 - DNA, 291 bp, Homo sapiens
  misc_feature (1)...(291): n = A,T,C or G
ataacaangcgcaccctggctgacatcatcatggagaagctgactgagaagcagacagaggttgagacagtcatgtcagaggtgtcgggcttccctatgccccagctggacccccgggtcctagaagtgtacaggggggtccgggagggattatctagtaccgcagtggaaaactgcccaaggcatttaagatcatccctgcactctccaactgggagcaaatcctctacgtcacagagccggaggcctggactgcagctgccatgtaccaggccaccaggatttttgcct

SEQ ID NO: 24787 - DNA, 446 bp, Homo sapiens
  misc_feature (1)...(446): n = A,T,C or G
cgtgggtaannnaaattgaccgccttaggaatccggcacgagctcctggccaccaagtgccagcattgcccacaaatccttttaggaatgggacaggtaccttccacttgttgtatttattagtgtagcttctcctttgtctcccatccactctgacacctaagccccactcttttcccattagatatatgtaagtagttgtagtagagataataattgacatttctcgtagactacccagaaacttttttaatacctgtgccattctcaataagaatttatgagatgccagcggcatagcccttcacactctctgtctcatctctcctcctttctcattagccccttttaatttgtttttccttttgactcctgctcccattaggagcaggaatggcagtaataaaagtctgcactttggtcatttcttttcctcagaggaagcn

SEQ ID NO: 24788 - DNA, 401 bp, Homo sapiens
  misc_feature (1)...(401): n = A,T,C or G
nagtgggcattgccttcagtggcattcggcacgagctccgctgctcgccatgtcttctcacaagactttcaggattaagcgattcctggccaagaaacaaaagcaaaatcgtcccattccccagtggattcggatgaaaactggaaataaaatcaggtacaactccaaaaggagacattggagaagaaccaagctgggtctataaggaattgcacatgagatggcacacatatttatgctgtctgaaggtcacgatcatgttaccatatcaagctgaaaatgtcaccactatctggagatttcgacgtgttttcctctctgaatctgttatgaacacgttggttggctggattcagtaataaatatgtaaggcctttctttttaaaaaaaaaaaaaaaaaa

SEQ ID NO: 24789 - DNA, 465 bp, Homo sapiens
  misc_feature (1)...(465): n = A,T,C or G
nattgaccgcctgcggaattcggatgagaatctttgtatttttagtagagatggggttttaccatgttggccaggctggtcttagactcctgacctcagttgatccacctgcctcagcctctgcattcagtttattcacatatttttggtaactcccatggcagctcctaggatttcagcggtctgtgggccagaaagcaggcaccagggctgacctcaaggccgtatcagagggccaagcagagttcttttggatacctgcttttcatcccacagggccttagagtcagaggtaaggtagcaacagagctagaatggggcaatgcactcttaccctccttctcaacttttatttaagctgtgctaaatgttttcttcaagggaaccagatttagttctttacagaattttccagcgaaataaaacatgttgtaatagctgtgtttgagatgaaataagaggttg

SEQ ID NO: 24790 - DNA, 485 bp, Homo sapiens
  misc_feature (1)...(485): n = A,T,C or G
cttagaccncgccctgaggngttttgccccgcgctgcaggaattcggcacgaggagcgccggcgagcggcgcggtgagaccctcgtgcagtagagacggagtttcaccatgttggccaggatggtcttcaacttctaacttcgtgatccacgctgctgggattacaggtgtgagccaccgcgtgtggcctctgggcaccttttgaaggtggtttcaccccaacatcagcagggtggaggcggagaagctgttcctatccagaggtcagcgtggggacttccttgccaggcccagtgagagcagcccggggggcttcacgctgtccgtcaggtagctgaagcagagagagaaggcggcaggcatcagcggtttcttctatgaacttataagatcaaagactttaagactttcactatttcttctaccgctatctactacgaacttcaaagaggaaccaggagtacggaaggagcatgaaagtgacn

SEQ ID NO: 24791 - DNA, 475 bp, Homo sapiens
cttagcccgcctgcaggtgtgtagaaggacggagtggggatggtcgagtatctcacaaaagaagacatggaatatgccctgcgtaaactggatgacaccaaattccgctctcatgagggtgaaacttcctacatccgagtttatcctgagagaagcaccagctatggctactcacggtctcggtctgggtcaaggggccgtgactctccataccaaagcaggggttccccacactacttctctcctttcaggccctactgagacaggtgatgggaattttttctttattttttaagttaactgagctgctttgtgctcagaatctacattccagattgaggatttaagggcctaggaaatttttttaaattttttttttttaagaacgaaaaaaactacctaatttctaccagggccctattatccgtgaaacattttaaactggccaaaatgggggtttggttcagaaaccagt

SEQ ID NO: 24792 - DNA, 481 bp, Homo sapiens
  misc_feature (1)...(481): n = A,T,C or G
gcgggccnnccttgactgccttcgccaactttctaagcagatataaagacacaataaataaaatcagagatttacgaatgaaagctgaagattatgaagtagtgaaggtgattggtagaggtgcatttggagaagttcaattggtaaggcataaatccaccaggaaggtatatgctatgaagcttctcagcaaatttgaaatgataaagagatctgattctgcttttttctgggaagaaagggacatcatggcttttgccaacagtccttgggttgttcagcttttttatgcattccaagatgatcgttatctctacatggtgatggaatacatgcctggtggagatcttgtaaacttaatgagcaactatgatgtgcctgaaaaatgggcacgattctatactgcagaagtagttcttgcattggatgcaatccattccatgggttttattcacagagatgtgaagcctgataacatgcn

SEQ ID NO: 24793 - DNA, 468 bp, Homo sapiens
  misc_feature (1)...(468): n = A,T,C or G
cggggccnnnnnnnattganatcgacccgcctgcagccaaatacatggattccccaagtggaaactaggagcagggagttgcttgggtggccgctaacaccaggctactcttattttagcttgctaagttgagatcagctagacctgctttcttttctcctcagtcttgcatttccctcaatacaagctgcagcctctttcctcgtttctagtctcagaaggaaggagagggaagccattctcctctagggactcttcagtctcatttagatgatagtccctttttttctacctccatattagagatggagctccttccttttcctgtttcttaatttttgtcttctcattcctgcttccctctcaccctattgccagttccaccaactagagtgaaagacttcctagccatttcattaaatctattctgtatccaccaggtggcagcatcttgtcatacgtgtcagg

SEQ ID NO: 24794 - DNA, 494 bp, Homo sapiens
agagggttttgcattcgcatcccatgtcggaattcggcacgaggaaaacgcctcttctctcagacacatcgttatctgccaattcttcgcagacgtagagaacggactgcagagttaataaacgtcgaggggaagctttgatgcgccccatttggccctgagagatgccacgtgatcgtcattttaaatcctttcctgggcttcccgatggactcgagtttttactatgtgagcatcccggtgcctgcacagcaaggactctcattgggttccacacgtgctgcgcagatccctgacgcagcgttcactgaacctcaactgcaggagcttcattcctgaggacgctgttaccaagaatgacttgcctcttgaagaatgagtttgcaaagccggcagttagattgctgatgtccaaagtaagtatgtgtagcatcactaaagagaaaattcaggattcctggaaaacagttatgggctctctgcagtgttatttt

SEQ ID NO: 24795 - DNA, 475 bp, Homo sapiens
  misc_feature (1)...(475): n = A,T,C or G
aatgaccggcctgcggaattcgcngcgaggccatgttttnctgccttcggaccccagcggccggatggggaaatcctccctgcagcggatcctcaatagccactgcttcgccagagagaaggaaggggataaacccagcgccaccatccacgccagccgcaccatgccgctcctaagcctgcacagacgcggcggcagcagcagtgagagttccagggtctccctccactgctgtagtaacccgggtccggggcctcggtggtgctcctgatgcccctcacccacccctgaagatcccaggtgggcgagggaatagtcagagggatcacaatctttcagctaacttattctactccgatgatcggctgaatgtaacagaggaactaacgtccaacgacaagacgaggattctcaacgttcagtccaggctcacagacgccaaacgcattaactggcgaacagtgctgagtggcgg

SEQ ID NO: 24796 - DNA, 342 bp, Homo sapiens
  misc_feature (1)...(342): n = A,T,C or G
ggctgggcgacccncnaattgacnnccccattgaccccgcgctgcaggcagatttgaactgttagcacgactgtgtccaaatagcactggtgctgagattagaagcgtctgcacagaggctggtatgtttgccatcagagcacggcgaaaaattgctaccgagaaggatttcttggaagctgtaaataaggtcattaagtcttatgccaaatccagtgctactcctcgttacatgacatacaactgaaccctgaaggctttcaagtgaaaactttaaattggaatcctaaccttatatagacttgttaataaccaattcataaacaaataaatggcttcaaa

SEQ ID NO: 24797 - DNA, 429 bp, Homo sapiens
cattgacggcgtagtatacgcacgattaccgacgtacgctttcctaaatacagcctctaacaaaactaggctgtcccgaacccctggttttagaattgtttacctttataccaagaaggttgggaaagcaccaaaatctgcatgtggtgtgtgcccaggcagacttcgaggggttcgtgctgtaagacctaaagttcttatgagattgtccaaaacaaagaaacatgtcagcagggcctatggtggttccatgtgtgctaaatgtgttcgagacaggatcaagcgtgctttccttatcgaggagcagaaaatcgttgtgaaagtgttgaaggcacaagcacagagtcagaaagctaaataaaaaaatgaaacttttttgagtaataaaaatgaaaagacgctgtagaaaaaaaaaaaaaaaaaactcag

SEQ ID NO: 24798 - DNA, 482 bp, Homo sapiens
  misc_feature (1)...(482): n = A,T,C or G
attgaccgcgntgatttgccccgcgctgcggctttttcagacaacacctgcctggcttctattaatgtgtgctggccatgatattgccccaaatccgccccactgaagtgttccctaaggaacagcatttctctgctcctcagtcaacccccgtagcctagagcagtgtcacaagcttcagtaaggccagtcagctggaagtcagtctaccgtatagtaacactgtatttcagtctacagaccacactctagttgttttccatgaaaggtatacaaatgaagaattttctagcaaaacatgtttttaaccatcagtgctcaattgcattttcttcctttcgcagccagtcagtctttcaaactattgacagtaagataattctcacgttcacacctggtggcaggattcactgtagggacggacattgcagttacaccacgattccttgctcttcactggctcgagggggggcccgggaccc

SEQ ID NO: 24799 - DNA, 493 bp, Homo sapiens
  misc_feature (1)...(493): n = A,T,C or G
ngcgggccttgattgcctgcggtgcagccagaacccgaacccgaacccgggctgcttttggaagtggaggagccagggacggaggaggagcgtggggctgacacagctcccaccctggcccctgaagcgctcccctcccagggagaggtggagagggaaggggaaagccctgcggcagggccccctccccaggagcttgttgaagaagagccctctgctcccccaaccctgttggaagaggagactgaggatgggagtgacaaggtgcagcccccaccagagacacctgcagaagaagagatggagacagagacagaggccgaagctctccaggaaaaggagcaggatgacacagctgccatgctggccgacttcatcgattgtccccctgatgatgagaagccaccacctccctcagagcctgactcctagccatcttctgcaccccactctttgtttccaataaagttatgtccttagatagcgaanaaan

SEQ ID NO: 24800 - DNA, 349 bp, Homo sapiens
  misc_feature (1)...(349): n = A,T,C or G
gggagttnccnagannaaaaaaaatcgaaagcctcgactgatcgcntgcggannnncatgagnactttttctttgaagttttagcggtcaatttgcctttttaatgaacatgtgaagttatactgtggctatgcaacagctctcacctacgcgagtcttactttgagttagtgccataacagaccactgtatgtttacttctcaccatttgagttgcccatcttgtttcacactagtcacattcttgttttaagtgcctttagttttaacagttcactttttacagtgctatttactgaagttatttattaaatatgcctaaaatacttaaaaaaaaaaaaaaaaaaaa

SEQ ID NO: 24801 - DNA, 488 bp, Homo sapiens
  misc_feature (1)...(488): n = A,T,C or G
ggggcaaagggggnnntttgatttcgcaccggctgcangaattcggcacgagcctgcacaagcttctctctctttgcttgctgccattctacttaagatgtgacctgctcctccttgctttctgccatgattatgaggcctccccatccatgtggaactgtaagtccagttaaacttctttcttttgtaacttgcccagtctcaggtatgtctttattggcagcatgaaacggactgatacacaaatgtattgcgtaatcccctgctagacaatcagctcttattagaaagtaatctccatgggggcgaggatcatatctgttttgtcatcttcagttcatggcatattcattcccagcaaaaaaaaaaaaaaaaaaaaactcgggggggggccgggcccccaatcccccttatagggaggggaataaaaattcatgggccggggtttaacaccgcggggacgggaaagaangnnnnnnnnnnnnnnn

SEQ ID NO: 24802 - DNA, 483 bp, Homo sapiens
cggggaccacccaattgaacgcctgcaggaattcggcacgagggactgtggtcctgaaagcagcaagaagtatgctgaggctgtcactcgggctaagcagattgtgtggaatggtcctgtgggggtatttgaatgggaagcttttgcccggggaaccaaagctctcatggatgaggtggtgaaagccacttctaggggctgcatcaccatcataggtggtggagacactgccacttgctgtgccaaatggaacacggaggataaagtcagccatgtgagcactgggggtggtgccagtttggagctcctggaaggtaaagtccttcctggggtggatgctctcagcaatatttagtactttcctgccttttagttcctgtgcacagcccctaagtcaacttagcattttctgcatctccacttggcattagctaaaaccttccatgtcaagattcagctagtggccaagagatgcagtgccag

SEQ ID NO: 24803 - DNA, 483 bp, Homo sapiens
  misc_feature (1)...(483): n = A,T,C or G
cttcgccccgcgctgcaggaattttgccccgcgctgcaggaattcggcacgagtgaccaagggcgaggtgggctgcttcctcagccattactccatctgggaagaggtgagggtgcctgcttcctccatccacagccttcggggagaacggggccagtttgttctattcactgctctgtgaacgagtgcgtgaatgaagacattcatcaaaacctggccagcagctttcaatctcctctgtgttcaacaccccagtgggcaccactaagcggtgcttgttttcattctgcagtctctcttgagcatctactatgtgctaggagatattctgctctgagaacacagaggaggacaggaacaatgcatgtctgctccttcctgcaataaagggatccccctggggctcanggaccagagcgggattatggaaatcaaaaccaagcttgcagtggaggggagagtatgggccacttttagaggtgc

SEQ ID NO: 24804 - DNA, 483 bp, Homo sapiens
attgaccgcctgatggacccgcgctgcaggaattcggcacgagaagaaaagaaggaacaatggtcgtgccaaaaagggccgcggccacgtgcagcctattcgctgcactaactgtgcccgatgcgtgcccaaggacaaggccattaagaaattcgtcattcgaaacatagtggaggccgcagcagtcagggacatttctgaagcgagcgtcttcgatgcctatgtgcttcccaagctgtatgtgaagctacattactgtgtgagttgtgcaattcacagcacagtagtcaggaatcgatctcgtgaagcccgcaaggaccgaacacccccaccccgatttagacctgcgggtgctgccccacgtgccccaccaaagcccatgtaatgagctgagttcttaaagactgaagacaggctattctctggagaaaaataaaatggaaattgtactttacaaaaaaaaaaaaaaaaaaaaacctcggg

SEQ ID NO: 24805 - DNA, 490 bp, Homo sapiens
  misc_feature (1)...(490): n = A,T,C or G
aggcgggaattggattcgtcgnctgcaggaattcggcacgagctcgtgccggttctgttagacctctcttatcacaacggtacccccaaaattagagactgtgcagtatccactctgtaacctcagaacctactgctgtattgggttcatagtagaggtggtatgatatagtgagtgaattgttttaaaagattggaccctagagagagactgcttaggttcaaatcgtgattctatcagttacctagctggtagccttaagtaagtcacttagacattctgtgactcagttttttcatctgttaaatgggtacaataaatacatatctctgaaggttgctgtgatgattacatgaaataaatacatggcacagtacctggtatgtaataagtacccaattaaatataactttttttaggaagtgacagtaataggaagaactcagtatgtttgttgaatgattcttacatgatacctcttaacacaggg

SEQ ID NO: 24806 - DNA, 483 bp, Homo sapiens
  misc_feature (1)...(483): n = A,T,C or G
ccttcgcccgcgctgcaagaattttgccncgcgctgcaggaattcggcacgaggcgaagttaaaccctcggagctggcctcggactgctggggcgttaccccttcggccacccccgctgaccatggcagtgtttcatgacgaggtggaaatcgaggacttccaatatgacgaggactcggagacgtatttctatccctgcccatgtggagataacttctccatcaccaaggatcagtttgtgtgtggagaaacagtcccagccccttcagccaacaaagaattagttaaatgctgaagaagccttcaggaatccaaatcctgaacatttggaatgagcccagatagaaatatcgaatgcaaagctactggcttcacagagacaaccatttatgatttgctgttctgtaagagtgtggattctttctatcaactgctgatatcatcttcaggaagcaagtccataacatgacatatctggattt

SEQ ID NO: 24807 - DNA, 473 bp, Homo sapiens
  misc_feature (1)...(473): n = A,T,C or G
attagaaaacccccttgatccgcctgcacgaattcggcacgagctgaataatgtatttcttttacagtgtaatatgggggtggggatatgcgaaagaaatgtgtatttttgctagttgcctaccttctgagataaataagcacaatcttgcaatggatccaataacccagttaggtattatagattagtatttaagtttgctgtagattgtgtgtgtgtgtgctaagtaaaagttccatgattcacaattttagtattaacccatgttgcaaaagctgttactggccaacagattgtaatgatgtgtaccatataacacaagcattaactaggcattaacgtttgtaaagccaaatataccatgcagaagtcttcatttttatagcagactgcattaaaacaagttaaatcttatnnnnnnnnnnnnnnnnnnnnnnnnnnnnnnnnnnnnnnntccctgggggggggcccgg

SEQ ID NO: 24808 - DNA, 477 bp, Homo sapiens
  misc_feature (1)...(477): n = A,T,C or G
cgcgggtgnttttnaactgaattcctgtagcctgggctgctgaaggggtcctccctgcgccacacggccgtcgccatggtgaagctgagcaaagaggccaagcagagactacagcagctcttcaaggggagccagtttgccattcgctggggctttatccctcttgtgatttacctggcactaggtggttctcggggtgtttttcctcaccgctccatgtggtcctaagtggaaagagtcctgttcagggaatcgagacacctcgtgaaagtaccactgccatgaaagcatgattataataatagtcgttggatgcctctgctttcttacctgtacgatgaagggtttggatgatttctattactgcccccattttacaggatttaagaggggtgcagatcccggaatgcctgaaccaactgttttgagcctactttggggataaaggattatttggtcttctggatttggaggcan

SEQ ID NO: 24809 - DNA, 459 bp, Homo sapiens
  misc_feature (1)...(459): n = A,T,C or G
agcgggcncattgaaattgattcgcgctgcaggaattcggcacgaggagccgccaccaaaatgcagattttcgtgaaaacccttacggggaagaccatcaccctcgaggttgaaccctcggatacgatagaaaatgtaaaggccaagatccaggataaggaaggaattcctcctgatcagcagagactgatctttgctggcaagcagctggaagatggacgtactttgtctgactacaatattcaaaaggagtctactcttcatcttgtgttgagacttcgtggtggtgctaagaaaaggaagaagaagtcttacaccactcccaagaagaataagcacaagagaaagaaggttaagctggctgtcctgaaatattataaggtggatgagaatggcaaaattagtcgccttcgtcgagagtgcccttctgatgaatgtggtgctggggtgtttatggcn

SEQ ID NO: 24810 - DNA, 455 bp, Homo sapiens
  misc_feature (1)...(455): n = A,T,C or G
tgtgtnncaatcggcttcactgacgattcggcacgagatgaacgacaccgtaactatccgcactagaaagttcatgaccaaccgactacttcagaggaaacaaatggtcattgatgtccttcaccccgggaaggcgacagtgcctaagacagaaattcgggaaaaactagccaaaatgtacaagaccacaccggatgtcatctttgtatttggattcagaactcattttggtggtggcaagacaactggctttggcatgatttatgattccctggattatgcaaagaaaaatgaacccaaacatagacttgcaagacatggcctgtatgagaagaaaaagacctcaagaaagcaacgaaaggaacgcaagaacagaatgaagaaagtcagggggactgcaaaggccaatgttggtgctggcaaaaagccgaaggagtaaaggtgctgcaatgatg

SEQ ID NO: 24811 - DNA, 475 bp, Homo sapiens
  misc_feature (1)...(475): n = A,T,C or G
attgaccgcctgcggaattacttgagagggctacgagacagccgccctttgagtaaatgatcaatttctgcaatagaacaaatgagtttgattttaatttttaagaatatggatgcaaagcaggctagagggaaatggctgcaactgtcattctgagaagggagacttttattcaagatggattaggaaagctcttccgcattcacttgttcttgaaaaatgtctcatcttaattttcaagttctgtatgggcatcggtcctggcacaacgtgcattctcccaagctgtggactttagcatcaacattatttcttgccaattttgagacttagaatcattccttggtttttgtgatcattacgccctcacttattttaaaaaattctactggacacctgaagaagattagaatgagcttggccatgttcggaggccccccgctatattcctaatgcgttctttggggaggggtcn

SEQ ID NO: 24812 - DNA, 472 bp, Homo sapiens
  misc_feature (1)...(472): n = A,T,C or G
cgccccccccccaattgacccgcgctgcaatagttcggcacgaggggacattgccatgggacggaagtctgcttggcagtggctttgataagcgatgcttgggggtcagaccaccccctagaggagccacgtgccgcccagccaccttcaatgcctgccaccctgcccgaggatgtacagagccgtgcccacacatttccttgcaacttgatcaaatttcttaaagcaaacaacaaaaatgtacatttctgtttttccttttaataaacaggtgtactctttatcatggttggtatgatggaccattctttggggcggaggattgattatgttactctctttaaaatctgttcccatattgaacaggcagattggaaaagctatggttcgatttctcagaagaaatgtttaggtcttagtcaatagttttaactatgccatttgtttaaatgagtgcatttgcttcgagggn

SEQ ID NO: 24813 - DNA, 468 bp, Homo sapiens
  misc_feature (1)...(468): n = A,T,C or G
agganannnnnattggattgcatcgcgctgcaggagaatctgatgcaacaggcaatagagattatgccaaggatgatccattggaatttaagtcccatcagtggtttgtagcatctgtgaggtcgaaacaggataaaattttggcctgtgccccattgtaccattggagaactgagatgaaacaggagcgagagcctgttggaacatgctttcttcaagatggaacaaagactgttgagtatgctccatgtagatcacaagatattgatgctgatggacagggattttgtcaaggaggattcagcattgattttactaaagctgacagagtacttcttggtgggcctggtagcttttattggcaaggtcagcttatttcggatcaagtggcagaaatcgtatctaaatacgaccccaatgtttacagcatcaagtataataaccaattagcaactcggactgcacaag

SEQ ID NO: 24814 - DNA, 480 bp, Homo sapiens
  misc_feature (1)...(480): n = A,T,C or G
attgacngccctcggaannatcgatccgcctgcgcgaattcgccacgagagcaaaggaattataatgggaaatctttttcatttgagaaattgtatgatatttattggttgtgtctactgccaacatttatatccaattctaagatttctgaaaaaaattcttatcccttgctgctcagaaaaagtttacggaaaacaccagttcactaaaagcaccgaaatctgcaaagcctgtcttccgctagaacaacgtctacaaatgtgaagatgatgacttctggcacgcggtcatgagggtggggaatggcactaggagctgatgtttgcctcatttaaagtaggcaagccgagccaactgcagccatcattcattaagttttgggtagtgctctaatggtttgttcactttaataaagacagattttggtaaagtaaaaaaaaaaaaaaaaaaactcgggggggggccgcggccccaattcc

SEQ ID NO: 24815 - DNA, 482 bp, Homo sapiens
  misc_feature (1)...(482): n = A,T,C or G
nggagttcgcggctgagttcttttcaaatggccggagaaacacctattttctcgtgataaactaaagctttttctgaagcaacactgtgaaccacaagatggagtcattaaaataaaggcatcatctctttcaacgtataaaatagcagaacaagatttttcttatttcttccctgatgatccacccacatttatcttcagtcctgctaacagacgaagagggagacctcccagacgaatacatattagtcatgaggacaatgttgctaataaacagactcttgcaagttataggagcaaagctactaaagaaagagataaacttttgaaacaagaagaaatgaagtcactggcttttgaaaaggctaaattaaaaagagagaaagcagatgccctagaagcgaagaanaaagaaaaagaagattaagagaaaaagagggaagaattgaaaaaaattgttgaagaagagagactaaaaaaaa

SEQ ID NO: 24816 - DNA, 487 bp, Homo sapiens
  misc_feature (1)...(487): n = A,T,C or G
cggnngtgnnnaaanccttgatcngcccttaggaattcgtcacgagaagaacgagaatgaagaagacaaactcactgactggaataaactggcttgtctgctttgcagaaggcagtttcccaataaagaagttctgatcaaacaccagcagctgtcagacctgcacaagcaaaacctggaaatccaccggaagataaaacagtctgagcaggagctagcctatctggaaaggagagaacgagagggaaagtttaaaggaagaggaaatgatcgcagggaaaagctccagtcttttgactctccagaaaggaaacggattaagtactccagggaaactgacagtgatcgtaaacttgttgataaagaagatatcgacactagcagcaaaggaggctgtgtccaacaggctactggctggaggaaagggacaggcctgggatatggccatcctggattggcttcatcaaacgaggctgaaggccggatg

SEQ ID NO: 24817 - DNA, 501 bp, Homo sapiens
  misc_feature (1)...(501): n = A,T,C or G
attagaccnccgcgctgcagngannnnattgcccccgcgctgcaggttccaattgatttaaccaagacacggctccagattcaaggccagacgaatgatgcaaaatttaaggaaattagataccgaggaatgttgcacgcattagtgaggataggcagagaagaagggctgaaagcactctactcggggattgcccccgcgatgttacgccaggcatcctatggcaccatcaagataggcacttaccagagcttgaagcgactattcattgaacgcccagaagatgaaactctaccgataaatgtgatatgtggaattctgtctggagtcatatcttcaaccattgctaatccaactgatgttnnnnaaattcggatgcaagcgcaaagcaacaccattcaaggaggaatgataggcaacttcatgaacatttaccagcaagaggggacaagaggactgtggaagggtggtgtccttactgcgcagagggctgctattgtt

SEQ ID NO: 24818 - DNA, 489 bp, Homo sapiens
  misc_feature (1)...(489): n = A,T,C or G
ngagggaattgatatgcatagcgattggcacgaggctggatttggtcgcaaaggtcatgctgttggtgatattcctggagtccgctttaaggttgtcatagtagccaatgtttctcttttggccctatacaaaggcaagaaggaaagaccaagatcataaatattaatggtgaaaacactgtagtaataaattttcatatgccaaaaaaaaaaaaaaaaaaactcgggggggggccgggccccaaattccccttataggggggggtataacaattcacgggccgtggtttaacaacgtggggacggggaacaaatcgttnggttttnnaatcatttgcccagttttggggaatattcatgcctgactcttgtgggggtgttccctctgttgtaatatcttaactggaaatactgttttaggttattatttatatataagcaaacttgtgatttaaaagggaaaattttgtgtctcttctattttttttg

SEQ ID NO: 24819 - DNA, 470 bp, Homo sapiens
  misc_feature (1)...(470): n = A,T,C or G
attgacgcctcggaannactggaggccttcaaggaacgcacgaggagatagtgtgacagttaccaagatgatcttctgcttacgatgggacttaatgatatttaagcacgaacggaaggattatataatgagaagattaacaaaattattatggaagccacgaaggggtccagattttatggaaatgagctcatgatagaaaagcacgtcaaccatcgaattgaaaatatgatgcaacaaaaagctcaaatcaccagccaacagctaataaaagcacaattacaggttgacagatttgcaatggaattacaacaaagccgaaatttgagcaataccatagtgcacattgacatggatgctttctatgcagctgtagaaatgagggacaatccagaattgaaggattaacccattgctgtaggatcaatgagtatgctgtctacttcaaattaccatgcaaggagatttgg

SEQ ID NO: 24820 - DNA, 496 bp, Homo sapiens
  misc_feature (1)...(496): n = A,T,C or G
nattgcccgcctgcaggattcggcacgagtcggatatgctctgcacgaattcggcacgagcatagctctagatgctgagcctgttacccagccagcatcgatgcccagacacagcagcacactcagaccacaccagcacactggagcctcctcgattgcctcagagaaggaacttacaaagtgaaaaggaaacttatgatctgtctaaggaagtggaaattttatctacgaacctggttgaaatgcaacggggtctttctgaacttacaaaccgtctgcgtaatgggaagaaatcctcttcagggtatgcactctctcaagatcttccttatgatcacatcatttaccagaaaccttattatctacggcctgttgatgaaaaaagagcggtgcttctctgtgatggtaaactaaggctcagtacagttcagcagacttttggcctttctctcattgaaatgctacatgattccccatggattcttctctctgctgn

SEQ ID NO: 24821 - DNA, 471 bp, Homo sapiens
aatagaccgcctgttgcaccgccctgcaggaattcggcacgagctttcactaacttctggactttccagctcttccgaagttcgttcttgcgcaaagcccaaaggctggaaaaccgtccacgatgaccagcatgactcagtctctgcgggaggtgataaaggccatgaccaaggctcgcaattttgagagagttttgggaaagattactcttgtctctgctgctcctgggaaagtgatttgtgaaatgaaagtagaagaagagcataccaatgcaataggcactctccacggcggtttgacagccacattagtagataacatatcaacaatggctctgctatgcacggaaaggggagcacccggagtcagtgtcgatatgaacataacgtacatgtcacctgcaaaattaggagaagatatagtgattacagcacatgttctgaagcaaggaaaaacacttgcatttacct

SEQ ID NO: 24822 - DNA, 467 bp, Homo sapiens
  misc_feature (1)...(467): n = A,T,C or G
agcgagntnnnaattgaattgcatcgacgatttccgcacgacgttttttaagggaccaggaaaagtggtgatggttgcaatttgcatcaatggattaaactgcttctttaaatttcttgcctggatttataccgggtcagcaagtatgttctcagaagctatacactcattatctgatacttgtaatcagggtttactagcattgggcatcagtaagtctgttcaaacaccagatccttctcatccgtacggattttcaaatatgcgctatatttcttcgctaattagtggtgttggtattttcatgatgggtgcaggactatcttggtaccatggagtcatgggattgcttcatcctcaaccaatagaatcccttctatgggcatattgtattttagcaggatcattagtatctgaaggagcaacacttcttgttgctgtaaatgaacttcgtaggaatgctcggg

SEQ ID NO: 24823 - DNA, 493 bp, Homo sapiens
  misc_feature (1)...(493): n = A,T,C or G
attcgaccgcctgcangaattcggcacgatcgagccgcctgcaggaattcggcacgagccgcgccatgaagagcgtgtttgttaccgtagggaccaccagctttgacgacctcattgcgtgtgtgtcggcgcccgacagtctgcaagtgagtgagggaggcgagcaggcggcggcttggctcgccacccgccatctccggccatactgccagccgcgttagccttgcctgaccgtcgcgctcggaaagaaacccccgcaactctaccacagaaaatcgagagccttggttacaaccgacttatcctgcaaattggtagaggaacggtggtacctgaacccttcagtactgagtcgtttactctggatgtttacaggtacaaggattccttgaaagaagacattcagaaagcagatcttgttattagtcacgcaggtgcaggaagctgtttggagactctggaaaaaggaaagccactcgtagtgggtataaan

SEQ ID NO: 24824 - DNA, 511 bp, Homo sapiens
  misc_feature (1)...(511): n = A,T,C or G
ncgtgggttttaattgaatttcactggcgtacgaattaggcacgagcaacgctcctattggctttgttcttatcaaatttctcagtgccttctcagggtctggtgtgaacagaaaaaacagtgttcctgcatttaccataatttaatcagtcaatttgcagatagctaaggaaaatcttccaaaatctgtaggtgcttcctctatatcaagtgagtttgctgattttaaaatcttaggaatataaataaagatcttaataaaagcaagcttaatgtagttaaggatcttcatattagaattgtgtcatttatcaaaccttttattacagaaaaaaatctgaactgagaaaggagctctgaatttatttgacagtctaacttttgaattacatttttgtaagtagatttattcttttattttatgaagtaatgttaattttactaagaataaaacatccaaattttaagtattatgatagcntaaaactacatgttttaaaacagaggtccg

SEQ ID NO: 24825 - DNA, 477 bp, Homo sapiens
aattagaaaacccccttgatccgcctgcaggattcggcacgagatcagccgaaagcccaacacacgtaagcagaagaacggcttcccgcccaacttcatccactcgctggactcctcccacatgatgctcaccgccctgcactgctacaggagtcctccgctctgccacaggaagggcctgaccttcgtctctgtgcacgactgttactggactcacgcagctgatgtctccgtcatgaaccaggtgtgccgggagcagtttgtccgcttgcacagcgagcccatcctgcaggacctgtccagattcctggtcaagcggttctgctctgagccccagaagatcttggaggccagccagctgaaggagacactgcaggcggtgcccaagccaggggccttcgacctggagcaggtgaagcgttccacctacttcttcagctgacaccccgtgagccttgtcagtgtgtaaataaagct

SEQ ID NO: 24826 - DNA, 323 bp, Homo sapiens
  misc_feature (1)...(323): n = A,T,C or G
cttcgacccccccntgananattttgaccccgctgcaggaattcggcacgaggagacctcttgtgttcctgccacatagctgccagggcttaagtgtgcctggcaaccaaatcgaatctctcattttctcctgtggaccagttagttttgcctagaatcctgttttcttctgaatttgcagctgtctctctgatgggtgccttttgttcaacacagtaagccctgctcccttccctgctctaatacactacctgtacaaaggttttttccttatttttaataaatgtcagacactattaaatagaaaaaaaaaaaaaaaaaaa

SEQ ID NO: 24827 - DNA, 463 bp, Homo sapiens
ccttgaccgcctgcagatttgagcccagcagagaagggaaagggggtagattgagtgtgccaagggccgtgcaagggcaggcttgctttccacccatctgctgagggagccctctcctctcgctccttgcctctgttcacacctgttgtcttggaagaggatggtccctttgtcttaaggctttgtgataaagtcatctccagttaggatctgcacctgtttccttcgtaatagtgcctggcggcctttctgaagttacaggtggttgggagccctctcgcatgcagaacatctggtagattgatctgccaggctgggtggttctactgctttctcaatttctaagaaccttttttttttcttaaagagttctgctgaattatttgacaatatttgtaagtaccatgtttccttgtggtggatgctctggtctggtttctggtttcaaatcaaatgcctgttg

SEQ ID NO: 24828 - DNA, 466 bp, Homo sapiens
  misc_feature (1)...(466): n = A,T,C or G
agtgggnnnaaaattgtatagacttccctacggaaattccgcacgaggggagccgccgccatgtctgcgcatctgcaatggatggtcgtgcggaactgctccagtttcctgatcaagaggaataagcagacctacagcactgagcccaataacttgaaggcccgcaattccttccgctacaacggactgattcaccgcaagactgtgggcgtggagccggcagccgacggcaaaggtgtcgtggtggtcattaagcggagatccggccagcggaagcctgccacctcctatgtgcggaccaccatcaacaagaatgctcgcgccacgctcagcagcatcagacacatgatccgcaagaacaagtaccgccccgacctgcgcatggcagccatccgcatggccagcgccatcctgcgcagccagaagcctgtgatggtgaagaggaagcggacccgccccaccaaga

SEQ ID NO: 24829 - DNA, 486 bp, Homo sapiens
  misc_feature (1)...(486): n = A,T,C or G
aatttgaccgccctgtggaannanattgatccgccctgcangaattcggcacgagaagagctgggagctgctgaaggaaggttttcttctggcgctgacccagggcagagagatccaggctcagaacttcttctccagcttcaccctgatgaagctgaggcactcctccgctctgggtggggccagcctaggggccaggcacatcgggcacctcctccccatggactatagcgccaatgccattgccttctattcctacaccttttcctagggggctggtcccggctccaccccctccaagctcagtggacactgggtctgaaaggaaggagtcttttgcttcctttctcctttttacaaaaacaaacatagaagaaaataaatgcactttatccactcaaaaaaaaaaaaaaaaaactcgggggggggcccgggcccaaattccccctatagggagccgaataacaattaacgggccgaggttta

SEQ ID NO: 24830 - DNA, 507 bp, Homo sapiens
  misc_feature (1)...(507): n = A,T,C or G
cgcgggttttaactgacttgcgtggcattcgcacgagcactatgcatgatattagcagagtaccactagtaatgcacaaacatgtacaatatggtcattcataaccgatttttatagaatactttttacatgtgcaactccatccgttatgtaaggattacgtgaatattgcacattcccttctggtttcacaaacccatttatacatatttcttagtgaggctcattgtacatgtattgaagctagaatcgagtcaagaaaaataaagccccattctccaactgcaaaatgtgctttcccataatgaacactagtcaccagcacagaataatctccaacattttctaaattctaattgccaactgtttctatttatatttgatttatatttcatttggagtctgttacatggcagcttaagcagactagatcttgttttttccaatgcagcataatgagtatgatctatntcttttcaaataatctttgagatcccaggaaaaaaa

SEQ ID NO: 24831 - DNA, 407 bp, Homo sapiens
gaattcggcacgagcctgagtcccctggtggggtggggggaattctgcctcaggaccctgaggggtctttggggcaagatggccttggtaatgcagccactaagaacaggacttcattcaaaggcataatgaagtaaccagggtgaccatcaagtaaaattaaagcacaagatcattgtaggaggcttccttgtcaaagacgtgaacgtgggatttccaacgcaccacggtgtgtccactcatcactgcatgttaggaactgctgtctctttgggacacgagttaaaagaacacactaatttctggagtgtgcctgcagcttcacggccttcattttgttactaagttattttctggaagaacagcaaaaatttcaggttgaaaacagaactttccaagtgctactg

SEQ ID NO: 24832 - DNA, 512 bp, Homo sapiens
  misc_feature (1)...(512): n = A,T,C or G
cgcggggttttnaattgaaattgcatggctgtacgaactaggcacgaggcgggacctggcaatagagctgcttggttggaggaagcgaagctggcttagtaccagcagctgatctcttccacgtgctgctgctttttttgccactctgatactaaaccagagaaagctgcaggtggataaagaagctgcggctgttatttgcttttgggtggcaatgagaaagagtcacagtgtgggttaaagggatctgcaccggggccaaggatgccaccccaccctcagctgtaggcaagcttgcacataaataacccccgtcaatggagtgttcgggatgcagggggcactatagtgttcttggacttgagcgcctggggcagttatagttctttatatttagagggtcagtgccaagtgctaccacttcccaataaaggaatggggacccagaggctgggtccctggctaccttgttatgaggatatgctatttctctgacaagattgctttggaaa

SEQ ID NO: 24833 - DNA, 385 bp, Homo sapiens
  misc_feature (1)...(385): n = A,T,C or G
ntttgaccctctccgccgcgctgcaggctccacgtcgcgcaggcgctgcagaaagtgaagatcgaggtgaacgagagtggcacggtggcctcctcatccacagctgtcatagtctcagcccgcatggcccccgaggagatcatcatggacagacccttcctctttgtggtccggcacaaccccacaggaacagtccttttcatgggccaagtgatggaaccctgaccctggggaaagacgccttcatctgggacaaaactggagatgcatcgggaaagaagaaactccgaagaaaagaattttagtgttaatgactctttctgaaggaagagaagacatttgccttttgttaaaagatggtaaaccaaaaaaaaaaaaaaaaaaa

SEQ ID NO: 24834 - DNA, 477 bp, Homo sapiens
  misc_feature (1)...(477): n = A,T,C or G
aattgatcgcccttggaatnccgcatgaggtcacccaatgataacatgcatgcatatggaacttgctgcatgccagcaccatgaggtgttcagggccccaatggtttttcgaagaagccgggctagcatggagtctcccccgaccttcacctccagtttatgactgcctgcggccaggaggacaggagtccgctccccatgctgtcctcaccacattgctcatttctgaggcctggatggtgggcttgcaagggaagatgacggttttctcctcagctttgcggagtggcagcagagtccgtttgccctggaaaacaaatgtccacacagttaggaagcccaagggccctctgccctttcctctctgccttcctggagcatgaacccacacagggcacacagcagcaaggcatccccgggcagtgccgtgcccactcaccagcttcttcctgcggtcatcgatctggcagaagttcn

SEQ ID NO: 24835 - DNA, 500 bp, Homo sapiens
  misc_feature (1)...(500): n = A,T,C or G
aatttgaannccccannngaagnncccngnnanaaaannnaatggatccgcgctgcaggaattccgcacgagcagtggcagatgagagaggtcaagaggacactagcaaccaggaaaaagcaagaaagtgctgtagcccaatgccatggaacacagagccactgctgtaaaatgtaaatagccaaaaggatagaatgcttttcaaccatttttgtagcagagtgaaaacctaccttcagcaagtacctggcttcaagctgctaaactacctcctgttatgaaggtgtgaaaagtttttttgttattgaatataaacaattagcatatacagatggcctcttcaatctccatgtgaatttaggatgaactatgtatgacatggttctggaaattctacttgtggactaattttggtgaccatctttctgtctctgcagtctcttaagcagattgactatgatgcatgtcacataaaacagntttctttctgttctattggg

SEQ ID NO: 24836 - DNA, 513 bp, Homo sapiens
  misc_feature (1)...(513): n = A,T,C or G
aggtggggttttnaatcgancttctagtatgcattcggcacgagcaggggcccccctgcttggctctgctgggagagtgctcagccgcccagtcctgcctgcaagcccagggcgagtattggaggaggggcagccacgggcagagcaccatgcccatccccgagtctctggtgtgtctgccccctctggcatcctctgggcgtcccatgatcccttctgtgtctgcgtgtccgaatccccgtgtgaccctgtcccagcattttcccgccgaccctgcgtgtccccgtggcgctgtccgctctccctctcctgctgcccacccacctgccagngttatttatgctcccttcgtgggtgatggccacgccctcaccatgtccctggcagagggcttccctccgggatcccctgcctggtgcccacactgcctcgcaagcgctcgccaccctcacgtggctcacctgctgttgagccttgtgctgtcaataaacggtttgaggattgcaaaaaaaa

SEQ ID NO: 24837 - DNA, 479 bp, Homo sapiens
cccccccccatgaccgctgcatagaccgcctacggaattccagtaatctttctttagaaaactggtgttttctaaagaaacaggataggagtttagagaaggcaccaaagctttcactttggtttggcaccagtttctaaccatctgttttttctaccctagctatcttttattggtaaaatataaatgtataattatgtttgtagagctttaccaaggagtttccctccttttttgtttgttgattagcaaatttttgattctccattttccaaaagtaagagactccagcatggccttctgtttgccccgcagtaaagtaacttccatataaaatggtatttgaaagtgagagttcatgacaacagaccgttttccatttcatctgtattttatctccgtgactccaacttgtgggtttgttctgtttttccatgagaataaaatactggcggtttttttctcagaaaaaaaaaaaa

SEQ ID NO: 24838 - DNA, 513 bp, Homo sapiens
  misc_feature (1)...(513): n = A,T,C or G
ncgtggnttttnaactcgnattcgatgagcgtccgcacnaggcacgagtaaggtactagatagccagagacactagagtgcataaaaacgcctatttgcaaccaccttcttcgtggctcacgtatcaaaacttcaaagcatcatctgagactgagaacatcacacaataaatttttacggagaccaaggataccacagagaaagccgcactcgactcttttaagggaaattcagcagttctctcaagggactcggaagagtgctactgataccattgctaagtggagactctcacactgtactgtgcatataactgatctctaccctaacagtaagcagctcttgaatagtggagtttcaatgcctgtcataccaactactgagaaaatgattcatgaacatcttacaggcatccatgaaaatgaaactgattcgtggacggtgatgcaaataaataaaaacagtacatccggaaccattaacgagactgatgacattgatgatatttttgct

SEQ ID NO: 24839 - DNA, 497 bp, Homo sapiens
  misc_feature (1)...(497): n = A,T,C or G
gagaaaaaaantttgcccgcctgtgttaattccgcacgagccaggtcctaacatagaaagtgggaatgaagatgatgacgcctccttcaaaattaagacagtggcccaaaagaaggcagaaaagaaggagcgcgagagaaaaaagcgagatgaagaaaaagcgaaactgcggaagctgaaagaaaaagaagagttagaaacaggtaaaaaggatcagagtaaacaaaaggaatctcaaaggaaatttgaagaagaaactgtaaaatccaaagtgactgttgatactggagtaattcctgcctctgaagagaaagcagagactcccacagctgcagaagatgacaatgaaggagacaaaaagaagaaagataagaagaaaaagaaaggagaaaaggaagaaaaagagaaagagaagaaaaaaggacctatcaaagccactgttaaagctatgcaagaagctctggctaagcttatagaggaagaagaaagacagaaga

SEQ ID NO: 24840 - DNA, 500 bp, Homo sapiens
  misc_feature (1)...(500): n = A,T,C or G
aggcgttcnnnnaattgtacgacctcantaattcggcacgaganaagagccagtttgctacgatgaaggtgacatttctctggtcatttatttgagagttcgaagtcaaagtcgaggggcaccggctttggttcatgtctaggagccctctgtcagaatccttgaagccctttaatggtctaactggcatctcttgtatcaagaagtacctttaaggtagaccttttcagggtgccctcaggaaagggccctgctcatgtttttttcctgtccccttagaccaaccccaggtgtccactgcaggggttctgcctgttcccaaactttttccattccaggaacaaaggagaagccactttccccaggacgcaagactctcccctccactgtccgggacagcgttcgccctttagcggngaggtcattacagcctcatggcctctaccaaggccccagatcacaggatctcctgggccttggagcacctcacgctggnggaa

SEQ ID NO: 24841 - DNA, 481 bp, Homo sapiens
  misc_feature (1)...(481): n = A,T,C or G
atagaccggcttccgaaanngttgaccggctgtaagaattcggcacgagcaaatcgtccttaagaacgaccaccaggaagatttctggaaagtgaaggagttcctgcataaccaggggaagcagaagtatacacttccgctgtaccacgcaatgatgggtggcagtgaggtggcccagaccctcgccaaggagacttttgcatccaccgcctcccagctccacagcaatgttgtcaactatgtccagcagatcgtggcacccaagggcagttagaggctcgtgtgcatggcccctgcctcttcaggctctccaggctttcagaataattggttgttcccaaattcctgttccctgatcaacttcctggagtttatatcccctcaggataatctattctctagcttaagtatctgtgactcttgggcctctgctctggtgggaacttacttctctatagcccactgagccccgagacagagn

SEQ ID NO: 24842 - DNA, 508 bp, Homo sapiens
  misc_feature (1)...(508): n = A,T,C or G
cgccgccccccnnnnagnnaatagatangtatgcggaannnncnatttgacccgccctgcaggaatttcgcacgagcaaccaagaggaaacggcgtggcaggctttgcagttcaggctattaatccaaagagaaacgatatagatgcggagtcggcagctaagcggtacgccacagcatatgaggtggaggaagaagagagggaccggatcccaggccccgtttgcaagggaatgtggaaaaataaggaacggattctcatcttttcttccagaggaataaattttagaacaagacatttaatgcaggacttgagaatgttgatgcctcattctaaagcagatactaaaatggatcgtgaggataagctatttgtgattaacgaggtttgtgaaatgaagaactgtaataaatgcatctattttgaagctaagaaaaaacaggagctctatatgtggctttcacattcacctcacggaccatctgctaaattccttgttcaaaatatt

SEQ ID NO: 24843 - DNA, 508 bp, Homo sapiens
  misc_feature (1)...(508): n = A,T,C or G
ggccgcgcattgacnccntgnaatagatccgcgctgcaggaattcggcacgagtaggagtgggcgtggcggagccagctccgttcggaacactcccgggccgacccgactcgctcatcctgcaggagctgcggcgccaagatgagtggagaggagaacccagccagcaagcccacgccggtgcaggacgtacagggcgacgggcgctggatgtccctgcaccatcggttcgtggctgacagcaaagataaggaacccgaagtcgtcttcatcggggactccttggtccagctcatgcaccagtgcgagatctggcgcgagctcttctctcctctgcatgcacttaactttggcattggtggtgacggcacacagcatgtactgtggcggctggagaatggggagctggaacacatccggcccaagattgtggtggtctgggtgggcaccaacaaccacggacacacagcagagcaggtgactggtggcatncaggccattgtgcaact

SEQ ID NO: 24844 - DNA, 478 bp, Homo sapiens
  misc_feature (1)...(478): n = A,T,C or G
ggaaggtcnnntttgcnccgcgctctctgctcgcgctgcaagaattcggcacgagcttataagatttttaaaaaagagattcagagaaggactgtagctgtggacccaagctcccttcaaagcactggcaggtcaatcgtttgcaacacagacagctgtatgtagagctctgtgatccacccaattattggctcatcaaggagtgtgccacatgccagatgctctgcagaacccaacagaggggttgctcctccatggaaacaacaagaagctttgatcaaagagcctgtattgactccttcagtgaaattcttgactgaaataatcaccttcttaaaatacacacatggtgaggtttgaagaggggaaattgccatccaggtaagaaaccttggccttgtcccaatttagtagtgctgaaggtgtgttcatttgaacatagatcatgtgctangtactgngaggatacaggaatgag

SEQ ID NO: 24845 - DNA, 470 bp, Homo sapiens
  misc_feature (1)...(470): n = A,T,C or G
tgggaaaaacnnntttgaccttcatccgcgctgcaggaattcggcacgaggcccggcgtgcgcgagatccacctgtgcaaggacgagcgcggcaagaccgggctgaggctgcggaaggtcgaccaggggctctttgtgcagttggtccaggccaacacccctgcatcccttgtggggctgcgctttggggaccagctcctgcagattgacgggcgtgactgtgctgggtggagctcgcacaaagcccatcaggtggtgaagaaggcatcaggcgataagattgtcatggtggttcgggacaggccgttccagcggactgtcaccatgcacaaggacagcatgggccacgtcggcttcgtgatcaagaaggggaagattgtctctctggtcaaagggagttctgcggcctgcaacgggctcctcaccaaccactacgtgtgtgaggtggacgggcagaatgttatcgggct

SEQ ID NO: 24846 - DNA, 497 bp, Homo sapiens
  misc_feature (1)...(497): n = A,T,C or G
tggataaataaataattttntttataagggaaaaaaagggttgaacgcctgtggaattccgcacgagcacctcacacgggaccacagccgcgctgccgagggccaagcacaaaggttccagtgagcgcatgtcccagcccctggtggccaggctccccttgctgagccgctgccacttcaccctgtgggaagtggccccagccatctcctctagaccaaggcaggcagccccgacatctgcttcctctatcgcccaatgcaaaatcgatgaaatggggagttctctgggccaggccacattcacattcccctccctctgtggtccagtgaagcctccggaccccaggctctgctctgccctgccctgcacccccctcgtcagaagtacatgaggggcgcagagatgagcacacagctttgggcacggtccagggcaaactgaaatgtacgcctgaattttgtaaacagaagtattaaatgtctctttctacaaaaan

SEQ ID NO: 24847 - DNA, 479 bp, Homo sapiens
  misc_feature (1)...(479): n = A,T,C or G
natagacnccgctgcggatttcattacgagcagcttggcgctcacaagaaccagtgaagaaatccattcaggaatcacaagcttttttgcctcacagcatacctgaagagagatacaagatgaagagcaagcccctaggaatctgcctgataatcgattgcattggcaatgagacagagcttcttcgagacaccttcactttcctgggctatgaagtgcagaaattcttgcatctcagtatgcatggtatatcccagattcttggccaatttgcctgtatgcccgagcaccgagactacgacagctttgtgtgtgtcctggcgagccgaggaggctcccanagccggtatggtgtggatcagactcactcagggctccccctgcatcacatcaagaggatgttcatgggagattcatgcccttatctagcanggaagccaaagatggtttttattcacaactatgtggcgtcagagggc

SEQ ID NO: 24848 - DNA, 474 bp, Homo sapiens
  misc_feature (1)...(474): n = A,T,C or G
attgacccgaatgtgactcgcgctgcacgaattcagcacgagatggagttggcactgacatcacagcttcataaccccaccaccgccagcttcccctgcctcctacatccagtctgttcttgttcatagtgagaatcctgtgttcccacttcagtgacacctgaattgtttgttgttgttttttttttttattgtcttcaaaaaggaagggccccattaaagggggaacttgtaataaattggaatttcaaataaaaaaaaaaaaaaaaaacttcgggggggggccgggcccccaattccccttataggggggggattaaaaattcatgggccgcgttttaaaaacgcgggaatggggaaaanannnnnnnnnnnnnnnnnnnnnnnnnnnnnnntnntnttntntnnttnnttttttttnttaggttnnntnntnttttnttggtttttttggtngtatttnntttttcctag

SEQ ID NO: 24849 - DNA, 482 bp, Homo sapiens
  misc_feature (1)...(482): n = A,T,C or G
natagtaggcgctnggaaanccnattgacccgcatgtcggaattccgcacgagctgcctccacgtcgccggctcaatctgggcgagaacccagactttcaccgcagccccgcaatctgcagacctcagcggcagcgcaggtggcagacctgcctcctttgcctgtgagtcatggcagctcccatgaatggccaagtgtgtgtggtgactggtgcctccaggggtattggccgcggcattgccttgcagctctgcaaagcaggcgccacagtttacatcactggccgccatctggacacccttcgcgttgttgctcaggaggcacaatccctcgggggccaatgtgtgcctgtggtgtgcgattcaagccaggagagtgaagtgcgaagcctgtttgagcaagtggatcgggaacagcaagggcgtctagatgtgctggtcaacaatgcttatgcaggggtccagacgatcctgaacaccagg

SEQ ID NO: 24850 - DNA, 521 bp, Homo sapiens
  misc_feature (1)...(521): n = A,T,C or G
agcgatggggnnaattgacggctgcggttntcttttccttttgtgcccagttaagtgggaatgtgtttggagataggggaaatcacataactggtacaagtatggggtaattgcttaaacatgcctggtggaagtctgatagcgtctctgcacgtgacctctgacaaagcccatcccaggagacggggtgaagctattccccacactctcctgtgaacactggagtcttgcaagacccagggagaacccactgcttttcccaggaggctccaggattaggaaatgtgtgtatttagtgaaaaataggtttgtagtgaaatagttactatttcatgaaagtagatatttttagaatttttgaaataccacagttgttttcctggattataaggaaaggcacattacatttagtcttcctttcgatataaaactctttgaagaaatatgatttttagaaatcagctacccattatagcacaaaatcagccaaagcagaatttttaaaaattggcttttttagg

SEQ ID NO: 24851 - DNA, 481 bp, Homo sapiens
  misc_feature (1)...(481): n = A,T,C or G
cttcgaccccccctcccnnatagcacccgcgttgcggaattcgccacgagaacgatcctgacattgagatggcttgggccatgagagcaatgcagcatgctgaagtctattacaagctgatttcatcagttgacccacagttcctgaaactcaccaaagtagatgaccaaatttactctgagttccggaaaaattttgagacccttaggatagatgtgttggacccagaagaactcaagtcagaatcagccaaagagaagtggaggccattctgcttgaagtttaatgggattgttgaagacttcaactatggtactttgctgcgactagattgttctcagggctacactgaggaaaacaccatctttgcccccaggatacaattctttgccattgaaattgctcggaaccgggaaggctataacaaagctgtttatatcagtgttcaggacaaagaaggagagaaaggagtcaacaatgg

SEQ ID NO: 24852 - DNA, 458 bp, Homo sapiens
  misc_feature (1)...(458): n = A,T,C or G
ctttgcnccgcgctgcagtaattcggcacgagcccaggcggngatgctgcggctccgcagcgggctgaggcaccttcgggcaacacccaatactcggggctccgctcggcttctttgcgccgagatgcctaagaaggctggtgcgacgaccaagggtaaaagccagagcaaggaaccagagagaccacttcctcccttaggtcctgtggcagttgatcctaaaggatgcgtcaccatagccatccatgcaaaacctggctccaaacaaaatgctgtaacagatttgacagcagaggctgtaaatgtagctattgcagcacctccatcagagggagaggctaatgctgagctctgtcggtatctttccaaggtcctagaactcaggaagagtgatgtggttttggataagggtggtaaatctcgtgaaaaggtggtgaagcttttggcttctacaactc

SEQ ID NO: 24853 - DNA, 491 bp, Homo sapiens
ggcaattgtcgcctgtggaattcggcacgagcatcatgaacgacaccgtaactatgcgcactagaaagttcatgaccaaccgactacttcagaggaaacaaatggtcattgatgtccttcaccccgggaaggcgacagtgcctaagacagaaattccggaaaaactagccaaaatgtacaagaccacaccggatgtcatctttgtatttggattcagaactcattttggtggtggcaagacaactggctttggcatgatctatgattccctggattatgcaaagaaaaatgaacccaaacatagacttgcaagacatggcctgtatgagaagaaaaagacctcaagaaagcaacgaaaggaacgcaagaacagaatgaagaaagtcacggggactgcagaggccaatgttggtgctggcaaaaagtgagctggagattggatcacagccgaaggagtaaaggtgctgcaatgatgttagctgtggccactg

SEQ ID NO: 24854 - DNA, 508 bp, Homo sapiens
  misc_feature (1)...(508): n = A,T,C or G
tgcaggtncccccaatagcccgcgctgcaggtagtcggcacgaggtcaaacggctgaaacctggctacttagaagctactgtggactggtttagaaggtataaggttcctgatggaaaaccagaaaatgagtttgcgtttaatgcagaatttaaagataaggactttgccattgatattattaaaagcactcatgaccattggaaagcattagtgactaagaaaacgaatggaaaaggaatcagttgcatgaatacaactttgtctgagagccccttcaagtgtgatcctgatgctgccagagccattgtggatgctttaccaccaccctgtgaatctgcctgcacagtaccaacagacgtggataagtggttccatcaccagaaaaactaatgagatttctctggaatacaagctgatattgctacatcgtgttcatctggatggtatagaagtannagtagagcttttcaaagctttaaattgtagactcatctaactanagtaaa

SEQ ID NO: 24855 - DNA, 501 bp, Homo sapiens
  misc_feature (1)...(501): n = A,T,C or G
gagcggcncnccaatagtcgcctgcgtagacggccgaganaatatgctgaaaatacaaaacaaaaagagagaacttgcagcaggagcctttggaactaaaaaaccaaatgctgacgaaatgaaacaagccaaaattaatgaaatcagaacattaattgacttataatttgtgggattttagtaagaagactactatatgtgagaggcgtgatatctggatggaagttgggctggatgatctccaaagtcgtttcaactcttaaagacatcttaatcctgaatgtaaacaattgttatgtgtttagaatcagaatttgattttgaacttgagtaattcatccttacagctatctgtagaattagtcatcntttttcttttcttttttttttacttttttggtaataaggcaacttatttgctgcagatttgggttgacttctgagcatatttaaaaccaaagagctagaaatttagcagtcgattaggtaggtgggttattt

SEQ ID NO: 24856 - DNA, 478 bp, Homo sapiens
  misc_feature (1)...(478): n = A,T,C or G
ctcgacccccctnnnnnatggaccgcctgcacgaattcggcacgagccaagatgtcccatcctcagcacagggcccactctgccaaccagtctcaagcaccagcccctcaacactgccatccacctggctctgggccaagccaccaatccagagctccctcaggtcctgggactaaggcggggacatgactgatcccctcagagcaggctcaggcctggagtcggcccccaaaagtttcacatagggccaggcagcctctgtgtttctttccctggtcctgaactgtggaaatgccattaaactctctctataatgtaactgaaactgctggctgggcgcagtggctcccacctgtaatctcagcccttcccgaggctgaggtggaaggattgctcaaggccaggtgttcgagaccagcctgggcaacatagcaagaccctgtctctatttatattgaaaaataaaaataacaaaaan

SEQ ID NO: 24857 - DNA, 312 bp, Homo sapiens
  misc_feature (1)...(312): n = A,T,C or G
taacaggctcttnnncgncncaagccancaactctctttgcattaaaatttcaaagtttaattaatataattaaaagcaacagcaagcagcagcctgtgaagattttgctcatcttttttatgccttttgacattgaatgacctattactgtatgccattacttggattttgaggggcactctaccttggttatgattcagtagaggaaaaagaccacctttcttcaatttacaaattaaatcttctggagggtcgctatcacaaaacattgacgatgtatgtattataattttttagaaaaaccaccatcg

SEQ ID NO: 24858 - DNA, 504 bp, Homo sapiens
  misc_feature (1)...(504): n = A,T,C or G
ctcgcccgctntgcgngannattgaccngcgctgcaggaattcggcacgagccggtactgttgaaagcgacaagtggaggcgccgctctagcggccgggactctgaactatggcggctagtgatacagagcgagatggactagccccagaaaagacatcaccagatagagataagaaaaaagagcagtcagaagtatctgtttctcctagagcttcaaaacatcattattcaagatcacgatcaaggtcaagagaaagaaaacgaaagtcagataatgaaggaagaaaacacaggagccggagcagaagcaaagagggaagaagacatgaatccaaagataaatcctctaagaaacataagtctgaggaacataatgacgaagaacattcttctgataaaggaagagagcgactaaattcatctgaaaatggtgaggacaggcacnaaacgcaagaaagaaagcatcaagaggcagaaggcactcaagatctaggtctcgtgaa

SEQ ID NO: 24859 - DNA, 502 bp, Homo sapiens
  misc_feature (1)...(502): n = A,T,C or G
gtgtgcccnaatagatcgctataggcgcctcgaggaccagcgaaacaaatcacacctcaaggccccggctgaaaaacgtggacaggagcactgcacagcagttggcagtaactgtgggcaacgtcaccgtcattatcacagactttaaggaaaagactcgctcctcatcgacatcctcatccacagtgacctccagtgcagggtcagaacagcagaaccagagcagctcggggtcagagagcacagacaagggctcctcccgttcctccacgccaaagggcgacatgtcagcagtcaatgatgaatctttctgaaattgcacatggaattgtgaaaactatgaatcagggtatgaaattcaaaacctccacctgcccatgctgcttgcatccctggagaatcttctgtggacatcgacctcttagtgatgctgccaggataatttctgcttgccatgggcatctggccaccaaggaatttcgcaccctgacgattactcttg

SEQ ID NO: 24860 - DNA, 479 bp, Homo sapiens
  misc_feature (1)...(479): n = A,T,C or G
nnnnnnaagggnnngnccttgaactgcatgccttcggaattcggcacgagccgaaaccggcgcggagcaactgaggcccgagccttctcgggacccgggggacgcctaaccccgcgagaaccctgcaaattttcttcctcataattgggagaagactcactggccgaatggcagcagtagatgacttgcaatttgaagttacttgctggacagaagaaaagctcccccttctggacatttgaatactaccaaacattctttgatgtggacacctaccaggtctttgacagaattaaaggatctcttttgccaatacccgggaaaaactttgtgaggttatatatccgcagcaatccagatctctatggccccttttggatatgtgccacgttggtctttgccatagcaattagtgggaatctttccaacttcttgatccatctgggagagaagacgtaccattatgtgcccgaattccn

SEQ ID NO: 24861 - DNA, 467 bp, Homo sapiens
agggttactaattacgacctgcctcgcgctgcagcaattcggcacgagggagaaggggacatatttgtggccaaaatgatactaaccaaaggggcttccttgtcagggcctggtggagttggtgggtcatcggggctcactgcctcctgcccttctctcctgtctgacccccacttagcccttctctccttgcagcctagcagtttatagttctgagatggaaagttgaagggggcaagcaagacctctcctcagcccatgcccagctgtcaggagagaggtgcagggaggaaggccttgtgctgggacaacctctctcttgccttacctcagagagggactatgccctgacccctcctttctgaaaatcagtgccctccctgttgctctaggaggctcctgctggcttggtagaagacagaattcgatctgcctgtccctttttcccctggggtttgacacacagg

SEQ ID NO: 24862 - DNA, 477 bp, Homo sapiens
  misc_feature (1)...(477): n = A,T,C or G
nttgacccgcgctgtggaattcggcacgagataacttccctgatgaataatctgatattaaagtagtatttggacccagagccagaactcggtggtggaggctgctggtctctcctcaccaccttcttttgcacttggaaagaacagcaacatctggatagagttctagctttgacttctcatttccttgtctttttgggtgcattcctcagcacactttttttttaaacctttttgttttgttttgtttgtatttcatgtggttttatttgggggctttggttttttcacccttttttgtgatttgcaatgatgtgcttgcccagctaacttttgaattgcactttttaataaatattcttaacaattaaaaaaaaaaaaaaaaaaaaaccgacggaagctttacccggccctgagctgggctagcacctcccccaggaaaccgttgcaatcggccaccccccttctcaacggaag

SEQ ID NO: 24863 - DNA, 477 bp, Homo sapiens
  misc_feature (1)...(477): n = A,T,C or G
cgtggnngnnnnnaattgaaattgatccgcgctgcaggaattcggcacgagattgatagggaaaaaatagcagtaattggacattcttttggtggagcaacggttattcagactcttagtgaagatcagagattcagatgtggtattgccctggatgcatggatgtttccactgggtgatgaagtatattccagaattcctcagcccctcttttttatcaactctgaatatttccaatatcctgctaatatcataaaaatgaaaaaatgctactcacctgataaagaaagaaagatgattacaatcaggggttcagtccaccagaattttgctgacttcacttttgcaactggcaaaataattggacacatgctcaaattaaagggagacatagattcaaatgcagctattgatcttagcaacaaagcttcattagcattcttacaaaagcatttaggacttcataaagattttgat

SEQ ID NO: 24864 - DNA, 480 bp, Homo sapiens
  misc_feature (1)...(480): n = A,T,C or G
tgggactanaattgaccccgctggatgaactctgcacgagcagagccccaccgcagcccagtagggatgcagcacgccccagagggctcatgtgggccccagatggcaatgccaccattgttgatgtgactccagagccagttattaggaagagcaagctcaccacagaggagtggaactgaggccccccaaatgttgcctccggtgtccaagccacagcggtctggctgttgggaagatggccaggaatggactcataccattggcacattaggctaatcctgggtttatgtgaagtcagcaattaagtgctcccactagaactgacctaagccactgattaatatttaatgagggaaggtaggggagaatctatgcattttataatgccagaaatctatatatgttatctgatgccatttttctgaagtagcctcacatgtgtgccccctgcaggttagcagttaacagatgactttn

SEQ ID NO: 24865 - DNA, 484 bp, Homo sapiens
  misc_feature (1)...(484): n = A,T,C or G
tggggnggaagggggnnnnaattgagcttcgatatcaattcggcacgagatagtncccagaccttgaagtcacccggccccgatgcaaggtgcccacatgtgtccatcccagcggctggtgcagggcctccattcctggagcccgaggcaccagtgtcctcccctcaaggacaaagtctccagcccacgttctctctgcctgtgagccagtctagttcctgatgacccaggctgcctgagcacctaccagaccctgcccctcatgccaaccccgccctaggcctggcatggcacctgtcgcccagtgccctggggctgatctcatggaagcccagctccagggccagatgagcagaagctctcgatggacaatgaacggccttgctgggggccgccctgtaccctctttcacctttacctaaagaccctaaatctgaggaatcaacagggcagcagatctgtatatttttttctaagagaaaat

SEQ ID NO: 24866 - DNA, 455 bp, Homo sapiens
atcgcccgcctgcaggaaattgcacgacgctgaatatgaggaagtcttcttccttcgcgccttcttcttccttacgctccagggcagcctgacagagccgctcgaaggctctgctggccgcggctagccggtttacccattccactggacccagccaccacccactcctgctgtctgggtgcagcagaagtctcaggtagctgagaagttcatggaatcttcttatttgctacacctttcactactgcttgtgatatagtgcagggttgggatgtgcagacatttctcaagtgcactgtgtacctacacagcatgctgcaatttggctactgaagtcaagagaaactggtttgaacaactactgagtgtaacataggaagcgcatttcatttgataacaggaacacagcttttgtgctaataaaatgctttgaaaaaaaaaaaaaaaaaactcag

SEQ ID NO: 24867 - DNA, 482 bp, Homo sapiens
  misc_feature (1)...(482): n = A,T,C or G
nggtgggtattgacgtctgtggacttcggcacgaggaggattgagggcctgagcacactgccctgtctccccactcagtggggaaagcaggggcagatgccaccctgcccagggttggcatgactgtctgtgcaccgagaagaggcggcagatcctgccctggccaatcaggcgagacgcctttgtgagctgtgagtgcctcctgtggtctcaggcttgcgctggacctggttcttagcccttgggcactgcaccctgtttaacatttcaccccactctgtacagctgctcttacccattttttttacctcacacccaaagcattttgcctacctgggtcagagagaggagtcctttttgtcatgcccttaagttcagcaactgtttaacctgttttcagtcttatttacgtcgtcaaaaatgatttagtacttgttccctctgttgggatgccagttgtggcagggggaggggaacctgtc

SEQ ID NO: 24868 - DNA, 507 bp, Homo sapiens
  misc_feature (1)...(507): n = A,T,C or G
agggnncnnnttttgggccctagatccgccctgcaggaattcggcacgagaaaacagctgcctgagaccacaatgtagggagttttagggccctctgattcctctgccctctgtttcctaccttcaggaaaaggagcctgggcaggtatggaaaagactggggggcctcagtgccaccctaaacaagcctagctaagggtgagctttactggatgaattcagcctggaggctccttctcaggagacccctccacggacagagtccaccagctccatcattagaatgaggcccagagaagcaaagtgacttgaaccaggacacccagcatcggtggcatagccaggagggccaggagttaaagaacccaggtctcttgaggtccagaaccactccctggactgttttaagttcaaattctgacaccaccccttcctagctatatgaccttgggaaagtaggtgcctctctccgagcttcagcctcttttcccatcatagggtgtatta

SEQ ID NO: 24869 - DNA, 459 bp, Homo sapiens
  misc_feature (1)...(459): n = A,T,C or G
cttgcccccgctnntttgacccgcgctgcaggaattcggcacgagatcaacctgtcattgccataggaggctcctatggtggcatgcttgccgcctggtttaggatgaaatatcctcatatggtagttggagctcttgcagcttctgcccctatctggcagtttgaggatttagtaccttgtggtgtatttatgaagatcgtaactacagattttaggaaaagcggtccacattgttcagagagcatccacaggtcctgggatgccattaatcgactctcaaatactggcagtggtttgcagtggcttactggagcccttcacttatgcagcccattaacttctcaggacatccaacatttgaaagactggatctctgaaacctgggtgaatctggcaatggtggactatccttatgcctctaactttttacagcctttgcctgcttggcctatcaagc

SEQ ID NO: 24870 - DNA, 455 bp, Homo sapiens
atttgccccgctgcagtaattcggcacgaggagagagagagagagagagagagagagagagagagctctcatgtctctcacgcgaaaggaaaaaggagtgatatttgggtccccactgacggaggaaggcattgcccagatataccaactgagtgagtatctacacaaaaacttgcgagtagagggtttgtttagagtaccgggtaatagtgtccgacagcagattttaagggatgctctcaataatggaactgacattgacttggaatcaggggaatttcactcaaatgatgttgccactttgctgaagatgtttctaggagagttgccggagcctctgctgacacataaacacttcagtgcacacctcaaaatcgctgatttgatgcagtttgatgataaaggaaacaagacctatataccagacagggaccggcaaattgaggctctccagt

SEQ ID NO: 24871 - DNA, 413 bp, Homo sapiens
  misc_feature (1)...(413): n = A,T,C or G
ggggnnnnnnnnagggggnnnnnnnnatttgacncgcccatttgcaccgcgctgcaggaattcggcacgagaacaaaatgctatggtagcatttttcaccttcatagcatactccttccccgtcaggtgatactatgaccatgagtagcatcagccagaacatgagagggagaactaactcaagacaatactcagcagagagcatcccgtgtggatatgaggctggtgtagaggcggagaggagccaagaaactaaaggtgaaaaatacactggaactctggggcaagacatgtctatggtagctgagccaaacacgtaggatttccgttttaaggttcacatggaaaaggttatagctttgccttgagattgactcattaaaatcagagactgtaaaaaaaaaaaaaaaaaa

SEQ ID NO: 24872 - DNA, 475 bp, Homo sapiens
  misc_feature (1)...(475): n = A,T,C or G
agtgggngnnnnnnaattgaccttcgctgcacgatttcggcacgagagcaacgtggacgactgggaagaggagaccattgagttcttcgtcactgaagaaatcattcccctcgggaatcaggagtgacctggagcactgtggggacggactccgcctgctgttcccgcgctgagctacaggactcccgagtgtgagccgcggttcctctgttgcagcgcagccgtgtgtgctgtggagccgaggccgtcctgcaggaagccgcgtgactcccgcctcctccctgtgctctctggctctggactgtgactgcgcctggattctgccattgcgacacatttttgtgcctttcagcccctggtgtctgcagtgggggatttaaggcacccgcttccacttctttcttgtttggagttttctggtggaaccgccggcgttggctccgaagacttagcgacgccactggcggcaccttct

SEQ ID NO: 24873 - DNA, 503 bp, Homo sapiens
  misc_feature (1)...(503): n = A,T,C or G
ggctcggtnnnnnnnaaattgatcgctctgtagaactctgcacgagctcaatatttgaattgttgccccatttgcttttacctgtactgtattcttggtcatctcaaatggcgtctaaacccagctactttgcattccagaagtttccattccctccaattccacctaatttttcatctgtcctagttactggctctttcttcatgtcttatttctcttgctttgggagcttaaaagattttacaagacctaattttgggttccttccttggagccatagttaccctgccaagaagagtagaaaatgggttcaactcctgtttcgctccaccaacacctctgtgagtctcatcatcagctgagcgatgatgccttacaggttgcatagcactggaactttcctagagtaacggctctgctgccagggtttctctgggctcattcttccactgacttaattatgatctatgcctaacagagccccagtacaactattttgcaga

SEQ ID NO: 24874 - DNA, 484 bp, Homo sapiens
  misc_feature (1)...(484): n = A,T,C or G
aggggtnnncctgacttcttgcggcattcggcacgaggactggatccactactggcccaagaatactgatgagaaacctagtctggattgggtcggaagctggaatttggtgctctgcagaccagtgctcaaaattgtggttatttttgaggactcgccttcaatccagaacatttgcgtttcaccttcctcgcccagatccagttaacaaggtagctcatcacttcttgcatctgttgagtgacatgctggattttaatttttattgtggttgtacttggatgcaaggaatatgttttgttcctcccaatttagcgcaccatcctgggaagtgcatgtctcagaccaactccaccttcaccttcaccacctgtcgcatcctgcatccttcagatgagctcactcgggtcacaccaaggtcatgtgaggaggacgacgaagcagccatatgccccgttgagctgagaggagatatagggcagag

SEQ ID NO: 24875 - DNA, 477 bp, Homo sapiens
ctttgccattcgctccgcgctgcagcgaaccagcacgagaggcagtagatgggcgagaatgaaaacagacaaacaacctcaacaaaccctggagagtactggagatttaaaagggactggaaaggacttgttgcgcaatggaagaatctgactctgagaaaacgacggataaagaaaatctggggccgagaatggatccaccactaggggaaccggaaggatcgcttgggtgggtgctaccaaatacagccatgaagaaaaaggtaagacgtgttagatacgtcaaaaccatgaaggtaaaggtgctgatgatgggtaaaagtgggtctggtaagaccagcatgaggtctattatctttgcagattatattgccagagacacacgtcgtcttggcgcaacaattgatgtagaacattctcatgttcgatttctgggaaacctggtattgaacctgtgggattgtggtgggcaagacg

SEQ ID NO: 24876 - DNA, 448 bp, Homo sapiens
  misc_feature (1)...(448): n = A,T,C or G
natgatnactgtgcngcaattcgacgagctntcgcgcgggtgtagctgggctggaggcctggaccttgcagccgcaatggattcaagttcgaaatatggcaactttgaaagatatcaccaggagactaaagtccatcaaaaacatccagaaaattaccaagtctatgaaaatggtagcggcagcaaaatatgcccgagctgagagagagctgaaaccagctcgaatatatggattgggatctttagctctgtatgaaaaagctgatatcaaggggcctgaagacaagaagaaacacctccttattggtgtgtcctcagatcgaggactgtgtggtgctattcattcctccattgctaaacagatgaaaagcgaggttgctacactaacagcagctgggaaagaagttatgcttgttggaattggtgacaaaatcagaggcatactcta

SEQ ID NO: 24877 - DNA, 482 bp, Homo sapiens
  misc_feature (1)...(482): n = A,T,C or G
attgganccgcccatctgcacccgctgcaggaattcggcacgaggacaaccgctacagaggaacaagtcagcgagccaaaaaaatggaaccttcgacgaaaccgaccacttctggattttgtgtccatggaagagctgaatgacatggatgactatgacagtgaggatgacaatgattggcgacctactgtagtaaagagaaaagggagatctgcatctcanaaagagggaagtgatggagacaatgaggatgatgaagatgagggaagcgggagtgatgaagacgagaatgatgaaggcaatgatgaagatcatagtagccctgccagtgaagggggttgcaagaagaagaagagtaaagttcttagcaaaaacagtgctgatgatgaggaactgaccaatgatagcctgaccctatctcanagcangagtaatgggtagatcaccccatttttatatctgtctgtctggggaaaaggcat

SEQ ID NO: 24878 - DNA, 473 bp, Homo sapiens
  misc_feature (1)...(473): n = A,T,C or G
ngcaggccnnnnnntttgganaatcgaccggttgcggaattcggcacgagctcacgccacgtcatcctaggcacccagcagttcaagcctaatgagtttgccagccagatcaacctgagcgtggagaatgcctggggcattttacgctgcgtcattgacatctgcatgaagctggaggagggcaaatacctcatcctcaaggaccccaacaagcaggtcatccgtgtctacagcctccctgatggcaccttcagctctgatgaagatgaggaggaagaggaggaggaagaagaggaagaagaagaggaagaaacttaaaccagtgatgtggagctggagtttgtccttccaccgagactacgagggcctttgatgcttagtggaatgtgtgtctaacttgctctctgacatttagcagatgaaataaaatatatatctgtttagtctttcaaaaaaaaaaaaaaaaaacctgg

SEQ ID NO: 24879 - DNA, 501 bp, Homo sapiens
  misc_feature (1)...(501): n = A,T,C or G
agcggtnctcattgaccgtctgaggacttcggcacgagccatcgtgtacggccactgaccaagaatgcactgttgagggacccttatgcgctgcggtcagtgcggcacctcatcgacaactgtgccttccggctctacgggcactgggtaaagaaaggggagcagcagaaccgggcggctctctttcagcaccggccccctgggccttttcccatcatgggccctgaagaggagggagactctgctgctataactgaggatgaggccgtgcttgtgctgggctaggacctcaaccccagggattcccaggaagcagaactctccagaagaagggttttgatcattccagctcctctgggctctggcctcaggcccactaatgatcctgctaccctcttgaagaccagcccggtacctctctccccactggccaggactctgagatcagagctggggtggaagggagccattctgaacgccacgcctggcccggtcagtgct

SEQ ID NO: 24880 - DNA, 453 bp, Homo sapiens
  misc_feature (1)...(453): n = A,T,C or G
nattgannattgaccnccgctgcaggaattcggcacgagcagcaatgacaaccttgggagtatttattaaatattatgctatgaatataggcaacacagaacagggtttgcagtatagcgtcttgatgctaaattctcatatacctctacacgagaaatatggaggagaaaaacaagcatttacatatattcttcgtcactttgaagatgcatggcctgaactcgactgcttgtgtttgtttacatatcaggcatacccaggcatctcctgcagccagaggttccattgctgtctttgctcagtcctcttttaaaatatgaattagtggacaggcacggtgcctcacacctgtaatcccagcactttgggaggtcgaggcaggtggatcacgaggtcaggagatcaagaccatcctggctaccactgaaaccccatctctactacaaaaaaat

SEQ ID NO: 24881 - DNA, 481 bp, Homo sapiens
aattcgcccgcgctgtggaattcggcacgagcagcgaggtgccttcattcttggtcgagcgaatggcaaatgtcaggcgtcgccggcaggacaggcgagggatggagggcggcatcctcaagtcacgcatcgtcacctgggagccctcagaagagtttgtcaggaacaaccacgtcattaacacccctcttcagacaatgcacatcatggcagacctggggccctataaaaagcttggctataagaagtatgaacatgtcctgtgtactctgaaggtggatagcaatggtgtgatcacagtaaagcctgacttcacgggcctcaaaggaccctacaggattgagacggagggggagaagcaggagctgtggaaatatacgatcgacaatgtttccccccacgcacagccggaggaggaggagcgggaacggcgagtgttcaaggatctttatggccggcacaaggagtatctcagcagcct

SEQ ID NO: 24882 - DNA, 478 bp, Homo sapiens
  misc_feature (1)...(478): n = A,T,C or G
cgtggtngnnnnnnttttgaaatcgatccgcgctgcacgaattcggcacgagaagatgctacagctgaaagaattgatgagttcattgtcaaactgaaggagctaaagcatgtagcctcccctttcactctgatcattgatgatccctcagggaacagttttgtggaaaacccacatgctcctcagaaagatgatgccctggtgatcacacactacaaccggacccgacagcaggaagagatgctggggcttcaagaagaagcaccagcagagaagccagaagaggaagatctcagaaatgaagtgctccagttcagcacaaactgcccagaatgcaatgcccccgctcagaccaacatgaagctagtacaaatccctcactttaaggaggttatcatcatggctaccaactgcgagaactgtgggcatcggaccaatgaggtgaaatctggaggagcagtagaacccttgggcacca

SEQ ID NO: 24883 - DNA, 472 bp, Homo sapiens
  misc_feature (1)...(472): n = A,T,C or G
cttggaccccctganaatttgacccccgctgcaggaattcggcacgaggacgcggggccccacagacctgtctccgcgtgagctgcctgcaggcccctgcgtcattcctcatctgcgtgcgaggcctctggcttggagagcctccccgctgtgcacagttctctctttgccagggcagggcttggggcagcaccaggctggggcagaggaggaaagcaagaggacagacctccagaagagcagcggagggcgggtgaggatttccccatataccagtgtgtgttcatctacccatgaggaataaaaccatgcagcagcatgcaaatggtgtcctggtgttcgcagcaaaactgctcatggtaatggataagttgttttcatacagtgggttgtcaatatgtttaataattgttgggatctattaataagggcaatatattcatatggtggattatttggctattataatggg

SEQ ID NO: 24884 - DNA, 469 bp, Homo sapiens
  misc_feature (1)...(469): n = A,T,C or G
tgggtnannnnnaactgacttgcctgcacgatttccgcacgaggagagagagagagagagagagagagagagagagagagagagagagagagagagagagagagagagagagagagagagcgcgagcgatatctcgcgcgaagacctggagcgagacctggagagtggcatccctgggggaaatctcttgtggtctctcacagagtctgtgagagatagcggctccccccgcggggcgcccccacaggtggagacccaaaacaagttctccttctatgcacatatacacacacatacatacacatactctgtgagcttctttttgagaggtatatatagacgtagatataccccctctctttctctctctctgtcacacactctcgcacacacctgtgctacagagttggagacacccagggggagacataggggtcactattgtgtctgccgccctctagataccccg

SEQ ID NO: 24885 - DNA, 499 bp, Homo sapiens
  misc_feature (1)...(499): n = A,T,C or G
agcccccccatagtcgcttgaggactttgcacgagcccagatggggctgtctagttgcaggaaaacaagctcagggctcccactgagtctctgtgatggtgagttgtagaattatttaattatatgttacaatgtaataatagtagaaataaagtgcacaataaatgcaatgcacttgaatcgtcctgaaaccatccctccccgaccccaatccatggaaaaattgtgttccgcgaaaccggtctctggtgccaaaaaggttggggaccgcttctggaaaagctggaaaaggcaagaaaacgcattctctccctcagcctctggaaggaaccagcactgtgggactaatttacatactgtagggtaataaatttgtgttgcttcgaaccactaaaaaaaaaaaaaaaaaaaaataaaggnagagactaaaaaaaaaannaaccttgggggggggcgccggccccaattccccctaaagagagacattataaaactcggg

SEQ ID NO: 24886 - DNA, 351 bp, Homo sapiens
  misc_feature (1)...(351): n = A,T,C or G
aggggangnnnnnnnnattgattgccncggctgcaggaattcggcacgagcggngaccgtggaggcttccgagggggccggggtggtggggacagaggtggctttggccctggcaagatggattccaggggtgagcacagacaggatcgcagggagaggccgtattaattagcctggctccccaggttctggaacagctttttgtcctgtacccagtgttaccctcgttattttgtaaccttccaattcctgatcacccaagggtttttttgtgtcggactatgtaattgtaactatacctctggttcccattaaaagtgaccattttagttaaaaaaaaaaaaaaaaaaa

SEQ ID NO: 24887 - DNA, 509 bp, Homo sapiens
  misc_feature (1)...(509): n = A,T,C or G
agggggannnnnnnattccatcggctgcacgaattcggcacgaggagaagcctcatcagtgccaagtctgtgggaagaccttctctcagagtggaagcaggaatgtgcatatgagaaagcatcacctgcagctgggagcagctgggagtcaagagcaggagcaaactgaggtgcttgctgaaggatccccacgttccctgtcttcagtgcctgatgtgacacatcacctggtgaccatgcagtcagggaggcaatcatatgaagtttctgtcttaactgcagtaaatccacaagagttactaaaccaaggagatttaactgaaagacggacatgagcgtgggtgctgactcctggaagagcaactctatctgatctcaaaatgcgtatactgggaacaggatgccttagcccacaacagaaccagaatgaatctttgaaagcacaagactctgcttttgccactcttcctctntcctggtatagaagatggatgtaggagagcttcttt

SEQ ID NO: 24888 - DNA, 511 bp, Homo sapiens
  misc_feature (1)...(511): n = A,T,C or G
agctgggttttaattgaccttcgatggctgtacgaattcggcacgagccggcttcggagagtctatcatggcagctcggactggtcatacggccttgagaagggtagtctcgggatgccgtccgaagtcggcgacagcggccggggcgcaggcgcccgtgcggaatggcagatatttagcttcctgtggtatactgatgagcagaactcttccactacatacctcaattttgcctaaggagatatgtgcacgaactttcttcaaaatcactgcaccattaataaacaaaaggaaagaatattcagagagaagaattttaggatattcaatgcaggaaatgtatgatgtagtatcgggagtggaggattacaagcattttgttccttggtgcaaaaaatcagatgttatatcaaagagatctggatattgtaaaacaagattagaaattggatttccacctgtgttggagcgatatacatcagtagtaaccttggtgaaacctcatttagtn

SEQ ID NO: 24889 - DNA, 463 bp, Homo sapiens
  misc_feature (1)...(463): n = A,T,C or G
naggancnnnaatgactcgtgacgattcggacgagccccatacagccctcaccttcctgtacttgcctcggccgccagccgatcccgcccgatacccccgctacctggcgctactggagactctaacccgagacctgggccccacgctgctggttcatggggtcactccagtcacctgcactgatctgtgatgcccctgcctccagggctaggtagagagggcccaggcaggcggcctatcctgatccttggaggaggaggaagaggaggccactgtggcccgtggccctgcccttgggacgtggagcccaggggaggtttgaaggggatcctgggcttgggcatcacgcccacctcctttggcagagggaccccagcacactaactctgggtggctgtccccaccgtgcaggggagggagtccgcagcctcccttcactggtgccttgatgctaggggccag

SEQ ID NO: 24890 - DNA, 448 bp, Homo sapiens
  misc_feature (1)...(448): n = A,T,C or G
natgatncccgtgggcntctcatatgtgcccctctctcgatgtgcactttccagtgtggatatatataggacacctctgtatgaccttcgtattgaccaaaagatttacggagaactgtggaagacaggaatgtttgaacgcatgtctctgcagacagatgaagatgaacacagtattgaaatgcatttgccttatacagctaaagccatggaaagccataaggatgagtttaccattattcctgtactggttggagctctgagtgagtcaaaagaacaggaattcggaaaactcttcagtaaatatctagcggatcctagtaatctctttgtggtttcttctgatttctgccattggggtcaaaggttccgttacagttactatgatgaatcccagggggagatttatagatccattgaacatctagataaaatgggtatgagtatt

SEQ ID NO: 24891 - DNA, 440 bp, Homo sapiens
  misc_feature (1)...(440): n = A,T,C or G
gggggcnnnnnnaattganaatcgagcgccctgcggctggaacaggcggccaagaaaaccctcccaacaccctcaccagaggcctatcaggctatgctgcttcgaatcgccaggatcccctgaagggtctgggatgggggccaggagattagcaacaaggattcattctgttacttacttgcccctttttatctttccctcttgccccagtcccttctctccagcttcatgtgaagctctgcacagacaagacactcagtgtccttggcagtgctgctactcctcaggtgcagcatacataaccagtaagagactaaatctgcaatatataaagagctcctacaaatcagtaacatgaagaacactcaaaaattggcaaatgtcatcagtgttttaaacagaataaagattccaaacactttgaaaaaaaaaaaaaaaaa

SEQ ID NO: 24892 - DNA, 516 bp, Homo sapiens
  misc_feature (1)...(516): n = A,T,C or G
gggntcccngggnnaaaaaagaaaatcgacggctgcggaattttgacgacccaccgtcggnggctggcttcgaggacgcccgcctgcctcgcgggtcgtgtccgcgggactgtgttcgtacgtgcatagtttcgatatcacatcgcggggctgtgttcgtagctgcgtcgtttcgatatcacaccctctgtgtgccgccttacttcctgcttcgagaatgtataacgtggaaatccacgggaccaaatttctgcagaggccttgccggatggttccataactgtagagtctaattgctatccattacagaaattaatcgttcagttgaaagaagtactgatgacttttcaaaacaaatgaaccaccgtagctgacagagaaccgtatcgtagaggtttgtagttagtgcttatttttgcatgttgatgttgactagctaataaactgtaaatgtnnnnnnnnnnnnnnnnnnnnnnnnnnnnnnnnnnannnnnananaaaaaaaacgcggggggg

SEQ ID NO: 24893 - DNA, 462 bp, Homo sapiens
  misc_feature (1)...(462): n = A,T,C or G
nttttgcctcgctgcagaattcgacgagctacacaagatggcggcacccgaggaacacgattctccgaccgaagcgtcccagccgattgtggaagaggaggaaactaaaacatttaaagacctgggtgtgacagatgtgttgtgtgaagcttgtgaccagttgggatggacaaaacccaccaagatccagattgaagctattcctttggccttacaaggtcgtgatatcattgggcttgcagaaactggctctggaaagacaggcgcctttgctttgcccattctaaacgcactgctggagaccccgcagcgtttgtttgccctagttcttaccccgactcgggagctggcctttcagatctcaaagcagtttgaagccctggggtcctctattggagtgcagagtgctgtgattgtaggtggaattgattcaatgtctcaatctttggcccttgcaaaaaa

SEQ ID NO: 24894 - DNA, 533 bp, Homo sapiens
  misc_feature (1)...(533): n = A,T,C or G
nggttcgccctgagatgtcggcacgctcctccacaggacgggagctgtggagggggtcctgggtcggacccaaggcacccacacttgagaaagcctccgcctggacgtcagggaggcctgcgagctgccacagtgcaggtgcagccgttcccaccgccctgctgctgcttgacacgggcataggagatacaagtggtgtgtgcggcggttcatgcctgtaatcccagtactttggaaagccgtggcgggaggaacgctgggcaacatggtgaaaccccgtctctaccccctaaaaatagaagaattggcaagaaaaaaaaaaaaaaaaaaaaaaaacctcgggggggggccgcggccccaattcgccttatggggagcggattacaattacatggccggcggtttaaaacgcggggaggggggggaaaaaaangngnttggnngtntngtttgtgttggnnttttttaaaattttggttgtttaaaattggaggtcgttcgccctaacctggttcttggttggtagtcttccc

SEQ ID NO: 24895 - DNA, 465 bp, Homo sapiens
atagacccgtcgtgaggccttcggcacgagtattagctttgcttaagagggccaattaaatcaaagccctttagttccctttaacagggactggagttatgatgcatgtgttacgacttttggcccactgtccatgcaactctaagtgcaggttgatttgctttccagaaatcccaaaggggctgctcttggatcaccgaagagccttacctatatcaaatcaaaaagacattctgggtcagattagactatgctcctggccctacagattgcacataaactatcataaatacagctttttcagggaactagttctaaaactcttacctgctgagaataagtcttaacactaagatgactgtattatatcaatttattattagaatcagacttatacctagcacaattaactattgtgtgggcaaagaacatttaaagggcatagtagaggtaaggagagacaca

SEQ ID NO: 24896 - DNA, 479 bp, Homo sapiens
  misc_feature (1)...(479): n = A,T,C or G
cggctacnattgaccgcctgcaggaactctgcacgagcatcttggagctggacgagcatctccagaaagatttcatcatctttgaggctgctccccaagagacacggggcatcccctccaagaagcccgtggccgactacttcctgtgaccccgcccggcccctgccccctccaacccttctggccctcgcaccactgtgactctgccatcttcctcagacggaggctgggcgtgggggggggctgtcctggctctgctgtcccccaagagggtgcttcgagggtgaggacttctctggagaggcctggagacctagctccatgttcctcctcctctctccccacttgaaccatgaagtttccaataatttttttttctttttttccttcttttttctgtttgtttttagataaaaattttgagaaaaaaaatgaaaaaattctaataaaagaagaaaaatgaaaaaaaaaaaaaaaan

SEQ ID NO: 24897 - DNA, 471 bp, Homo sapiens
  misc_feature (1)...(471): n = A,T,C or G
atttgaccctcgccnccgcgctgcaggttttgatggtacagtccaggtctatgatgccacatcttgggatggaacacggagccaagtagaacctctcttcactcacagaggtcacatcttcctagatggaaatgggatggaccctgctcctttggtcaccacccacacctggcatccctgcagaccaaggactttgttatcagcaacaaatgatgcctctctgcatgtgtgggactgggtggacctttgtgccccccgctgacaccagcatctttccatctaggcctctagaaaggggaggagctgctgtagtagcaagggtgctgatgtaggactcaagtgactaccagtccctgttaccagctgtgtggccttgggcaagtctgccagcgtcacttagcctcagtttccttatctgtaaaatgaggatagtaagaactacctcgtagtgatattgcgaaggttagaaga

SEQ ID NO: 24898 - DNA, 469 bp, Homo sapiens
atttgcccctcgctgcaggaattcggcacgaggagaacttgaaagttcggaccaggtgagggagcacacgtcgcatttggaggcagagctggaaaagcacatggcggccgccagcgccgagtgccagaactacgccaaggaggtggcagggctgaggcaacttctcctagaatctcaatctcagctcgatgccgccaagagcgaagcccagaaacagagcgatgagcttgccctggtcaggcagcagttgagtgaaatgaagagccacgtagaggatggtgacatagctggggccccagcttcctccccagaggcgcccccagccgagcaggaccccgttcagctgaagacgcagctggagtggacagaagccatcctggaggatgagcagacacagcggcagaagctcacggccgagtttgaggaggctcagacctcggcatgtctgttacaagaagaattggagaag

SEQ ID NO: 24899 - DNA, 475 bp, Homo sapiens
  misc_feature (1)...(475): n = A,T,C or G
attgcccgcctgcggattgcggcacgagcatctctcagcaaggtgacatatttgtttttgacctggagacctcagctgtcgctccctttgtttggttggatgtaggaagcatcccagggagatttagtgacaatggtttcctcatgactgagaagacacgaactatattattttacccttgggagcccaccagcaagaatgagttggagcaatcttttcatgtgacctccttaacagatatttactgaaggaatctaggttgtattttcagtggacaatgggaataaagcatttctaaagcaccgactggagaggaaggcaacagagacaaggagagaagccgagagacatgtctgcgtgctgccacgcatctgagcgattgctctgtgaagagttgtacactgaacattttcaggggaggctgtttacccaggcaatgtcctcaaacaagcctgtgccggagtgtcctggaatn

SEQ ID NO: 24900 - DNA, 450 bp, Homo sapiens
  misc_feature (1)...(450): n = A,T,C or G
ntttgacccccctgtaccccgcgctgcaggaattcggcacgagccgaatccgggtgcatggtattggcgggggccacaagcaacgttatcgaatgattgactttctgcgtttccggcctgaggagaccaagtcaggaccctttgaggagaaggttatccaagtccgctatgatccctgtaggtcagcagacatagctctggttgctgggggcagccggaaacgctggatcatcgccacagaaaacatgcaggctggagatacaatcttgaactctaaccacataggccgaatggcagttgctgctcgggaaggggatgcgcatcctcttggggctctgcctgtggggaccctcatcaacaacgtggaaagtgagccaggccggggtgcccaatatatccgagctgcagggacgtgtggtgtgctactgcggaaggtgaatggcacagcca

SEQ ID NO: 24901 - DNA, 489 bp, Homo sapiens
  misc_feature (1)...(489): n = A,T,C or G
natgaaggcgtcgattcgcacacggaaaaaccctcctgctttcaacaactatgcatttccaaatgtcgaaagagagattgcagagctcaacaacatgaatattttctggcttacctgccaatgggttttttctccccctaaaatgaaacaatatccattatctctagcgacatgtctattttaactttgtcactgttaacagagggtactggtattccaatactttttcctaatgtgtatagtggtgttttgatttgtatgcctttgatgcttattatactcacaacagtagatgggccttttcttgtgcttgtgttctgtcaaagaatttttcttagttcaacatattctttctttaaaacttgttttaactgcagngatgcccgaaagtttcaaaaagacagatcctcactttttcttggcagcagttctggggttagaaggggataacacatattgaaatcatgatttattttaagtagaaatttt

SEQ ID NO: 24902 - DNA, 452 bp, Homo sapiens
atctgcactgcgctgcacgaattcggcacgaggaaaaaagaagagaggaagaaaaaaacagctcttagaaaactggggtgctcatttacatgaatatttccagatgacaccactgaaccatagcagggcatgggccttggtttgcagagtgatgagtggttgccctgagtcatccccacttccatttggttccaaaacctgtatttatgagttaactcatcagaatctgctgaatgacctgaagagaataggcttgtttattcttcctatgtgatgctgtctggagtctatacatcctcaatcctttatttaatttctccatccattcatccatcgatcttttttatattcaaaagatgctgagcacctcttacagaaaacatcctgagggagaatatagagattcattccttgagtcattcaaaaacactcaataaagtctacctgagtgt

SEQ ID NO: 24903 - DNA, 419 bp, Homo sapiens
cggcgccaatagaacgctgcagttgagaccgcctgcaggaattcggcacgagctttgtttagaagagagtagctcgtcctcactggtctacactggttgccgaatttacttgtattcctaactgttttgtatatgctgcattgagacttacggcaagaaggcatttttttttttaaaggaaacaaactctcaaatcatgaagtgatataaaagctgcatatgcctacaaagctctgaattcaggtcccagttgctgtcacaaaggagtgagtgaaactcccaccctacccccttttttatataataaaagtgccttagcatgtgttgcagctgtcaccactacagtaagctggtttacagatgttttccactgagcatcacaataaagagaaccatgtgctaaaaaaaaaaaaaaaaaa

SEQ ID NO: 24904 - DNA, 477 bp, Homo sapiens
  misc_feature (1)...(477): n = A,T,C or G
ngggcggggtnnaattgaactgcgtggctgtcangaattcggcacgaggttcatgtacaaggtcaggaacctttgactgcttccatgttggcatctgcccctcctcaagagcaaaagcaaatgttgggtgaacggctgtttcctcttattcaagccatgcaccctactcttgctggtaaaatcactggcatgttgttggagattgataattcagaacttcttcatatgctcgagtctccagagtcactccgttctaaggttgatgaagctgtagctgtactacaagcccaccaagctaaagaggctgcccagaaagcagttaacagtgccaccggtgttccaactgtttaaaattgatcagggaccatgaaaagaaacttgtgcttcaccgaagaaaaatatctaaacatcgaaaaacttaaatattatggaaaaaaaacattgcaaaatattaaataaattaaaaaaggaaaggaa

SEQ ID NO: 24905 - DNA, 475 bp, Homo sapiens
  misc_feature (1)...(475): n = A,T,C or G
nattgaccgccatgcgcccgcctgcaggaattcggcacgaggaacggtcaacagtcctcatcaaccaagctgagcatatcctgaaagaaaatgaccaggcacggtttctacagtctgcaaaaaatattgctgagagggtcgctatggcaactgcatcttctcaagttctgattccagacatcaattttaatgatgcctttgaaaactttgctttagatttttccagagaaaagaaactgctagaggggttagattatttaacagccccaaacccaccatctatccgagaagaactctgtactgcctcccatgacaccattacagtccactggatctcggatgatgagttcagcatcagctcctatgagcttcagtacaccatattcactggccaggctaacttcatcagcctgtataattcagtagacagctggatgattgttcccaacattaaacagaaccattacacagtgca

SEQ ID NO: 24906 - DNA, 497 bp, Homo sapiens
  misc_feature (1)...(497): n = A,T,C or G
cgaagccaattgacgccgtagatggacgtngtggaaacgcacgaggagactgtgggctcctggcgcaggcttgtggaattgaagtgcaagatgcctatattctgagagacaggacagcttcccaggaagatgggcagagacttgagtggcgattacctccagcacagagacgtgccaggcggtgttggcgctcggggcgagatgctgcccttctttgcacgaagcctggcctcttgcttggcgtgataaccctgtcatcttcccaaagctcatttatgagccaccagaggctcctaccccaaagattttcacagaaacttgaggccaggtgccgtggctcacacctgtaatctgaacactttgggaggccgaggcgggaggatcacttgagcccaggagttcaagaccagcctgggcaacatagtgagactcctgtctctacaaaaataaaagatttaaaaaaattagccaggcacggtggcacacacttgtagccc

SEQ ID NO: 24907 - DNA, 474 bp, Homo sapiens
  misc_feature (1)...(474): n = A,T,C or G
ggcggggnttttnnaactgactggcgtcggcattcggcacgagggaaagagaagtagccactggtggctcctggcatcctcctgctgggcagccccttctcaaagtgtgaggggtccccttgtgtacaagcaggaaggctctgagaaagtcaggtttgctcctaccacaggataattccgatgaacctgaaaagcgggttttggcttgtgtgcagggactctggtggaagaaagggtgacagcacctggcctgggcatgacacaagttaggacccgtaccaagaggccctggaattgagggtgggggttgctgtggactctttctccctcttaggaaactctattgggtctccatctgtcacagaagcagtaaatgatgtangggctgccaggtatagggtcctgtggggatgctggaacatgccgaggcaggacgtgccagccacccttctgccatatgtgcagcaaggccac

SEQ ID NO: 24908 - DNA, 403 bp, Homo sapiens
acatacccctgcacacatacccagccacgtacagctgggtggctgtacgcaagtcatttttctactctgagcctcagggtcttcctctgtccacctccccccaggattactggcagaattatgtgtgagcttgcatttaaaaagaggtttgttttgtaaacccacgctttgcaaattggcagcccaagtctcacgggcctgtgcagtgactgatcattaccaacatttcgaagtgagagatgtctcataaagagcgtcatttcgagcttctcttgaaaagttgtaaggtgagctaccctgggactgtattcctgaatggcaatgtgatggcagagtcctgcagtattaccacctgtggacttgtgcaccagggttcccacccacccacttcaggcccttggtt

SEQ ID NO: 24909 - DNA, 498 bp, Homo sapiens
  misc_feature (1)...(498): n = A,T,C or G
aggagcccccgacngctgagatcgacggctgtcgaatgcccacnagcagccaggagcacgggagaacattgcctatctcacccacacggagcggaggaaggacttccagtacgaggccatgcangagaggcgggaggctgagaacatggctcanaggggcattggcgtggccgctagctctgtgcccatgaactttaaggacctcattgagaccaaggctgaggagcacaacattgtcttcatgcccgtcattgggaagcgacacgaagggaagcagctctacacctttggccgcattgtgatctacatcgaccggggagtggtctttgtccagggcgagaagacgtgggtgcccacctcactgcagagcctgatcgacatggccaagtgaactgtggcaggtccagaaccagtcagagacttgcccctaagagggatgtactggtaataaacagtatttttagaaaaaaaaaaaaaaaaaaaaaagaaaannnnnna

SEQ ID NO: 24910 - DNA, 479 bp, Homo sapiens
atagacaactagaccgccgtgcagaattcggcacgagtctcagcttcccaagtagctaggactacaggcgtaagctaccatgctcaactaaggacacagatatcttaaactcacatatctaaaactgagcatctctctcttccacgtatcctttttaccacctgttccatataactacaaaaaactgaaatgcatatattcttcctcttttatagaatggcaccagcatctacataatcagtcaagtgtggaattggaaaccattctattatctcctcctcgtacaccccctacatccgtttggtcaattttgccttctaatttgatctccagtctgtgccttctgcttttcttctgcacttcattaatccagctcaggacaatattattggttacctggactctagtgataaagatatgtcctaccttactacctccatctgccataacttctgaaatgaaatcctgcttaatatcct

SEQ ID NO: 24911 - DNA, 472 bp, Homo sapiens
  misc_feature (1)...(472): n = A,T,C or G
nattgaccttcgtgagcacatacccagtgatgctgcgactcacacgcttcaattcaagacctgaccgctagtagggaggtttattcagatcgctggcagcctcggctgagcagatgcacagaggggatcactgtgcagtgggaccaccctcactggccttctgcagcagggttctgggatgttttcagtggtcaaaatactctgtttagagcaagggctcagaaaacagaaatactgtcatggaggtgctgaacacagggaaggtctggtacatattggaaattatgagcagaacaaatactcaactaaatgcacaaagtataaagtgtagccatgtctagacaccatgttgtatcagaataatttttgtgccaataaatgacatcagaattttaaacataaaaaaaaaaaaaaaaaaaaaactcgggggggggcccgggccccaattccccctatagggagtcggattaaa

SEQ ID NO: 24912 - DNA, 516 bp, Homo sapiens
  misc_feature (1)...(516): n = A,T,C or G
tccgcaataatatatatggnggagaaanaaggggagagaagaaaggtttgannnccctnttttgatccgcgctgtcggaattccgcacgagccacatttggctgattatttcaaccgaaactgttatcaggatgatattaacaggtcaaatttgttggggcataaaggtgaagtggcagaagaatttggtataatcatgaaagccctgtggacaggacagtatagatatatcagtccaaaggactttaaaatcaccattgggaagatcaatgaccagtttgcaggatacagtcagcaagattcacaagaattgcttctgttcctaatggatggtctccatgaagatctaaataaagctgataatcggaagagatataaagaagaaaataatgatcatctcgatgactttaaagctgcagaacatgcctggcagaaacacaagcagctcaatgagtctattattgttgcactttttcagggtcaattcaaatctacagtacagtgcctcacatgtca

SEQ ID NO: 24913 - DNA, 506 bp, Homo sapiens
  misc_feature (1)...(506): n = A,T,C or G
acggtcctttgagtccgtggcntattcgagctggctagaaatataaatggccacctatcgatgtttttctgcttcctttttatcaggacttgagaccaggagacgtatccagcaagcggaacctctgggaaaagcaatctgtggataaggtcacttcccccactaaggtaatctattgggaagactagtatttcagaggtttgttttcctgatgtatggtgtagtataatgtcctggagtcagatgagaaatatcactgacctacagatctttgcctgcacacccatcagtgtctaaaagaccagtacataacacagtgaaatgaaaagcgcattgcaagtttgtcagtcatacaacataaacggcccaaatccatggaatggttctcagtaggacattctcaatacaccacagtggtaggaacattggcagcagaaggccgtatgggataccatggtctacgtttccttacaaggtcccagcttagtgccacagtcatttaaaaa

SEQ ID NO: 24914 - DNA, 475 bp, Homo sapiens
  misc_feature (1)...(475): n = A,T,C or G
agagcggnntnnnttttgatactcatgaccgtaggaattcggcacgaggtgagatgtgcttgcttccccttcttccccttcgccttctgccatgactgtaagtttcttggggcctcccagtcatgcttcttgttaagccggcaaaactgtgtaagcacaggaggaccttcatccaaatctgatatcaactcaaggtctggatcttgttcactggcaaggaccatgcaaggtgttgttgattttcgcctgcttgccattctgatgttatgaggaaaagctcagtggtgattaaaaagcatcgaggcttaaaactgttcagtgttcttcatttgaaaacaatggcttttggttcttcaagtccatttttgtgctcaacaagtctcattagcagctttctcatggtgcaatcaagtaaagagcttattggtggcagataaaatactgctgaatttctgaaatttttgaagcacaactc

SEQ ID NO: 24915 - DNA, 472 bp, Homo sapiens
  misc_feature (1)...(472): n = A,T,C or G
gggcnnnatgaactgccgctgcgaatcgccgagatatcttcaggttaaacctcttggcagttacccttttcacaaagtgcacagtgggaatcgagaatcgatagggttaattttggagcagtggcttataccattcacctctgtttttttgtgattatttcacagataatgagaccttaataacaaataggcgtaaaaaaattttcacattgaaatgatagaaacatttgatgtaataaaacttggttggcttgatattttaaggaattgaaacctagcaatcttattggagagacaagaattggtctccagctgcctttgatcaagattcgggtgcaagtggagcaggagccatatacctggagggaatgtgctttgtcacaccaaagaggatttttttttcttcaaacttgtatgttgcctaggtttcaaattctttgccgcaaggctgatctgctttcattaactggaa

SEQ ID NO: 24916 - DNA, 421 bp, Homo sapiens
attgcaccgcctgcaggcttttacacgcccatgatactctgttggggatttagagtttctctctgaggcttgtcttagaagttcctctacttcaactggtgccaggccatcggtgccattgtatgctgcactgtgattagaacttactgcatacactgacttttgcccatcatcataaacatcatcttcaggaagcaagtccataacatgacatatctggattttgtgcttagaaccttaaattggaagcattcttaattatgcatctaaatttaaaagaagataatttcaaaacagtgctttctttcccttggtttcatcattttcatatcttaaaccaaattacttcggtatctgacaacagcatcatctacctcagtcattaggatttcttaataaaaaagagattgtaaaaaaaaaa

SEQ ID NO: 24917 - DNA, 448 bp, Homo sapiens
  misc_feature (1)...(448): n = A,T,C or G
ntttgcccccgctggacgatcgctgcacgaattcaggacgaggggtaacaggccgttccattggtgccactcacagaggaaaatgaggaagccatggaaaacgaacagtttcagcagctgttgcgcaagctaggggttcggccccctgcctctgggcaggaaaccttctggcgaattccagccaagctgagtcctacccagctccggagggcagcagcttctttgagtcaaccagaggaggaacagaagctgcagccagagctgcagcctaaagtccctggagagcaaggctctgatgaggagcactgtagagagcaccgagcacaagccctgagggccctcttgctagcccacaagaagaaagcgggcctggcatccccagaggaggaagacgctgttggtagagagccgctgaaggcagcacccaagaaacgacaattgctggacn

SEQ ID NO: 24918 - DNA, 240 bp, Homo sapiens
  misc_feature (1)...(240): n = A,T,C or G
aaaacgaaaaantttgactccgctgcggaattcggcacgaggagagacctgcgccacccctccactctcccaggagtcgctgatcactgggacctggttccagccgtttgcaggggaggcggctccgagaggcgtgtgctttccgtgggtggcgcccctcccccgccctgcctggcctcatccttgtatttaattaattaaacaagcccctttttaaaccctaaaaaaaaaaaaaaaaaa

SEQ ID NO: 24919 - DNA, 470 bp, Homo sapiens
  misc_feature (1)...(470): n = A,T,C or G
ntagaacgcttcgagcgccgtcgggagctactcctttgaggcccgaatggaagtggatgcagatggaaatggtgctaagatatttgcctatgcctttgacaagaaccgaggaaggggctctgggagactccttcatgagctgctgtgggagcggcaccgggggggcgtggccccgggcttccaggtggtgcacctcaacgctgtgaccgtggacaatcgcctggacaacctgcaactggtgccgtggggctggcggcccaaggctgaagagacctccagcaagcagagggagcaaagcttgtattggcttgcaattcagcagctgcctacagaccctatagaagaacagtttcctgtcctaaatgtgacccggtattataatgccaacggggatgtagtggaagaggaggagaactcttgcacctactatgagtgccactaccctccctgcacagtgattgagaagcagn

SEQ ID NO: 24920 - DNA, 521 bp, Homo sapiens
  misc_feature (1)...(521): n = A,T,C or G
agtgcggtnnnaatttggcggctgcggaattcggcacgattgaccgctcgcttataagcgatcatgtttctccagtattacctcaacgagcagggagatcgagtctatacgctgaagaaatttgacccgatgggacaacagacctgctcagcccatcctgctcggttctccccagatgacaaatactctcgacaccgaatcaccatcaagaaacgcttcaaggtgctcatgacccagcaaccgcgccctgtcctctgagggtcccttaaactgatgtcttttctgccgcctgttacccctcgcagactccgtaaccaaactcttcggactgtgagccctgatgcctttttgccagccatactctttggcatccagtctctcgtggcgattgatcatgcttgtgtgaggcaatcatggtggcatcacccataaagggaacacatttgacttttttttctcatattttaaattactacaagattattaaagataaaatgatttgaaaaaaaaaaaaaaaaaaa

SEQ ID NO: 24921 - DNA, 513 bp, Homo sapiens
  misc_feature (1)...(513): n = A,T,C or G
ncgtgttccaattgacgtcctgtagacntcggcacgagcagaaccctggggcccagggccacccagaggtaagaggacatttagcattagctctgtgtgagctcctgccggtttcttggctgtcagtcagtcccagagtggggaggaagatatgggtgacccccaccccccatctgtgagccaagcctcccttgtccctggcctttggacccaggcaaaggcttctgagccctgggcaggggtggtgggtaccagagaatgctgccttcccccaagcctgcccctctgcctcattttcctgtagctcctctggttctgtttgctcattggctgctgtgttcatccaagggggttctcccagaagtgaggggcctttccctccatcccttgaggcacggngcagctgtgcctgccctgcctctgcctgaggcagccgctcctgcctgagcctggacatggngcccttccttgtgttgccaatttattaacagcanataaaccaattaaatggag

SEQ ID NO: 24922 - DNA, 494 bp, Homo sapiens
  misc_feature (1)...(494): n = A,T,C or G
nattgccccgcctgcangaattcggcacgaggttccctgcacaaaatgcccggcgaagccacagaaaccgtccctgctacagagcaggagttgccgcagccccaggctgagacagggtctggaacagaatctgacagtgatgaatcagtaccagagcttgaagaacaggattccacccaggcaaccacacaacaagcccagctggcggcagcagctgaaattgatgaagaaccagtcagtaaagcaaaacagagtcggagtgaaaagaaggcacggaaggctatgtccaaactgggtcttcggcaggttacaggagttactagagtcactatccggaaatctaagaatatcctctttgtcatcacaaaaccagatgtctacaagagccctgcttcagatacttacatagtttttggggaagccaagatcgaagatttatcccagcaagcacaactagcagctgctgagaaattcanagttcaaggtgaagctgn

SEQ ID NO: 24923 - DNA, 474 bp, Homo sapiens
atttgaccgcctgcaggtttgaccgcaatttccttgtgacacagagaagggcaaaggtctgagcccagagttgacggagggagtatttcagggttcacttcaggggctcccaaagcgacaagatcgttagggagagaggcccagggtggggactgggaatttaaggagagctgggaacggatcccttaggttcaggaagcttctgtgtaagctgcgaggatggcttgggccgaagggttgctctgcccgccgcgctagctgtgagctgagcaaagccctgggctcacagcaccccaaaagcctgtggcttcagtcctgcgtctgcaccacacattcaaaaggatcgttttgttttgtttttaaagaaaggtgagattggcttggttcttcatgagcacatttgatatagctctttttctgtttttccttgctcatttcgttttggggaagaaatctgtactgtattgggattgt

SEQ ID NO: 24924 - DNA, 453 bp, Homo sapiens
ctttgacccgccctggccgccgcgctgcacgaattcggcacgaggagaaaccgtacgaatgcaatgaatgtgggaaagccttcagccagcactcaaacctcactcagcatcaaaaaactcatactggggagaaaccctatgattgtgcacaatgtggaaaatcttttaattactggtcatcccttgctcaacacctgaaaattcatactggagaaaaaccttacaaatgcaatgaatgtggaaaggccttcagttactgctcatcccttactcaacatcggagaattcacacgagagaaaagccctttgaatgcagcgaatgtggaaaggctttcagttatctctcaaaccttaatcagcatcagaaaactcatactcaagagaaagcttatgaatgtaaagaatgtgggaaagcttttattcggagttcatctcttgctaagcatgaaagaa

SEQ ID NO: 24925 - DNA, 425 bp, Homo sapiens
aattggaattctgccccgcgctgcaggaattcggcacgagcccgaatgacccccagatttgactccaacaacgtggtcctcattgaggacaacgggaaccctgtggggacacgaattaagacacccatccccaccagcctgcgcaagcgggaaggcgagtattccaaggtgctggccattgctcagaactttgtgtgagttgagcccaggcctctggttgcaggactcgtgaatggagcagttctgagaaccacccttttgctaagggagcttgggagccacatggctgctcccttcacactgggtaacagtgtagtatcctgtgagagaataaatgtattcatttatgtgtttttccagagctttctgggatgtgggaaaataaattacactgaagcagttaaaaaaaaaaaaaaaaaactcga

SEQ ID NO: 24926 - DNA, 242 bp, Homo sapiens
aatagaacgccttgaggaactctgcacgagcggcggcagacacctctggcctgaagtcacagcagagttcaccccagagcgcctgggcgcatcttgtggcatgcccatgggctgccgagtcctgccctctcgccacatttcccccaagttacattcccaggaggacctttttaatgttctcaatcgtggctctcagacacaaataaatttttttgtaaactctgaaaaaaaaaaaaaaaaaa

SEQ ID NO: 24927 - DNA, 518 bp, Homo sapiens
  misc_feature (1)...(518): n = A,T,C or G
gggggggggggnnattcgccggctgtangaattgcaccggctgcaggaattcggcacgagctcctttgagaggcgctccttgcaggaaaaagagaggctcccagagtggtagcctctcagtgaaaatgcatcctaaaaattcaatgtttataccaggctcatgacactaagatgtgacatctggacacgaggggtcagccacgtggatacatccctcccagattgcatctccaggaatcactctgctagcagaatgggcgccccatcccttactatgctgctcctcctcaaagtgcagcccagaaggacccaggcctttgatgcacattgggtgggtctcccactactttagttgaaatgggagcatgctggagtcgcgttctgttgcttctggtgagaaggacatcccattgacccctggccaccaggtccagtattccatccttccttctgtcccagcctatcgccctccccactaggcccacccccacaacttctcctcaagggaggttgctccc

SEQ ID NO: 24928 - DNA, 478 bp, Homo sapiens
cttagacccgccctgctagaccccgctctgcatgaattcggcacgagcgcaggccggggaacatcttaaaagcaaacttctagcctgctgactcttggcaatgagtgttggatcctggctaaagtgccttgaatgcagcatgaggccaatccatgaatccaacttctcatggagaaatgttaatattttttcagtttgaatcaatcagggtgaaactaccatgctattggtttgcttactttttattatttcatgtaaaatctaagacaaaatacattaaatgcttattgacatatgtatttattcttcaccaggctgataatatctgcctaattttaaactttcttccattttgtaggtttcaacttattctattgtaagatactggtacatctaatagaggcattggcacttttacgcatattttattttatttcatatatttcctattgggcttttacatttaattatggagcct

SEQ ID NO: 24929 - DNA, 473 bp, Homo sapiens
  misc_feature (1)...(473): n = A,T,C or G
nattgaacgccttcggtatacgcccctagagagcaagaacatgtggatctttgataggattgttaccaaatggtgtcagtatggaccaattgtgtgaccatgagaaggatgcttattttttttaaaaagaaaacacatctaaaagcccaggaactgatttttttaagaggaaaactaatgacagtgtataactgatgtttaaattgtgcatttagtactatttaaatgttttcttatactagtattttatattcttttgttgtcgtttaaaactggagcttcagtgtctcttccctccctctaatagtaatggttcagtaagcactccttaactccttagtatttcatagaaaaatgactgcaacattaaagctaagaggaacacttcaacatatgtggtacaaatttatattgaagatctaaataaaccacgtattttccagtcttcgttgtgtgaagctaaatggtggctt

SEQ ID NO: 24930 - DNA, 479 bp, Homo sapiens
  misc_feature (1)...(479): n = A,T,C or G
ctttcgccccgcgctgcttgaattcggctcgagcgcaccgccatgcacatcatcatatgcctgcagaatgatcacaaggcagtgatgaagcaggtggaggaggccctgcaccagctgcacgctcgcgacaaggagaagcaggcccgggacatggctgaggcccacaaagaggccatgagccgcaaactgggtcagagtgagagccagggccctccacgggccttcgccaaagtgaacagcatcagccccggctccccagccagcatcgcgggtctgcaagtggatgatgagattgtggagttcggctctgtgaacacccagaacttccagtcactgcataacattggcagtgtggtgcagcacagtgaggggaagcccctgaatgtgacagtgatccgcanggggggaaaacaccagcttagacttgttccaacacgctgggcaggaaaaggactgctgggctgcaacattattcctct

SEQ ID NO: 24931 - DNA, 471 bp, Homo sapiens
  misc_feature (1)...(471): n = A,T,C or G
nttagcaccgcgctgcaggattgtcgcacgagccatgacaatgcttctctgtgactcaaaccaggaatttccaaagatttcaagccagggagaagggttcttggtgatgcagggcatggaacctggacaccctcagctctcctgctttgtgccttatctacaggagcatcgcccattggacttcctgacctcttctgtctttgagggacagagaccaagctagatcctttttctcacctttctgcctttggaacacatgaagatcatctcgtctatggatcatgttgacaaactaagttttttttatttttcccattgaactcctagttggcaattttgcacattcatacaaaaaatttttaatgaaatgatttcattgattcatgatggatggcagaaactgctgagacctatttccctttcttggggagagaataagtgacagctgattaaaggcagagacacaggact

SEQ ID NO: 24932 - DNA, 515 bp, Homo sapiens
  misc_feature (1)...(515): n = A,T,C or G
cgcgttcaaattgangactgacngncnctagcaanngaacgagaaaagttagacttcctgatttaactaaagtgattcaattgaagatggacttcactgcatcaagattacagagaggtcacttattactcacacaaggaaaacttgatgaagcagaagatgattttaaaaaagtgctcaaatctaatccaagtgaaaatgaagaaaaggaagcacagtctcaacttataaaatctgatgaaatgcagcgtttgcgttcacaagcacttaacgcttttggaagtggagattatactgctgctatagccttccttgataagattttagaggtttgtgtttgggatgcagaactacaggaacttcgagctgaatgttttataaaagaaggagaacctaggaaagctataagtgacttataagctgcgtcaaagttgaagaatgataatactgaagcgttttataaaataagcacactgtactaccaactatgagaccacgaactgtccctcagtgag

SEQ ID NO: 24933 - DNA, 484 bp, Homo sapiens
aatagaaaaccttgaccgcctgtcggaattcggcacgaggcagatcctgggcagaagctccagtgatccacaagctcagaaatacatcgcggaaagtaaatgtttagtcattgaaaaaaatgggaaattacgatatgaaatagatactggagaagaaacaaaatttgttaacccagaagatgttgccagactgatatttagtaaaatgaaaggagcttattctccatggagtcagtctaattcagaagatggttgatactgaagcctaagagccaggctgtttggaaagctaattctgtgtccaaatatatcaccaaaaccacaagaagtgctgcatgatttcagagcgcagagaagaaaattgacacgggggcggggtgggcaagcaagtgtattgggaaatatgttaagtgagatctttgtcataaattaataaacctcagaaagtaaaaaaaaaaaaaaaaaaatctcggggggggggccg

SEQ ID NO: 24934 - DNA, 495 bp, Homo sapiens
tttgcccccctttgccccgcgctgcaggaattcggcacgagtgcagattgctcgggatgttgatggatcaggtaactacttaatgctgacacataagcaggttgctcagctgcatcccctgtctggttactcaatcaccaagaagatgccagagtgggtcctcttccataaattcagcatttctgagaacaactacatcaggattacctcagaaatctctcctgaactatttatgcagctggtaccacaatactatttcagtaatctgcctcctagtgaaagtaaggacattctacagcaagtagtggatcacctatcccctgtgtcaacaatgaataaggaacagcaaatgtgtgagacgtgccctgaaactgaacagagatgcactctccagtgactccccagcaaacacaaggtgcagcagggtcccaaaggtagctggatggctgaactgctggatatgggagatacatgacgcgaagacggatttcacat

SEQ ID NO: 24935 - DNA, 474 bp, Homo sapiens
  misc_feature (1)...(474): n = A,T,C or G
tgtgggncnnnnnnnaattgctcctgctgcaggaattcggcacgagccatcgcccacccgaggacgtccccccagccggagtcgggcatcaagcgactgtttagcttcttctcccgagataagaagcgcctggccaacacacagagaaacgtgcacatccaggagtcctttggacagtgggcaaacacccaccgcgatgacggttacacagagcaaggacaggaagccctgcagcatctgtgaccttggcccatctccaccctccaacctggactgcccgccaccagcgcctgcaaccgaactgcagcccaggggtcattgctgcctcaagcctctcggtgcagatgcaccctgaaaactgacccctcaaacagactgtctgatttgaggatggacattgaaaaactgacgccaaactctaaagagatgtttatttatacccagggctatcactgtttctaatagatgactctt

SEQ ID NO: 24936 - DNA, 408 bp, Homo sapiens
  misc_feature (1)...(408): n = A,T,C or G
gaattcggcacgagcgcttgtgctgcagccatgtctctagtgatccctgaaaagttccagcatattttgcgagtactcaacaccaacatcgatgggcggcggaaaatagcctttgccatcactgccattaagggtgtgggccgaagatatgctcatgtggtgttgaggaaagcagacattgacctcaccaagagggcgggagaactcactgaggatgaggtggaacgtgtgatcaccattatgcagaatccacgccagtacaagatcccagactggttcttgaacagacagaaggatgtaaaggatggaaaatacagccaggtcctagccaatggtctggacaacaagctccgtgaagacctggagcgactgaagaagattcgggcccatagagggctgcgtcacttn

SEQ ID NO: 24937 - DNA, 495 bp, Homo sapiens
  misc_feature (1)...(495): n = A,T,C or G
tgaagatanaanaanntttggacngcttgcagcgcctgcangaattcggcacgagggaagaagagggcctcgggggcctccggagctgggctttgggcctctcctgcccacctctacttctctgtgaagccgctgaccccagtctgcccactgaggggctagggctggaagccagttctaggcttccaggcgaaagctgagggaaggaagaaactcccctccccgttccccttcccctctcggttccaaagaatctgttttgttgtcatttgtttctcctgtttccctgtgtggggaggggccctcaggtgtgtgtactttggacaataaatggtgctatgactgccaaaaaaaaaaaaaaaaaaaaaaaggggggggccgggccccaattcccccttatggggggcgtattaaaattaccggggcggggttttaaaaccggggggagggggaacaannntttgngnntnnttcccctggggtttaccgtgtttg

SEQ ID NO: 24938 - DNA, 467 bp, Homo sapiens
ccccccccccccccccttgcccgcctgattaattcgcacgagctgaatctcctttttggagtatgtatcttctctcacttgttcaagtacaggcacactgttcaaccgcatggtatctttctgttgtgtgacttctacaaatgtaattttaaatgaaattaagttaacatggattcattacgttcctggccctgtagacacgtgtaagattatttaaaattctttcatttttttctgcctcttactatacgactgtagtgcaacaaatattttaaagcccccttttcttctttattttcattagttgtacattgatttcagtgtcaacacatttaaagattcattcatgttgcacagtggcttacatgaacgtgaaactgtgatataaggttttctttcatactcataattagcccaaaacagttgccaaactttgccattgtgctcctgcatttgtgtttgagctg

SEQ ID NO: 24939 - DNA, 313 bp, Homo sapiens
ccttggcaccgcgctgcatgaattcggcacgaggttactatgagtgaaagggagccagaagactgattggagggccctatcttgtgagtggggcatctgttggactttccacctggtcatatactctgcagctgttagaatgtgcaagcacttggggacagcatgagcttgctgttgtacacagggtatttctagaagcagaaatagactgggaagatgcacaaccaaggggttacaggcatcgcccatgctcctcacctgtattttgtaatcagaaataaattgcttttaaagaaaaaaaaaaaaaaaaaaa

SEQ ID NO: 24940 - DNA, 485 bp, Homo sapiens
  misc_feature (1)...(485): n = A,T,C or G
tggggnggcgggggccctgaatacatcggcatncgcacgagcaactttgggcatgtgccctatggaagcttagtcacaagaggcactagctaatctacagattcctatccaatgccacattttaataaatcaccggaagcgggagaatgtagctcttatcttcggtgacctctgcatgttaactctgtttctgtgttaaaggcaatgcaggagtgtggattaagcaccagactgtattctcattcaaccatgaccgtgcgcattaaaatcaacctgtaagggagacactgactccagccaagaaacctgagccccttttttttaggttcatattcaaagtcaaatgaactggatgaaagtcagtaccaatggctgtgcctataaatagacctgattctttgtttccctcgtcaattaaacaaaggccaagaaagagagaagatgagagggaatggtggatttgcgttgacagattttttaaaagg

SEQ ID NO: 24941 - DNA, 489 bp, Homo sapiens
  misc_feature (1)...(489): n = A,T,C or G
ttttnnnaagggggnntttgaactagatcggcctcggaattcgcacgagcccctctaccgcatgcgaatctttgcgcctaatcatgtcgtcgcctagtcccgcttatggtactttgtatctcagttgaagaagatgaagaagtcttcatgggagattgtctactgtgggcaggagtttgagaagtcccccctgcgggtgaagaacttcgggatctggctgcgctatgactcccggagcggcacccacaacatgtaccgggaataccgggacctgaccaccgcacgcgctgtcacccagtgctaccgagacatgggtgcccggctccgcgcccgagcccactccattcagatcatgaaggtggaggagatcgcgggcagcaagtgccgccggccggctgtcaagcagttccacgactccaagatcaagttgccgctgtcccaccgggtgctgcgccgttagcacatgccacgcttctccaccaagaggag

SEQ ID NO: 24942 - DNA, 543 bp, Homo sapiens
  misc_feature (1)...(543): n = A,T,C or G
aggagatttcgccggctgtggaattcggcacgagagacaccagattgtccaggagcaggagctgctgggactgcgctggccccggacctagtgggccttctcctggctgctgagatgtcgtctgtgactggcctggctggagggggagtgttgacaacccaaagctgttctccagtctggggagggagaggcagggtccccaatgtccgagctgcatctggacgctgctcttaaaggacctcctggggcaggggagcggtagggtctggactgggcagatgctgtatgacctccctgagcacccgtgactgccccatgctttcccctttgtgctctgtgtgtgtctgggctgtgcccgggggcttcacaaataaagtcgtgtggcagcttcnnnnnnnaaaaaaaaaaaaaaaaaaaaaaaaaaaaaaaaaaaannnncctgggggggggggcccgcccccccccccccctttaggggggggataaaaaatccgggggcgggttttaaaaaaggggggaggagagaggagaggggnnnnnnng

SEQ ID NO: 24943 - DNA, 539 bp, Homo sapiens
  misc_feature (1)...(539): n = A,T,C or G
ggagaccgacgccttgacggctgctcgaattcggcacgagaganagtgaagaggaaggggttcctagtactgcaattcgggaaatttctctattaaaggaacttcgtcatccaaatatagtcagtcttcaggatgtgcttatgcaggattccaggttatatctcatctttgagtttctttccatggatctgaagaaatacttggattctatccctcctggtcagtacatggattcttcacttgttaagagttatttataccaaatcctacaggggattgtgttttgtcactctagaagagttcttcacagagacttaaaacctcaaaatctcttgattgatgacaaaggaacaattaaactggctgattttggccttgccagagcttttggaatacctatcagagtatatacacatgaggtagtaacactctggtacagatctccagaagtattgctggggtcagctcgttactcaactccagttgacatttggagtataggcaccatatttgctgaactagcaactaagaaaccactn

SEQ ID NO: 24944 - DNA, 484 bp, Homo sapiens
  misc_feature (1)...(484): n = A,T,C or G
attagaccaacttgcaccgcctgcaggaattcggcacgagctacagcaccgagggcggcctctgacatgatgtgccggcagtttcttgccttctgtgaagggacagcgctgtgcagatttgatatttcaacttacaacttgttttaaaagaaaaattgcacacgaaaaatgcctgttggcttttcagtctatatttgaaataacaggttaacaggcagttgtttacttgtggttttgctgcactattgcaatttcaaaggggctttgaagcaattttttataggattcttttgagggagggtatcaaatctatgtcaaggtagtggtttgaggaaaactcattctgtgtgttgaatccatagtatgtcccattcagactgatttccaaatctgtcaactagaaactctactttatgtaaagggccttttaaaaatgcgggatcttcaattttttttattcaataaactagtaaagagtatctan

SEQ ID NO: 24945 - DNA, 497 bp, Homo sapiens
  misc_feature (1)...(497): n = A,T,C or G
gggatgtnaggggntgnnnnnnaattgancgctctgagacttcggcacgagcaggctcgtgctgtcttggaaagagaatttaacaaccttttggtcatggggactgatagaaggtttgatgaagatgatgataaaagctttaggagagcaccttcatggagaaaaaagtttagaccaaaggacattcgtggcttagctgctgggtcagcagagactctccctgcaaacttccgggtgacttcttctatgtcttccccctctatgcagccaaagaagatgcagatggacggcaatgtatcaggaacacagaggttggattctgctacagtcaggacttactcctgctaaagtctcctgttgtttacccacactacttctacagatgagtatgcagcatttgaatccaacaaagactacattctggaatccaggggaatctttaatcttgttaatacttgttatatggaccctaagatattttattacagagcttttaa

SEQ ID NO: 24946 - DNA, 450 bp, Homo sapiens
  misc_feature (1)...(450): n = A,T,C or G
nttttgcccctcgctgcaggaattcggcacgaggtccagggcatggagaggcacagacagcaccctgcttgtgacttcactggcccaactcatcctggaccccttgagcaagaccatggctggattccaggaactggtggagtggaagtggatccaggaaaatgccgtgtgaagggaggactcanatgcactccctgtggtctgggctcaaccagccaaaagagcaacaaagactccagaacccactctacctcctcaatcccttggccatctgtggagccccagagcctgcggctgtggcaaggcctgtttctgcgctggacctgctcacctgagcctgcagaagctgcatgggggaagagtgtggcaaatagtgacaggaagggagaagacagaagcctctcagccaactgcttcagccgagcccctattctaagcactggctccttg

SEQ ID NO: 24947 - DNA, 449 bp, Homo sapiens
  misc_feature (1)...(449): n = A,T,C or G
nattgacnatcganccgcgctgcaggaattcggcacgaggttgaagggtttagagtttttaacctgatctgtagagcagagaggttgaaagcacttaactcttgtttagtatcctcattgccttgctgcctgggtatctggcccctttccataaacatttcttttcagttcatgtagttctttaatagaaagctgctattatgtatattgtcatttgtgaaggaagttggagagtcacagctttactgtgacaggttttgcccaaggctttgatacctgtcacccagggtatcttaaaagcaagttgttctcccactactttcctttccctctgccctgccattcctattacaatgctgtgaaaaaagatctggttcttaaggtgaatgggtactttctattttggttctaaacgagcaattttgaggatgaaaatgggaagatatcat

SEQ ID NO: 24948 - DNA, 501 bp, Homo sapiens
  misc_feature (1)...(501): n = A,T,C or G
tggggnnnnnnggaggggntttgaattgctccggctgcaggaattcggcacgaggcctcctgcaccaccaactgcttagcacccctggccaaggtcatccatgacaactttggtatcgtggaaggactcatgaccacagtccatgccatcactgccacccagaagactgtggatggcccctccgggaaactgtggcgtgatggccgcggggctctccagaacatcatccctgcctctactggcgctgccaaggctgtgggcaaggtcatccctgagctgaacgggaagctcactggcatggccttccgtgtccccactgccaacgtgtcagtggtggacctgacctgccgtctagaaaaacctgccaaatatgatgacatcaagaaggtggtgaagcaggcgtcggagggccccctcaagggcatcctgggctacactgagcaccaggtggtctcctctgacttcaacagcgacacccactcctccaccttcgacgctggg

SEQ ID NO: 24949 - DNA, 456 bp, Homo sapiens
  misc_feature (1)...(456): n = A,T,C or G
nggggcgccccattgacccgcgctgcattagattcggcacgagcacagccgtaatcccagctactcgggaggctaaggtgggagaattgcttgaacctgggaggcggaggttgcagtgagccaagatcacgccactgcactccagcctcggtgacagagcaagactgttttgaaaaaaaaaaaaaatgggaacattttaaatgattttcacctttattatgcatctattttcatggggtttcccgatatctcactgtccagccccttcatttggggaatgtgttggattagggaacagggttgaagatttgaagtttaaactaaagagctgggaacagcttcaaagtcaggctcagcctgactcatgcttgacacccccacccccagggagggttgggggatgtgaggagggcagggaaatctgagagcctccttccagccccataacgctgttaa

SEQ ID NO: 24950 - DNA, 431 bp, Homo sapiens
  misc_feature (1)...(431): n = A,T,C or G
natagaacgccttggagaactctccacgagctcgatttctcgttttctggagttgggatgtagacatagagagatctgttacatctgagatgaaaaccctgcacaatacacgttagggttggccaattgtttgcttgaccttaaatggttagtgtggtttaagcttccccaaaatgcgctgtgagctgagcttccacttttggaatgattgcagaattcggtgcttaagagatgagaaacttcgttctaccagtaatggaagaaacgcttcaccttaatcaccctccttgtctttcccctccctttgactatgtaggactcgataacacaacatttgaaagattctactctatgaaataagcacagattgaaattcagtatttgccaaggaatattaaacatgaattactgggaaaaaaaaaaaaaaaaag

SEQ ID NO: 24951 - DNA, 468 bp, Homo sapiens
  misc_feature (1)...(468): n = A,T,C or G
cggcggcnnnnnnaattgccctcctgcagcttacatgggatgtgaccaggagtacaaattcagcgtggatgtgaaagaagctgagacagacagtgattcagattgagtcctgaggcatttacttttgggtaaaggagatttgagcctgaattaggaatgtgtacattgtaggaatcctggttgtggggaccaggtctgtgggcctcaggtctggccagccagggctggtgctgtccccgcctacctccacttcctttcccttgctcactctggatccagtgacagcaggtgtcatgggtcaagcataaatcatatatagcattttcaggcatgttcctggtagttcttttgagtctgacattctaataaaataatttgtagaaaccaaaaaaaaaaaaaaaaaaaaaaatttggggggggggccgggcccccatttccccttatgggggggggaataacattccctgg

SEQ ID NO: 24952 - DNA, 468 bp, Homo sapiens
catcgcaccggttgcattaattcgcacgaggaaaacaggactttctgcctttataaatggaaatcaactgtgtatgaactataactctgcagaggttatgaattcatcctttacaaacaataatgaacttttagtcctgtaataaatgaaatgttattaggcagctttgttgcatgattgcatagttatatcttgctaacgggccactcatttctcactgatgtggatgaaaaaatgagagcagtatgtttccaggtgtgtgcactcaacaggcaaatagctcccgaggtcaccacttccctaatgggccacaggaagtaagttgatcatgatggggagatcacgtcacccagaaccagcaactggatagagactgttgttagtgtctgggtagagcacaggctcccaggggtcttaagagctaattactgaataaaacaatctagaacaaagcaaaaaaaaaaaaaa

SEQ ID NO: 24953 - DNA, 408 bp, Homo sapiens
  misc_feature (1)...(408): n = A,T,C or G
aggagattgacgccttcgacggctgcangaattcggcacgagcctccctctcttccgggagctggtgacagccttgggcctttcagtcccaaagcggccgatgggagtctccctccgactccagatatgaacagggcccaggcctggagcgtttgctgtgccaggaggcggcagctcttctgggcagagcctgtccccgccttccctcactcttcctcatcctgcttctcttttcctcgcagatgataaaaggaatctggcattctacacctggaccatttgattgttttattttggaattggtgtatatcatgaagccttgctgaactaagttttgtgtgtatatatttaaaaaaaaaaatcagtgtttaaataaagacctatgtacttaaaaaaaaaaaaaaaaaa

SEQ ID NO: 24954 - DNA, 494 bp, Homo sapiens
  misc_feature (1)...(494): n = A,T,C or G
ggggnnnnnagaggnnnattggcggcttcgctttcgaacgagcgacaccgnanctatccgcactacaaagttcatgaccaaccgactacttcagaggaaacaaatggtcattgatgtccttcaccccgggaaggcgacagtgcctaagacagaaattcgggaaaaactagccaaaatgtacaagaccacaccggatgtcatctttgtatttggattcagaactcattttggtggtggcaagacaactggctttggcatgatttatgattccctggattatgcaaagaaaaatgaacccaaacatagacttgcaagacatggcctgtatgagaagaaaaagacctcaagaaagcaacgaaaggaacgcaagaacagaatgaagaaagtcagggggactgcaaaggccaatgttggtgctggcaaaaagtgagctggagattggatcacagccgaaggagtaaaggtgctgcaatgatgttagctgtggccactgt

SEQ ID NO: 24955 - DNA, 499 bp, Homo sapiens
  misc_feature (1)...(499): n = A,T,C or G
aggggnnnnagaggggnttgaatcgcccggctgcaggaattcggcacgaggtttttttttttgccatcttttgtctttccgtggagctgtcgccatgaaggtcgagctgtgcagttttagcgggtacaaaatctaccccggacacgggaggcgctacgccaggaccgacgggaaggttttccagtttcttaatgcgaaatgcgagtcggctttcctttccaagaggaatcctcggcagataaactggactgtcctctacagaaggaagcacaaaaagggacagtcggaaaaaattcaaaagaaaagaacccgccgagcagtcaaattccaaagggccattactggggcatctcttgctgatataatggccaagaggaatcaaaaacctgaagttagaaaggctcaacgagaacaagctatcagggctgctaaggaagcaaaaaaggctaagcaagcatctaaaaagactgcaatggctgctgctaaggcacctacaaag

SEQ ID NO: 24956 - DNA, 497 bp, Homo sapiens
  misc_feature (1)...(497): n = A,T,C or G
cgannncnnnaggaggnnnattgatttgcttggcattcggcacgaggaaactaatacttaccgagtcagactttgtgttcatttcatttcagggtcttggctgcctgtgggcttccccaggtggcctggaggtgggcaaagggaagtaacagacacacgatgttgtcaaggatggttttgggactagaggctcagtggtgggagagatccctgcagaacccaccaaccagaacgtggtttgcctgaggctgtaactgagagaaagattctggggctgtcttatgaaaatatagacattctcacataagcccagttcatcaccatttcctcctttacctttcagtgcagtttcttttcacattaggctgttggttcaaacttttgggagcacggactgtcagttctctgggaagtggtcagcgcatcctgcagggcttctcctcctctgtcttttggagaaccagggctcttctcaggggctctagggactgccaggc

SEQ ID NO: 24957 - DNA, 461 bp, Homo sapiens
catcgaccatctgccccgcgctgcaggaattcggcacgagataaatgactggatgggcgctgctttttaagtttcaaattgacattccagacaagcggtgcctgagcccgtgcctgtcttcagatgttcacagcacagttcctgggaaggtggaaccaccagcctctccttgaataactgggagatgaaacaggaagctatatgacacacttgatcgaatatgacagacaccgaaaatcacgactcaaccccctccagcacctctacctgtagcccgccgatcacagtcggaatgcagctgaaagattacctggggcctggttccaaccgcccactgtggactctgaggcctctgcatttgcgggtggtctgcctgtgatattttggtcatgggctggtctggacggactcccatttgtctggacagactctatgtgagttaaacccttgcccttcattag

SEQ ID NO: 24958 - DNA, 500 bp, Homo sapiens
  misc_feature (1)...(500): n = A,T,C or G
ggtggcggannnnnnnnnaattcgcaccgtctgcaggacttcggcacgagccanaaccctaacgttcttctctcacttgaacacagacgaccttgcttgggtgatgagacatcccctttatctcttcctctactgctggccaagacccgtcactttataagaagctcagatgcagcagtgctggagagctctctctttatgcaaaaatctcatttcaccaggagctttcagaagattcacctgggctaaattcagcagcatttctgttaggatatttagatggaggttttattttcacacttggattcttgctctggaccactatttgcctccttttctgtgactgaactggggttttctgacatgcctagactcctaataaggggatttcttccttggtgcaaagctgatttttgctaataaacaagatgttaaagaatgcatgactgtagcagaaatntnccaggttttgggggggggggcgattacagatcaccagc

SEQ ID NO: 24959 - DNA, 473 bp, Homo sapiens
  misc_feature (1)...(473): n = A,T,C or G
agaggggtaattcgacgtcggtctgacttcggcacgaggacaaacccatcttgaaggctggccgggcgtaccacaaatataaggcaaagaggaactgctggccacgagtacggggtgtggccatgaatcctgtggagcatccttttggaggtggcaaccaccagcacatcggcaagccctccaccatccgcagagatgcccctgctggccgcaaagtgggtctcattgctgcccgccggactggacgtctccggggaaccaagactgtgcaggagaaagagaactagtgctgagggcctcaataaagtttgtgtttatgccccnnaaaaaaaaaaaaaaaaaaaaaaacccccgggggggggcccgggccccaattcccccttaagggggggggaataaaaatcccggggcggggttttaaaaagggggggggggggggaaaaaaatnnnnttttntnntttttttttttttn

SEQ ID NO: 24960 - DNA, 529 bp, Homo sapiens
aggcgttgacggcgtgatgcagcccagcttcttcaatccaaagatttttcttacagagtagctgcttgtcttcctattgatgatgtattgagaattcagctccttaaaattggcagtgctatccagcgacttcgctgtgaattagacattatgaataaatgtacttccctttgctgtaaacaatgtcaagaaacagaaataacaaccaaaaatgaaatattcagtttatccttatgtgggccgatggcagcttatgtgaatcctcatggatatgtgcatgagacacttactgtgtataaggcttgcaacttgaatctgataggccggccttctacagaacacagctggtttcctgggtatgcctggactgttgcccagtgtaagatctgtgcaagccatattggatggaagtttacggccaccaaaaaagacatgtcacctcaaaaattttggggcttaacgcgatctgctctgttgcccacgatcccagacactgaagatgaaataagtccagacaaagaatactttg

SEQ ID NO: 24961 - DNA, 472 bp, Homo sapiens
  misc_feature (1)...(472): n = A,T,C or G
catcgaccgctttcatttgaccgccntgcagattcggcacgagccggaccggngacgggcacggtgaagggctgcagcctggggtctgacgtggcccctagtgctgtctcaggagaaggctctggaggacttgaggcatgctgggcctggtgcagtgatggcgctaaggagacccggggaaagacagtatcgtggtcacgtatgcttaggaagcagcacagccgtgtccttagggatgttcgcgtccagtaaagacactggtaactgcggtttcagccaacactcttcatggcagtgtcgacctcgggttagcttctgttgtctttgtggatggttttcctggagcggcctgacgttgacgtgttctctggtcccatgtcttagcggggcatggtacggattcgtgcctgacgcgtgcattagggtgttctcttatactttcagtagcatctttccacagcaagggccaaag

SEQ ID NO: 24962 - DNA, 493 bp, Homo sapiens
  misc_feature (1)...(493): n = A,T,C or G
agggccnnnnnattcggcgtctgaggacttcggcacgagactttntatgtcatttttttatcccaaaaaatattttttaaaagttaaaaaaagacatatcaaacatgcaaatacttgaatccagcaggccaatagtgaaatgtgaacactttctaattctacacttccaggttgacatcagtacacagaaacaggctctaggaaaaatttctaagttcatagcctacgtgtgtgtatgtgtgcgtgttgaaacagaagtgtgtgtgtgtgtgcatgtgtggcgcgtgctcctgcacggcgtgcagttttctgtgtttgtgtgtttgaaagcgtgtgaggatttaactgggggttttcccttgtattcagtatacgctttttttttggcgcattggtcaaacgggtgttattattagcttctaactttgcactgagtgtcctcgcccttcctttagctaatcctatacattacagagaattcctaggacagggc

SEQ ID NO: 24963 - DNA, 501 bp, Homo sapiens
  misc_feature (1)...(501): n = A,T,C or G
atgggtctnnnaattggatcgcctgcacgaattcggcacgaggtgattgtacattgcacatatctcccctctaaaacctgtagtacaacttctcccctcaagctgatattctgtgtctctcacctcaatgtccacaacagtcaatctcaaacaaggtagctttgaacatctcaaacagagtagctttgaaaatcaacattttggtaccagtgttttcattagaaataagtgtttttaactccccagatataatattgtaattgggaaacctgaatagttttaagagtccagtggagcctcagtgttttgaatagagatgactcattacacataatggtaggagttttctaccatatcatattgaagatatgaagaggtattttccagcttcccaagtttgagagttgggcatttacctcttacacttcagtcaacaaacaaactagtgattcctaatgcataattaatttggatgcaagataagataaaagttctggagtt

SEQ ID NO: 24964 - DNA, 497 bp, Homo sapiens
  misc_feature (1)...(497): n = A,T,C or G
ngggtncccattgacactgaagactttgcacgaggcctgctgaccaaggtgctgcaggagagggatggcttgcggagagtgcacaggccggcagtcctggtgaagatcgctcctgacctcaccagccaggataaggaggacattgccagtgtggtcaaagagttgggcatcgatgggctgattgttacgaacaccaccgtgagtcgccctgcgggcctccagggtgccctgcgctctgaaacaggagggctgagtgggaagcccctccgggatttatcaactcaaaccattcgggagatgtatgcactcacccaaggccgagttcccataattggggttggtggtgtgagcagcgggcaggacgcgctggagaagatccgggcaggggcctccctggtgcagctgtacacggccctcaccttctgggggccacccgttgtgggcaaagtcaagcgggaactggaggcccttctgaaagagcagggctttggcggagn

SEQ ID NO: 24965 - DNA, 480 bp, Homo sapiens
  misc_feature (1)...(480): n = A,T,C or G
aggggnatgtcncngnngtannnnnaaaactgagtacctnctcgnatagacccngcgctgcaggaattcggcacgagcgggaatcctacctgcagtggttgcgggatcaggagaaacaggctcgccaggtccgaggccccagccagccccggagagccagcgccacatgcagttcggccacagcagcagcctccagtggcctggaggagtggactagccggtccccgcggcagcggagttcagcctcgtcacctgagcaccctgagctgcatgctgaattgggcatgaagcccccttccccaggcactgttttagctcttgccaaacctccttcgccctgtgcgccaggtacaagcagtcagttctcggcaggggccgaccgggcaacttccccccttgtgtccctctaccctgctttggagtgccgggccctcattcagcagatgtccccctctgcctttggtctgaatgactgggatg

SEQ ID NO: 24966 - DNA, 465 bp, Homo sapiens
  misc_feature (1)...(465): n = A,T,C or G
ggggntgttcggnngtaannaattacgtgtctcctggataattcgccacgagatgatccagttaaacccaggcaactacccaaaaccattggctgtagtaagaacttcccaggaaaaacagctcttgctactcgggaacaggtacaatggtggctgttgcaattagcccaggaactagaggagagactgactaaagaccgaaatgataatgacagggtagccacccagctggttgtgagcattcgtgtacaaggagacaaacgcctcagcagcctgcgccgctgctgtgcccttacccgctatgatgctcacaagatgagccatgatgcatttactgtcatcaagaactgtaatacttctggaatccagacagaatgtctttgttcatagggccgggcgcggtggctcacggctgtaatcccagcactttcggaggccgaggcaggcagatcacctgaggtcggg

SEQ ID NO: 24967 - DNA, 478 bp, Homo sapiens
  misc_feature (1)...(478): n = A,T,C or G
gggcggnnntttaaattgacggccgactgatagtactagcactccccagggaaggaggcctgggctcaggcccagagtgccagctttgccctatcccatagcctggagccaccacaggaggggcactccactctcttgggctcctggagcctcagagttccaaaatgaagagtgattttcttgcttcttgtttgagctgggctgtgacatgtgcttcctctcgaagagccagtggatttgatgagaagcaccgagagcaccgcccggctcccggcatctgcgaggcctcgcacagagccagccgggagtgcaggagggagaactttcctgtggacgtcctgtgttctccagacgcagagaaccctcatcaaccgagggggaggtcacttccgaatccacagatggcgtgtgagtgcatggcgagcgcctccaggacacacttactgttcccttgctctggccagacgccagccggacn

SEQ ID NO: 24968 - DNA, 499 bp, Homo sapiens
  misc_feature (1)...(499): n = A,T,C or G
tgggggtnnntttgcncgacctgttgtatgaattccgaacgaggacgtgcagaaatggcacctcgaaaggggaaggaaaagaaggaagaacaggtcatcagcctcggacctcaggtggctgaaggagagaatgtatttggtgtctgccatatctttgcatccttcaatgacacttttgtccatgtcactgatctttctggcaaggaaaccatctgccgtgtgactggtgggatgaaggtaaaggcagaccgagatgaatcctcaccatatgctgctatgttggctgcccaggatgtggcccagaggtgcaaggagctgggtatcaccgccctacacatcaaactccgggccacaggaggaaataggaccaagacccctggacctggngcccagtcggccctcagagcccttgcccgctcgggtatgaagatncgngcggatgangatgtcacccccatcccctctgacagcactcgcangaaaggggggtcgccgtgtc

SEQ ID NO: 24969 - DNA, 315 bp, Homo sapiens
  misc_feature (1)...(315): n = A,T,C or G
ntgtggggaattgacgtcctgtangaattcggcacgagggtagctgccatctttgagacagaaagatgcaggacagcatttcatatgtaaccatttgaatgtttttgctgtttttagaattcagagcccttgctggggggtgcctgggagatggggtaagaagagctttcatttgtctggtagatagatagcatgtaagggggtggttgtcccaggaggcagctgctgacaggtttgctacacacagccccggactgtgttgcctgggtgctcattcagagaggggctatcatctgggagcctgtgcccctgggt

SEQ ID NO: 24970 - DNA, 466 bp, Homo sapiens
  misc_feature (1)...(466): n = A,T,C or G
gggatgcccnnngtnccnnaaatgatacccttgatagaccccggctgcaggcttcaacctgtgtgagaacctggtgaagtccagtgaggcaaactctccagcccatgaggagttcaagacgatgctgctgatcgctcattactatgccacgcgctctgcagcccagagtgtcaaacagctggaaaccgtggctgccaggctttctgtttcactcttgcgtcacacccagctactacctgtagacaaagccttctatgaagcaggcattgctgccaaggcagttggctgggataacatggcattcatcttcctcaatcgctttttggacctgaccgatgcaatcgaggaagggactctagatggccttgaccactctgattttcaggatacagacattccctttgaggtgccactcccagctaagcagcatgtaccggaggctgagagagaagaggttcgagactgg

SEQ ID NO: 24971 - DNA, 481 bp, Homo sapiens
  misc_feature (1)...(481): n = A,T,C or G
ggtggggnattganattcgatcggctgcangacttcggcacgagcttctatcttcattctctgaagttgcctagagcaccatcacagctaggaagcttccatcatgaattaccttatttccaaaagcaagtactcaaataattgtctcaagagaggaaggacaaaactgttacaagctgaaatatttggggatttgtttgacttgactagggaaccacaagttttcatataatgcctgatttagccctgtgcctaacagtttaaatcttaatgctaatgttaattgcttcccagttggttgaccttataagaaaacactgtgtggtattttaatgtggtaaacatgtgaatgaaggcctgtggctcagttaatcactcccacaactttgagctgtgagttttactggtggaaggaactttaacaggtcttcgctcttgtcattagatatcaaagaactgaaattagttggaattgtaagcn

SEQ ID NO: 24972 - DNA, 482 bp, Homo sapiens
  misc_feature (1)...(482): n = A,T,C or G
cggggctgngnattgancccattgacccgcgctgcaggaattcggcacgagccgaagcccgggctgaagcaagaacccgcatgggaattggagatgaggctgtgtctgggccctggagctgggatgacattgagtttgagctgctgacctgggatgaggaaggagattttggagatccctggtccagaattccatttaccttctgggccagataccaccagaatgcccgctccagattccctcagacctttgccggtcccattattggtcctggtggtacagccagtgccaacttcgctgccaactttggtgccattggcttcttctgggttgagtgagatgttggatattgctatcaatcgcagtagtctttcccctgtgtgaggctgaagcctcagattccttctaaacacagctatctagagagccacatcctgttgactgaaagtggcatgccagataaatttatttgctggtccttg

SEQ ID NO: 24973 - DNA, 466 bp, Homo sapiens
  misc_feature (1)...(466): n = A,T,C or G
ggctgatcgcctgaggannncactgtcaccctgcgagacaccgccggcattaatatgcaagctggctacagagggtgcaaggtcatataagccttccgagacaggacaaatttcctcatgaaccatgaccagatgagaaaagatgctgctgtccactagctacaggaaaaaaacaaacgaataaaggctcatcagcaaaaaggaaggcggtgcctacattcctgcagaccccaggcccttccctgtctggctagcacccaggatgtgcccagcaggcagagccgggcccccagcaagcagcctcctgctggcaacgtggtccaaggccctgagccaagagacagcagaggatctccaggagggtctctaggcggaaccctccagaaggagcagcatgtttcctcagatttgcagggaacaaactccagaaggccaaatgaaacagccagagaacattctaaaggcc

SEQ ID NO: 24974 - DNA, 470 bp, Homo sapiens
  misc_feature (1)...(470): n = A,T,C or G
ggggatggtcngnnngtnnnnnaaccactgagctcgctgcaatagattcggcacgagccagttcctatcgcagagccgcgcccgccatgagggagatcgtgcacatccaggcgggccagtgcgggaaccagatcggcaccaagttttgggaagtgatcagcgatgagcacggcatcgacccggccggaggctacgtgggagactcggcgctgcagctggagagaatcaacgtctactacaatgagtcatcctctcagaaatatgtgcccagggccgccctggtggacttagagccaggcaccatggacagcgtgcggtctgggccttttgggcagcttttccggcctgacaacttcatctttgcccatctgcacaggggaactgaggagaaacaggaatgaagagtgggcgacaaagagaaagcatcccttcccacacgccaagagtccagtgcaacgatccctgccaca

SEQ ID NO: 24975 - DNA, 472 bp, Homo sapiens
  misc_feature (1)...(472): n = A,T,C or G
gggatcgggnngnnngaaaactgaaagccatgaaaacntgcacgaggacaagnctctgtggacagacatccctgtgaattttccaaagaatggctgggctgcaattggaactcactcctttgaatttgcacagtttgacaactttcttgtggaagccacacgctaatacttaacagggcatcatagaatactctggattttcttcccttctttttggttttggttcagagccaattcttgtttcattggaacagtatatgaggcttttgagactaaaaataatgaagagtaaaaggggagagaaatttatttttaatttaccctgtggaagattttattagaattaattccaaggggaaaactggtgaatctttaacattacctggtgtgttccctaacattcaaactgtgcattggccatacccttaggagtggtttgagtagtacagacctcgaagccttgctgctaacn

SEQ ID NO: 24976 - DNA, 474 bp, Homo sapiens
  misc_feature (1)...(474): n = A,T,C or G
ctggacccccctnnanattttgccccgcgctgcaggaattcggcacgagccttttcacatcttaagtttttacatttgccattttccaaatctcaattttgggcaagaacgatatagtcacaactatggggctgctttcaaaagcggggctccatttctactgtcagatcaatgtggtgctgtaaccatctttttatccctaccttcaagaacctccttatatgaagcctgtctttatccatcagaaggtgtgtgaaatcatcacttccttctggttttatgtatttgtagactatgcagcttttcattaaactgcaagtatatacaagacagatctgaaattaggcctgagtgttccgatccaccactgtactagtaaataaaaatccacctaccttttatgtggaaaattatgtgctattgagtaacttttagctcttttttaaaaaatgggtgaaatttaagtgtcttttt

SEQ ID NO: 24977 - DNA, 499 bp, Homo sapiens
  misc_feature (1)...(499): n = A,T,C or G
gcagcccnnnattgacaatgatcgccatgcggaattcggcacgagcgagcgaccatggtggcccgggtgtggtcgctgatgaggttcctcatcaagggaagtgtggctgggggcgccgtctacctggtgtacgaccaggagctgctggggcccagcgacaagagccaggcagccctacagaaggctggggaggtggtcccccccgccatgtaccagttcagccagtacgtgtgtcagcagacaggcctgcagataccccagctcccagcccctccaaagatttactttcccatccgtgactcctggaatgcaggcatcatgacggtgatgtcagctctgtcggtggccccctccaaggcccgcgagtactccaaggagggctgggagtatgtgaaggcgcgcaccaagtagcgagtcagcaagggccgcctgccccggccagaacgggcagggctgccactgacctgaagactccggactgggacctncactcgagggc

SEQ ID NO: 24978 - DNA, 471 bp, Homo sapiens
  misc_feature (1)...(471): n = A,T,C or G
ntttgaanccttgaccgcctgtcagaattcggcacgagataacctgcactgtaatagcctaaacacaactcttatttacttacagccttatgtttttgtattttcttggtagactaggtaatttttttttaaaggacaggaaactgatattttaaagaccaatttgttctacctagcattttaactagtttttctgccagctatgttgaatgcacaaattctgtcacgcatgttcattcattgctacataatttggttcttctggaatatttttatgtagctcttggagtacagctatgaaaattaacaactgttaaaggaaatacctttttttttttttgaaatttttccctggaaaaaccaaagaattttttaagcgggtggtgaaaaagggtaaagcccgttggaataacctgggccttcaattatttggttccaaaaaggcggggccttttcctaaaacatttattg

SEQ ID NO: 24979 - DNA, 482 bp, Homo sapiens
  misc_feature (1)...(482): n = A,T,C or G
agaggggnattgaagttcctncggctgcangctgaataaatgtcactttttgaggcaaaaaaaatgacaagatgtccatcccttggctcccttccctcccccctcctgctgctcctcagcccccagagattgagccctggctggggctgggtggcaggacagcccctcagatgaggtcagcaacattgaggggcatttcctcaatggaggtgttgtagaaggtctcaatgtctcgaagagtcctcttgtcttcttctgtcaccatgttaatagccacacctttacggccaaaccgtccacctcgaccgattctgtggatatagttttccctggtggtgggaaggtcatagttgatgactaaagaaacctgctgcacatcaatgcctctggccagcaggtcagtggtaatcaaaactctgctagagccagaacgaaactccctcataatcacgtctcgttccttttggtccatatctccatgg

SEQ ID NO: 24980 - DNA, 471 bp, Homo sapiens
  misc_feature (1)...(471): n = A,T,C or G
nttttgacccgcgctgcaggatttcgacaccagcacacgtacctgtttgcccaggccatgatgtccgtgctggcccaggaggagcaggggggctccgctgtgcgcaggatcgcccaggaagtgcagcgctttgcccaggagaagtgagaggccctgtttctgctcagcccttccttcctagtgctccccacaaaacccttcccatggcccgtgttccacagccaaagctgctagctccttctgttcaacgtagaggtaaacttgcttttggctgggcgtggtggctcacgcctgtaatcccagcactttgggaggccgaggcggatggatcacctaaggtcaggagtttgagaccagcttgaccaacatggagaaaccccatctctggtaaacaaaaatacaaaattagccgggtgtggcggcacatgcctgtaatcccagctacttgggaggctgangcaggagaatcgc

SEQ ID NO: 24981 - DNA, 487 bp, Homo sapiens
cttcgcccgccttcagcaatcgctgcgagattgagatgaccgatggaggagtgcactattcctttgaatgtattggtcatgtgaaggtcatgagagcagcacttgaggcatgtcacaagggctggggcgtcagcgtcgtggttggagtagctgcttcatgtgaagaaattgccactcgtccattccagctggtaacaggtcgcacatggaaaggcactgcctttggaggatggaagagtgtagaaagtgtcccaaagttggtgtctgaatatatgtccaaaaagataaaagttgatgaatttgtgactcacaatctgtcttttgatgaaatcaacaaagcctttgaactgatgcattctggaaagagcattcgaactgttgtaaagatttaattcaaaagagaaaaataatgtccatcctgtcgtgatgtgataggagcagcttaacaggcagggagaagcgcctccaacctcacagcctcgtagag

SEQ ID NO: 24982 - DNA, 321 bp, Homo sapiens
  misc_feature (1)...(321): n = A,T,C or G
naaacattgtcgccttagganatcggcacgcgatgagctgggtatcaccgccctacacatcaaactccgggccacaggaggaaataggaccaagacccctggacctggggcccagtcggccctcagagcccttgcccgctcgggtatgaagatcgggcggattgaggatgtcacccccatcccctctgacagcactcgcaggaaggggggtcgccgtggtcgccgtctgtgaacaagattcctcaaaatattttctgttaataaattgccttcatgtaaactgtttaaaaaaaaaaaaaaaaaaaaaactggggggggggc

SEQ ID NO: 24983 - DNA, 511 bp, Homo sapiens
  misc_feature (1)...(511): n = A,T,C or G
gggtgtgcncnnagggtnnnnnaattgaccggcatcaggaatccngtacgagagcagaggaggctgacaggccctgctccctctgctctgggggtgtatgggagccccagctcacaccctcccaatgcttatatgctgaagctcacagaatgggcttcttgcctgacagcaagtcaaagaatgagtttaatatcaaagtgtaagcttactttccatccccaagccagcctgccccctgccccatttcccatgagcacacttctggggaaggaaaacaggctcctggccttcactctcagcagagctttggagatgccccacgcatgccctgagctccttctgtgtacctgctcccacttctgagccacccgctgcccctccgcactgctggcaaacccagttcctgcctcagccaggtctccttccctggtttccagtcacacagagcccagcagctgtctctttcagtcccataagggcagccttgtgtccctggccacacttacacccc

SEQ ID NO: 24984 - DNA, 460 bp, Homo sapiens
ggaagaaaaatttgatttgcctgcgctgcaggaattcggcacgagcaatggtggcctaggcctgtgggaataaacaatagagagacgaaagggttgctccttctacattttagatattatcaatgcatcattttcaggctaaaagcacatcattgctctatttaaaataagaaagctaagactaatgtgacattttgctttgtaaacagtttcacttaagcatagaatgaaaatatagttcataaaagcaccagatgcaaaacatatgcacacataaaagagtttataaaatggttattccaaaaggtaaaggatatggtttaagtccattttattttatcgtaatgccaacatctcctgacttgtctgcctgaagttgcttttaaaaaatagtaaatacaaggtttcagtgtgtatgcatttaattttaagaggaaaagcataaacacttttttaaggc

SEQ ID NO: 24985 - DNA, 413 bp, Homo sapiens
  misc_feature (1)...(413): n = A,T,C or G
gggagtgnngggnngnnnaactgtgcctcactgactcactagnanangcangnnctaagcacagctctcttctcctattttcatcctgcaagcaactcaaaatatttaaaataaagtttacattgtagttattttcaaatctttgcttgataagtattaagaaatattggacttgctgccgtaatttaaagctctgttgattttgtttccgtttggatttttgggggaggggagcactgtgtttatgctggaatatgaagtctgagaccttccggtgctgggaacacacaagagttgttgaaagttgacaagcagactgcgcatgtctctgatgctttgtatcattcttgagcaatcgctcggtccgtggacaataaacagtattatcaaagagaaaaaaaaaaaaataaaag

SEQ ID NO: 24986 - DNA, 458 bp, Homo sapiens
  misc_feature (1)...(458): n = A,T,C or G
gtgtgcctcccntttgaatcgcctgcacgaattcggcacgagcctcccataggcagtggctgtggtttctaccccgggtggccgggggcagtgctgagctgggactgttgtttgcccagcctgggctgcagaaagcagcagttaaagttcgtttctggtcactgctccaggaagccaccttactctgagggtcaagaattgccgcttccttttagttactgtaagttcctcctctgcccctggtttgtttcccgcggcacttctggatacccccaggtcccagacccttccagactcaaaccatgaactttcggcagctgctgttgcacttgccacgttatcttggagcctcgggttccccgcgtcgcctgtggtggtccccgtccctcgacaccatctcctcggtgggctcttgncgtggtcggtcctccaagtccccggcccactggaatcaggan

SEQ ID NO: 24987 - DNA, 493 bp, Homo sapiens
  misc_feature (1)...(493): n = A,T,C or G
ccccccctcgaacgcccgcnnnnnnttttgcccgcctgcaggaattcggcacgagatgattctggctgtcctctatagaaggaaaaactctaaacgggattacactggctgcagtacatcagagagtttgtcaccagttaagcaggctcctcggaagtccccctccgacactgagggtcttgtaaagagtctgccttctggatctcaccagggcccagtcatatatgcacagttagaccactccggcggacatcacagtgacaagattaacaagtcagagtctgtggtgtatgcggatatccgaaagaattaagagaatacctagaacatatcctcagcaagaaacaaaaccaaactggactctcgtgcagaaaatgtagcccattaccacatgtagccttggagacccaggcaaggacaagtacacgtgtactcacagagggagagaaagatgtgtacaaaggatatgtataaatattctatttagtcatcn

SEQ ID NO: 24988 - DNA, 456 bp, Homo sapiens
  misc_feature (1)...(456): n = A,T,C or G
ggaaaaaaatttgctcgcctgcggtagttcggcacgagccgcgccgccacaatggtgcgcatgaatgtcctggcagatgctctcaagagtatcaacaatgccgaacagagaggcaaacgccaggtgcttattatgccgtgctccatagtcatcgtccggtttctcactgtgatgatgaagcatggttacattggcgaatttgaaatcattgatgaccacagagctgggaaaattgttgtgaacctcacaggcaggctaaacaagtgtggggtgatcagccccagatttgacgtgcatgtcaaagacctggaaaaatggcagaataatctgcttccatcccgccagcttgagttcattgtactgacaacctcagctggcatcatggaccatgaagaangcagacgaaaacacacaggagggagaatcctgggattctttttctatggatggaataca

SEQ ID NO: 24989 - DNA, 491 bp, Homo sapiens
cttccctcgccttttgacccgcgctgcaggaattcggcacgagagacgattggccagacatcacctcagatctgagaccagcgtcttccatctctcagagccttactcccaaagtacctgctcactgttccgtgttgaacaattgccggagtttcctctcttcactggtttccatgagtacccttatatttcacaactttctgttcataagttatagtgacattgctctttggtaaaaatgcctgctttccaatactttgattgcatattagacattcttaacagggcggcagtctagtgttgaaagttttatttttccatttttcttttaagtaaattttttttaaaaaattctgatttaaggctaggtgtggtggctcaagcctgtaatcctggcactttgggaggccaaggtgggaagatcgcttgaggccaagagttcaagaccagcctgggcaacatagcgagacccctatctgtattaaaaaaaa

SEQ ID NO: 24990 - DNA, 472 bp, Homo sapiens
  misc_feature (1)...(472): n = A,T,C or G
ctagcccgcctgcaggaattcggcacgcgccaagtcctgcattgggtggtttgggtaatgaaggaattcagcatgaccgatatagacctcaccacactcaacatttcggggagagaattatgtagtctcaaccaagaagatttttttcagcgggttcctcggggagaaattctctggagtcatctggaacttctccgaaaatatgtattggcaagtcaagaacaacagatgaatgaaatagttacaattgatcaacctgtgcaaattattccagcatcagtgcaatctgctacacctactaccattaaagttataaatagtagtgcgaaagcagccaaagtacaaagagcgccgaggatttcaggagaagatagaagctcacctgggaacagaacaggaaacaatggccaaatccaactatggcagtttttgctagaacttcttactgataaggacgctcgagactgcattn

SEQ ID NO: 24991 - DNA, 517 bp, Homo sapiens
  misc_feature (1)...(517): n = A,T,C or G
ggttttnnccnnaagactggcnnnnnatttgannnccatcgagcgccntgcggcanaaagaagcgtgcagaggatgactacgagcctataatcacctaccaatttcccaagcgggagaacctgcttcggggtcagcaggaggaggaggagcggctgctcaaagctatccccttgatctgcttcccagatgggaatgagtgggcatcactcaccgagtatcccagggagaccttctccttcgttctgaccaatgtggatgggagcagaaagattggatactgcaggcgcctcttgcctgccggccctggccctcgccttcccaaagtgtactgcatcatcagctgcatcggctgcttcggcttgttctccaagatcctggatgaagtggagaagagacatcagatctccatggctgtcatctacccgttcatgcagggcctccgagaggcagacttccctgctcctgggaagactgtcactctcaagagcttcatacccgactcangcactgagttct

SEQ ID NO: 24992 - DNA, 470 bp, Homo sapiens
  misc_feature (1)...(470): n = A,T,C or G
gcggcacnnnnattganaggatccgcgctgcaggaattcggcacgaggggatgtgggaagctggtgagaaggcacactctctccacagttagatttgggaggaggcctgacttgggagagggatccaggctcacaccgccctgtcctgtgtcctgtctgcagacagaggaactgaaccgcgaggtggccaccaacagtgagctggtgcagagtggcaagagtgagatctcggagctccggcgcaccatgcaggccttggagatagagctgcagtcccagctcagcatgaaagcatccctggagggcaacctggcggagacagagaaccgctactgcgtgcagctgtcccagatccaggggctgattggcagcgtggaggagcagctggcccagcttcgctgcgagatggagcagcagaaccaggaatacaaaatcctgctggatgtgaagacgcggctggagcaggagat

SEQ ID NO: 24993 - DNA, 470 bp, Homo sapiens
  misc_feature (1)...(470): n = A,T,C or G
aggggcccacattgatcgcctgcggaattcggcacgaggagaagatagtggctctaccccctgaaagagggtggatgcagctgcttgtgtttcttggggtgactgtcattggtaatacggacacagtgacccatcctccatcctatttatagtggaagggccttcaattgtatcagtactttttttttaagctctggcacattgacctctatgtgttaccagtcattaatgagctgctgcagaggtgactatttgttttactttcttggatgttaacattacactactcactactcaaaaaaaaaaaaaaaaaaactcgggggggggcccggaccccaattccccttatagggagccgtataacaatccactggccgccgtttaacaacgccgggacggggggaaaaaannnnnnnnnnnnnnnnnntnntnnnnnggnngnnnnnnnnggnnnnnnngnnnnnnnnngn

SEQ ID NO: 24994 - DNA, 472 bp, Homo sapiens
  misc_feature (1)...(472): n = A,T,C or G
gcggcgcgggtggaaattgaaactagcggtatccgcacgagctcagaccagaacctgcaggagctggagaagtggctgaagaaagagccagaggcctttgactggtccccagtggtgacctatgtgtgtgatcttgaagggaacagagtcaagggtccagagaaggaggagaagttgagacaggtggtcaagcaggagctgaagtgtgatgtgactcagagccagccactgggggccgtccccttacccccggctgactgcgtgctcagcacactgtgtctggatgccgtctgtccagacctccccacctactgcagggcgctcaggaacctcggcagcctactgaagccagggggctttctggtgatcatggatgcgctcaagagcagctactacatgattggtgagcagaagttctccagtctccccctgggccgggaggcagtaaaggctgctgtgaaagaggctggcn

SEQ ID NO: 24995 - DNA, 460 bp, Homo sapiens
  misc_feature (1)...(460): n = A,T,C or G
cttcgaccccccnttataccccgcgctgcaggctggcatgtgccttatgaccctcgtgggtcatgataactgggtacgtggagttctgttccattctggggggaagtttattttgagttgtgctgatgacaagaccctacgcgtatgggattacaagaacaagcgatgcatgaagaccctcaatgcgcatgaacactttgttacctccttggatttccacaagacggcaccctatgtcgtcactggcagcgtagatcaaacagtaaaagtgtgggagtgccgctgattgtgtctccttcggcccctcctccctcttttcctctggatgcactctgatgataccatggttaccccattgagctctgtttaaataaatattggcctttcatgtgnnttnnnnnnnnnnnnnnnannnnnnnnanannnnnnaaaactctggggggggggccgggcccccatt

SEQ ID NO: 24996 - DNA, 473 bp, Homo sapiens
  misc_feature (1)...(473): n = A,T,C or G
agaggggggtgncctaggactgatggcagtcggaancggcacgagcctccatctgcagctccaggttctcctccgtgttcctctgggccaggaagcggctagtgatgtcctggccagtccgggggagagagaagcaggtgtgggccaggatggtgggcagagggggcttcacagaactggtttcttctgggcccctcctagacgctagtgcactttctctgtgctcattcacaagtgtgatcacagctcactgcagcctcaacctcccagactcaagcgatcctcccacctcagcttcctgagtagctgggaccacaggtgtgcaccaccacacttagcaggggtgaagcgctttgtggatgtcattgcacacgaccctaatggcaggcagagagggtagataaccccatgtagagataaggagatcatcacttgagggacgtgggtcacttgagtcacttgtctgacagtgg

SEQ ID NO: 24997 - DNA, 330 bp, Homo sapiens
attgcccgcctgcaggcttgtgccttccgattttcttgcatttgtttttttcctgacctgaagttgttgttacaaaatcagtcagactttgtgggctgaaggacacggtgcagcagagggtgtccctgtgagagttctgcagagtgctgggcatgtgcctggaactaccgagtaggagccatttctttgtacccctgcctaatccattcctctccttccaagtccattgttgcaagcaatattcttctcaatttttatatgtttactttaaatcaaagttagtctatttgtataaaatttttaaaaaatctaaaaaaaaaaaaaaaaaaa

SEQ ID NO: 24998 - DNA, 505 bp, Homo sapiens
  misc_feature (1)...(505): n = A,T,C or G
aggaggcacggggggnnngnnnnaatagatngnatagtagcgacctgtacgaatcggcacgagctgcggagcttcctctcacccatcctgaatattatgaagagatgggtataaagcctcctaagggggtcattctctatggtccacctggcacaggtaaaaccttgttagccaaagcagtagcaaaccaaacctcatccactttcttgagagtggttggctctgaacttattcagaagtacctaggtgatgggcccaaactcgtacgggaattgctccgagttgctgaagaacatgcaccagccatcgtgtttattgatgaaattgacgccattgggacaaaaagatatgactccaattctggtggtgagagagaaattcagcgaacaatgttggaactgctgaaccagttggatggatttgattctaggggagatgtgaaagttatcatggccacataccgaatagaaactttggatccagcacttatcagaccatgccgcat

SEQ ID NO: 24999 - DNA, 502 bp, Homo sapiens
  misc_feature (1)...(502): n = A,T,C or G
agtggnattttaattgacttcctgagcatcggacgagccatccaaggctntgccttcatcagcttccaccgccgcgaggatgctgcgcgtgccattgccggggtgtccggctttggctacgaccacctcatcctcaacgtcgagtgggccaagccgtccaccaactaagccagctgccactgtgtactcggtccgggacccttggcgacagaagacagcctccgagagcgcgggctccaagggcaataaagcagctccactctctctaaaaaaaaaaaaaaataatgaaaaaaaaaaaccctggggggggggcggggccccaaattccccttaaaggggggggtataaaaattcaggggccgggttttaaaaagggggggagggggaaaagnnnnnnnnnncctcnggggggggccccgtttctttttctctttttggggggttgttttccgtttgggtgccggggtgttcccctttttttctgggggggttatttccccct

SEQ ID NO: 25000 - DNA, 509 bp, Homo sapiens
  misc_feature (1)...(509): n = A,T,C or G
gggtgtncccnnaggttnnnnnnaattgancggcataggaattcggtacgagaacgaatgaagagtcgggagcagggaggacggctgggagccgaaagccggaccctgctggtcatagcgcaccctgacgatgaagccatgttttttgctcccacagtgctaggcttggcccgcctaaggcactgggtgtacctgctttgcttctctgcaggaaattactacaatcaaggagagactcgtaagaaagaacttttgcagagctgtgatgttttggggattccactctccagtgtaatgattattgacaacagggatttcccagatgacccaggcatgcagtgggacacagagcacgtggccagagtcctccttcagcacatagaagtgaatggcatcaatctggtggtgactttcgatgcagggggagtaagtggccacagcaatcacattgctctgtatgcagctgtgagggccctgcactcagaagggaagttacctanagggtgctc

SEQ ID NO: 25001 - DNA, 506 bp, Homo sapiens
  misc_feature (1)...(506): n = A,T,C or G
tggggnnnnnaagtggnnnnnnattgannnccatgaccgccttcggtgagacagaaacattgctgattatctcatgcaggaatcacctcctcatgtagaaaattactgtctaccagaagctatttcatttattcagaataataaggaacttgggactggattatcacaaaagaggaaagctcctacagaaaaaaataaaatcaaacgacctagagtacactaatcgcatctaccctttagttaccaaacattaaatgtttttaaaaattgaaagcctgaatgtgactgtgatagatttgggtagtaatttaaagatgagtacctgaagaattctgcttcagagtataatgatgacccttcttgagttttgaacacctgaaattgtaatcactgaaatattaactgtttcttaataaaaagttacctgaaataacaacaaaatacaactcctcagctagcttgctgttaaaccacattgaagtctgttaaagatatttattttcttg

SEQ ID NO: 25002 - DNA, 487 bp, Homo sapiens
  misc_feature (1)...(487): n = A,T,C or G
gaaatgaacccggaagcnccccccaactgatncccacctgacgcccctcgagaantccgcacgaggagggtcacaggctgcccaccctttgatgaacacaagtgtctggctgatggaggtaaaattatgaaaattccaggcacctgctgtgacacatgtgaggagcctgagtgcaacgacatcactgccaggctgcagtatgtcaaggtgggaagctgtaagtctgaagtagaggtggatatccactactgccagggcaaatgtgccagcaaagccatgtactccattgacatcaacgatgtgcaggaccagtgctcctgctgctctccgacacggacggagcccatgcatgtggccctgcactgcaccaatggctctgttgtgtaccatgaggttctcaatgccatggagggcaaatgctcccccaggaagtgcagcaagcgaggctgctgcagctgcatgggtgcctgctgctgcctgccttggc

SEQ ID NO: 25003 - DNA, 245 bp, Homo sapiens
  misc_feature (1)...(245): n = A,T,C or G
ctcgacccgccttcangaattgacccgcatgcaggaattccgcacgaggccgcaagagctatgctcgccttcaccctcgtgctgtcaactgccgcaagaagaagtgtggtcacaccaacaacctgcgtcccaagaagaaggtcaaataaggctgttctttccttgaagggcagcctcctgcccaggccccgtggccctggagcctcaataaagagtccctttcattgaaaaaaaaaaaaaaaaaa

SEQ ID NO: 25004 - DNA, 496 bp, Homo sapiens
  misc_feature (1)...(496): n = A,T,C or G
ngaggccganngccgtgnaaccttgannaaatgcacggccgtgcgaattcggcacgagcagacacctttgccttctgctgtgcttcgggccggctggggcttgttgacacccggcagaagtgggcaccgttggagaatcgcagccctggccctgggtctggtggagagagatggtgtgctgaagttgggagctggggccagggccctgggcccagcattgccagccttggctcagatgggcgtctttgtcttcttgacccccgggatctctgccatcctgtgagctcagtccagtgcccagtatccgtacctagccctgacccagagctgctgcgagtgacttgggccccaggcctgaagaattgcttggccatctcaggttttgatggtacagtccaggtctatgatgccacatcttgggatggaacacggagccaagatggaacacggagccaagtagaacctctcttcactcacagaggtcacatcttcctag

SEQ ID NO: 25005 - DNA, 504 bp, Homo sapiens
  misc_feature (1)...(504): n = A,T,C or G
gggtgggcnnaggttnnnnnttttgancgcattggaatccgtccgagcttatttgngagacctcgctcttgccctgtttgaagagcctgagttgcttcccctgcctttcttggccacctcaatagcagaagtactctgcctgactgcatactttggcagactggtacattttgcaaaagtcactcctcaaatggttttctggaaggatacaaaagacatctgcaccatggtaaccacagtggcgagtgttcattgtagtacctgtaagagtttatgaccgaaggcaggagccatgaagaaaaaagactcaatagatttgcttttgatgaaacaacaacacttccatacagtgaacgccataagcacaactgcaagcaaaccgcaaactgaagaacaaatagggcaaaatgtggcagtgcagacatttcagcatatcaagagcacttccaaattacaggaaaaaaaagatatctcaatagataattttgctgaagataagtgaag

SEQ ID NO: 25006 - DNA, 493 bp, Homo sapiens
  misc_feature (1)...(493): n = A,T,C or G
aattgaccgcctgncttgctncgcctgcaggaattcggcacgagaaaccatttttcatatcagttatagcaaaacaagacaaaccagttcttaataatgttcaaagttggacccatagagacatgctaagcactacatcatgctaagaagaacagttattactcagctgccatacttcagccattctacttttacaccaagaacaaaatggctagagatttttttaaaaatacaaatgccagtaccttgccgagacttgttcactgatttgccccaaccccaaggtaatggtcatctactttgcaacctatggagatcctgatagctcccatacaaagtgaggtacactgttgccaatttggaggcaggaagccatcaaactaaacgtagtttaattcagatgaacacctatcgatattcaaaaggcaaaacaaaaaaactaattccagggacattagaccttggtgaaatgccaaatggaaaatggtgcttt

SEQ ID NO: 25007 - DNA, 504 bp, Homo sapiens
  misc_feature (1)...(504): n = A,T,C or G
cggcgcacccccacnaatagcaccgcctgcaggaattcggcacgagcattgttctcctctagatactttcagtttctgatggcatagctgaagtcatgttgtggctttattagtttcaggaacttggatgtctgttttaaaccttagctatcattttagtcatcccaggaagtttgacttgactattcttatttaaatatttttcaaactgttgcaacttaatactaggaaaaaggaaggactagctgagctgacggaagttaagcttgctttcttaaccgcaaggcttagagcctttattatgctaattggcattatgaattttttagggactccttaacacacagctatcccaaacctgttttttaggacacctaagtgttactaattcagaaatgctgttcagggtctagggatggttgacaaagtatagccatatttttgtgtagcctgagagctaagaatgttctttacattntttaaatggttggaaaagaatcaaan

SEQ ID NO: 25008 - DNA, 448 bp, Homo sapiens
atagaaaatttgccccccctgcaggaattcggcacgagccttctccacttactataatgggtggaactaagcgtcaccaaggtggcttctccttggctgatagatggaaggcggggtgggatttgctcctgggttccctatgccctactgagggcagaaaagaaaccatcctctcccttcttacaccgtgaggccaagatcccctcagaaggcacgagtgctggcctctcccatggtgcccgcgcctctgtgctgtgtatgtgaaccacccatgtgagggaataaacctggcacctgatgaaccctgttctggagtggaaagagcacagaatagaacaccaagctaagaagctcgtggggggggggggcgcccccctccgctctgcaggtaggatttcaaccatatgtggaggcgttcatttctcaagctcgtgggagaggtacctaa

SEQ ID NO: 25009 - DNA, 495 bp, Homo sapiens
gccccattcgcccgcgctgcaggaattcggcacgcgaatgaaatgcatcagacaaacatctacaaacaaacatgaatacatgggcatacaaaagcacgtggacaagttttctgtacagtttatgtctcagatacttctatgtatacataagaaccactcagggggaaaaaaaaagatttccctctccagctccctgaatttctgaaagttgtctgacccataaaatgttaaaatatttcatttttatataaaatatctacaaaaatagataacatttacaaaaaccagacagtatttccagttttccttagtaaccgttaacgcagtccccttcctcttttttttcttctcagaacgttgccatctccagcaaagagcgcttgaacagctgggcatttctagaaaggtctgtcacttggtgcaccatttcctgcagggccgtggtgctggggtaatggagggcggccatcttggttgccatgactatagtcttga

SEQ ID NO: 25010 - DNA, 500 bp, Homo sapiens
  misc_feature (1)...(500): n = A,T,C or G
gccccattgacccgccctgcggaaatttgaacngcgctgcaggaattcggcacgaggttgcccacggcaatgaaacgcttggaagaggcccgactccataaggagattcctgagacaacaaggacctcccagatgcaagagctgcacaagtctctccggtctttgaataatttttgcagtcagattggggatgatcggcctatctcctactgtcactttagtcccaattccaagatgctggccacagcttgttggagtgggctttgcaagctctggtctgttcctgattgcaacctccttcacactcttcgagggcataacacaaatgtaggagcaattgtattccatcccaaatccactgtctccttggacccaaaagatgtcaacctggcctcttgtgcggctgatggctctgtgaagctttggagtctcgacagtgatgaaccagtggcagatattgaaggccatacagtgcgtgtggcgcgggtaatgtggcatcc

SEQ ID NO: 25011 - DNA, 502 bp, Homo sapiens
  misc_feature (1)...(502): n = A,T,C or G
cattcgcaccccnnttngnganaatagactcagtgctgcaggaattcggcacgagccaaagttgacttagatgccatcccaagtgctaaagtacgagagcaaagaatgcccagagatgacactagtgatttcttgaaaaactcattattggaatctgatagtgcttttattggggcttacggtgagacatatcctgccattgaagatgacgtcctccctccaccatcacagttgccctctgcacgggagcgcaggaggaacaaatggaaaggactagacattgatagcagtcgtcctaatgtagcaccagatggtctctctctaaaatctatatccagtgtaaatgttgatgagcttagagtgagaaatgaggaacgaatgcgaagactgaatgaatttcacaataaacctattaatacagatgatgagagttcactgggtgaccctgatgacatcatgaaacacataggggatgacggatcanactctgtagcaactgagc

SEQ ID NO: 25012 - DNA, 447 bp, Homo sapiens
  misc_feature (1)...(447): n = A,T,C or G
tttgccccccttgtcccccgcgctgcaggaattcggcacgagctttgtggtatgggaaagaatattgggctcttacctccccaatgactgccctacccctgcggaccccgctccagcgggtggggattttcttggactatgatgctggtgaggtctccttctacaacgtgacagagaggtgtcacaccttcactttctctcatgctaccttttgtgggcctgtccggccctacttcagtctgagttactcgggagggaaaagtgcagctcctctgatcatctgccccatgagtgggatagatgggttttctggccatgttgggaatcatggtcattccatggagacctccccttgaggaggtgaattcaggccaaaagggctgttggctgtaatcctacgccaggcacaaggcatcttgttgccttgccacgtcctgtcacagctgn

SEQ ID NO: 25013 - DNA, 522 bp, Homo sapiens
  misc_feature (1)...(522): n = A,T,C or G
agggggcgcccggnnttnngnnnnnattactgatcgccctgtaganatcgccacgcgctccctgctcctttcacacaaatcttggatattgccagaggaagccattcagcagctgctggggtttttcatccccctgacatgcatacatttgctctgggagaagtgtcttccctctgaccctggtccccagctccgtctgtgcttaattgctcttaacctgttgcactaatgaatatgactaggttttaaagggggaatgtgaagcaataggcacatggggcttggatgaattggtcccacagatataccctgccttaagccgctgaggtgatgagtccactgctcatgtgaccctccacctttgtggatccctcttggtttgtgaccagtgtgtctgtttgttgaggttgtacaaacttgacaaaagttaatacttttggttgtattttctgcactgttgcactctccacatgggcccctgagatttttattgacttgtacacacatnnttgctttgatgct

SEQ ID NO: 25014 - DNA, 457 bp, Homo sapiens
  misc_feature (1)...(457): n = A,T,C or G
agctgganaattgaaattgattcgcgctgcaggaattcggcacgagaatgcatgaggctgcctgggactgtgggaccttggcctaaagacttgaattattcttacaactctttccattagtagattttggagtgaaaagtgatctttaaacaaacgtgattgttttaagcctaaaagaagaatcttctgtgccatttaatgatttgattcccattgcaagtttattattagatataataaagcaagtcacatcagttgcttccataacctttccacatgaactaatgatcatgtaggcatgaataaattctcccatactaattctaaagtttaaaatcagcaacttgtcttaaataatgccttttaggccgggcacagtggcttacgcctgtaatcccagcactttgggaggctgaggcaggtggatcacctgaggtcaggagtttgcgaccagcct

SEQ ID NO: 25015 - DNA, 515 bp, Homo sapiens
  misc_feature (1)...(515): n = A,T,C or G
ggggngaaattgatcngccttagngaattcgccaggcctgcangaattcggcacgagatttcccttcttggtcttacgtctcagggtctaagagacaggtaaataaatcattaaaaaatgatgtatctgatagttcaggggccacagtaagataatttttcaggctgagcatggtggctcatgcctgtaatccagcattttggaaggccaagatgaggatcacttgaggccaggagtttgagaccagcctgggcaacatggcaagacccccatctctatgaaaaatagagataaaaagaagaaataaaaaagtgtgtccctttcccactgagcaaaagcatcctcctgaggaccccaggtgtgttttgagtgtcaattctggccgggtgctgtggtgtggccatgatcgacaacacagtccttgtccacaaggaagttaaaatcttaaggaaagcgagactgttgtggtccagctgaacatgcctgtgcattgagacctaaagctcatagagatg

SEQ ID NO: 25016 - DNA, 454 bp, Homo sapiens
cgagggaaaatgaattcgctggcggatttcggcacgagagcgcatcagtatgctctggctggaggcatctccttccccttcttctggctggctggtgcgggctcggccgtcttctgggtgctgggagccaccctggtggtcatcggctcccacgctgccttccaccagattgaggctgtggacggggaggagctgcagatggaacccgtgtgaggtgtcttctgggacctgccggcctcccgggccagctgccccacccctgcccatgcctgtcctgcacggctctgctgctcgggcccacagcgccgtcccatcacaagcccggggagggatcccgcctttgaaaataaagctgttatgggtgtcattcaggaaaaaaaaaaagatatatcttccttgacagcaaagatccagaatataagaagtttttagaaacctactgtgtggaggaaga

SEQ ID NO: 25017 - DNA, 451 bp, Homo sapiens
  misc_feature (1)...(451): n = A,T,C or G
ntggcccncncttgcccccgcgctgcaggaattcggcacgagaagaatctgaaaggcatagacgcagagacagaagccaagacaaggacagagacagaaaaagcagggaggaagggcacaaagataaagagagggcacggttatcacatggtgatcgaggaacagatggaaaagcaagcagagatagtaggaatgtagacaagaagccagataaacctaaaagtgaagactatgagaaggacaaagaacgagagaaaagtaaacacagagaaggagaaaaggacagggataggtaccacaaagatagggaccacactgacagaactaaaagcaaaaggtaaaatttgcaggctgcttcaggattacatttaaataactgttaaaatgttgtatcttgtaaacaaaagaaagattgcctgctaggattgtgccatctttaaaatttttacta

SEQ ID NO: 25018 - DNA, 447 bp, Homo sapiens
  misc_feature (1)...(447): n = A,T,C or G
nttgacnccgcgctgcaggaattcggcacgagtcgggactcaccaccacgaggtcaggcgatgtggtctacaccggcagaaaggagaacatcaccgctaaggcaagcagtgaagatgctggaccaagcccacagaccagagctacaaaatatccagcagaggagcctgcttcagcctggaccccatccccaccgcctgtcaccacctcctcctcaaaggatgaggaggaagaagaagaagaaggagacaaaataatggcagaactccaggtatgtggatgaggtgactgacattggctccttgcctcccgcctgggtctctgcagccatggcactcacagatttgttagcgagaaggccagggaagcgcatggaccgggaccatagaagctgtgtcttctggccttagcctttgctttcccaagatggcgctgaacaaggctctcag

SEQ ID NO: 25019 - DNA, 446 bp, Homo sapiens
ctatgccttcgctgcacgaattcggcacgagcaaagctgggactgatgtcctgccagtagagaatctacagaaataatttgaatgaattaaaaccaaatcttgatagcaggagacagcttcctgatctagatgtacaattagagtttaggttggaaattactttaaaatgtgttttttggggatgtcttcaatctctgtgtaaatacccacatgcttatgcattgtaaaccaagtgtgtattcctgtgtatgaatttgtagaactgatttctgcttcaagagaagctgcacctttaattttataaggtcccctccacctgtaaccctataaatgtctgtaaataaaacactaaaatttgtagtgataggatcaatttgggaatatctgctgagagaccaaaaagttcatttttttaagtaccttggttaaagagtaaagattattc

SEQ ID NO: 25020 - DNA, 494 bp, Homo sapiens
  misc_feature (1)...(494): n = A,T,C or G
nacggggattganattcatcgtcctgcangaattcggcacgagctttcttagaaatttatttcctagttctgtacaaatggttgtattagatgttctctatcatttaataatatacttgtggactaaaagatataagtgctgtataaaatcagccaattatgttaaactagcatatctgcctttattgagtttgtcattagcctgagtagaaaggcctttaaaatttttttagaaagcatttgaatgcattttgtttggtattgcatttattcaataaagtatttaattagtgctaagtgtgaactggaccctgttgctaagccccagcaagcaatcctaggtagggtttaatccccagtaaaattgccatattgcacatgtcttaatgaagtttgaatgttaaataaattgtatattcactttataaaaaaaaaaaaaaaaaactcgagagggggcccggacccaaattcgccttatagagagccgaataacc

SEQ ID NO: 25021 - DNA, 485 bp, Homo sapiens
  misc_feature (1)...(485): n = A,T,C or G
gcgggccttgcctgctgtggcagagcaccatgcagacatatgaagaagttggagatgatgcattggaagaccccatgccacagctggatgtgactgaggccaacaaggagttcatggaacagagtgaggagctgtatgacgctctgatggactgtcactggcagcccctggacacagtgtcttcagagatccctgccatgatgtagccaggccaaaggacaagccaggttgcatgatgtgagggagatgagagactcctttttaaaaattgtgaaacctttttggaaatatgatttgtaagattttaataatgactgtttttggagatcanaaaaaaaaaaaaaaaaaaaaaaaccttgggggggggcccgggccccaattcccccttatgggggggggtttaaaattcccgggccggggttttaacacgggggggaggggggagannnnnnnnnnnnntnnnntnntttttttttttttttttt

SEQ ID NO: 25022 - DNA, 498 bp, Homo sapiens
  misc_feature (1)...(498): n = A,T,C or G
cttcgcccgcctgcggngnattgccnccgcgctgcaggaattcggcacgagccaatgtccaggagccggagaagaagaagaaacgcagggagtgatgtggccgggccaaggacaggcagggagggaggccaggcctcgcttgcaccgcgggacgaggctgaccgggctgttctgtagactcaggaccgtggctccagaactcctgtgccaggcgggagggaagggcggcactggagagatgggcccatcattaggggccagcatcccaggaactggacctttccccagagcctccgcctgtggctgtgatgaccttgggccagaaggtcaaactccgaagactgaaactctgcctgcagcaggactggctgcccctgctgtggggggttcagaaaataaaatgccgcgcagcccttgcaaaaaannnnnnnnnnnnnnaaaaaaaaaaaaannnnnnnnnnnnaanaaaannnngggggggggggggggcgcgccccc

SEQ ID NO: 25023 - DNA, 489 bp, Homo sapiens
  misc_feature (1)...(489): n = A,T,C or G
gagtnattgaattcgattcgcctgcggannaaacacacaaaagggcaaaactcattggcggatgtaaacatccctgttccactccccagcctcattccgtttttttgatatcacttctccatccttttcacagtagcgatccttggatttatgacggctgcgctgcttgttgcactcgttgtggtcctgctctcgatccacgtcccgggaacggtgccgggactccctgtgtctgtggtcactgctcccgtgggtctcgtctctgtggttgtggtcacggtgtgaggcatagtggtccacgtggtcatgggaataatcttcctttggctctacgtaggcagagtctcgactctcctgggtttccgagtcaaatgtctcttgcctggagaggccgcgacttgtcccactgcgatggttgtggtgtggggctgaggaggaagagcggagctgggatttcttgactgggtccacactaggttcttcttcagn

SEQ ID NO: 25024 - DNA, 449 bp, Homo sapiens
cttggcccgccttgtcccccgcgctgcaggaattcggcacgaggatggaccagtcactgtacaggaatttatggaggtcaaaaacgctctagtggcttctgaggccaagatacagcagctaatgaaggtgaataacaacttgagtgacgagctgagaattatgcagaaaaagttgcttggaaaagatgctaattaatgaagaggagcaactactattggtgtatttttcacagattggtgctttctaaataaaaattgagagtaactcctaacattgaatgggtttgctactgaaaaagtaatgatcttctggtgcaaacagttgcttgtggacttaaaccttggcactggtggggaatttggtcagattttacaatctctgtcaaagagtagacagctgaactcacaccacacccagcttatagaatgtccatggaagatgaaggcgc

SEQ ID NO: 25025 - DNA, 487 bp, Homo sapiens
cttgcccgcctgcaggggatgacccacgctgctgcgctttggaggctggaccatcgtggggcctgtctgtgcccacttttcccccattcaagagttaccacggccaggcgcagttgctcaggcctgcaaacccagcactttgggatggcaagacaggaggatcgcttgagcccaggagcttgagaacagcctggacaacatgagccagccaggcccctgggcctggagcatccacaggaggaaagtacaagaaccctggcaccctgccaagcagcagggattcttcagacacccaagggctggtttgctgggaaggactcatgtgaccagaaggggaaactgaggcactgctgagcaccaacagtcctggagagctttaagaatggttgccatctgaggccaggcatggtggtttatgcctgtaatcccagcactttgggaggccaaggcaggcaaatcacttgaggtcaggagttcgaggctgtca

SEQ ID NO: 25026 - DNA, 499 bp, Homo sapiens
  misc_feature (1)...(499): n = A,T,C or G
cttcccccngccctnnnnaaaatggaccccgctgcaagaattcggcacgagaattatttgaagaactagggaaacagatccaacagtatatgaaaataatcagctctttcaaaaacaaggaggaccagtatgatcatttggatgctgctgacatgacaaaggtagaaaaaagcacaaatgaagcaatggagtggatgaataacaagctaaatctgcagaacaagcagagtttgaccatggatccagttgtcaagtcaaaagagattgaagctaaaattaaggagctgacaagtacttgtagccctataatttcaaagcccaaacccaaagtggaacctccaaaagaggaacaaaaaaatgcagagcagaatggaccagtggatggacaaggagacaacccaggcccccaggctgctgagcagggtacagacacagctgtgccttcggattcagacaagaagcttcctgaaatggacattgattgattccaacacttgtn

SEQ ID NO: 25027 - DNA, 486 bp, Homo sapiens
attgcccgcctgcagaattcgcacgaccccaatgcctccccgctgctgacgcttcatcccccacacctccagccccagttacctggagcttctcagaacccactttgccggtgctaaaacacaagagggggtgaaagtggctgccagtaatggccagaaaccaaccaccagaggccaggctgaaagacaagctccgggtgtccaggggctgacgggccaaccatgtggcaggtcccaggccccacccactgcgccatccgcctctgagctccacagtggtcccactaatgggaacctcctctagggagagtgatactgcaccttcacccgtaggactcatatttataacaatgtgtaatggctgtagcaaaaagcccttgtttctagatgtaaatggtcaaagaaacaagcgctctattgttttgaataaaatagttcaaatgagtcctgtatcattggatctcctattctggattagtgcctttt

SEQ ID NO: 25028 - DNA, 467 bp, Homo sapiens
  misc_feature (1)...(467): n = A,T,C or G
ggttgcccgcctgcggaattcgctggagggcatgtgtgactggcaaaaggtggcctattgttggagtacgtcttgtgtcagaatttccatatattgaagcagaggtgaaatatgggattaaggagtatgcctgcactgctgtggatatgatttcacgtcgtactcgcctggcctttctaaatgtccaggcagcagaggaagccctacccaggattgttgaactgatgggcagggaactgaattgggatgattataagaagcaggaacaacttgaaacagccaggaagtttctatattatgaaatgggctataaatctcgatcagaacagttaacagatcgctctgaaattagcctactgccttcagacattgacaggtataagaagagatttcataagtttgatgcagaccagaaaggctttattaccattgttgatgttcagcgtgtattagagagtatcaatgtn

SEQ ID NO: 25029 - DNA, 472 bp, Homo sapiens
  misc_feature (1)...(472): n = A,T,C or G
cttcgcccatcctcccgcactgcaggactacggcacgagagacagctagctgacttgctgattaactttcaaaatacccagcttgggttatttttcttagaatctgttgctaagactggggacgctgttttcttttaccaagggaaatctacgttaatttcaaggcattcgaaatggggaaagactattattgcattttgggaattgagaaaggagcttcagatgaagatattaaaaaggcttaccgaaaacaagccctcaaatttcatccggacaagaacaaatctcctcaggcagaggaaaaatttaaagaggtcgcagaagcttatgaagtattgagtgatcctaacaagagagaaatatatgatcagtttggggaggaagggttgaaaggaggagcatgaggtactgatggacaaggaggtaccttccggtacacctttcatggcgagcctcatgctacatttgctgn

SEQ ID NO: 25030 - DNA, 392 bp, Homo sapiens
  misc_feature (1)...(392): n = A,T,C or G
nttttgcnccgcgctgcaggcgagagcatgcccttctggcttacacactgggtgtgaaacaactaattgtcggtgttaacaaaatggattccactgagccaccctacagccagaagagatatgaggaaattgttaaggaagtcagcacttacattaagaaaattggctacaaccccgacacagtagcatttgtgccaatttctggctggaatggtgacaacatgctggagccaagtgctaacatgccttggatcaagggatggaaagtcacccgtaaggatggcaatgccagtggaaccacgctgcttgaggctctggactgcatcctaccaccaactcgtacaactgacaagcccttgcgcctgcctctccaggatgtctacaaaattggt

SEQ ID NO: 25031 - DNA, 506 bp, Homo sapiens
  misc_feature (1)...(506): n = A,T,C or G
ngagaggtnnnnnnattcccggctgcttgattcggcacgaggtggtcctggcccagtacctttggtttcacagaagatctctgccaggcaaggccatcttagagattggagctggagtgagccttccaggaattttggctgccaaatgtggtgcagaagtaatactgtcagacagctcagaactgcctcactgtctggaagtctgtcggcaaagctgccaaatgaataacctgccacatctgcaggtggtaggactaacatggggtcatatatcttgggatcttctggctctaccaccacaagatattatccttgcatctgatgtgttctttgaaccagaagattttgaagacattttggctacaatatattttttgatgcacaagaatcccaaggtccaattgtggtctacttatcaagttaggagtgctgactggtcacttgaagctttactctacaaatgggatatgaaatgtgccacattcctcttgagtcttttgatgcan

SEQ ID NO: 25032 - DNA, 450 bp, Homo sapiens
  misc_feature (1)...(450): n = A,T,C or G
nttagcncccgctgtgccccgcgctgcaggaattcggcacgaggtcatcctcaccaagctcattacatctgccagggcctgcctcaagaagcccagcccagccttttcctgggatgcagtgaaatcccatccatgaactcgatgggcccctcctgtgccggccgagaggcacacactgccttcacgacgtgactgctggacctggccgagcttgaggccacatgtgaagggtcctgctgtggtcatcttggtgactcggtcacagcagctactggccaagatcagacgtcgctgaggggctgttcaccaccatcctcgttctccagggtcaaggaagtgttttaacatgtcgtgttttcgacttgaccttgtggtatttttcttggcctagttgtgtgccatggatattaaaaaaaaaaaaaaaaaaactcgggggggggcccggtcccc

SEQ ID NO: 25033 - DNA, 445 bp, Homo sapiens
  misc_feature (1)...(445): n = A,T,C or G
ntttgccccggctgcaggtctgacagctggtgcgcctgcccgggaacatcctcctggactcaatcatggcttgtggtctggtcgccagcaacctgaatctcaaacctggagagtgccttcgagtgcgaggcgaggtggctcctgacgctaagagcttcgtgctgaacctgggcaaagacagcaacaacctgtgcctgcacttcaaccctcgcttcaacgcccacggcgacgccaacaccatcgtgtgcaacagcaaggacggcggggcctgggggaccgagcagcgggaggctgtctttcccttccagcctggaagtgttgcagaggtgtgcatcaccttcgaccaggccaacctgaccgtcaagctgccagatggatacgaattcaagttccccaaccgcctcaacctggaggccatcaactacatggcagctgacggtgactt

SEQ ID NO: 25034 - DNA, 492 bp, Homo sapiens
  misc_feature (1)...(492): n = A,T,C or G
agtgcagggtgctgnnccatggaccccacnancaatcgcanctgcaggngnaatggacgttaatactgctttacaagaggttctgaagactgccctcatccacgatggcctagcacgtggaattcgcgaagctgccaaagccttagacaagcgccaagcccatctttgtgtgcttgcatccaactgtgatgagcctatgtatgtcaagttggtggaggccctttgtgctgaacaccaaatcaacctaattaaggttgatgacaacaagaaactaggagaatgggtaggcctttgtaaaattgacagagaggggaaaccccgtacagtggttggttgcagttgtgtagtagttaaggactatggcaaggagtctcaggccaaggatgtcattgaagagtatttcaaatgcaagaaatgaagaaataaatctttggctcacacnnnngaaaaacanaacaactcgaggtctgaaataaagtactcagcttcctc

SEQ ID NO: 25035 - DNA, 517 bp, Homo sapiens
  misc_feature (1)...(517): n = A,T,C or G
tgggnccngggnnnnnagnnnatatgacggctgtggaatttggacgagctcgctcctcggaagcctgactgggacctcaagagagatgtggccaagaagctggagaaactaaaaaagcggactcagagggccattgccgagctgatccgtgaaaggctgaaaggccaggaagacagcctagcctctgcagtggatgctgccaccgaacaaaagacctgtgactccgactgaggcatgccctgccccaccactcgcccatcaggcctgtcctgcaggggatggtcttgggcagggatgggggctaggcttgccatcacctccagtttggcttctgagcagagactccctgcccatcaagtctgaaacccccatggatgaggtcagctccttgtctgctgggtggcccctgccattctgaatggaggcagaaccagcaacaactcttggcgtgcctgtgtctgcacatgtggatgtacatatgtctgtatatatgtatatattttgaactttctaaaaa

SEQ ID NO: 25036 - DNA, 467 bp, Homo sapiens
  misc_feature (1)...(467): n = A,T,C or G
ctttgcccccgctgcaggaattcggcaccangcgaagttaaaccctcggagctggcctcggactgctggggcgttaccccttcggccacccccgctgaccatggcagtgtttcatgacgaggtggaaatcgaggacttccaatatgacgaggactcggagacgtatttctatccctgcccatgtggagataacttctccatcaccaaggatcagtttgtgtgtggagaaacagtcccagccccttcagccaacaaagaattagttaaatgctgaagaagccttcaggaatccaaatcctgaacatttggaatgagcccagatagaaatatcgaatgcaaagctactggcttcacagagacaaccatttatgatttgctgttctgtaagagtgtggattctttctatcaactgctgatatcatcttcaggaagcaagtccataacatgacatatctggattttgtgct

SEQ ID NO: 25037 - DNA, 468 bp, Homo sapiens
  misc_feature (1)...(468): n = A,T,C or G
agtgaggnnanantttagtatagaagtacgtattggagattccgcacgagccaagcccgtgattgctgccgtccatgggggctgcattggcggaggtgtggaccttgtcaccgcctgtgacatccggtactgtgcccaggatgctttcttccaggtgaaggaggtggacgtgggtttggctgccgatgtaggaacactgcagcgcctgcccaaggtcatcgggaaccagagcctggtcaacgagctggccttcaccgcccgcaagatgatggctgacgaggccctgggcagtgggctggtcagccgggtgttcccagacaaagaggtcatgctggatgctgccttagcgctggcggccgagatttccagcaagagccccgtggcggtgcagagcaccaaggtcaacctgctgtattcccgcgaccattcggtggccgagagcctcaactacgtggcgtcctggaacat

SEQ ID NO: 25038 - DNA, 463 bp, Homo sapiens
  misc_feature (1)...(463): n = A,T,C or G
cggagaaacantttcgttcgcctgcacgaattcggcacgagccgaataccgtgagaagaacgtggagcggattcggaggcagctgaagatcaccaatgctgggatggtgtctgatgaggagttggagcacatgctggacagtgggcaaagcgaggtgtttgtgtccaatatcctgaaggacacgcaggtgactcgacaggccttaaatgagatctcggcccggcacagtgagatccagcagcttgaacgcagtattcgtgagctgcacgacatattcacttttctggctaccgaagtggagatgcagggggagatgatcaatcggattgagaagaacatcctgagctcagcggactacgtggaacgtgggcaggagcacgtcaagacggccctggagaaccagaagaaggcgaggaagaagaaagtcttgattgccatctgtgtgtccatcaccgtcgtcctc

SEQ ID NO: 25039 - DNA, 473 bp, Homo sapiens
  misc_feature (1)...(473): n = A,T,C or G
natagacgccataggaactccgccgaggggagaagaggagtgttttcatgactgcagtgcctcatttgaggaggagccaggagcggactatgttgagaacaaatctaatgaagatgtgaattcctctgaactagatgaagaatacctactataactggaaaaaaacatgtcggatgaagagaaacagaaaagaagagaagagagcgctagactaaaggaggagggaaatgaacagtttaagaaaggagattatatagaagctgaaagttgttatagtcgagccctcgaaatgtgcccatactgcttgcaaaaggagaggtcgattctattttctaatagagctgcggctaggatgaaacaggacactaaagaaatggccatcaatgactgcagcaaagcaattcgattaaaccccagctatatcagggcaatattgaggagagcagagttgtatgagaagacggacaagctag

SEQ ID NO: 25040 - DNA, 549 bp, Homo sapiens
  misc_feature (1)...(549): n = A,T,C or G
aggagattcccggctgggaattcgcacgagctcctggcccggctgagcatctatagcaccagtgactgtgagcacggcatggccagcgtcatctccaggcttgacttcaatggtttctacacggagcgcctggagcgcctgtctgcagagaggagccagaaggccaccccccaagtgcctgtcctgcgggggcccccggctcctgcacccagggtcgcagtcaccgcacagtgagccctggctgtgacaggaaggaagggtgtggggtcagcagggactggtgcaaatgggtccagaattttcaaatcgaatgctctgtgttctgtctttgcagtttaaatataaagcaggaatgattgannaaaaaaaaaaaaaaaaaaaaaaaaaaaccctggggggggggccgggccccaattcccccttatgggggggggtttaaaaatcccggggcggcgttttaaaaaggtggggagggggggaagnnnnnntnnnttttgtnnggggtnnntttttttggggttntgtgggtttttttntggggggtgtttt

SEQ ID NO: 25041 - DNA, 473 bp, Homo sapiens
  misc_feature (1)...(473): n = A,T,C or G
ngggtgtctcccggctgcttgaattcggcacgagatggatcaactgataagttgccttatgtcaccatgggttctggctccttggcagcaatggctgtatttgaagataagtttaagccatacatggaggaggaggaagccaagaatctggcgagcgaagccatcgcagctggcatcttcaacgacctgggctccggaagcaacattgacctctgcgtcatcagcaagaacaagctggattttctccgcccatacacagtgcccgacaagaaggggaccaggcttggccggtacaggcgtgagaaagggactactgcagtcctcactgagaaaatcactcctctggagactgaggcgctggaagaaacagtccaaacaatggacacttactgaatggcatacacgggtggctggacgcggatctggaaggcggtgagcactgaggcccactgagacactcatgtggctagtgt

SEQ ID NO: 25042 - DNA, 397 bp, Homo sapiens
  misc_feature (1)...(397): n = A,T,C or G
nctagacccgcgttggaagaactctgcacgagcaaaaagggacagtcggaagaaattcaaaagaaaagaacccgccgagcagtcaaattccagagggccattactggtgcatctcttgctgatataatggccaagaggaatcagaaacctgaagttagaaaggctcaacgagaacaagctatcagggctgctaaggaagcaaaaaaggctaagcaagcatctaaaaagactgcaatggctgctgctaaggcacctacaaaggcagcacctaagcaaaagattgtgaagcctgtgaaagtttcagctccccgagttggtggaaaacgctaaactggcagattagatttttaaataaagattggattataactctaaaaaaaaaaaaaaaaaaccggca

SEQ ID NO: 25043 - DNA, 486 bp, Homo sapiens
ggaaaaaaaaattagaccgcctgtttgctccgcctgcaggaattcggcacgagaaggcatcgtctatgacactggaggcctcagcatcaaagggaagactaccatgccggggatgaagcgagactgcgggggtgctgcggccgtcctgggggccttcagagccgcaatcaagcaggaagccacttgacaaatgatcacagattcatcaggcagcagccgtgagtgttctcagcactcctccacctctagaggtgctgcggcctctagaggtggaggagcacctctagatttgaggggtgctgaggacaccccacccccactctggacaaagatccccctcccacaagagctccagcctggaggctccactgtgaacgcgaatgtcctgcttggccttcacatatccttgttggcctcttagaaaggaatacgcctctgtctgagccacagaatcaatcctcagggtaatgcatttacccagagaat

SEQ ID NO: 25044 - DNA, 549 bp, Homo sapiens
  misc_feature (1)...(549): n = A,T,C or G
gacgggatttgacgncctttgcncgngctgcacgaattcggcacgaggacactctttgtggccctttatgactatgaagcacggacagaagatgacctgagttttcacaaaggagaaaaatttcaaatattgaacagctcggaaggagattggtgggaagcccgctccttgacaactggagagacaggttacattcccagcaattatgtggctccagttgactctatccaggcagaagagtggtactttggaaaacttggccgaaaagatgctgagcgacagctattgtcctttggaaacccaagaggtacctttcttatccgcgagagtgaaaccaccaaaggtgcctattcactttctatccgtgattgggatgatatgaaaggagaccatgtcaaacattataaaattcgcaaacttgacaatggtggatactacattaccacccgggcccagtttgaaacacttcagcagcttgtacaacattactcagagagagctgcaggtctctgctgccgcctagtagttccctgtcacaaagggatgccn

SEQ ID NO: 25045 - DNA, 449 bp, Homo sapiens
aaaaaactagaccccgctgcaggaatctggcacgcgctgcctaccacgtgatgggattacagatgtgagccaccgtgcctagccaaggatgagatttttaaagtatgtttcagttctgtgtcatggttggaagacagagtaggaaggatatggaaaaggtcatggggaagcagaggtgattcatggctctgtgaatttgaggtgaatggttccttattgtctacgccacttgtgaagaatatgagtcagttattgccagccttggaatttacttctctagcttacaatggaccttttgaactggaaaacaccttgtctgcattcactttaaaatgtcaaaactaatttttataataaatgtttattttcacattgaaaaaaaaaaaaaaaaacctcgggggggggcccggaccccaattggccctatagtagtcgaattacaattcact

SEQ ID NO: 25046 - DNA, 526 bp, Homo sapiens
  misc_feature (1)...(526): n = A,T,C or G
nggggnnncgggggnnnnnnnnnnnnattatgcncggcctgangaattcggcacgcgaagcanataagatttaacaacccaagattaagaggccaggaagaggttagacgcaatgtgaaactgtcctcctaggataaggtttaaagtggctttttgggggctgggtgccgtggctcacgcctgtaatcccagcattttgggaggctgaggtgggcagatcacttgaggccaggagttcgagaccagcctggccaacatggcaaaaccccttctctactaaaaatacaaaaattagccagacgtggtggtgggtgcctgtaatccaactacccaggaggctgaggcatgagaatcgcttgggcccaggaggtggaggttgcagtgagccgagatcgagccactgcactcctgggcaacagagcaagacttcgtctcaaaataaataaataaataaagtggcaaaaaaaaaaaaaaaaaaaaaaacttgggggggggcccgggccccaattcccccttatggggagcc

SEQ ID NO: 25047 - DNA, 474 bp, Homo sapiens
  misc_feature (1)...(474): n = A,T,C or G
natttgacncgctctgcaggaattccgcaatagccgcgcgttccccggccgaccaggacaggtttatttgtatctatcctgcttatttaaataataagaagaccatcgcagagggaaggcgaatccccataagtaaggctgttgaaaatcctacagctacagagattcaagatgtatgttcagcagttggacttaacgtatttcttgagaaaaataaaatgtactctagagaatggaatcgtgatgtccaatacagaggcagagtccgggtccagctcaaacaggaagatgggagcctctgccttgtacagttcccatcacgttaagaatgtctgaggggtcaggcggtgctggcaagatggctgcacttgagaagatgacgtttcccaagaagatgacatttccagagaaaccaagccacaaaaagtacagggccgccctgaagaaggagaaacgaaagatacgtcggcagga

SEQ ID NO: 25048 - DNA, 501 bp, Homo sapiens
  misc_feature (1)...(501): n = A,T,C or G
gtgggatnccaccngttgatcgcctcgtttagaccggcctgcagaattcggcacgagctgaagccaagaacttgatcaaccagatgctgaccataaacccagcatagcgcatcacggctgaccaggctctcaagcacccgtgggtctgtcaacgatccacggtggcatccatgatgcatcgtcaggagactgtggagtgtttgcgcaagttcaatgcccggagaaaactgaagggtgccatcctcacgaccatgcttgtctccaggaacttctcagctgccaaaagcctattgaacaagaagtcggatggcggtgtcaagccacagagcaacaacaaaaacagtctcgtaagcccagcccaagagcccgcgcccttgcagacggccatggagccacaaaccactgtggtacacaacgctacagatgggatcaagggctccacagagagctgcaacaccaccacagaagatgaggacctcaaagtgcgaaaacaggagatca

SEQ ID NO: 25049 - DNA, 464 bp, Homo sapiens
tggagaaaaaattttgctcgcctgccctgaggaattcggacgagaatacagcctagagagctttcattttccaaagagtgtggggataaattagtgaatgcatatttttcaaaattaagaaaacagaacatataattttgaacgctgagaaaaataaaaatttaaaaactacactgtatacacggtatacctcaactgtgaataatagtagccatgtaaagtcagtcataattatgtaaatactgaatactgattttaccacaaatgattctataacgctgggaggatgggagaaaagagatgtgtgtgtgtgtaatggtggtgagccaatcaagatctgatatagaaaaatgcagaaaaaggagtatacacatgttttcttcggattaaaaaaactaataataaatcaccaagagtggtaaagttttaaatcaagatctgatatagaaaagtgcagaaaaagg

SEQ ID NO: 25050 - DNA, 489 bp, Homo sapiens
  misc_feature (1)...(489): n = A,T,C or G
cgcgccccccccnagnagnnnnnntttaganngccatagatccgcgctgcaggaattcggcacgagggacgaccttgttttgccagggttacccagactgcataccttaaccctcaacaagaaccgaatcactgatttggagaacctgctggatcacttggcagaagtgacaccagctctggagtacctcagtctgctgggcaacgtggcctgtcccaacgagctggtcagcctggaaaaggatgaggaagactacaagagatacagatgctttgttctgtacaagctgcccaacttgaaatttctggatgcccagaaagtaaccagacaagaacgagaggaggcgttggtcagaggagtcttcatgaaggtggtgaagcccaaggcttctagtgaggacgttgccagctccccggagcgccactacacgcccttgccttctgcttccagggaactcaccagtcaccaagatgaagtttcattcttgtc

SEQ ID NO: 25051 - DNA, 465 bp, Homo sapiens
  misc_feature (1)...(465): n = A,T,C or G
aggcgccccccntttgcttcgcctgcacgaattcggcacgagatttctcggactgcaattacaacagcttcaatccgtcgtcatagatggagaagagaaggtgctgagggtgtaaatggaggagaggagtctgtaaacctgaatgatgcagatgaaggattttcatcaggggcttccctcagcagtcagccaattgggaccaaaccatcctcctcttctcagaggggaagcttaaggaaagtagcaactgggcgttcagccaaggataaagaaacagcctctgccatcaaatccagtgagagccctcgagattcagtagttcgcaagcagtatgtacagcaaccaactgatcttagtgtagattcagttgagctgacaccaatgaagaaacacctgagcctgcctgctggccaggtggtgccaaaaatcaatagcttaagtctaatccggacagccagtgcttcn

SEQ ID NO: 25052 - DNA, 487 bp, Homo sapiens
  misc_feature (1)...(487): n = A,T,C or G
tggtggaanaanntttggacgcctgtttgcccgcctgcggcgagcccgagccccgagacggcattgaacctggccacatcccatgtaccgtgaacatccccttcacagacttcctgagccaggaggggctggagaagagccctgaggagatccgccatctgttccaggagaagaaagtggacctgtctaagccactggtggccacgtgtggctctggcgtcacagcctgccacgtggcactaggggcctacctctgcggcaagccagacgtgcccatctacgatggctcctgggtggagtggtacatgcgcgcccggcccgaggatgtcatctcagagggccgggggaagacccactgaagctgggcaggacacaggcgagctcatgtgatgccggccaccagcaatgcctggcctggtagctccgcttctgctttcaccaagagagtgtttcttcactcaactcangtggcatttggggtgacatc

SEQ ID NO: 25053 - DNA, 480 bp, Homo sapiens
  misc_feature (1)...(480): n = A,T,C or G
aaatttgatccccctnnnnnnnnncaactgatccgcgctgcaggaattcggcacgaggaacaagccgtacccaaagtctcgcttctgccgaggtgtccctgatgccaagattcgcatttttgacctggggcggaaaaaggcaaaagtggatgagtttccgctttgtggccacatggtgtcagatgaatatgagcagctgtcctctgaagccctggaggctgcccgaatttgtgccaataagtacatggtaaaaagttgtggcaaagatggcttccatatccgggtgcggctccaccccttccacgtcatccgcatcaacaagatgttgtcctgtgctggggctgacaggctccaaacaggcatgcgaggtgcctttggaaagccccagggcactgtggccagggttcacattggccaagttatcatgtccatccgcaccaagctgcagaacaaggagcatgtgattgaggccctgcgcag

SEQ ID NO: 25054 - DNA, 539 bp, Homo sapiens
  misc_feature (1)...(539): n = A,T,C or G
aagagattcgacgcctcgccggctgcangaattcggcacgaggagaagcccaggcctgagatttcatctgctctccttcctggagcccagaggagggcagcagaagggggtggtgtctccaaccccccagcactgaggaagaacggggctcttctcatttcacccctccctttctcccctgcccccaggactgggccacttctgggtggggcagtgggtcccagattggctcacactgagaatgtaagaactacaaacaaaatttctattaaattaaattttgtgtctcaaaaaaaaaaaaaaaaaaaaacctcggggggggcccgggcccccattcccccctatgggggggggaataacaatccccgggccgcggtttaacaacgtggggactggggaacannnnnnnnnnnntnntnnntntntntttnttttttttnttnnntttntttttttttttcctttnnnttnnnntttttttttttntnnttnnnntttttttttttttttntnnnnntttttttcctnnnttnttnttg

SEQ ID NO: 25055 - DNA, 480 bp, Homo sapiens
  misc_feature (1)...(480): n = A,T,C or G
nattgaccnccnttngnnaannnnnnnattgacccgcgctgcaggaattcggcacgagtaaagaccaaaattcttggcataataatcagctacatacaaatcacatatagtttaatcttttttaatgaaaaaaaatcatgtttaaaatggcaaaagcccatcttatacacttttatatagctgcaaaaaaatttatatctgtacagatctaacactacgacactcagtattcattttattgaagcatgcaagtaaagcactttttctaatttatatagaggtatctaattaacacagcacattgtactaatgactaggagtagcagctttttcttctctccctctatgaattcttataatgtccctttttctgtaagtttttgagaggcaattggcaatttaggaggcagcagggtctgttttggtcaaatcttgaatttcgttgttgcactctagtgactgatctttgggaatgtcttg

SEQ ID NO: 25056 - DNA, 464 bp, Homo sapiens
atttgccctcgctgcacgaattcggcacgaggactgattcaaagggtcatttatgacctttcacaagtcccacatcctgcccaatggccaggtcttgggatgctgttgcaagatggttctgtgactccatgtgactgtctgatgattgccccagctggggaaaaggctcccatgtctctttctcataaaaccagtgggcaaggccgggcgcagtggctcacgtctgtaatgccagcacttcgggagaccaaggtgggcggatcacctgaggtcaggagttcaagaccagcctgaccaacatggtgaaaccccgtctctacaaaaatatggaaattagctgggcatgacggcgggtgcctgtaaccccagctacttgggaggctgaggagggataatcagttgaacccaggagggtgaggttgcagtgagccgagatcgcgccactgcactccagcctgggtgac

SEQ ID NO: 25057 - DNA, 466 bp, Homo sapiens
  misc_feature (1)...(466): n = A,T,C or G
nttagaaccgcgctagatcagcgctgcaggaattcggcacgagccatgcacttcagggcccccatccgccttcctgagcatgtaacggtgcaggtggtggtcgtgcggaaacgggaaggcctgctgcattccagccacatctcggaggagctgaccacaactacagagatgatgatgggccggttcgagcgggatgccttcgacacgctgttcgaccacgccccggataagctcagcgtggtgaagaagtctctcatcacttttgtgaacaagcacctgaacaagctgaatttggaggtgacggaactggagacccagtttgcagatggcgtgtacctggttctgctcatgggccttctggaagactactttgttcctctccaccacttctacctgactccggaaagcttcgatcagaaggtccacaatgtgtccttcgcctttgagctgatgctggacggaggcn

SEQ ID NO: 25058 - DNA, 492 bp, Homo sapiens
  misc_feature (1)...(492): n = A,T,C or G
agggggnnnnnnnaggagnnnnnntttgatnngcctgatcgaccagcgctgcaggaattcggcacgagcagagttggtggacatcgagaaggccattgcccactacgagcagtctgcagactactacaaaggcgaggagtccaacagctcagccaacaagtgtctgctgaaggtggctggttacgctgcgctgctggagcagtatcagaaggccattgacatctacgaacaggtggggaccaatgccatggacagccccctcctcaagtacagcgccaaagactacttcttcaaggcggccctctgccacttctgcatcgacatgctcaacgccaagctggctgtccaaaagtatgaggagctgttcccagctttctctgattcccgggaatgcaagttgatgaaaaaattgctagaggcccacgaggagcagaatgtggacagctacaccgagtcggtgaaggaatacgactccatctcccggctggacca

SEQ ID NO: 25059 - DNA, 483 bp, Homo sapiens
  misc_feature (1)...(483): n = A,T,C or G
aggagttccnnnagaagannnnactgatcgcgcgctgaactcgctcgagagagagagagagagagagagagagagagagagagagagagagagagagagagagagagtgcgagatacagagagagagagagagagacagagagagagacagagagctactgaaagaggctgggtacgctacactactggagctgtatgagaaggccattgacatctacgagcaggtggggaccaatgccatggacagacccctcctcaagtacagcgcctaagactacttcttcaaggcggccctctgccacttctgcatcgacatgctcaacgccaagctggctgtccaaaagtatgaagagctgttcccagctttctctgattcccgggaatgcaagttgatgaaaaaattgctagaggcccacaaggagcataatgtggacagctacaccgagtcggtgattgaatacgactgcatctcccggctggacc

SEQ ID NO: 25060 - DNA, 492 bp, Homo sapiens
  misc_feature (1)...(492): n = A,T,C or G
tgcgggcncgcccnattggacccccctnattgcaccgccctgcggaattcggcacgagcttacttctaaacgagcaggagactggtttaaagaagaactccggcttttgggtggtctggatcatattgtagataaagtaaaagaatgtgtggatcatttaagtagagatgaggatgaagagaaactggtagcctcactatggggagcagagagatgtttacgagttttagaaagtgtaactgtgcataatcccgaaaatcaaagctacttgatagcatataaagattcccaacttattgtttcatcagctaaagcattacagcattgtgaagaactgattcagcagtacaaccgtgctgaggacagcatatgcttagctgacagtaagcctctgcctcaccagaatgtaactaaccatgtaggcaaagcagtggaggactgcatgagggccatcatcggggtgttgcttaatttaactaatgataatgagtg

SEQ ID NO: 25061 - DNA, 485 bp, Homo sapiens
  misc_feature (1)...(485): n = A,T,C or G
natttgcaccgccnatgggnnaaaanncnnnattgaccccgcgctgcaggaattcggcacgagtctggtttcttcattttcttccattacttaggaaagagtggaaactccactaaaatttctctgtgttgttacagtcttagaggttgcagtactatattgtaagctttggtgtttgtttaattagcaatagggatggtaggattcaaatgtgtgtcatttagaagtggaagctattagcaccaatgacataaatacatacaagacacacaactaaaatgtcatgttattaacagttattaggttgtcatttaaaaataaagttcctttatatttctgtcccatcaggaaaactgaaggatatggggaatcattggttatcttccattgtgtttttctttatggacaggagctaatggaagtgacagtcatgttcaaaggaagcatttctagaaaaaaggagataatgtttttaaatttcatta

SEQ ID NO: 25062 - DNA, 470 bp, Homo sapiens
  misc_feature (1)...(470): n = A,T,C or G
nattgcccgcctgcaagaattcggcctaggtcctcgctgtgtgggctgagcgctgtgtctctcctggcatgctacctcaagtcaagggcctctgtctgctcctgccatccccgcagtgctggacatacatgctcagtgggaagcgtctgttgatttgagggcaaccccctcctcttttcaaaacctatgaaccacctgctttgcaggcaaactcccccgctggccagcgttgaaatggaagccatggaggctctgccggtgacttgggggaccagcagcagagatgaagacttggaaaactgctctcaccacctatgaaactcggggaaaccagcccagctaagtccggagtgaaggagcctctctgctttagctaaagacgactgagaagaggtgcaaggaagcgggctccaggagcaagctcaccaggcctctcagaagtcccagcaggatctcacggactggcgggt

SEQ ID NO: 25063 - DNA, 531 bp, Homo sapiens
  misc_feature (1)...(531): n = A,T,C or G
aagatggggnnntttcgtcggctgtangaatncngcccnattagcaccgcctgcangaattcggcacgaggtcatccttacataccctcacgaaggtgccaaagaagagtctcaagcctagaacgccacgttgtgccgctcctcagatccgtagtcgaagcctggctgcccaggagccagccagtgtgctggaggaagcccgactgaggctgcatgtttctgctgtacctgagtctcttccctgtcgggaacaggaattccaagacatctacaattttgtggaaagcaaactccttgaccataccggagggtgcatgtacatctccggtgtccctgggacagggaagactgccactgttcatgaagtgatacgctgcctgcagcaggcagcccaagccaatgatgttcctccctttcaatacattgaggtcaatggcatgaagctgacggagccccaccaagtctatgtgcaaatcttgcagaagctaacaggccaaaaagcaacagccaaccatgcggcagaactgctgg

SEQ ID NO: 25064 - DNA, 467 bp, Homo sapiens
atttgcccgcctgcaggaattcggcacgagattggctggtccaagctctgttattgagtatacaaggaactgatttttcttatgttagcactaagggcaaaaaccaatatttataatgtaagcactatccaggtaaaacactggcccaagatttggtaaagagatttcattgcaatgtaataactacagttttttacaaattggaacagctttggtgtgtcgtaatcaagggttttttttgtttgtttgtttcaaataagccatctgattgtggtgactggggcccatgtccaagacaattcctggcatattctgtcaccctcccgtggggcgatcactgtgtggggaccccattccccagttaaagtgtgtctctgtaccttacaacagcgattcaggacccaagtgtgaacaacactcagcccgccctctggagcgtgtgctgtctttagggccctacccaaagt

SEQ ID NO: 25065 - DNA, 541 bp, Homo sapiens
  misc_feature (1)...(541): n = A,T,C or G
aggagatcgannccnnnnattcancggctgcangttctgttccagtcacattgccatcactcttgtactgcctgccaccgcggaggaggctggtgacaggccaaaggccagtggaagaaacaccctttcatctcagagtccactgtggcactggccacccctccccagtacaggggtgctgcaggtggcagagtgaatgtcccccatcatgtggcccaactctcctggcctggccatctccctccccagaaacagtgtgcatgggttattttggagtgtaggtgacttgtttactcattgaagcacatttctgcttccttttatttttataggaatagaggaagaaatgtcagatgcgtgcccagctcttcaccccccaatctcttggtggggaggggagtacctaaatatttatcatatgcttgcccttgagtgcttgttagagagaaagagaactactaaggaaaataatattatttaaactcgcacaaaaagagacaaagaaactcgagggggggccgggtacccaatccccactaag

SEQ ID NO: 25066 - DNA, 499 bp, Homo sapiens
  misc_feature (1)...(499): n = A,T,C or G
aggaggagaaanannnantttgatcgcttgatgaaccttgcacgagaagaaggcattgaagttaagatagactatatagttagatactggacacacacatggattttgaggaatgatgagagcttgtttatgtatgtacattttagcagttaacatgtttggagtaaattgaatatttataaaacaacagtaattgccatgtaggtttactgtcatagtggaagatgattaagttgatggtacctacaggtattttgctatgaaaatgttttgacaaacaggatgatcgcgtaatttatgttccaagctctagtttgagaatggaagaatgtggtgaatttttgccaactgaacaggcataaagcgctgataataaaggacttggccttaaggtaagaggctggtagcatttctttctaaacgtgtaagaggttatttatgtgacacccagcgttttggaaaaatgggtgtttgtttagaacaataatttggagggaag

SEQ ID NO: 25067 - DNA, 462 bp, Homo sapiens
  misc_feature (1)...(462): n = A,T,C or G
nttagaacgcgctgtgagagctctgcacgagagcacctcgtatgtgccacgcactatgctaagcactttacataagttaggattaatccctgcaagaatcctataaagaatgttactagcatttacacttcccaaatgaaggtaccaaagctcaaacgcactgttgtgaagctgtttccttcagatttaggttatgtgggatgatgtgggattgaagaggaaagaaaggtgggattatccccctaggaagactttcaggcctgacttcataggaattcatccatcttatcatgtggagtttatctcaccctgctgttgcaggatgctatttgcatgtgtccccaagtgatgttttttctttggggagtaggggtttggcttcctcattcatccctcttgctaaaagaggagatagttgatgttgcatctaaagatgctataagacaatgaaagtttgatgtn

SEQ ID NO: 25068 - DNA, 481 bp, Homo sapiens
  misc_feature (1)...(481): n = A,T,C or G
ggagtcccnnagaatntnnnactgaccgcctgtggaattccgctcgagccgtactggtagtcgctggcccgagttagaggccagctgagaagtcttcgtgcttcagatttgtttacctacaaaatgcttcggtatccatatttttgtagaatgtataaagaatgcctttcatgttggttggaatctggcatacctaatttaggtgtctggccaaaaagaatacatactacagcagaaaaatatagagaatatgaagcccgggagcaaacagatcaaactcaagcccaggagttacacagatctcaagatagagattttgaaactatggctaaattacatattccagtaatggtggatgaagttgttcattgtttgtcaccacaaaaaggacagatttttctagatatgacatttggttcgggagggcacacaaaagccattctgcagaaggagtcagatattgttctctatgccttggaca

SEQ ID NO: 25069 - DNA, 473 bp, Homo sapiens
  misc_feature (1)...(473): n = A,T,C or G
ggcgaggnttttnaactgaacatagaggcattcggcacgagcagaaagtggacggcttcacccggaaatcggtccgcaaggcgcagaggcagaagcgctcccagggctcgtcgcagtttcgcagccagggcagccaggcagagctgcacccgctgccccagctcaaagatgccacttcaaatgaacaacaagagcttttctgtcagaagttgcagcagtgttgtatactgtttgatttcatggactctgtttcagacttgaagagcaaagaaattaaaagagcaacactgaatgaactggttgagtatgtttcaactaatcgtggtgtaattgctgaatcagcgtattctgatatagtaaaaatgatcagtgctaacatcttccgtacacttcctccaagtgataatccagattttgatccagaagaggatgaacccacgcttgaggcctcttggcctcacatacaagtggta

SEQ ID NO: 25070 - DNA, 474 bp, Homo sapiens
  misc_feature (1)...(474): n = A,T,C or G
agggcggggtnnnttctggactgcatggctgtccgaattcggcacgagattaaagagagcagatataaatttcctcttgataattttggattgttttggcagatctcttgccggatctgattctagtaccactgctttgtgagctatatcgtggctgacatagagctcaagtagggtagaagtgtcggctcggcagattcttgtttatcattgctgttcacttgtgcttgttcaattagtgttatcttctatccacagttcctttggtgggatcttttaaagccaattgtccattttgtgaggattagtttagttaaaaattagattatataatctctaaatccacttaatagggcatgtatgaactgcaattcaagaaaggcgagtgagccccaaagggtgccactgttgaccccttcgtgttagccatgaagctcctatgcctcccttcaaatacttgaggcctatgtgatg

SEQ ID NO: 25071 - DNA, 482 bp, Homo sapiens
acggccccaattcgccatcttcgccgcgctgcaggaattcggcacgaggacaggcggcagcacagcacctgcacgaacacccgccgaaactgctgcgaggacaccgtgtacaggagcgggttgatgaccgagctgaggtagaaaaacgtctccgagaaggggaggaggatcatgtacgcccggaagtaggacctcgtccagtcgtgcttgggtttggccgcagccatgatcctccgaatctggttgggcatccagcatacggccaatgtcacaacaatcagccctgggcagacacgagcaggagggagagacagagaaaagaaaaacacagcatgagaacacagtaaataaataaaaccataaaatatttagcccctctgttctgtgcttactggccaggaaatggtaccaatttttcagtgttggacttgacagcttcttttgccacaagcaagagagaatttaacactgtttcaaacccg

SEQ ID NO: 25072 - DNA, 501 bp, Homo sapiens
  misc_feature (1)...(501): n = A,T,C or G
cgcggttttttactggctctcgtggcattcggcacgagctccacggaaaataatggccctcanacggtgtggactggaccctgggcacctcacatgaacagtgtgcatatgaaccagcttggctgatgaggatcagcttgttagcctgcagattccttttcatttggaggaaatcacaagtggccgaaaaaaaaaattatgctcccaaatcattctactgatgtgcttgactgaagtgtgtaggctttttgcagaagatcttactaactgacctattttctgtgaacatttgtgactgcccattccccatcatcatccgttttaccttagttagcatttttcttatcatttttctttttttctttccctcttcccctttggacataactttctgttgaagctgttctttggcttgttggnttagtactgtaaactgcttctgagcaaacacggaaatttagcaaaattatgtaaacttgatcctgaagtttagaatggcaa

SEQ ID NO: 25073 - DNA, 470 bp, Homo sapiens
aatggaccgccctgcggaattcggcactagccgccgcgatattcagtaaaccactgggagtccggcagcatggaggcagcgcgccctcccccgacggcagggaagttcgtggtggtcggcggcggcatcgcgggcgtcacttgtgcggagcagttggctactcactttccatcggaagatattctcttggtaacagcttctcctgttattaaagcagttacaaatttcaagcagatttctaaaatattggaagaattcgatgttgaagaacaatcaagtaccatgttaggaaaacgctttcccaacattaaggttatagaatctggcgtaaagcaactgaagagtgaagaacactgcattgtaacagaagatggcaatcagcacgtatataagaaactctgtctgtgtgctggagctaaaccaaagttgatatgtgaaggaaatccttatgtattaggaatccgtgatac

SEQ ID NO: 25074 - DNA, 487 bp, Homo sapiens
  misc_feature (1)...(487): n = A,T,C or G
cggggttaaaaggattgatcccctgggannnncnctgatcgcctgcggaattccgcacgagcgttctttgacccaggcacacagctctgattttccatcagaaatcctctgaaactgagtgcagaagagagtagagtggtgtgtgcattgacagtatgggctagagggtgtttctttcctaccaactcactctgttctcctcccaggatgacattattgacgatgtggagagttttgttgctgccgcggagatcctgaaagagagaggcgcctataagatctatgttatggccacccacggcatcctgtctgcagaggcccctcgcctgattgaggagtcctccgtagacgaggtggtggtgacgaatactgtccctcatgaggttcagaagctgcaatgtcccaagataaagactgtggatatcagtttgattctttctgaagccattcggagaatccacaatggagagtccatggcctacctttt

SEQ ID NO: 25075 - DNA, 487 bp, Homo sapiens
  misc_feature (1)...(487): n = A,T,C or G
atttgaaccccgctcaggaannnnattgaccccgcgctgcaggaattcggcacgagccagggccgggtaaccactgtggacctgcgggatgagagcgtggcccacggacgcatagacaatgtcgatgctttcatgaacatccgcctggccaaagtcacctacacggaccgttgggggcatcaggtcaagctggatgacctctttgtgacaggccgcaatgtccgctacgtccacatcccagatgacgtgaacatcacctcgaccattgagcagcagctgcagattatccatcgggtgcgaaactttggtggcaagggccaaggccggtgggaatttcccccaaaaaaccccncccgaggccctcagcaagccctggccccaactcggagtcctccagtgatctccggagctagttccctgccctcacaccctgtctggtacccgagaagaaagcagggccaggccagaagctggtgtccaacagaca

SEQ ID NO: 25076 - DNA, 215 bp, Homo sapiens
  misc_feature (1)...(215): n = A,T,C or G
gggggtncnnnaagggagnnnnnntttgannnccntaatcgaccgcgctgcaggaattcggcacgagacaggctcagcctcctcattgtctaaatgaggcctaaatgtgtgaagtgcgatttctgcttttgtgtaccccaccaccccattaccacagctgcctttgtgtgtttgtgtcaataaaaagccaaaccctgaaaaaaaaaaaaaaaaaa

SEQ ID NO: 25077 - DNA, 483 bp, Homo sapiens
  misc_feature (1)...(483): n = A,T,C or G
ggaggtnnnnnaggagntnnncctgacccgcctgtggaattcggcacgagctgccaccctgcttaatgccttccccacagccccctctccccggccacccaggaaggccccaaacctgactgcccaagctgccccaaggggtcccaagggacctccattgccaccaccccctcccctacctgagtgcctgaccatctcacccccagttccatcagggcccccttcaaaaagcctgctggagacacaatatcaaaatgtgagggggcgccccatattctggatggaaaaagacatctgaggccatccagggcaaggaactgtctttctggttcaatagactgccccgacagtctacaagcctcagcccactgaccatacctcagcccctagcccctggggggcagctttaacctgggcatgtttcctgggtaccagtggggccaggaggtggctctggctcaaagccgtcagtgtggctgaata

SEQ ID NO: 25078 - DNA, 504 bp, Homo sapiens
  misc_feature (1)...(504): n = A,T,C or G
ngagagcnnnattgacgctgtggtggaacggctgcangaattcagcacgagctgacacgtggctcaccgctgtcatttgggggatggaatgaacagtcactgttctatagcatcctcctgtgctcttacctaaggaatctaaattgtcctagccttccattgctatgcactgaatgaggactactctcgtgtgtgtgtgtgtgtgtgtgtgtgtgtgtgtgtgtgttggatctactaacatgtttagcacatggctctgacagggtggccatgagcagatgacaccagctcttgcttgggtggaagccacactgcagtttgcagtttagcctttggtgtctcagtggcctcttgcttattccatgctttttatatcccattctctctctgtgccctcctgcaatggcagccttgacacaatgcctggtgccctcatccttgctttactctggaaagtgtggagatggagaggatggtgcatttacagcgctttcttacctgtcg

SEQ ID NO: 25079 - DNA, 486 bp, Homo sapiens
  misc_feature (1)...(486): n = A,T,C or G
nttttgcaccgcgctgcaggaattcggcatgagccaccttctgacagctccagctaatgggactgccagcaggctagacatccttcgccggaatgtgcagcgcttagttctgtgcccgggaggggcttctctctcttttgggattggagtgtggcattgccgccagaaagcctgcagaattccgggttgtgcagccaagcaggaacggtgtacctttctagacccatcctcttgcaatcttggaccctaagaaaagatgtggagtgggctgctacctcctggcctaaatgaaagtgacgctgagtcaaactcggaagatgaagctacgttggagaactctggacttaacttacaggaagataaagaggatgagagcatcagaaaaacagaaatcatagatttctcaacagatgaaccanaaactgaaacagagtcgaatgtaaatgcctatgaagagtgtccttctggaatcccatagatatgtgg

SEQ ID NO: 25080 - DNA, 480 bp, Homo sapiens
agccaacttgcccgcctgctgaattcgcctcgaggaacctattgcgtactgtacaacttcaagcctcgaaatcagataggcaccaccaacctcatttcctgtttcaccttgattttctgtgataccaaaatctcagcttcacaaagtcattgaaagtgttgggtcatgaaggtttaccatcaattcaagtaatcataaatggcaaattctgcaaaagcagaagaatatgaaaagatgtctcttgaacaggcaaaagcgtcagtgaattctgaaacagagtcttcattcaatattaatgaaaacacaacagcttctgggactgggctttctgaaaagacttctgtctgtaggcaagtagacatagcaagaaagagaaaagagtttgaagatgatcttgtaaaggaaagttctagttgtgggaaagacactccatccaagaagagaaaacttgatcctgatattgtcccagaggaaaaagaa

SEQ ID NO: 25081 - DNA, 537 bp, Homo sapiens
  misc_feature (1)...(537): n = A,T,C or G
ggatgtttcgccggctgaggaattcggcacgagcggcacgagcgcagggcccatcaattgctacatagagatacacatggaaagagggtttaacagaccctctctaggacacaactgtttctgctttgagcaataatttctaacctgaggccaacatgtcccactgccccttgggttggctggggttgtttcctgagccaagcatccaatatcatgccccactcaatggcctagaagctgcctgtactttggggaaacagatggagctcttgggcccagccagctgggcctgggacttctgcctctgccgcctccagagtggcctggcagctttgccagaggctgtggagcgagggtagtangagcttttcccagagtgctgtgacttgcatgatggattctangctgtggcaagggctgatttctgggatgggnggaggttggaaaattatttttatgaaacagagggaagacnnttattgtgtatttttggtannataaanggcaactaaagcaaaaaaaaaaaaaaaaaaaaac

SEQ ID NO: 25082 - DNA, 427 bp, Homo sapiens
  misc_feature (1)...(427): n = A,T,C or G
natttgccccgcgctgcaggaattcggcacgagagacagagcccaggcaacacagccacactctgaactgacactcggaccaccaccaccaaacagaaggcaacgcaggacctgcagactaaggctaacgaggctgattgcctgacaaaacagaaaaaaaagaaacattcttcagggaattttagcagaacacagagtctcccaacataaaacagacagtcctcactgcacagcagttcagaactgtaaaaatgaccttccaacctgaaactgccatgtgctgttcataatcattaatgggtaaaattgtgatttttttcctgtcttttgaaaattgtcaaaacattgataatcttgtactgttagaaatgtataaggaaacaataaagtaaatatttttgtacactgtaaaaaaaaaaaaaaaaaa

SEQ ID NO: 25083 - DNA, 507 bp, Homo sapiens
  misc_feature (1)...(507): n = A,T,C or G
agacaggcnnnattgacggctgttttggaacggcctcagggaatcacacaccaagccccacaaagcccctaaaggaggatttggcctttcaaactctaggcactaacgtaactgtagggtctgcccacatgttgaagtattgccaagagaggactcagtgtgaagccttcatcaatagcaagcactttttaagggagtaaaagttgttaaaggcaaacgtcaaaaacatgaaagggcattcaggatgtcccatggcaataagaacaggggaaatctcagagcacaattcagcaggatgagagaaggggaaccagaagctccggagtcattgctcacttcagagtttgaattcgtgagctgacaaagagtaacatgctctttctacacagacatggacaatttagacagtattggaaaattacttgaagctggattttcatgaagttctgaatgagtgtaaatgttttttaggatactataaagagtgatgtttttcataagcaccat

SEQ ID NO: 25084 - DNA, 482 bp, Homo sapiens
  misc_feature (1)...(482): n = A,T,C or G
ctgggtaaaagaactgatcgcctcggaannccgcctgatggccgttgacacagacccggaggacgaaaacttgtatgagaagaacccagactcccatggttatgacaaggaccccgttttggacgtctggaacatgcgacttgtcttcttgtttggcgtctccatcatcctgggccttggcagcacctttgtggcctatctgcctgactacaggatgaaagagcggacccgccgcgaagctgagaggcttgtgaaatacccagaggccaatggccttcccatcatggagtccaactgcttcgaccccaacgagatccagctgccagaggatgagagaccagtagctaagtggggctcaagaagcaccgccttccccaccccctgcctgccattctgacctcttctcagagcacctaattaaaggggctgaaagtctgataccctatagaagaatgaattaacaataaaagaaacaaccctgg

SEQ ID NO: 25085 - DNA, 489 bp, Homo sapiens
  misc_feature (1)...(489): n = A,T,C or G
gtgggtaannagaatcttatcccttcgaaannnctcggtctgtcgtgcgagaaancanangaggcttatatataccgctcagctaagagcggggcccgaaagcccatgggtcatgaattgagtcacttcacaagccactgggcgatgctaaacaatgtcttgaccggaagaacagggctaaacctgactggaggaaatcacctctttcttttggacatgcactggaatccatcacttgaagatcaagcttgtgaccgaatttaccgagtagggcagcagaaagatgttgtcatacacagatttgtttgtgagggaacagtagaagaaaagatcttacagctccaagaaaaaaagaaagatttggccaaacaagttctatcagggtctggagaatctgtcaccaagctcaccttggctgacctcagagtcctttttggcatctaacctcctgtggataagggctcaaaataacaccattgctggtttgtg

SEQ ID NO: 25086 - DNA, 508 bp, Homo sapiens
  misc_feature (1)...(508): n = A,T,C or G
ggggggggggnnnttttcccggctgcttgaattcgccacgaggtgaaccactgtgcctggcctgtttgtttgtttgtttaaaacatttctccatcactcattccaggtcccagagcaaactctctctgctctcggagcctgtgacactggctatgtgctccacagtttcagtcccaggtcatactctccaacagttttcagagctccatatatatgtagatgccatcctttctaaaaacttctcacgacctcctggaatattcctattgatctcattttatttagcatcagctcaagaaactaagtcttagtgcacagtatcacaacaaagaaaaagctttgtttttataactggtaaaaacaagaaaagattctcatcaaaatgaaaatataaaattaatcatttctcaccnaagagtatgcctgggagcctccagctgttaaaagacaatgctattactacttcttatcaaaaatctgtaatgccctgtgatttttatgatacttc

SEQ ID NO: 25087 - DNA, 507 bp, Homo sapiens
agcggggtttaactggaacgctggctcgtggaattcggcacgagtgtttgaaactgttttacccacattccaatgaacttgagaaagcccaaaagaaaatttggatttaagccagcaagattatggatgggtgaaattttcctctttaggttcttttaaaacaagttatactgttcatactagattttccatatctagttgatttactagctccatgaatattttcagatatttctttattatctatttctgctgaccttccttccgtatgtccctgtgacttcaaagagaagaaaactttatttttctataaaacattaatcaacaacaaaacattcaaaaacattgaatgaagaaaaaagtaagcaagattagaagctgatagaggaaacactaaatcatgtgaaaaatgtagagtataaatagcgtgaatttttaaagttcaaatctgttcaacttcggtcccatctgattaagtctgaaaagaaaatattctctctctgactt

SEQ ID NO: 25088 - DNA, 443 bp, Homo sapiens
  misc_feature (1)...(443): n = A,T,C or G
attgacctgcgtgacgattcngacgagaaaaaagaggtaataggactttcgtattctcctatcatgaatatgacttgcatttctaaaggccatttgatcctttttgtgtgaggagtttatatgaaatcctcatgttcttttaaatttcccaactaaattgtgtgttcctacgaataccttttaggtatgcacacatacacagagcatcttattttatactggtgaaatctatgttgtttaggatacagataatgtcattgtatttatcctatcagaataggcttttcccctatttcaaaatagatgctattggctttattttttatttttaaattttttttaaacacggtcttaccatgttgcccaggctggtctcaaactcctagatgcaagcaatcatcccacctcgatcacccaaagtgctgggagtacaggcagaggan

SEQ ID NO: 25089 - DNA, 486 bp, Homo sapiens
  misc_feature (1)...(486): n = A,T,C or G
gtgcgttannagaacctcgatcgccttcggaattccgcttggcagacttgcagctctgcctggaagaaatgcagctgcttcaagtccagtccccttctataaaaatgagccttgagtcctacgggaagagctatggtagcatggtccccagcaatgagaactgtcgcaagacttatgataccactgtggatgacaatgagagctattacaagagttacaccagcacccagaccagcagcaagagctttctcaagagctatgacagcagcaccagtgccagtgaggcctatgggaagagttactgcactaccagcaacagcagcattacctataagaagagttacggcagcaccagtagctctgacacctgccagaagagttttgtcagcagctgcactgacgaggaacctgctgagcctgaagacatggagcgctttgaggaaatggttgtgaaagtgctgatcaagctgcaggcggtgcaggccn

SEQ ID NO: 25090 - DNA, 487 bp, Homo sapiens
  misc_feature (1)...(487): n = A,T,C or G
ngcgggcnaatcgacgtctgcagacatcggcacgaggaaggatccctcacagcccagctcgggaagtggacagactgggcgtcatgacccttttgccaccttccagagaagaggtacgagatgacaagacaaccataaagtgtgaaacctccccgccttcctccccgagagcccttcggttagaccggctgcacaaaggggcgctgcacaccgtcagccacgaggacatcagggacataaggaactccacaggctcccaggatggtcccgtgagcaaccccagcagtagcaacagtagccaggactcgctccacaaagccccaaagaagaaaggcattaagtcctccattggccgcttgtttggcaagaaagaaaagggccgacctggacaaactggcaaagaagcattaggacaagctggtgtttccgagacggataactcatctcaggaatgcctgggagctagcannatngngggacaagctga

SEQ ID NO: 25091 - DNA, 503 bp, Homo sapiens
  misc_feature (1)...(503): n = A,T,C or G
gagaggtnnnnnattgacggctgttggaatcccctgagggatactgcctgcccctaccctggacttgcctctgcacaccctccagagacaacaggtaaaacagggccacatatatgctgatggagccttcccaagttgtgcttgagccaggaggcctgctagggttaggaggtccttaggcctctgagaagctctgaagaactctctggaagcccctgggcccagtacctagctggctctgtgagggtgctgactggcttcagcaagttagaactagccaaaccaggaccctgtccaatctttgacaattgggagctgccaagagtgaagggaagagacagcccaggatactggcacagaggtagtctcactgcttgaactaggctgagcaatctgaccctatgggtctaggacacagttcctgggaacatcacattcctctgcccttcctgcaggcaggaacaaacagggctgccttctggccttgtaagacccttattgca

SEQ ID NO: 25092 - DNA, 473 bp, Homo sapiens
  misc_feature (1)...(473): n = A,T,C or G
attgaccgcctgcagaattcgttggagagccttcccgccggcagctgtgcgcaccaaagactcgggagaactggaaaggctgtctggggtcttctgactgcaggggaaggatgtactttccaaacaaatgatacaaccctgaccaagctaaaagacgcttgttaaaggctattttctatatttattgttgggaaaagtcactttaaagacttgtgctatttggaagcaaagctattttttttgtcagtggaatgcagtttttttactattccatcatgaggaacaacatagattccatgatctttttaatgacagtacagactgagatttgaaggannnncgcacaaatctgtaaaacatagaccttcgctttatttttgtaagtatcacctgccaccatgttttgtaatttgaggtcttgatttcaccattgtcggtgagaaaattttcaataaatatgtattacccgtctg

SEQ ID NO: 25093 - DNA, 507 bp, Homo sapiens
  misc_feature (1)...(507): n = A,T,C or G
cggatgacccgggccttccccccccaatggagcgtcctgcggannattgacacgcggtgcaggaattccgcacaaggtccatctgaaagtggcattcacctgacttgctcatttagactgttcacggagtctgaatctgccaacgtggtgttggaggctccaccttgaaaagggccacagtcagggcaactttccccatacaggaaaacttgaaaattacatcaacagtctacgtcacagccaaattatatttcctttataccaaacaaaactatggagaactaaaagtacatcacacaaaacgtttatagtgttttgcatgtgacctatttcagtatttatataactagattagtgctttctagcaaacggttctgttaattagcgagtcactgttgattctgctgtggtggtaagttgataccgtgtaactaatcccgtggatgcctcctcgttatttttgtccaaacgaagcagtcgtggtagtagctgtctatgattcttgct

SEQ ID NO: 25094 - DNA, 414 bp, Homo sapiens
  misc_feature (1)...(414): n = A,T,C or G
cgtggccngnnnaatggaaaaatcgagcgccatgcggaattcggcacgagctctggacccgccctcatcacagtccaatctaccaaactgagtgaccctaaaggacatcatagacaacatttgaaagcaagaaatgcaaaatgttcccatagcatcaggtgagcagggagaggatgcccactgtagaccacatggaaatggcagtccctccacggagagggaatcacaggaacacatttaccaaagccttcccttccattcctggccattccagtagcatcttcctcatccagaagggcttccaatactctctggaggatcctgactcgtttggagtattatccttgtaaaagatgctggcacattgtaggtgctcaataaatgtgttcaattgaaaaaaaaaaaaaaaaaaaa

SEQ ID NO: 25095 - DNA, 494 bp, Homo sapiens
  misc_feature (1)...(494): n = A,T,C or G
gtgggttaannagggtttgatncccctttgnannnncacctgatgcgcctgcnggaanngcgacgaggagacagccaattccaccaactgccacattctcaacatgtaccggaggaacacatggctgtaccaggcactgtgggaaggcaagcgggttcagagcatggagcagatctgcgaggtggcctcgggagtggcccgcattcgtgggaagacgctgggcctcatcggctagggtcgcacgcagcaggcttttgcagttccagccacagcctttggattcagcgtcatgttttattacccctacttgcaggatgggatcgagcagtccctgggcatgcagagggtctacaccctgcaggattggctgtatcagagcgactgcatctccttgcactgcagtctcaacgaacttaagcaccacctcatcaatgactttaccataaagcagatgaggcagggagcattccttgtgaacgcagcccgtggtggcn

SEQ ID NO: 25096 - DNA, 503 bp, Homo sapiens
  misc_feature (1)...(503): n = A,T,C or G
ncgtggttttaaactgaagttgtggccttcggccgaggaganagtgaaacctgagatccggctgttgattgagaaatgtaacacggtcaaaatgtgggtacagctcctgattcccaggatagaagatggaaacaactttggggtgtccattcaggaggaaacagttgcagagctaagaactgttgagagtgaagctgcatcttatctggaccagatttctagatattatattacaagagccaaattggtttctaaaatagctaaatatccccatgtggaggactatcgccgcaccgtgacagagattgatgagaaagaatatatcagccttcggctcatcatatcagagctgaggaatcaatatgtcactctacatgacatgatcctgaaaaatatcgagaagatcaaacggccccggagcagcaatgcagagactctgtactgaggccagggccagggccaggggactctggagtctggctcaagaccgacattgccttggt

SEQ ID NO: 25097 - DNA, 440 bp, Homo sapiens
  misc_feature (1)...(440): n = A,T,C or G
aggagattctganngccctnngnattctgancgccttcggttttttttcagttggagaaaccttttattggcacaggcattccttgttaacttgacagggtgaagctgtaatttttcaaaaacagtaaaagctggtttctcctaaactattctccttgtggtagtagagatcagtgggtcagaaacaactcctgaccacttggtttccttttgagccgcgtcataaggaggcaatctgtaaaactagcacaggtctcccgctgttccactggctcacccacatgattagcagagtgcacgaaaaaataaaacttctattaaagaatcatgctgagcacaagatcagagaggttgtgacattgcaaactcgatagatgcagggggcctgggagactgcgttctccaaagggctcccaacaccatctctcctctgatttctg

SEQ ID NO: 25098 - DNA, 484 bp, Homo sapiens
  misc_feature (1)...(484): n = A,T,C or G
atttgacngccctcgggaanncnattgaccnccgctgcaggaattcggcacgagcccctttggagcttttctcttgtcctctcactccttcccagaagtttttgcacagaacttcattttgaaagtgtttttctcattctccatacctcccccaagctctcctccagcccttcccagggctcagccctgctgtcctgagcgtctcctgggccagagagaggagatgggggtgggagggactgagttgatgttgggtttttcattcaataaattggtgatttcttaccgactgcnnnanaaaaaaaaaaaaaaaaaaaaaaaaccctgggggggggcccgggccccaaanncccgggaaggggggggaataaaaaatcccgggcccgggttttaacaggggggggggggaaaaaaaaacnntntnnnntntnttttnttctctctttttcccaatataccatccttttcctcttgcagaagaggc

SEQ ID NO: 25099 - DNA, 320 bp, Homo sapiens
  misc_feature (1)...(320): n = A,T,C or G
anannnnnnananccanntgncncacatcaaggacgagcctcctccactctcccctgcccccttaaccccagccacgccttcctcccttgacccattcttctcccgggagccctcatctatgcacatctcctcaagcctgccccctgacacacagaagttccttcgctttgctgagactcaccggactgcgtttaaccagatcctacggcagtccacgacccaccttgctgatgggccttttgctgtcctggtagactacattcgtgtcctccactttgatgtccagcgcaaatatttccgccaagagctggagcgtttc

SEQ ID NO: 25100 - DNA, 472 bp, Homo sapiens
  misc_feature (1)...(472): n = A,T,C or G
attgacggcctgcagaattcggtcgagcccactccctgcagccaggactcgatggagaatccattcccaatatggccatgtggctctttggaacaatgtaccatcatgttccatgctgctgacgtcacatggagcacataaatcaatgttagcatatagccaccccatacaagatcgttttcaactattggccccactgtgtccggaattgatgggttcttggtctcactgacttcaagaatgaagccgcggaccctcgcgtgcacttgtgtttttaatggatcatactttaccctacattgtattgtaggaggcatcgtggatggatggctgnngnaaagccgttgccatagccagctcttcttcaatacttaaggatttaccgtggctttgagtaatgagaatttcgaaaccacatttgagaagtatttncatccagtgctacttgtggttacttctaaacagtcatttt

SEQ ID NO: 25101 - DNA, 514 bp, Homo sapiens
  misc_feature (1)...(514): n = A,T,C or G
agagagggnnnnnattgccgnncngatcgcaccgngctgcaggaattcggcacgagcccagccgtcgtctccctcgacagcgcccctgctgtcttccccaccgcagtcaccaccacccgaaatgccacgtggtcactgtgcactgccctgttcatgtgcctctgcggggcagggccttcctggttttgtacactgctgtacccagatgcctacaaccatccctgccacatacaggtgctcaataaacacttgtagagcagaaaaaaaaaaaaaaaaaaaaaaaaaaaaaaaaaaggggggggggggaaaaaaaaancccattgggggggggggaaaaaaaaaaagggggggggggtttaaaaaaaaaatggggggagaaaagnnnnnnggggggggggggggggaagnnnnnnnnnnnnnnggnnntgnnnaaannnnnnnggggtggggattgaaaaaaaaagtggaaaaagaaaaaatattattttggtgaaaaaaaaaaaaaaaaaatatg

SEQ ID NO: 25102 - DNA, 508 bp, Homo sapiens
  misc_feature (1)...(508): n = A,T,C or G
ngtgaggnnnnnnattcccggctgtggaattcggcacgagcaggagctgctggggcccagcgacaagagccaggcagccctacagaaggctggggaggtggtcccccccgccatgtaccagttcagccagtacgtgtgtcagcagacaggcctgcagataccccagctcccagcccctccaaagatttactttcccatccgtgactcctggaatgcaggcatcatgacggtgatgtcagctctgtcggtggccccctccaaggcccgcgagtactccaaggagggctgggagtatgtgaaggcgcgcaccaagtagcgagtcagcaggggccgcctgccccggccagaacgggcagggctgccactgacctgaagactccggactgggaccccactccgagggcagctcccggccttgccggcccaataaaggacttcagangtgaannnnnnnnannnannnaaaaaaaaaaaaaaaaaaaaaaaaaaaaaaaaaaaaannnccccc

SEQ ID NO: 25103 - DNA, 480 bp, Homo sapiens
  misc_feature (1)...(480): n = A,T,C or G
aatggaggctntcngaanaatgatcagcatccnggaancnccacgagccatgattttgtcactgacagtctgtgagccaaagactgagcctttttggccggaataataatctatactacacaacttgctactttcagaaaacttttttttagcttcaccgatgacaacagaggaagaagggaactgggatttgggtaagttctcctccactgtttgaccaaattctcagtgataaatatgtgtgcagatccctagaagagaaaacgctgactttctttttaagtgtggcacataaggatctgcagaattttccgtagacaaagaaaggatcttgtgtatttttgtccatatccaatgttatatgaactaattggattgctttatactgtgaccacaaatattatgcaatgcaccatatgttttttatttcattaaaggaagtttaatttaaaaaaaaaaaaaaaaaaaaaattttggttt

SEQ ID NO: 25104 - DNA, 504 bp, Homo sapiens
  misc_feature (1)...(504): n = A,T,C or G
cgtgcgtcnnnnnnaattgagcgcatggagatctctcacgagcagatnaattgaacatgactccagaagaagctgaaaggtggattgtaaatttgattagaaatgcaagactggatgccaagattgattctaaattaggtcatgtggttatgggtaacaatgcagtctcaccctatcagcaagtgattgaaaagaccaaaagcctttcctttagaagccagatgttggccatgaatattgagaagaaacttaatcagaatagcaggtcagaggctcctaactgggcaactcaagattctggcttctactgaagaaccataaagaaaagatgaaaaaaaaaaactatcaaagaaagatgaaataataaaactattatataaagggtgacttacattttggaaacaacatattacgtataaattttgaagaattggaataaaattgattcattttaaaaaaaaaaaaaaaaaaactcgggggggggcccgggccccaattcgcctt

SEQ ID NO: 25105 - DNA, 273 bp, Homo sapiens
  misc_feature (1)...(273): n = A,T,C or G
ngtgagatggggntttgcacgccctttcgcccggctgcaggaattcggcacgagcttagagttgattgatggaaaaagcagacagttcccattcaactgtgcacaaaggtatagatatggaagacatctcactccaactctcacctttggaattaaataaacctggaacagggaaggtgaactatggctgaaaccaagtgaagatttttaagaagctttgacagaaacattaagaataacacctgaatgcaaatccagaaaaaagcgccggca

SEQ ID NO: 25106 - DNA, 436 bp, Homo sapiens
attgacgcttgagcttcgcacgagccagtcttcacaaacccttgcaacattgcctgaagtttatggaataagatgtattctcactcccttgatctcaagggcgtaactctggaagcacagcttgactacatgtcatttttaccaatgattttcaggtgacctgggctaagtcatttaaactgggtctttataaaagtaaaaggccaacatttaattattttgcaaagcaacctaagagctaaagatgtaatttttcttgcaattgtaaatcttttgtgtctcctgaagacttcccttaaaattagctctgagtgaaaaatcaaaagagacaaaagacatcttcgaatccatatttcaagcctggtagaattggcttttctagcagaacctttccaaaagttttatattgagattcataacaacaccaagaattgat

SEQ ID NO: 25107 - DNA, 452 bp, Homo sapiens
  misc_feature (1)...(452): n = A,T,C or G
nattgaaaatcgtcgccgctgcagtacctaggacagaattaaacatttgttacacattcagaacagtgatgttgttctttttgatacttttatctcagtatcttttcacgttccataacttgtccatatttttgctcatattttcttacttttctttgttatttattcatgtctgcaacatcaatcatagtagtctagatcaatgcaactcaaagcaccagtctacaaactgttacttatccacaggcaagataagcatgcacaagaatttaaatctagagatactttttaggtcaatgacaggatttgattttttagcaaaattttattaatagctaaagcaatgtattgatttacactctgatgcaagtaatttatctcttcattgactggtagcaaccaattcatggaccagtaccatggaccacactttgagaaacacttctttggan

SEQ ID NO: 25108 - DNA, 498 bp, Homo sapiens
  misc_feature (1)...(498): n = A,T,C or G
catcgcccgcgntgcggnanatttggccngcgctgcaggaattcggcacgagagatagatcgccatcatgaacgacaccgtaactatccgcactataaagttcatgaccaaccgactacttcagaggaaacaaatggtcattgatgtccttcaccccgggaaggcgacagtgcctaagacagaaattcgggaaaaactagccaaaatgtacaagaccacaccggatgtcatctttgtatttggattcagaactcattttggtggtggcaagacaactggctttggcatgatttatgattccctggattatgcaaagaaaaatgaacccaaacatagacttgcaagacatggcctgtatgagaagaaaaagacctcaagaaagcaacgaaaggaacgcaagaacagaatgaagaaagtcagggggactgcaaaggccaatgttggtgctggcaaaaagtgagctggagattggatcacagccgaaggagtaaaggtgct

SEQ ID NO: 25109 - DNA, 447 bp, Homo sapiens
aatagaaattttgacccgcgctgcaggaattcggcacgagggcaaccagaccagtggcatcgacttctttattacccaagaacggattgttttcctggacacacagcccatcctgagcccttctatcctagaccatctcatcaataatgaccgcaaactgcctccagagtacaaccttccccacacttacgttgaaatgcagtcactccagattgctgccttccttttcacggtctgccatgtggtgattgttgtccaggactggttcacagacctcagtctctacaggttcctgcagacagcagagatggtgaagccctccaccccatcccccagccacgagtccagcagctcatcgggctccgatgaaggcaccgagtactacccccacctagtcttcttgcagaacaaagctcgccgagaggacttctgtcctcggaagctgcg

SEQ ID NO: 25110 - DNA, 510 bp, Homo sapiens
  misc_feature (1)...(510): n = A,T,C or G
agggcnnnnnnnnnattgatcgcccggctgcacgaattcggcacgagacaaatcctgagagtgttttaattgttggacaacatattctcaagaatggactttccttacttaaaataggaaaaagaaatttctacattataaaatggcttcagttgtgatgaaaagtccttctggttgtccaaataaacttacccatcattcattctcaagacctctgaagggttggctccagaacttagacctttgcttatgcaaatcagaaaaacagaatggactaggactcagtgcagcagagcatggctttagtgttcaaattctagccatttactacctggattacttggagcaagtcactgtcttcatacgcaaaaatggagatgttataataccttggtgaactgtcagaatctggtaggaaaaaagtcgtaaaatttttcgtactctatacnggtatgttccaaagtagattaggtattaaaaagctccttttgtctccctttctctgggaga

SEQ ID NO: 25111 - DNA, 540 bp, Homo sapiens
  misc_feature (1)...(540): n = A,T,C or G
ggagattgcagcttcccggctgcggattcggcacgagccggcttccccctactcagtgaagaagccaccctcagtcaccccaattttcctggagccacccccaaaggaggagggagccccaggagccccagaacagacatgagacctcctccaggaccctgcggggctgggcctggctcagaatctaacctatttattgactgtcctgagggccttgaaaacaggccgaacctggagggcctggatttctttttgggctggaatgctgccctgagggtggggctggctcttactcaggaaactgctgtgcccaacccatggacaggcccagctggggcccacatgctgacacagactcactcagagacccttagacactggaccaggcctcctctcagccttctctttgtccagatttccaaagctggataagttggtcattgattaaaaaaggagaagccctctggggaaaaaaannnnnnnnnnnnnnnnnnannnnnnnnnnnnnnnnnnnnnnnnnnaaaaaaaaatggggggggg

SEQ ID NO: 25112 - DNA, 490 bp, Homo sapiens
gcccccccccaattcgacggcctgattagtacggcactagaagaaggagtatgtacacctggtatgccagatgagaatgacaggagccatccgcaagcagttggcggctttcttagaaggcttctatgagatcattccaaagcgcctcatttccatcttcactgagcaggagttagagctgcttatatcaggactgcccaccattgacatcgatgatctgaaatccaacactgaataccacaagtaccagtccaactctattcagatccagtggttctggagagcattgcgttctttcgatcaagctgaccgtgccaagttcctccagtttgtcacgggtacttccaaggtacccctgcaaggctttgctgccctcgaaggcatgaatggcattcagaagtttcagatccatcgagatgacaggtccacagatcgcctgccttcagctcacacatgttttaatcagctggatctgcctgcctatgagagg

SEQ ID NO: 25113 - DNA, 519 bp, Homo sapiens
  misc_feature (1)...(519): n = A,T,C or G
ggggnnnnnnaaggtgnnnnnaggggnnnnnnttatgatcgcctatggattcgtccgaggctgggcgaagccgatgaagcggagttgcagcgcctggtggccgccgagcagcagaaggcgcagtttactgcacaggtgcatcacttcatggagttatgttgggataaatgtgtggagaagccagggaatcgcctagactctcgcactgaaaattgtctctccagctgtgtagaccgcttcattgacaccactcttgccatcaccagtcggtttgcccagattgtacagaaaggagggcagtaggccatcccccaggagaatgacagaagcaaaggacttgttactaagcagatttaagggtcagtgggggaaggctatcaacccattgtcagatcagcatcaggctgttatcaagtctgttggtgctaaaaagtaaaagatgaaatgttcaaaaaaaaaaaaaaaaaactcgaggggggggccgggccccattncgccctaaaggggagcgaataaaat

SEQ ID NO: 25114 - DNA, 499 bp, Homo sapiens
  misc_feature (1)...(499): n = A,T,C or G
tggaggaaaaanaancttgattgccctgcngaaannncnncttgatncgcgctgcaggaattccgcacgagaaaaaggagaaaaagtaaaacatgtattaaatagcttttttaatttgtaaattaaaatcttacaaactaaatcagtgtgctgctagagggttctttttcacttgacatgcttattagaaagctgacccaacaagagctctctgcctccggtcactcttgctgtggtgctacgtggaagtgaatggagactgatctcaaatctgaactgcagctttcgctgctgtgagttggggatatgatagtcagctcaggcttcagattgtatgagaaaaatgaagagaagtcaacaaatattttggtactcttcattcatttatctctaaaaccaggagttgaattttcctcatcttgaaagactcttggggtctgtttctggtattttacaaaattgctaagtggaatgcatgaattgcattatgttctctgga

SEQ ID NO: 25115 - DNA, 344 bp, Homo sapiens
  misc_feature (1)...(344): n = A,T,C or G
caaagnannntggctcnnnatccgctctcacgagtgctccctctactgtaggggtgaataaacctcatcgttacaggcctggtactgtggcgctccgtgaaattagacgttatcacaagtccactgaacttctgattcgcaaacttccctttcccgtctggtgcgagatattgctcaggactttaaaacagatctgcgcttccagagcgcagctatctgtgctttgctagaggcacgcgaggcctatctggttggcctttttgatgacaccaacctgtgtgctatccatgccaaacgtgtaacaattatgccaaaagacatccatctagcacgccgcatacgtg

SEQ ID NO: 25116 - DNA, 511 bp, Homo sapiens
  misc_feature (1)...(511): n = A,T,C or G
nggggttnnnnggaaatatgatcgcctgtggaatatcgcacgacgatgaacttttcagttactcctgccccaagttcctgtcgcctgtagtgcccaactatgataatgtgcaccccaactaccacaaagagcccttcctgcagcagctgaaggtgttttctgatgaagtacagcagcaggcccagctttcaaccatccgcagcttcctgaagctctacaccaccatgcctgtggccaagctggctggcttcctggacctcacagagcaggagttccggatccagcttcttgtcttcaaacacaagatgaagaacctcgtgtggaccagcggtatctcagccctggatggtgaatttcagtcagcctcagaggttgacttctacattgataagcttaatcgaaccctgaagaagatgggacagagaccttgatgatattcacacacattcaggaacctgttttgatgtattataggcaggaagtgtttttgctaccgtgaaacctttaccta

SEQ ID NO: 25117 - DNA, 505 bp, Homo sapiens
  misc_feature (1)...(505): n = A,T,C or G
ngaagctcgatggccgtggaanatcgaccgcctgtcggattcgcacgaggagagagagagagagagagagagagagagagagagagagagagagagagagagagagagagagagagagagagagagagagagagagagagagagagagagagctctcttttgtgtgtgcgccacacgtgtttcgcgccccccacatacatatttttgtgggagacactgcgtgtgtgccccacaccctgtgtgtggggcgctctctctgtgttctcacacacagagagagcgcgtatctttttttatacgtgtggggggtctgtggcccgcgcgcccgtgtgtgcacacacgcgtatattttcttcccgcgcacgtgcgcgcgcgctctgtgcgcgcccccctctctctcgcgagagacgcgcgcacacacgtgttttttttatataaagaacacttttttttctgtgtagcgcaaaaaaaaaaaaaaatctggggggggggggccccccccctt

SEQ ID NO: 25118 - DNA, 502 bp, Homo sapiens
  misc_feature (1)...(502): n = A,T,C or G
agtggcggnnnnagccgnnaatgatcgccttcggattgaccgccatgagaantcccacgagggaacccgtgcggctggagagagatatttgtagagcaattgaattattggaaaaactacaaaggagtggagaagtaccaccacagaaacttcaggctttgcaaagagtccttcaaagtgaattctgcaatgctgtgagagaggtatatgaacatgtctatgagactgtggacatcagtagcagtcctgaagtgagagcgaacgctactgcaaaggctactgttgctgcatttgctgccagtgaaggacattctcatcctcgagttgttgagctaccaaaaacagaagagggccttggattcaatattatgggaggcaaagaacaaaactctccaatctatatatcccgaataattccaggtggaattgctgatagacatgggggcctcaaacgtggagatcaactcctctctgttaatggagtgagtgttgaaagagaacn

SEQ ID NO: 25119 - DNA, 556 bp, Homo sapiens
  misc_feature (1)...(556): n = A,T,C or G
gaccatgtcgcgctacctccgtgacgtgttggtgattgccacatatcatcttatctctgtcccctnccaaagaggcannaagggggggggnttttgaccgctgatagccattccacgagacagactctcaggactttgagtgtgtgtgtgaattgcattcatcacaaagatattgaagacaataaataatctttataacaaactccttgggttggactattaaacaatagcagagccaagaaataggacttttaaaagtcctattattcggccgggcgtggtggctcaggtctgtaatcccagcactttatgaggctgaggaggggagatcacctgaggccaggagttcgagaccagcccagccaacatggtgaaaccctgtctctaccataaattaaaaattagccgggcttggtggtgggcacccgtaatcccacctatttgagaagctgaagcagaagaatcgcttgaacctgggagatggaggttacagtgagccgagattgcgccactgcactccagcctgggtgacagagcaagactctgtcttaagaaa

SEQ ID NO: 25120 - DNA, 449 bp, Homo sapiens
cttgccctgcgctgcacgattcggcacgagtagtctatatcaatgcaactcaaagcaccagtctacaaactgttacttatccacaggcaagataagcatgcacaagaatttaaatctagagatactttttaggtcaatgacaggatttgattttttagcaaaattttattaatagctaaagcaatgtattgatttacactctgatgcaagtaatttatctcttcattgactggtagcaaccaattcatggaccagtaccatggaccacactttgagaaacacttctttggataataatagatatcctgggatagtgcatgttcaccatctattttgtcagataatggggccttttaaaaaataatactttgctttcatgatatattgtattttgtggaaagttaagtttagcaatatagactctaaaagcaaattaaatttttttaagg

SEQ ID NO: 25121 - DNA, 465 bp, Homo sapiens
  misc_feature (1)...(465): n = A,T,C or G
ntttgacccgtcctgangaattcggcacgagatggaatctgtgaagtcttgtctttctccaaaagagagggaacaagtcacggcgacaccccgaatagccaaggcagaacagcataattatcctggtatcaaattacagattggtccaatccctaggtaagcaaactctaaagcagactttgtgttcacagacttaattctagtccaagtctcgatttttccttcacagatctagagtaactgagacctgacctgcagtgaggaaggtgctgccagagtcaggaggggtattagaatgcattcacccccgtcctatggtctcgcctaccttttcactctcatttgtcctgcacttgcagatcctatctgcctttcctgcaagtcctgacacagctgggtatggttggggtgataagatggggcacaaagtcccaagcgggagcaaactctgtagctgtgggagaa

SEQ ID NO: 25122 - DNA, 472 bp, Homo sapiens
  misc_feature (1)...(472): n = A,T,C or G
ntttgccctgctgcggaattcggcacgagctcagtcggtgtccgagcttagccttggacccaccaaggctgtgacttcctggctgacagaccagatcgcccctgcctactggaggcccaactcccagattctgagctgcaacaagtgtgcgacgtcctttaaagataacgacactaagcatcactgccgagcctgtggggagggcttctgtgacagctgttcatcaaagactcggccagtgcctgagcggggctgggagccctgcgccagtgcggtctgtgacaactgctacgaagccaggaacgtccagttagctgttaccgaggcacaagtggacgatgaaggtggaacactcattgctcggaaggtgggcgaggccgtgcagaacactctgggagccgtggtgacagccattgacataccactaggtctggtaaaggacgcggccaggcctgcgtactgggtgcctgac

SEQ ID NO: 25123 - DNA, 475 bp, Homo sapiens
  misc_feature (1)...(475): n = A,T,C or G
atcgcccgcctgcggaattgggcaccagctccagcgagaggccagcaagagaccatctgcccgagtagccgcaaatgtgcttcatctaagcctctggggtgaacatattctagccctgaagaatctgaagttagacaagatggttggctggctcctccaacaatcggccgccactttgttggccaacaggctcacagagaagtgttgtgtggaaacaaaaatgaagatgctctttctggctaacctggagtgtgaaacgctctgccaggcagccctcctcctctgctcatggagggcagccctgtgatgtccctgcatggagctggtgaattactaaaagaacatggcatcctctgtgtcgtgatggtctgtgaatggtgaggggtgagtcaggagacaagacagcgcanagagggctggttagccggaaaaggcctcgggcttggcaaatggaagaacttgagtgagagttcan

SEQ ID NO: 25124 - DNA, 484 bp, Homo sapiens
agcgcccatggtcgcctgtagatagagcaccagtactcactcacaatccaccaacactgtcatcaaactcccttatacatattccaaataatatgctgtcttacactgcaagagacatctttcctggttgtttgaaagtacctttttaaaatgtacagatgtgtttggacactcttttggtttctaaagcataacgtccactacatttgctgaggcagtgctaaacctgagcttttaaaccttttcgaagaggtttaattttctgcatcttggatctgaaaccactttgcacttgagagagaaaaaatcatttcttaaagaataaaaaacaaaaaaactccacaatccttttatgttacctatggttgagttggatctaaaacgattgattttatatactgtggggttttgttttcattgaaaatatctgagggtttttgctttatttggaaggtgctctggagtctgcagccagctacaagca

SEQ ID NO: 25125 - DNA, 412 bp, Homo sapiens
  misc_feature (1)...(412): n = A,T,C or G
aggggcnnnnnnnaggggggaatagaccgccttnggattgcaccgcctgcaggaattcggcacgagtaggattctctcatgcttaacatgcatcttactggttctttatgaagagctttctcttgttctggagaccagaaggccaaaatcaaaagtatgggcaggcttgatttctttagaagactccagcggagaactgtgtctccttgcttctgattctacatctccatccatgggccactgtttcagcaacctcagccagtgcaacacaacctcagccaagaagagtatgcagagaaaggagtcccctacctgccacaaaactgttgtctgaaaactgtctcatattgtctcaagttgtcattcattgtgaattagacctgtttaacatgtaaaaaaaaaaaaaaaaaaa

SEQ ID NO: 25126 - DNA, 442 bp, Homo sapiens
aattgaaccgctctgcaggacttcggcacgagcagatgtcttttggaattggggcatttccctttgggatatttgccacagcatttaatataaatgatgggcggcctcctccagctgtccctgggacaccccagtatgtggacgagcagttcctgtcacgcctcttcctatttgtggccctggtgatcatgttctggctcctgattgcctaatgctgggctcctgcctacatccgtggcagggctctggactggtgacgtgccaccccaactcctggtgtttggcttcctggctaatcttgactcctggaatcagtgggatcagtaacacatcaaggagtcttgtttcttcatcagagctttggaactcgagaccagttggcgatgacccctgaatatcgccaccgctgtaaacactctataacttcaggccttggcattga

SEQ ID NO: 25127 - DNA, 486 bp, Homo sapiens
  misc_feature (1)...(486): n = A,T,C or G
aattgaaacgccnttttgacccgcgctgcaggaattcggcacgagggaaggaactgctcctctcttctttgaagcccttcagcttcctggagaaggaggagcagctaaaggaagctgctcgacagagagacttggcagccacagctgaagccaagatctccaagcagaaggccaccagaaggattcccaagtccattctggagccagcccttggggataaactccaggaagctgagctcttcaggaaaattcgcatccaaatgagagccctggacatgctccagatggcctcttcccctatcgcctcctctagtaaccgggctaacccacagccccgcacagccacccgaacccagcaggaaaagcttgggtttctgcacactaacttcagattccagcctcgggtgaatcctgtggtccctgactatgagggcctttacaaggccttccagagaagagcagccaaaagaagagaaacccangagg

SEQ ID NO: 25128 - DNA, 475 bp, Homo sapiens
  misc_feature (1)...(475): n = A,T,C or G
nttgccctttgcccggctgcaggtgagacttctacgccgcctccgcctcagacgccgccgcgatgcgctacgtcgcctcctacctgctggctgccctaaggggcaactcctaccccagcgccaccgacatcaagaagatcttggacagcgtgggtatcgaggcggacgactaccggctcaacaaggttatcagtgagctgaatggaaaaaacattgaagacgtcattgcccatggtattggcaagcttgccagtgtacctgctggtggggctgtagccgtctctgctgccccaggctctgcagcccctgctgctggttctgcccctgctgcatcataggataagaaagacgagaagaatgaggagtctgaagagtcagacgatgacatgggagttcggctttttgattaaattcctgctcccctgcaaataaagcctttttacacatctagaaaaaaaaaaaaagaaaaaaaaan

SEQ ID NO: 25129 - DNA, 480 bp, Homo sapiens
  misc_feature (1)...(480): n = A,T,C or G
nattgacccgcctgtaggaattcggtacgagcttttataccatgaatattacaaaaaaattgtcagattctgaatatttcttctttgtagatttttggaatcattatgagtaaaagtttgttactttattttactatttaaaagatgttattttaccatgtgttaccaagatgaaactgtatgggtagcttttttgtttgttttttgttttgtttttgtttttggttttggttttagttggaggtcgcagcggggaaattttttgcgactgtacacatagctgcagcattaaaaacttaaaaaaattgttaaaaaaaaaaaaagggaaaacatttcaaaaaaaaaaaaaaaggaaaacccgtcccccttttgtttaaagggggggttgggggccccaattttttaatgttttgggggaatttctaatttggaaaagggcccaaacgggttggggggtggagttcctctaaaacaaaaaaa

SEQ ID NO: 25130 - DNA, 505 bp, Homo sapiens
  misc_feature (1)...(505): n = A,T,C or G
aaaaaaaaaatttganngccctatttcgaccggctgtaagaattcggcacgagctagttttggaaagtgtagtgggaatattcagacaaaagaggccattttccatttttaaagcttcttactggtgaaacagcccagttgtagtaggtgccagtcagtcaaggcaggggccctctctccgtcaatatggaaaactcagcagttttcctctcccccagttgtgttcttgtaacgttgttaatgggttcctttgctttttgctttctccttttctgaaaatgtatgtgttttgcctctcttttggctacatcttcaaaatatttcttttgtgcctatgtacatgtgtaaacatgccatagcatgtgtggtaggtgtcctgtattttgtttgggaaaaaaactatcaaaatgaggaagagaatttcccctatttatgcactaggtttctgtgctttttctttgagttctctggagtagatattaatttgataccttcatggtaatgg

SEQ ID NO: 25131 - DNA, 502 bp, Homo sapiens
  misc_feature (1)...(502): n = A,T,C or G
gaaantaaatttgcccggctgcagtattcggcacgagaacaaacaatgaatatgttcaacaaaaagaaagaaaagaggatagaataagattaatacagtttccctttttataatgagaaaaaaagcacaatttaaagtttcaggcaatttaacgtcaggttttgggaacactttctggcgtttggtccacgacatccaactacaaattaaaaataaattactatgttgcaatttacattttaaaacaagtccatgaataaaaagaaagcgactttcataaacggggactttccccctcccttcaacataggataaaataatatcttacaggtgagaggcaaggaagaaagcaagagaggggagacgggaggaggggaaagcaggtctctgaaaagcaagaagaaacttacgtgttatctggagtaacactgtcctttaataaaccaagattttgctgctctgtataaaacagtttacgggtttgtttatttagacaaggcan

SEQ ID NO: 25132 - DNA, 504 bp, Homo sapiens
  misc_feature (1)...(504): n = A,T,C or G
gggatgggntttagannccccnaattgaccgccctgcggaattcggcacgagaaattattttgagaccttttgctggtagacaaaaactgaggaaatgtttcactaaatatattatggtcaatgaaaaaaccagactttagagtaaatgtgataaccaagtagatttgtgaactttatttctttagtaattatttttatcttatgtgaaatgattcaacctttaatttttgcctagattatagcaatgttttgttttaccttatagggcattttaatgcttggagaaagactataagtgaatctacttcaagggattctgttcatggtggtatacagttcttggtgctcttttggaaattgtcaaacatttactgatagcagaaaaggaaccccaaaacacctgtagtgttcaccttgttataagaacagaaacatttggaacaggtttcattctgtttctagatttatgttgttgtagttgaacagcaactgtttttttccct

SEQ ID NO: 25133 - DNA, 492 bp, Homo sapiens
aattgatcgcctgtggtggaaagcccgtgaggacttcctagaggaagggacatcgaactaagacctgaactatgagaaataggcaggaagaagttgtacctgactcatttttctcaggtgtctacagggagcaggacccatggagggacccctggtgtaggcctgggcgatagactcttcctcagcagcctggcaggcaggaaacagacataggaccccagcccagatctgaatggcatgggaggtgctgcccttaaccatgacaccattgtaagagctgtccacatttgtatgttgtgccctggaatcagcctgggtgagctcaaatcccaacttagccacgtctggcctgtgtccttgggcagtcacactacctctctgattttgtttccttatctgtaaaatggtgatcatcataatacaacttcaaaaggatttcaggctgagtgtggtggctcacgcctatacacccagcactttggaaggctgagg

SEQ ID NO: 25134 - DNA, 499 bp, Homo sapiens
  misc_feature (1)...(499): n = A,T,C or G
tcggatatttnnattgggaaaaaaaggggaaaaaagggttgaccgcctgtggtaattcgctcgagatacacccactagtgcctcaggtgcccggccctgtgactgcagccatggccacaggcttagctgttaacgggaaaggtacatctccgttcatggatgcattaacagccaatgggacaaccaacatacagacatctgttacaggagtgactgccagcaaaaggaaatttattgacgacagaagagaccagccttttgacaagcgattgcgtttcagcgtgaggcaaacagaaagtgcctacagatacagagatattgtggtcaggaagcaggatggcttcacccacatcttgttatccacaaagtcctcagagaataactcactaaatccagaggtaatgagagaagtccagagtgctctgagcacggccgctgccgatgacagcaagctggtactgctcagcgccgttggcagcgtcttctgttgtggacttga

SEQ ID NO: 25135 - DNA, 474 bp, Homo sapiens
atttgccctcgctgcacgaattcggcacgagcttcccttcccgtcttccttatcaataccaacaaagaggaagctaaggcctgggttgggtaactgcctgacgttttactgtaagtgcattgtgtgcccaagctcagggttgtcccgtctagaccattaaagtcacacaatgcaatttaagaagacaatgaggcaatctcagcactttgggaggccgaggctctctgtttcctcgagtcactcccagattagtggtgtctagctcagcactgtttctgttatacttcattcataattcccagcgctgttggacgaggatgggaagaccgcctgtggccatgagccctccccggtgctcctggggctaaggctggggctgcagccatggagcgggtcagccccaggcctggttgctgggtctgcccacagctgtgggctatggctccctggctctcttcaccaccatcctgcaca

SEQ ID NO: 25136 - DNA, 462 bp, Homo sapiens
cgcgccccattgaccttgacgtcgcgctgcaggaattcggcacgagcagatggtgaatatctccctgcgagtgttgtctcgacccaatgctcaggagcttcctagcatgtaccagcgcctagggctggactacgaggaacgagtgttgccgtccattgtcaacgaggtgctcaagagtgtggtggccaagttcaatgcctcacagctgatcacccagcgggcccaggtatccctgttgatccgccgggagctgacagagagggccaaggacttcagcctcatcctggatgatgtggccatcacagagctgagctttagccgagagtacacagctgctgtagaagccaaacaagtggcccagcaggaggcccagcgggcccaattcttggtagaaaaagcaaagcaggaacagcggcagaaaattgtgcaggccgagggtgaggccgaggctgccaagatgct

SEQ ID NO: 25137 - DNA, 476 bp, Homo sapiens
  misc_feature (1)...(476): n = A,T,C or G
ggagtcggnngggcnngaaactgaganccaatgagagcctgcggaanncgcacgagccccagccccttgggctcacctgaagtcctatcactgccgctctgcccctccccatgagccagatcccaccagtttctggacgtggagagtctggggcatctccttcttatgccaaggggcgcttggagttttcatggctgcccctccagactgcgagaaacaagtaaaaacccattggggcctcttgatgtctgggatggcacgtggcccgacctccacaagctccctcatgcttcctgtcccccgcttacacgacaacgggccagaccacgggaaggacggtgtttgtgtctgagggagctgctggccacagtgaacacccacgtttattcctgcctgctccggccaggactgaaccccttctccacacctgaacagttggctcaagggccaccagaagcatttctttattattatta

SEQ ID NO: 25138 - DNA, 493 bp, Homo sapiens
  misc_feature (1)...(493): n = A,T,C or G
tgggnttnnnnnaattgacntttccaccggctgcaggaattcggcacgagggaaacatctttcaaaagcgaagataattttctaagttgaacagaactttgtccttttttctttcaggttatctgagttcattggagtgggtgcttgtgcatatatgctaggtatcttttgccatctttctctttagatcaggggaaatgtttaagctaaataaatctggggggttttttgttctgaaaaaaaaaaaaaaaaaaaaacctggggggggggcccggaccccaattccccttatagggggccgtttaacaattcatggcccgcggtttaacaacgtcgggacggggaaaaannaccnnncnnnnncttctgnattctccnctgcggctttcctttggtcctgtggcgaccctgggtgatgtatcctggtgtgaaagatcgagacactgtcagggggctgaaaagaactcttctatcccttctatatacgatggcg

SEQ ID NO: 25139 - DNA, 480 bp, Homo sapiens
  misc_feature (1)...(480): n = A,T,C or G
ntttgaccctcgccncccggctgcaggaattcggcacgagtgccgccggagaggagtggcctcgcccgcttgagttttgattcatcatggataatctgtcatcagaagaaattcaacagagagctcaccagattactgatgagtctctggaaagtacgaggagaatcctgggtttagccattgagtctcaggatgcaggaatcaagaccatcactatgctggatgaacaaaaggaacaactaaaccgcatagaagaaggcttggaccaaataaataaggacatgagagagacagagaagactttaacagaactcaacaaatgctgtggcctttgtgtctgcccatgtaatagcaagcagacagatctgggaatcactgaggatgctctggggaagcatgctgagctcaagacaattctcttccaggcgaagaattttaaggcgtggacagcaagatatcttcactgagatctgagatatn

SEQ ID NO: 25140 - DNA, 454 bp, Homo sapiens
ggtgggcctgactgcctgccgtgggcattggacctgcctatgccatcccagtagctttgcaaaaagcagggctgacagtgagtgacgtggacatcttcgagatcaatgaggcctttgcaagccaggctgcctactgtgtggagaagctacgactcccccctgagaaggtgaaccccctggggggtgcagtggccttagggcacccactgggctgcactggggcacgacaggtcatcacgctgctcaatgagctgaagcgccgtgggaagagggcatacggagtggtgtccatgtgcatcgggactggaatgggagccgctgccgtctttgaataccctgggaactgagtgaggtcccaggctggaggcgctacgcagacagtcctgctgctctagcagcaaggcagtaacaccacaaaagcaaaaccacatgggaaaactcagcactggtggtg

SEQ ID NO: 25141 - DNA, 468 bp, Homo sapiens
attcgcccgtcctccccgcgctgcaggaattcggcacgagagagagatgatgtcactagctccaccggtccccacaaggagctgacaagcacagaggcaggttccacagttgcaggagcagccctcagacccagccatcattcccagcgttccagtctctctggggatgaagaggatgaactgtttagaggggcaactctgaaagctctgaggcccaaagcacagcctgaggaggaggatgaagactaagtgagcatgaatggacgcccgcccccaacgcccctttttggagatgatgatgatgacgatgacattgactggctgggaggaagacccaggaaactggtgcaaaggtttctctgcgacccttccctaagcatgattttgcacagccaaccctgggtctaggcgagccacagggtgaggtcaaggtgagcattctgggaacaatatttgggctcagagggg

SEQ ID NO: 25142 - DNA, 461 bp, Homo sapiens
attgcccgtctgcagaattcgcacaagaccttttctactgtacaccccatcccagacgaagacagtccctggatcaccgacagcacagacagaatccctgctaccatagaccaagacacattccaccccagtggggggtcccataccactcatggatctgaatcacatggacactcacatgggagtcaagaaggtggagcaaacacaacctctggtcctataaggacaccccaaattccagaatggctgatcatcttggcatccctcttggacttggctttgattcttgcagtttgcattgcagtcaacagtccaagaaggtgtgggcagaaaaaaaagctagtgatcaacagtggcaatggagctgtggaggacagaaagccaagtggactcaacggagaggccagcaagtctcaggaaatggtgcatttggtgaacaaggagtcgtcagagactccaga

SEQ ID NO: 25143 - DNA, 462 bp, Homo sapiens
agcgggcccattgaaattgattcgcgctgcaggaattcggcacgagctacgccgagggacagagacgctcatgctgtgttctcaggatgaccgagtgggagacagcaggaccagcggtggcagagaccccagacatcaagctctttgggaaggggagcaccgatcatgagcagatcaatgacatttccctgcaggattacattgcagcgaaggagaagtatgccaagtacctgcctcacagtgcagggcggtatgccgccaaacgcttccgcaaagctcagtgtcccattgtggagcgcctcactaactccatgatgatgcacggtcgcaacaacggcaagaagctcatgactgtgcgcatcgtcaagcatgccttcgagatcatacacctgctcacaggcgagaaccctctgcaggtcctggtgaacgccatcatcaacagtggtccccgggaggactaca

SEQ ID NO: 25144 - DNA, 500 bp, Homo sapiens
  misc_feature (1)...(500): n = A,T,C or G
aggggnntgnnnnnnnnattccaccgttctgcaggaattcggcacgagggaagctgctcatcctccatcccccatccgctgctgctggctccgcctccgctgcttggcagctactagcattatctgtggctgctcttgcctgggagtcatggctctggtgtttgccatcaaggcggaagagcggcataaagcaggccggtccgaggaggcagtgcgctggggggcccgggcccggaaactcatcctggccagctttgctgtctggcttgctgtcctcattctgggtcccctgctgctgtggttgctctcctacgccatcgctcaggctgagtgaccctggatggcctctgctgagagccagccgagacctcctggatcctgcaatgcggcattgctaaggtcctgtgacagcagtggttggaaggatcctggttggaaggatggggactctctcaaggggctttggaagagctcttctagccctttataaaaggagggcc

SEQ ID NO: 25145 - DNA, 496 bp, Homo sapiens
  misc_feature (1)...(496): n = A,T,C or G
ggtgtcttgaccccagggaggcttcagagcctccggaannncccacgaggaaaattacaggatattaaatatccaaaacaatagtgtttctgtacacagtgaactagctgaaaaagaaatcaagaaagcaatcccatttacaatagtgccaaataaataagataactaagaattaaatttaaccaaacaagtgaaagacccccataaggaagattataagatactgatgaaagaaactgaacaggatacaaagggaaagacatcccaagctcatggatcagaataattaatattgttaaagtggcagtactctccaaagcaatctacagattcagtgcaatctgtatcaaaatacgagtgacattcaaaacagaatgtcactggaagaaaaaaatctggataggcaaggtggctcacgcctgtaatcccaccactttagaaaaccaaggcaggagatcacttgaggccaggagtttgagactgtcatagtgagatc

SEQ ID NO: 25146 - DNA, 438 bp, Homo sapiens
  misc_feature (1)...(438): n = A,T,C or G
attatgcccgcgctgcaggaatncngtatccnccgcgctgcaggaattcggcacgagaagaagcgaatgcgcaggctgaagcgcaaaagaagaaagatgaggcagaggtccaagtaaaccgctagcttgttgcaccgtggaggccacaggagcagaaacatggaatgccagacgctggggatgctggtacaagttgtgggactgcatgctactgtctagagcttgtctcaatggatctagaacttcatcgccctctgatcgccgatcacctctgagacccaccttgctcataaacaaaatgcccatgttggtcctctgccctggacctgtgacattctggactatttctgtgtttatttgtggccgagtgtaacaaccatataataaatcacctcttccgctgttttagctgaagaattaaaaaaaaaaaaaaaaaaa

SEQ ID NO: 25147 - DNA, 251 bp, Homo sapiens
  misc_feature (1)...(251): n = A,T,C or G
nattgacnaactgatcgcctgcggcggcacacctgtagcacacctgcgtaatgtgcggtctgggccagtcacaaggaattgtgttgtctaagccctgagaccatgaggcctccagggcatgtaagaggcacagaacactcccagaacccagaatctgctgtcatctgagtgcctgagcaacttacataaccatcagcttttagacgaacttacacatttcctatttgacagaaatctcttccacaatttgg

SEQ ID NO: 25148 - DNA, 328 bp, Homo sapiens
  misc_feature (1)...(328): n = A,T,C or G
ggggcccncaattgacccccattgaccccgctgcaggttgagaaccactggtctagctagacctgcactgtccagtacagtagccactaaatacatgtggctaaacttaaatttaagttaattaagattaaaagctcagtttctcagtcacattagtcattcaagtgttcagacagccacatgaggggacagtgcagctacaggatatgccatcatggcagaaagttctgttggttggacagcgttggtctatactgactcttatttctcagggagatcacagcaacctaaataaaccagataccttttcaaaaaaaaaaaaaaaaaa

SEQ ID NO: 25149 - DNA, 468 bp, Homo sapiens
  misc_feature (1)...(468): n = A,T,C or G
gtggtantnaaaatcgacctctcatcgcgctgcagcaattcggcacgagcccacccagtggggcccccatctaatattctaagtgtcagaggttccgtatttgtaatagcaaatgggccctgactgtaaattagtgaagagtgaatgtaacttattacccacagggacaattccaaatgagggccttaaatgatgctcagctaagctggttcttgtgtggcctctgtaccttcaaaagctgccgagtcctatgattacacgcgatgggacttgtacacttgaagtgaaacacagttttaaaacttgctttgtttagaattcccacctcatttttccatggacaaaagtattctttatgtcctagtgcacttacaatttggtattacctgggagtgaaaagaaatattacagccatgcctaactgacttcttgaggtaagattgttctgtcagaaaaccctctcccagt

SEQ ID NO: 25150 - DNA, 501 bp, Homo sapiens
  misc_feature (1)...(501): n = A,T,C or G
atggagnctnnnnnnnatttcaccgttcgcancgcctgcacgaattcggcacgaggccagttccacttttgcagccttctgtgctggaagagaagcccagcgccctggaaggagcctctttaagtcccccatgtcgctttctctctctgctcttttagtgtctgagattgcctttctttgaatttcccagtgtttcttttccttgtcccttccctcaccaacctggagttattttggttgactatgtcctggctttggcttctcctggcaggaagtcatcaggcatcctctccaggtgagccgaaattccaccctcccaggttggacatcatcttttaaacccaatggtctactcccctccttctttatgaaacagtgatttcccgtgagtaactctggttctgattttttgtaccggcgcttaaattctttctgtagacattggaaagccacaaagaacgtgactgcagtgagcctcccactggagcagccttaaccaac

SEQ ID NO: 25151 - DNA, 512 bp, Homo sapiens
  misc_feature (1)...(512): n = A,T,C or G
agtggtnnnnnaattgatcgactgtcgtagagagcacgagacgagatatactaaaattggagcgatacagataagattagcatggcccctgcgcaaggatgacatgctaattcgtgaagcgttccatatctttttacaggtgctttaaaaaggaaaaagtgacccattttgtgtggtagaactgaacaacgatagactgctaacacatactgtctacaaaaatctcaatcctgagtggaataaagtcttcacgttcaacattaaagatatccattcagttcttgaagtgacagtttatgatgaagatcgggatcgaagtgctgactttctgggcaaagttgctataccattgctgtctattcaaaatggtgaacagaaagcctacgtcttgaaaaacaagcagctgacagggccaacaaagggggtcatctatcttgaaatagatgtgatttttaatgctgtgaaagccagcttacgaacattaatacccaaagacacgaagtacatttgag

SEQ ID NO: 25152 - DNA, 489 bp, Homo sapiens
  misc_feature (1)...(489): n = A,T,C or G
cgacgtgacnccaattgatcgcctgaggtagttccgccgagcccagacgctgcccatggaggcgtccagcgagccgccgctagatgctaagcccgatgtcaccaaccagcttgtagatattcagaggaaactgggtatggctgtgagctcaaacacttgcagatctcttaagtatccttacgttgcagagatgctaaaagcggcagatcattcaggccacgtaaagaccaagtgctttgaaatgacgattccacagtttcagaatttctacagacagatcaaggaaattgctgcagatattgaaacggtgtgaagacggattctttgggtgataaattgctatcattctaaagtcatggacttcactttcggggacaccactatgtaaggatggaacatttattgaatgactaatgcactgttgtctttgcatttgtttacataatcaaaatcatacaggcctgaaagcctgggggtgtcatcagctca

SEQ ID NO: 25153 - DNA, 474 bp, Homo sapiens
  misc_feature (1)...(474): n = A,T,C or G
ggatgggganannnagaaaactgagaggctttgagaacnctcacgagctcagccccgcgtacggcctttcacgagtcttcaagccttcaggctttcttctagtcaagatgagtgataaaccagacttgtcggaagtggagaagtttgacaggtcaaaactgaagaaaactaatactgaagaaaaaaatactcttccctcaaaggaaaatggtggaattttccagaacttcattatgtgcgatatggcaagagagaaagtgaatacgctgatataagaagcaagaaaccttccttccttccagatgtgtgtcagtagaattacagagtgtccacggaaacagctcatgccctagtgtacagtggtgcagccaatgagtgacctgaagtctatgagcaacactcattgtcccaatgtgggacgagtgaccgaagctgaacccacaacagccttcctgtgatattccacgtggtggt

SEQ ID NO: 25154 - DNA, 480 bp, Homo sapiens
aggcgccctttgattcgactcgcgctgcaggaattcggcacgagcatcacttctcgcctgtcagtgattccatgtttcgtaacgggggattctctgcctttttgtatcaaagaacaagcaaatggacccccgcccgctgcaggcgcccatagccatcgggtctctaaagctgagtggctagcagcgtttgtttgtttgtttgtttttttttttctgaaggggggacagtcacttcctcctccctccccacccctgtcgcatccacgtgcgacctggaggactggtcaaaaccgttactgtgaatgagtgaagatcctggaggaccctgggccccaggccagctcccatcgctgggggacggtgaacggccatgtgttaatgttacgatgtttttaaaagacaaaaaaaaaaaaaaacctcgggggggggccgggccccaattcccccttatagggagccgaataacaatccatggcccgg

SEQ ID NO: 25155 - DNA, 453 bp, Homo sapiens
  misc_feature (1)...(453): n = A,T,C or G
cgcgggggccccccaattgannnccaatttgaccccgctgcaggaattcggcacgagagtccccagactattcccatcactaccctcttggttaaccctacttccttcccctgtccattgaaccagtcccttgtggcctcctctgtctcacccttaattgattctggcaattctgtgaatcttcctataccatccacccctgaagataaggcccacgtgaatgtggacattgcttgtgctgtggctgatggggaaaatgcctttcagggcctagaacccaaattagagccccaggaactatctcctctctctgctactgttttcccgaaagtggaacatagcccagggcctccactagcacatgcagagtgccaagaaggattgtcagagaatagtgcctgtcgctggaccgttgtgaaaacagaggaggggaggcaagctctggagccgctc

SEQ ID NO: 25156 - DNA, 439 bp, Homo sapiens
  misc_feature (1)...(439): n = A,T,C or G
nggagtgtctggcgcttatggttggctggaggaccatcggcgattctgtggatccgaggaggcggaacaagtccacggagtccctgcacgccaacgtgcagcggctgaaggagtaccgctccaaactcatcctcttccccaggaagccctcggcccccaagaagggagacagttctgctgaagaactgaaactggccacccagctgaccggaccggtcatgcccgtccggaacgtctataagaaggagaaagctcgagtcatcactgaggaagagaagaatttcaaagccttcgctagtctgcgtatggcccgtgccaacgcccggctcttgggcgtacgggcaaaaagagccaaggaagccgcagaacaggatgttgaaaagaaaaaataaagccctcctggggacttggaaaaaaaaaaaaaaaaaaaggggggggc

SEQ ID NO: 25157 - DNA, 492 bp, Homo sapiens
cgcccattgcccgcctgcaggatttggacgaccttagaacagctgaaacattccgaagagggaatggatggggagaatggtcaatacacataagaccgtgtcccaaggagctgatttccaggcccctgaggactggagaccgcttcacccctgcacttcagacaccgtttgtcccccggggcaaggtctccttactctgagcccaggccgttccccttggcttcctccgtccacccaggctgcactgcagtgatggcgcgggaggcaccagctctgtggcctgtgtccagcagctgcgggtctgaaggaatagccagagaggagcacctgaaccccatgggcttggacttcctggggccccgctgggatttcttcgctgctctagctggcaggacacatcccggcctcttccacccattccccctgtggctgaagacattccaacaatggggtgggcccataatagttagccctcagtcagttcccggagca

SEQ ID NO: 25158 - DNA, 477 bp, Homo sapiens
  misc_feature (1)...(477): n = A,T,C or G
atgaccgcctcgatgatcgcctgcggagacgccaagncatctccatgtgaaaaactgaagacagagaaagagcctgatgctacccctccttctccaagatctttactagctatgcaagctgcgcctgctgggaagtagctcagaagaggagctggagagtgaaaatcgaaggcaggcccgtgggaggaacgcacctgctgctgtacacgaaggctccatatcaccccggactctttcagccattaagagagctcttgacgatgacgaacatgtaaaagtgtgtgctggggatgatgtgcagacgggagggccaggagcagaagaaatgcgtataaacagctccaccgagaacagtgatgaaggacttaaagtgagagatggaaaaggaataccgtttactgcaacacttgcgtcatctagtgtgaactctgcagaggagcacgtagccagcactaatgaggggagagagctcacaga

SEQ ID NO: 25159 - DNA, 498 bp, Homo sapiens
  misc_feature (1)...(498): n = A,T,C or G
cggaaaaaaaatagacgccttagacatgcgtgcaggaattctgcacgagattctgcataggtattttgactctgtgcaggacagaaagttgtgtatgtatgactgctctacttttcagatttcttttgtttcaatatatactattttctctagaaattactcaaacaaaagcagccttctatcttgccttgtcttaatgctttaacataaccacactggagatctaactaccaaactgttcattatattattacataccaactttggttacagcatagtgtctttactttagctgatggttctgtaaccttgtgctttttaaagcaatttttatgttttggtgcaaaagttgtccagtgtctcttgttcccttcactagagaacatgcttagaggtatgtttgtaggtatttttgtttagaagaactatttcatgcgctccattttatttattataataggtaaaaagaacaaaaacaggcgtaattcatcaccctan

SEQ ID NO: 25160 - DNA, 510 bp, Homo sapiens
  misc_feature (1)...(510): n = A,T,C or G
agagcgagggcccccaatagcccgcctgcaggtattcggcacgagaaagaacttgttcctggctgatccaagtgcagtggtatttacaactaattgatcacaaccagtttgtagatttctttgttccttctccattcccactgcttcacttgcctagtcttgaagaaaaaaaacaaaaaacaaaaaaaaaccttgttcctttataggttcctggtagaatcagtagagatgatttcagctcattgacatttttttaagctatatccccttgtcattccattgagaaagctgacaactgggatagggaggggattagataatagatggggtcaaattctgtgtgaatgtgaacttgcctagtaagcactttgtctctgttcactactgcgatagaggaaatctatctccctatcttgggtccttgaactacagcctgctgtcttacaccagtggagctaccctttaaatgtacaaattatttgtatgctaatggaatatggtgaaattaan

SEQ ID NO: 25161 - DNA, 495 bp, Homo sapiens
  misc_feature (1)...(495): n = A,T,C or G
ngcggaattgcattcgtgtcggctgtaggaattcggcacgagggaccctgtgttccagcttccaactgcaggaagaacaccaaatggtgaggttggggccatggatctcacacagctacagaaggagaaacaggacttggagcagcaacttctggagaaaaataagaccataaagcagatgcagcagcggatgctggagctccggaagactctgcagaaggagctgaaaatcagacccgataatgagctcttcgaagtccgggagaaacctggacctgagatggcaaacatggcgccttccgtcacgaataacactgacctgacagatgcccgcgagatcaactttgagtaccttaaacatgtggttttaaaattcatgtcttgtcgcgaatccgaggcttttcatcttataaaagctgaagcagtgttgctgaacttttcccaagaggaggagaacatgctcaaggaaactctggaatataagatgtcatggtt

SEQ ID NO: 25162 - DNA, 483 bp, Homo sapiens
  misc_feature (1)...(483): n = A,T,C or G
ttgccccgctgcggattcgcatagctccacttacaaaagtctgaggtgctgacggacgggcacattccgtttttcctgacccatgtcgctgaagaggattcagaaataattgatggatctacagcgcgatacacctgctcactgttcagctggacctgtgggagatgacttgttccactggcaagccactattatggggcctcctgatagcgcatatcaaggtggagtcttctttctcactgtacattttccgacagattatccttttaaaccaccaaagattgctttcacaacaaaaatttaccatccaaacataaacagtaatggaagtatttgtctcgatattctgaggtcacaatggtcaccagctctgactgtatcaaaagttttattggccatatgttctctactttgtgatcctaatccagatgaccccttagtaccagatattgcacaaatctataaatcagacaaagaanaatg

SEQ ID NO: 25163 - DNA, 478 bp, Homo sapiens
  misc_feature (1)...(478): n = A,T,C or G
nttgaccgcctgggaattcgatagctccacttacaaaagcttgaggtgcatgacggaaggccagattttttttttaatgaaattatatagattagatctcagtatttaaactgttcctcaattttgtgaggctgtgttggaaataacccgcctctagtgctgttggtatgcaaggcagcggtgcttaatcaatatttcctgtgctcaccagaggcaaaatgtaccaatatcctgacaccattctctctccatttacttctggtggttaccctgactcttgactcttagaagtgcccgagatggggctaacctttattaaacagatcgcatattatgatcttgctgcagccacagtgcagctccacattaactctacagaccaaaccatttgtatctggcatcacttactaacacacgacatgcgggttttctgcatcaactgctatgacggttaagaatgtcagtatacaagaaggag

SEQ ID NO: 25164 - DNA, 499 bp, Homo sapiens
  misc_feature (1)...(499): n = A,T,C or G
nccgggctggaaattgaagccgattgagcgccttcggctttgatacaccaagtcggatgggcagtttaagaagacagccagtaacagcaagctgaggacctacctgcccgacttccggttcacacccttcaagcaggcggtgaaggagacctgtgcttggttcactgacaactacgagcaggcccggaagtgaagctggaagacaggatcaggtgccagcggaccatcggctggcagagcccagcggccaccacccgtcaaccctgccaggagctgagggcaccacccagcaacctgggcctgcattccatccgctctgcagccccaagcatctttccagtggggcccccattcacgttggtcctcagggaaaccagggtccggggcaggcccggcgctttgctccccacaccagccccctgcgcgtgtccactctgatcctgcatcccactccctgggagccaataaagtgcattttcacagaaaaaaaaaaaaaaaa

SEQ ID NO: 25165 - DNA, 447 bp, Homo sapiens
  misc_feature (1)...(447): n = A,T,C or G
ngagggtaaannntttgacccgcctgaggaattcggcacgagcaccccacactctagttgcccatgtctgattgggggctctagccccttccctcccagctcagtcaatacttgaactcccatcacgggcactttcaatcccgaatgctgggtcttgggtttttttaattcatcttttcacaaaacgtgggcttttaaaaaatatattcctacagtgatgtcaatttttattaatccctgtccccagggagggtgggagccgttgccagtcctacctgaattaggtcgtttttctccctcatccctcaataccctaccacagatcctgcctccacccagttccccacaaagcaccagaggtaggagacctggattcaagtgccagctctgccactgaccctggggccccgacccagccctgcctcctcagccagtgtcttcacacgn

SEQ ID NO: 25166 - DNA, 292 bp, Homo sapiens
  misc_feature (1)...(292): n = A,T,C or G
atacaaannnnnnnnnntttcctttttttgcaactaaaattcaaaccttttaattttttttttttttccacccccaaaaatantttccattttaaaatttaattgatgattaataccttacattcaggttttattttttccaggaccattacaggataattaattttaaatttcctttaaattaaagggctttttttcaaatgagtttaaatgctttttttttttaaacaccttacttgactttttttttttaaaaacaatgcttcctttccaaataaatcacagtcaaaat

SEQ ID NO: 25167 - DNA, 440 bp, Homo sapiens
atcgaccgccatttgacgccgcgctgcaggaattcggcacgagggaaagccttcaactcttctaattcctgtcgagtgcatgaaagaactcatattggagaaaaaccatatgaatgtaaacgatgtggctgatgattcaatcggtccatttctcttctattgcatgaaagaactcatactggagagaaaccttatgagtgtcaacagtgtcataacaccttcagtttttcaagatcccttagagaacaccaaccagctcacactggagagaaaccctatgaatgtgcacaatgcggtaagaccttccgtttttcaagttcccttctaagacatgaaaggactcacaatgcagagaaaccctatgaatgtaaacagcgtgggaaagcctttaggtgttcgagttattatcgaattcatgaaaggtcacacactggagagaa

SEQ ID NO: 25168 - DNA, 488 bp, Homo sapiens
  misc_feature (1)...(488): n = A,T,C or G
atatgcaccgcgctgcaggncgagnatttgccccggctgcaggaattcggcacgagcccggcccgtcccgccggtgtctggcttgcctcagctcacaggcttttcccgagcgccagtccctgccaggacctccgcagccagcaccttctcttgcgacctttttcttaccctctcattcctccctcgccccttcagccctgtcacctcctccttcctagatggcctcccgtgtccttccctttccactgattttatttttccgtttccaaaccaccgtcttgtgatgcctgccatgcttgcgtaccttgcaggacctgaacccgcggcgggacatctcctcctggctggcccagtggttccctagaaccccagccaggtccgtggtggccctgaagacccccatcaaggtggagctggtggcagggaaaacctacaggtggtgtgtgtgtggccgcagcaagaagcagcccttctgtgacggctcccac

SEQ ID NO: 25169 - DNA, 487 bp, Homo sapiens
gccggccaattgaaatcgatcgcattcggaagacgcgcgaggcgcctccgagggccgcctcactgtctcctggcagatcccatggaaccttaaatacctgaaggtgagggaggtgaagtacgaggtgtggctgcaggagcagggggagaacacctacgtgccttacatcctggctctgcagaaccacaccttcactgagaacatcaagcccttcaccacctacctggtgtgggtccgctgcatcttcaacaagatcctcctgggaccctttgcagatgtgctggtgtgcaacacgtagcgagcaggccacagcctggcctcgggaaggtggctcctgcagttcagcgtccctgggcccattaatcccactgtggagacttctgggaactatttattgagcaggcctgtgcctccacatcatcttggtggctctggggtgtggtgtcacagcactcctctttgccctagagataagggacctgacttc

SEQ ID NO: 25170 - DNA, 499 bp, Homo sapiens
  misc_feature (1)...(499): n = A,T,C or G
agcgttgctnnnnttttgtgcgactgcatgaattcggcacgagctgtaagcttgtttgtacaaaaacataccatacagagaaagctgaagacaaacaaaagttagaattcttgaaaaaaagcatgttattgaattatcaacatcactggattgtggataatatgcctgtaacgtggtgttacgatgttgaagatggtcagaggttctgtaatcctggatttcctattggctgttacattacagataaaggccatgcaaaagatgcctgtgttattagttcagatttccatgaaagagatacattttacatcttcaaccatgttgacatcaaaatatactatcattgttgttgaaactgggtccatgggagcaagattagtggctgctaaacttgaaccgaaaagcttcaaacatacccatatagataaaccagactgctcagggccccccatggacataagtaacaaggcttctggtgagatcacaattgcctatactt

SEQ ID NO: 25171 - DNA, 326 bp, Homo sapiens
  misc_feature (1)...(326): n = A,T,C or G
agaagcgtgtnnnnnnnnnnccttggatnggccntcgcggagnnnncnnnnnnnntttgcaccgcctgcaagaattcggcacgagtgaaccagcagattttcacctgggttctggctccggtgtttaacactggatacatctttgatgtgcgaaagtgagttcatcttcagacacatttggtacatccagaaatagatccaagaaatggggtggttgagtgggtccgcacgaaatgcttgattatgtcagcaacacccaacactgtctgttttccatttgttggttttaatcataaaattgtcaagtgaaaaaaaaaaaaaaaaaa

SEQ ID NO: 25172 - DNA, 477 bp, Homo sapiens
ccagccccattgccctcctgcacgaattcggcacgaggacaacttgagacagtttttttaatcttttaatcagtgtagctatgtgctgctgctgctcaagagctggatccatacaggttgtgtgtcatctgtcctcttgaggttcaggagattctaaattgaatattccacggtttgggacagcatccggaagttttccctatgactttatgttttgtattatgtcaaatgttatggcagggcccaaatagcatagccacaagtttggtttatgtgggcataaaattctaaccaaaccccagacatagggagtcatttggagaaagcctgtatgtggtgttttaacctaataaagttgatgagagagaaggggagaggaagcgaacataaagcgggtcaagtgtagtgcatcttttgtatctcaggcgtggcttcttcagtggaccaagctgcaatgcagtattgacttgacagagc

SEQ ID NO: 25173 - DNA, 495 bp, Homo sapiens
  misc_feature (1)...(495): n = A,T,C or G
gggtggaggggnccnnnnnttatgaccgttcgtangacttcggcacgagctcattcctacatcaatgagtggctccaaatagacctgggggaggagaagatcgtgaggggcatcatcattcagggtgggaagcaccgagagaacaaggtgttcatgaggaagttcaagatcgggtacagcaacaacggctcggactggaagatgatcatggatgacagcaaacgcaaggcgaagtcttttgagggcaacaacaactatgatacacctgagctgcggacttttccagctctctccacgcgattcatcaggatctaccccgagagagccactcatggcggactggggctcanaatggagctgctgggctgtgaagtggaagcccctacagctggaccgaccactcccaacgggaacttggtggatgaatgtgatgacgaccaggccaactgccacagtggaacaggtggcaccactgtgctggccacagaaaagccc

SEQ ID NO: 25174 - DNA, 457 bp, Homo sapiens
  misc_feature (1)...(457): n = A,T,C or G
ggaggggagacccnnnaattgannncccaattgactccgcgctgcaggaattcggcacgagccgagccacactgagcctgaaggacatggtgacctacttcatgaacctgagccaggcgaatgctcaggggacgccgcgctgggagctcgagtaccagctgaccgaggcctatggggtgccggacgccagcgcccactccatgcacacagtgctggaccgcatcgctggcgaccagagcacactgcagcgctactacgtctataactcagtcagctactctgctggggtctgcgacgaggcctgcagcatgcagcacgtgtgtgccatgcgccaggtggacattgacgcttacaccacctgtctgtatgcctctggcaccacgcccgtgccccagctcccgctgctgctgatggccctgctgggcctgtgcacgctcgtgctgtgacctgccaggct

SEQ ID NO: 25175 - DNA, 471 bp, Homo sapiens
  misc_feature (1)...(471): n = A,T,C or G
natttgaccctggctgcaggaattcggcacgagccgggatggccccgcagccttcagcccctccttgccttggctgtgccctcttctgccaaggaaagacacaagccccaggaagaactcagagccgtcatgggtagcccacgccgtcctttcccctccccaagtgtttctctcctgacccagggttcaggcaggccttgtggtttcaggactgcaaggactccagtgtgaactcaggaggggcaggtgtcagaactgggcaccaggactggagccccctccggagaccaaactcaccatccctcagtcctccccaacagggtactaggactgcagccccctgtagctcctctctgcttacccctcctgtggacaccttgcactctgcctggcccttcccagagcccaaagagtaaaaatgttctggttctgannnannnnnnnnnnnnnnnnnnnnnnnnnnnnnnnnnn

SEQ ID NO: 25176 - DNA, 483 bp, Homo sapiens
  misc_feature (1)...(483): n = A,T,C or G
catccgaccgcccctnnatcgcaccgctctgcaggaattcggcacgagcggcacgagcaagagagctggagagcacagcacatcaggaagggaagaaacttgagtctggatatgagggaggagggggccacagttagaagtttgaccttctggccgagcacggtggctcatgcctgtaatcccagcactttgggaggccaaggtgggcagatcacgaggtcatgagttcgagaccagcctgaccaacatggtgaaaccccatctctactaaaaatacaaaaattagccaggcgtgtggcgcacacctgtaatcctagcgactcgggaggctgaggtaggagaatcacttgaacccaggaggcgaaggttgcaatgagctgaaatcatgccactgcactccagcctgggtgacagagcgagactccatctctnnnnnnnnnnnnnnnnnnnnnnnnnnnnnnnngnnnnncttctggggggggg

SEQ ID NO: 25177 - DNA, 477 bp, Homo sapiens
  misc_feature (1)...(477): n = A,T,C or G
gattagatccccctnngnnnnncnactgatccgcgctgcaggaattccgcacgagaaggaaagctgattttcttctatgagtggaacatcaaactgggctggaaaggcatcgttaaagaatctggagtgaagcacaagggattgattgaaatacccaatctttctgaggaaaatgaagtagatgacactgagaatttacaacgggaatgattttaccaacgaaagctatggcaacccaggaattgactgtcaaaagaaaactgagtgggaataccctgcaggttcaggcctcatctccagtggcactgggtgtaaggattcccactgtggctcttcacatgatggaactgtttgacacaactgtagagcagctgtatagcatcttcactgtaaaggaggtaagtaactccctaagctagcatgttaagtgctgacattgggagaaaatacattacaaagaacaggagctggtttttg

SEQ ID NO: 25178 - DNA, 493 bp, Homo sapiens
gccccttgcccgcctgcggaatttcgcacgagctccggaggtgcgtcctagccctcatctggggaagcgcacctgcatacagacgggtgcaccggggaggaggcgacctgccgcgtgttcctgcaagcagaaaaggagttaactagtgtcacatttgaagacgagcactgaggatgaggaaccaactgaagaatatgaaaatgttggaaatgcagcatctaagtggccaaaagtggaggatcctatgcctgaatctaagctctgttctggaccagcataaaaggatccacactggggagaagccctatgaatgtggtgagtgtgggaaggccttcaggaacagctctgggctcagagtccacaaaaggatccacacgggggagaagccctatgaatgcgacatctgtgggaaaaccttcagtaacagctctggccttagggtccataaaaggatccacacagttacagctctctcctttctcagcacaagagg

SEQ ID NO: 25179 - DNA, 502 bp, Homo sapiens
  misc_feature (1)...(502): n = A,T,C or G
agggatgggaggannttnnnnnnnnccttgaaaatcgttacgcctgtacgaattcggcacgaggctctgagtcaaatctgggcccttccacaagggtcctctgaaccaagccccactcccttgctaggggtgaaagcattacagagagatggagccatctatccaagaagccttcactcaccttcactgctgctgttgcaactcggctgttctggactctgatgtgtgtggagggatggggaatagaacattgactgtgttgattaccttcactattcggccagcctgaccttttaataactttgtaaaaagcatgtatgtatttatagtgttttagatttttctaacttttatatcttaaaagcagagcacctgtttaagcattgtacccctattgttaaagatttgtgtcctctcattccctctcttcctcttgtaagtgcccttctaataaacttttcatggaaaagcaaaaaaaaaaaaaaaaaacctcgaggggggg

SEQ ID NO: 25180 - DNA, 472 bp, Homo sapiens
  misc_feature (1)...(472): n = A,T,C or G
cggggcccattgacnatcgatccgcgctgcaggaattcggcacgagcagcaggaagaactggacaggaaagctgccgagctggaacgcaaggagcgggagctgcagaacactgtagccaacttgcatgtgagacagaacaactggccccctctgccctcgtggtgccctgtgaagccctgcttctatcaggatttctccacagagatccctgccgactaccagcggatatgcaagatgctctactatctgtggatgttgcattcagtgactctgtttctgaacctgcttgcctgcctggcctggttctcgggcaacagctccaagggagtggactttggcctctccatcctgtggtttctgatcttcactccctgtgccttcctttgttggtaccgacccatctataaggcctttaggtccgacaactctttcagcttctttgtgttcttctttgtatttttttgtcaaata

SEQ ID NO: 25181 - DNA, 338 bp, Homo sapiens
aaccccaacttcgtggcgcgtatgatacctaaagtggagtggtcggcgttcctggaggcggccgataacttgcgtctgatccaggtgccgaaagggccggttgagggatatgaggagaatgaggagtttctgaggaccatgcaccacctgctgctggaggtggaagtgatagagggcaccctgcagtgcccggaatctggacgtatgttccccatcagccgcgggatccccaacatgctgctgagtgaagaggaaactgagagttgattgtgccaagcgccagtttttcttggtatgactgtgtatttttgttgatctataccctgtttccgaattct

SEQ ID NO: 25182 - DNA, 416 bp, Homo sapiens
  misc_feature (1)...(416): n = A,T,C or G
cttggcccccccntgagnganatttgcnccgcgctgcaggaattcggcacgaggcctctttggggtcatcgtcgcaattcttcagacctccagagtgaagatgggtgactagatgatatgtgtgggtggggccgtgcctcacttttatttattgctggttttcctgggacagctggagctgtgtcccttagcctttcagaggcttggtgttcagggccctccctgcactcccctcttgctgcgtgttgatttggaggcactgcagtccaggccgagtcctcagtgcggggagcaggctgctgctgctgactctgtgcagctgcgcacctgtgtcccccacctccaccctcaacccatcttcctagtgtttgtgaaataaacttggtatttgtctgggaaaaaaaaaaaaaaaaaaa

SEQ ID NO: 25183 - DNA, 479 bp, Homo sapiens
attgacccgcctttaggaattcggtacgagcaaacatttgtgtttaacaagggacagtaaactgtgtgtttacagccaaaagaaatgcctcatagttcttaacctcaacttttgtagaagtatttttttctctgtaatatttttattggctcataaagatgttttcgtatctgaactcctaaataagtgaaattacagtagattatattaacaaaatactttttaggtagccatgcttgagactttttaaaaatataactttttccttaaagttttcagctatagcaaaaggtagttatgtatgccagacctaatatgagctgccaccaacacccctagaactttcagccatggtgtcttcagaattgtagcgcatttctgaatctagcaaatcctccttttacccgttgaatgttttgaatgccctgactctaccagcgcccataaatgatctctagaaggactggtagtaccaatct

SEQ ID NO: 25184 - DNA, 487 bp, Homo sapiens
  misc_feature (1)...(487): n = A,T,C or G
gattgaacngcccattgacccgcgctgcaggaattcggcacgagcttgtaggtcctgtctagggaacttatagaaatgctggcaatttcaagaaaccaaaagttgttacaggctggagaggaaaaccaggtcctggagatgttaattcaccgagatggggaatttcaagaactaatgaaattggcacttaatcagggaaaaattcatcatgaaatgcaagttttagaaaaagaagtcgagaagagagacagtgatattcagcagctacaaaaacagctaaaggaagcagaacaaatactggcaacagctgtttaccaagcgaaggagaaactcacgtcaatagaaaaagcatgaaaaggtgctatctgctctgaagaaataactaagtatgcacataggatcagtgcaagtaatgcatgatgtgctccactgacctgggttccatgggacccccggagaccctacccaactgagttagagatgagag

SEQ ID NO: 25185 - DNA, 500 bp, Homo sapiens
  misc_feature (1)...(500): n = A,T,C or G
gggggagggaaggggnntgnnnnnnnaattgatcgtcttagngcacttcaaanagccaagagagtcaaaacagaggatgaaaaagagaaagacccagaggagaagaaagaagtcaccgaagaggagaaaaccaaggaggagaagccagaagccaaaggggtcaaggaggaggtcaagttggcctgaatggacctctccagctctggcttcctgctgagtccctcacgtttcttccccaacccctcagattttatattttctatttctctgtgtatttatataaaaatttattaaatataaatatccccagggacagaaaccaaggccccgagctcagggcagctgtgctgggtgagctcttccaggagccaccttgccacccattcttcccgttcttaactttgaaccataaagggtgccaggtctgggtgaaagggatacttttatgcaaccataagacaaactcctgaaatgccaagtgcctgcttagtagctttgga

SEQ ID NO: 25186 - DNA, 504 bp, Homo sapiens
  misc_feature (1)...(504): n = A,T,C or G
nggcaggncnncaattgaacgcctgcggttgtttttcagatggagttaccctgttgttgcccaggctggggtgcaatggctcaattttggctcactgcaacctctgcctcccaggttcaagtgattctcctgcctcagcctcccaagtagctgggattacaggcatgtgctaccatgcccggctaattttttgcatttttagtagagacggggtttcaccatgttagccaggatggtctcgatctcccgacttcaggtgatctgcccgcctcggcctcccaaagtgctgggattacaggcatgagccaccacgcctggctcttgagacaaattctaatcccacaagctttagaatggtctctccttactttttaaaacatacacaccctatgattatgagtgatctagcttcttcagggtctcttcnntccatnttacccccaagaaactccttaaacctctctgttaggccctagctcaataggatggaacgtttccccactc

SEQ ID NO: 25187 - DNA, 463 bp, Homo sapiens
  misc_feature (1)...(463): n = A,T,C or G
agagaaaaaattttgttcgacccgcgctgcaggaattcggcacgagtgaggttggacgtggggaatttctcctggggctcacagtgttgtactcgtaaaacaaggatcatcgatgttgtctacaatgcatctaataacgagctggttcgtaccaagaccctggtgaagaattgcatcgagctcatcgacagcacaccgtaccgacagtggtacgagtcccactatgcgctgcccctgggccgcaagaagggagccaagctgactcctgaggaagaagagatttttgtccccctaccaactacccatgcacaagaattaaaaataaatactccctgggggggggccgcgcccccgccttcctttaaaggggggttgacaaaaaaccagggggccgttttatgcactctgagggggagggaaaacntgngtttttcaaaaaaaaaaaacaagctattgggttctg

SEQ ID NO: 25188 - DNA, 490 bp, Homo sapiens
  misc_feature (1)...(490): n = A,T,C or G
ntttgcccccgctgcaggaattcggcacgagcaggataatgtggggaggcagtggtgaaactactttagaagaaagtgttagaagaaagtgtcatctgtgtaagagaaaacatttgagctggtacgtgaaggattagaaggaaccacaagtgggctgaggggaggaataataaaggcaaagacccagaaggcaagcacaaacttggcatgtttgagaagttagaagtgtgtcatctgtgtctctgtcatgaggagtgctcaagttccctctaggagccttatgggctatctagctctttttctcttctgatcacgtgcttgcttgctttcttctttgcttatatagcagagttcacaaattaaatctaatgtaggctggttaataaaggaaatgaacatgaattcactgataggctcttgcattaatgtgaaaatgtaaagtctgttgtacaccatcaggccttctaaatgaagcccaaattctgtaagg

SEQ ID NO: 25189 - DNA, 496 bp, Homo sapiens
  misc_feature (1)...(496): n = A,T,C or G
aggtgtnntaatcgacgctgaggacttccgccgaggagagagagagagagagagagagagagagagagagagagagagcaaaatactagagagcagagcttacctcagtgtctgtccccaccccatcccaggtcaccacctgggtgaccccaggtccccgacccaacaacaacccctcccaagtccctaactctctcacttggactagagacccttcacaccccaggagcgctccgtctcccacttgacatcatgctttctggaaacttccccgtatgtcccactttcacacacttggcgccctggagcaccttccggtctatacatgctgtacgttcccgtgagagcacccttctctcggtctgtggcccacacagtcccacccatgtgtgggtaacaagggagagtgggtgttcttttcagccttgctaaactctctgaaacagagatcacaaactacaggctgcaggccaaatccagcacacagtctgtgtgg

SEQ ID NO: 25190 - DNA, 335 bp, Homo sapiens
  misc_feature (1)...(335): n = A,T,C or G
cgccccgccccattgacccngccangnattattccccgcgctgcaggcgggtctgtggagagccgggtgcgagcggcggcagcacgaggggaaaagagctgagcggagaccaaagtcagccgggagacagtgggtctgtgagagaccgaatagaggggctggggccacgagcgccattgacaagcaatggggaagaaacagaaaaacaagagcgaagacagcaccaaggatgacattgatcttgatgccttggctgcagaaatagaaggagctggtgctgccaaagaacaggagcctcaaaagtcaaaagggaaaaagaaaaaaaaaaaaaaaaa

SEQ ID NO: 25191 - DNA, 468 bp, Homo sapiens
  misc_feature (1)...(468): n = A,T,C or G
aactggatnncccccttgatccgccctgcaggaattcggcacgagtccacctctcgtatcatggatcccaacattgttggcagtgagcattacgatgttgcccgtggggtgcaaaagatcctgcaggactacaaatccctccaggatatcattgccatcctgggtatggatgaactttctgaggaagacaagttgaccgtgtcccgtgcacggaaaatacagcgtttcttgtctcagccattccaggttgctgaggtcttcacaggtcatatggggaagctggtacccctgaaggagaccatcaaaggattccagcagattttggcaggtgaatatgaccatctcccagaacaggccttctatatggtgggacccattgaagaagctgtggcaaaagctgataagctggctgaagagcattcatcgtgaggggtctttgtcctctgtactgtctctctccttgcccct

SEQ ID NO: 25192 - DNA, 496 bp, Homo sapiens
  misc_feature (1)...(496): n = A,T,C or G
nccgggccnnnattgaacccaattgagcgcctgcggaattcggcacgaggtttttactatcaaagctggccgcaaagcagtatcctgtacaccactctatgttgaaataagactgaaaaatacctgcaccatagatggattcttgatgttattatatgtcattcttaatgaaaatgaaaacttccctagggaactctctcttcattttggtagagagtttgtagactgttttctttacttaatggacacctacagttttacaactgtgaagctactttggatttgggacaagatggaaaaacagcaatacaaatctgaagtccataaagcttcattaataattgatttgtttgggaatgagcatgataattttacaaaaaatcttgaaaatctcatgtctaccattcaagagagttactgttccaactggcgatgcccaactcgagtgcaggaggatcagcagcgcacaattaatataaatcctccccaagaaatt

SEQ ID NO: 25193 - DNA, 450 bp, Homo sapiens
  misc_feature (1)...(450): n = A,T,C or G
cgcgggngtnnnnaacttggtactgcatggccgtacgcacatttactattcggacaaatacgacgacgaggagtttgagtatcgacatgtcatgctgcccaaggacatagccaagctggtccctaaaacccatctgatgtctgaatctgaatggaggaatcttggcgttcagcagagtcagggatgggtccattatatgatccatgaaccagaacctcacatcttgctgttccggcgcccactacccaagaaaccaaagaaatgaagctggcaagctacttttcagcctcaagctttacacagctgtccttacttcctaacatctttctgataacattattatgttgccttcttgtttctcactttgatatttaaaagatgttcaatacactgtttgaatgtgctggaaaaaaaaaaaaaaaaaaaaaaacctcgggggggggcccggac

SEQ ID NO: 25194 - DNA, 496 bp, Homo sapiens
  misc_feature (1)...(496): n = A,T,C or G
aggggggggagggnnncnnnnnnaattgatcgtgtgtagaccttggccgaggaaatcctcaatgtcgccattgttggctacctgagaccagaaaagaactttgattctttagagtcacttatttcagcaattcaaggtgatattgaagaagctaagaaacgactagagttaccagaacatttgaaaatcaaagaagacaatttcttccaggtttctaaaagcaaaataatgaatggccactgatgaaaaattgtattatttattcattcactgttttctagtgtttctgtgtttattactgttcagcatcatcttggttatatactgaaaatcaaacactttactacagttgtgaattagtttaaaccgtacaatgctgttatcatatcatgcttcaactattaaattaagcccatcatatcatagcactaaaaagattgagttaaaaataagatttaaaaaatatatattgattaaaatgtaccactagaaaggg

SEQ ID NO: 25195 - DNA, 479 bp, Homo sapiens
  misc_feature (1)...(479): n = A,T,C or G
agaaanagcttgaacgccntgangaaacttgatccggctgcaagattcggcacgagaagggttagcctggggaggtcactgtctcttcaagagctccaaaaataaacagaggccaggcctggtggctcacacctggaatcccagcacttttggaggctgaggcagggggatcacttgaggtcaggaggtcaagaccagacttggcaacatggtaaaaccccatctctactaaaaatacaaaaactagcagggcagggtgacccacacctgtaatcgcagtcacctgggaggctgaggcaggagaatcgcttgaacccgggaggtggaggctgcagtgagccaagatcacgccactgcactccagcctggtcaacagagcaagactccatctcaaaacaaaacaaaagccaggcgtggtggctcgcgcctgtaatcccagcactttgggaggccaaagcgggcggatcgtgaggtcagga

SEQ ID NO: 25196 - DNA, 488 bp, Homo sapiens
  misc_feature (1)...(488): n = A,T,C or G
agggggnnnattgaaattcgatcgcctgtcggaattcggcacgagaatcccagctacttgagaggctgaggcaggagaatcacttgaactcgggaggtggaagttgcagtgagctgagatcgtgccactgcacgatccgcctgagcgacagaatgagattccatctcaaaaaaaaaagtacataatacctactttagagattgtcatggaaatataaagtatggggcccttactaatgctagataatgctttgctttcttttatttgcatcttaccctcttccgtgagtattgatactgtcttaaacatagtaggggttgattagatatttgctggttgccccttcacttgcaagggatacatacaaatgttggtttgtattggataatgaatatgatgtttttaagagtaatatgtgattttgttactttttgaaggccttaacaacattaacactagtaaaagaagtagtaacatttagtctgtcn

SEQ ID NO: 25197 - DNA, 499 bp, Homo sapiens
  misc_feature (1)...(499): n = A,T,C or G
agacgggctnnnaaattgatcgccngcttgaatncccctgaggagaaacccatttatactctactctcagtatggattattaatgtattttaatattctgtttaggcccactaaggcaaaatagccccaaaacaagactgacaaaaatctgaaaaactaatgaggattattaagctaaaacctgggaaataggaggcttaaaattgactgccaggctgggtgcggtggctcacacctgtaatcccagcactttgggaggccaaggtgagcaagtcacttgaggtcgggagttcgagaccagcctgagcaacatggcgaaaccccgtctctactaaaaatacaaaaatcacccgggtgtggtggcaggcacctgtagtcccagctacccgggaggctgaggcaggagaatcacttgaacctgggaggtggaggttgcggtgagctgagatcacaccactgtattccagcctgggtgactgagactctaactaaaaaaaaa

SEQ ID NO: 25198 - DNA, 463 bp, Homo sapiens
attgcccgcctgcagaattttgacgagctcctttgtacgtaaattggcacctaatgagtttcctcacaaactctacattcagaattatacatcagctgtgccaggcacctgcttgaccattcgaaagtggctttttacaacagaagaagaaattctcttaaatgacaatgaccttgctgttacctacttctttcatcaggcagtcgatgatgtgaagaaaggttacatcaaagcagaagaaaagtcctatcaattacagaagctatacgaacaaagaaaaatggtcatgtacctcaacatgctaaggacttgtgagggctacaatgaaatcatctttccccactgtgcctgtgactccaggaggaaggggcacgttatcacagccatcagcatcacgcactttaaactgcatgcctgcactgaagaaggacagctggagaaccaggtaattgcatttgaatgg

SEQ ID NO: 25199 - DNA, 496 bp, Homo sapiens
  misc_feature (1)...(496): n = A,T,C or G
gannnnnaggggggangcccggangttannnnnaaatcgatccgccttcaggaattcgccacgaggaccaatgccagccagagtcctgcgggggtgggcccggccctccctggatctcctccctcctcccaggggttcagatgtggtggggtagggccctggaagtctcccaggtcttccctccctcctctgatggatggcttgcagggcagcccctggtaaccagcccagtcaggccccagccccgtttcttaagaaacttttagggaccctgcagctctggagtgggtggagggagggagctacgggcaggaggaagaattttgtagagctgccagcgctctcccaggttcacccacccaggcttcaccagccctgtgcgggctctgggggcagaggtggcagaaatggtgctgggcactagtgttccaggcagccctgggctaaacaaaagcttgaacttgccacttcagcggggagatgagaggcaggtgcn

SEQ ID NO: 25200 - DNA, 466 bp, Homo sapiens
  misc_feature (1)...(466): n = A,T,C or G
nattgancggttgtagaactcgcaaagaaggtctacaaacccgcctccatgtcagtgttggggggtgccttgagcacttcttttatttcatataggaaaatgcacatctttcatttgtctcccaaaagatgatttccataaaaatatacttcaaagtatttactgtacatagacttcaatgattttatttccagcatcaaactaaacatttctaaccttttaaataaatggggaatttagtttcatgagaatttttactgacaactaataaacactgtatgtgtacatattcatatacactgcggactggagaaagacagcatggaaataaatttcactgagatccagaaagtagcaatataggacttttaggggtatgtattagtgtaaataatatatgtgcagtctaggctaatcattttaattaaaaacaaataagcatacttttttgctttaaaaatatgcc

SEQ ID NO: 25201 - DNA, 498 bp, Homo sapiens
  misc_feature (1)...(498): n = A,T,C or G
ggtgtnncctctgancgtctgaggacaagttcctctanagttaaatcaaaggtggtttgtctagcagagagccagaatcttctaatagtgggcagagcccagagacaaggggaagaaagatgaccttctccccagtccttcccagcaccatttttgtttcacaccaggcttgtggcattttggtgctcacaggggttttgccttctgacctctccttggagtaggccattctcatgcagggctcaccctgaggcaggaggaccaagggctccctgcgtccacggaccacgtatgccttggtggtcactcccatcggggctatcagttctgcactgtgccctggtgcggattttaatgcatatttttatatataaatgttcccaaaggccaaatttgttgccaggttttatacgcaggtcaccataatttgtattatgttccctgagtcaatgaaagttttctttagacttcttanntannaagagaagaaagaaaatg

SEQ ID NO: 25202 - DNA, 237 bp, Homo sapiens
attgcccgccataggaattcggtacgagcggcctgatgctccctcccctgccctggtccagggaagctggccgagggtcctggctcctgaggggcatctgcccctcccccaacccccaccccacacttgttccagctctttgaaatagtctgtgtgaaggtgaaagtgcagttcagtaataaactgtgtttactcagtgaaaaaaaaaaaaaaaaaacctcgggggggggcccggac

SEQ ID NO: 25203 - DNA, 463 bp, Homo sapiens
  misc_feature (1)...(463): n = A,T,C or G
atcgaccgcctgcagaattttgacgacagaaaggccatgtgaagacacggtgagaagacggccatctgaaagtcaggaggagtatcctcttgagaactgaatcaagctagtactttgatcttggacttccagcctccagaactgcagtgttggtctgcaagcttcaagagccagtgaccctgactgccaagtgatttgccgaagggaattatggttttgcatttgatggtttccaggaactgctaagagtgagatcatccctgaagcagtgactgccagaggaaggcgagagacatatggtggccttacagccatgtgaagtgcctcactccctgttcaccttccaccatgattttaagttctgtgaggcctccctagaagctgatgccaccatgtttcctgtacaacctgcagaatggaagcctgtcagccagcagcatgaattcgagccacatgtgcatan

SEQ ID NO: 25204 - DNA, 512 bp, Homo sapiens
  misc_feature (1)...(512): n = A,T,C or G
agggcgagggcgcccccaattgccccgcnctgcggattgacccgcgctgcaggaattcggcacgagtggaatcttcccttgaagaggaccatagaattttttggctgattacaggaattatgttcatgggaagtggcctcatctggaggcgcctgctttcattccttggacgacagctagaagctccattgcctcctatgatggcttctttacctaaaaagactcttctggcagatagaagcatggaattgaaaaatagcctcagactggatggacttggatcaggaaggagcatcctaacaaaccgttaggaacagccccgtggatactgaagttttttttatggtagttacaggaaacttctgatactctttttattattttcttgtatagagtcagacacttgaaaaaaactaatggttgaagacaaaatattttggcaggcccaatacagaactggattgcatttccagaatctgagntaaagaacaaagaattgcttgtaaaaggca

SEQ ID NO: 25205 - DNA, 478 bp, Homo sapiens
  misc_feature (1)...(478): n = A,T,C or G
nttggaccgcgcttaggaatccggtacgagcatcatcgaaaggaagcctggcagtcacataggacagatgaaaatattgatactccaggaacccccaaaacgcacagagtaccttcagcaacttccaaaggagcagttgctagtggccatttacaggaatcagccacttcagttcagacagctttattaaaccgcctggagcgaattttcgaagcatgttttccttccatacttgtccctgatgctgaagaggaagttacttccctgaagcacttgctggaaacaagcactttgccaataaaaacgagagaggccttacctgaaagtggggaattgctagatgtgtggactgtgctacaggatatccatgatgcacatggcttgagataccagtggggcggctcccatagcaacaagaagcttttgtcctccttgggaatagacacccgaaacattctcttcacggcaataagaacag

SEQ ID NO: 25206 - DNA, 400 bp, Homo sapiens
  misc_feature (1)...(400): n = A,T,C or G
atttgacccgcccttttgcaccgcgctgcaggaattcggcacgaggtttgtcttctctcaagaaatggtgttcttctctgacctgaaatacgaatgtagagatccctaatcatcaaattgttgattgaaagactgatcataaaccaatgctggtattgcaccttctggaactatgggcttgagaaaacccccaggatcacttctccttggcttccttcttttctgtgcttgcatcagtgtggactcctagaacgtgcgacctgcctcaagaaaatgcagttttcaaaaacagactcagcattcagcctccaatgaataagacatcttccaagcatataaacaattgctttgggttcctttntgaaaaaaaaaaaaaaaaaactcgggggggggcccggaa

SEQ ID NO: 25207 - DNA, 484 bp, Homo sapiens
  misc_feature (1)...(484): n = A,T,C or G
ggcgncnaattgacactgtatcgtatgcggaattccgcacgagggaagaactacccttttgagagtaagaatagctttgtttaaatatgtcgtaagaagggttaggctgttgcaggatgggttttggtattaaaaagtcagtttgctggatagaacaatggttgttaaagtgcagttttatttaatacaatcatttttaataaagcctgacttctggtcataatccttgaactctagttcagagtgtgctatgcactgtgcctttttagagcctgttctaacctgagattggcagattcacctaaatattacgtgtttacatgtgtttttctggggaaaatgggtccatgatactctaagggagctaatgatgaaatcagattgaacagtgaaagtttcttttgaggtaaacttttctgagaatgctttctctttctgataactgtcttgctggaaaactctaccgagagannngagtgagagc

SEQ ID NO: 25208 - DNA, 474 bp, Homo sapiens
  misc_feature (1)...(474): n = A,T,C or G
nattgacccgcgcttaggaattcggcacgaggtctctgccggccccttagcatgagcgagggggacccagccgggtgacattgtgcccgttggcggattctcgatttcccctcttccccgtcctcgtcctcctcctcccccatgaagtgattctgagtatcggggggtctctggattattgttctgacgaacccctgcttgtggttggggggtatttaatctgaggccttagggtccttcggtgtctttgagtggtttgtgtgtacatattttgctcttaaaagttataaatatacgtatattgagagtggggnnnnnnannnnnanaaaaaaaaaaaaaaaaaaaaaaatcttgggggggggccccggcccccaatcccccttaaggggagggaataaaaattcctgggccggttttaaacaacggggggggggggagaacnnnnntntttntgggcctttcttttttgtttg

SEQ ID NO: 25209 - DNA, 491 bp, Homo sapiens
  misc_feature (1)...(491): n = A,T,C or G
cgtgggataaaacggagtataaaggganaaaaagggttgaccgcctgtggaganccctggcgccttgaaacaagaacagggtaacagggatgttcagggaacaagggagataaccattaggtctgactgcctgttagtcgggtggaacagagccatgtttctcttcttacaaaagtgaataggagaaatattgctgaactctttttctcagcaaggaacagccctgtgaaagagaatgcgttcctagggggaggtctctaaaatggctgctctaggaatgtctgaattatatggttgctgataagggataaaataagccccagtctcctgtagcactcccaggcctattaggatgaggaaattcctgcctagtaaattttagtcagactgattgtctgccttcaaactctgtctcctgataagatgttatcaatgacaatgtgtgcccagtggggcatgatacttcattagcaattttaatttcgccctgg

SEQ ID NO: 25210 - DNA, 493 bp, Homo sapiens
  misc_feature (1)...(493): n = A,T,C or G
ggagaaattgacgcctgtagaaattgaccgacttcgagagaatggngtaaacactgaagagtggtctgatggttctgtttgctgaagaaaaaaaaagtggttaaaggactagtgaaatcaaagaaggtgatttcaacctttccttttactgagtttgaattgttacgcgaatcctaaatagaaatgtcttgtcaagcaaacatctaggacagcattttaagatatttactaaataagtaaaagaagatatgggactattgaattgtagatatagtcatttctgtggatgtattagttgtctccctggagtcagaggaactcagagaatgaatgtagaaatgggataatatgctggtgctattgactcacttataggacagtgtgatcggtgcacacccctgaaagccctgctttttccaacagttccattgtgaacgtgcctggtgagtctactcttcgccgagatttcctgagactgcagcaggagaacaag

SEQ ID NO: 25211 - DNA, 504 bp, Homo sapiens
  misc_feature (1)...(504): n = A,T,C or G
agggaaaattgatngccngtngnattactgaccgccttcangaattcggcacgagcggccacagaggacagtgccccaaaggagagcctcgggtgtcacgactgccacgccatcaaaaactgccggaaatgggaagttttcaggatgacccaccaagtgcttttcccaagggtctgggctctgagttggaacccgcttgcctgcactccatcctgtctgcaacgctgcacatgtatcccgaagtgctcctgagtgaggagacaaaacgcattttccttgatcgtttaaagcccatgttttcaaagcaaacaatagaattcaagaaaatgcttaaaagcacctcagatagtctgcagataacactggggttactggctctgcaaccttttgaattagcaaatacattatgccatagttaaggtacaagcagaacaataccaatagattaattttaagagttgtcttagaatgatttctttcgcattaagtctggatgcaaactgt

SEQ ID NO: 25212 - DNA, 497 bp, Homo sapiens
  misc_feature (1)...(497): n = A,T,C or G
agcgggnnnnnttttgacaaccgatccgccctgcaggaattcagcacgagcaccagtgaggctattgggtaaccacctttctatacaggagattggaatctactttgtcatttatccaccacagtgacaaaggaaaagtggtgccgttatgcaatccatttaactcataaacatattactctgagtaactggccagccattcatcggatccttcattgggtactcctgaaatcagacatgttcctgtagaaagaattttaagttaggctttctatgcacctatcaagaatcaagagaatagattgtatcaaacaacggcagggaaatccttcagcaattctaatccactttgggttttcagctgtttttacatctaaagcaatagactagaactgaattatcttctacatagtaaaatcacaattgtggaattacaggaattctggtgatattaaggtgaaataacaaaacacaaaaggccctattttaacagttgn

SEQ ID NO: 25213 - DNA, 503 bp, Homo sapiens
  misc_feature (1)...(503): n = A,T,C or G
cggaactgacggctgatggancggctgtagcaaatctgcgcatcctcttttatatttttaaaatactgtttaacatttgtgagaattttatgaaaatgcttttgtatgagctgtggctttttcccattgtgaagcattgaatatcacattttggaacatgttatagggtgagtccctggatctttgctcaccagatccaagcactgcttctcggtgtcattgcagtgtgctgcttgtcacccagaatactactatcatgtgaattctttttgtcgtcagtgtcttttccttagtctttttgttgttgttgttgttgttgttttaatcattccttttttaagaagaagtaattttccatttatgaagcagtatgaattagatgtattttcaaaacaggtccctaagacaattcttcagatcatttttaaaatgactaagtcantttagtatgtcaagcaagataaaaattacatcataccgtctattttgcccatagtgccatt

SEQ ID NO: 25214 - DNA, 499 bp, Homo sapiens
  misc_feature (1)...(499): n = A,T,C or G
ngggnaaggtnnnnaatttgacncgcccattgacaccgcgctgcaggaattcggcacgagccccattctgcccctggtaggccccctggcaagttcgcctacgagtctctaaacggggtctttctgactccgaaactaacagatcttgactccagaaaagcgtcctgcctgtcatttatgatatttgtgaaagacctaggaacaactgaagctaacacctgagatactgaaggcctggaagagttaggtacggctgatgacactgttgaaaagtcataaacgcacccaagttgagcaagaactgtgttggcccgtgtgtgagaaaaaatagccacgtccagactgggagaatttactacttccaaagacaagttaatagaagcggcacaggacatggaagtatggagtggacaggttaccatttgtacgcggtgattgatttttaaatgtgctgaactagcaaacattttttttaatggggcaatctaaacaggggtgg

SEQ ID NO: 25215 - DNA, 484 bp, Homo sapiens
  misc_feature (1)...(484): n = A,T,C or G
aggaaaaaaantttgcccgcctgttgaattccgctcgagggagactgcagttgcagttgctccgtgtaggctgttcttgactctcgtatgaaagcccacgcgatccaagtgccctgcaggttttggtccagggaaaagttggtctctgcagatgactgtaaatgactacctggaggtcgattaaagtgcggtactgcgggattcaaccgatttccttcttcctctgactgcccggaaatatcagccaaaggccagcgttctaaggacatatggaattggctatggataattcatatgctttcaatcaacgaagcacatgtaatggaattccatctgagaagaaaaacaacttccttgtatcagaagatcatggacaaaaaatgttaagtgtactacagaattttagagaacagaatgtcttttatgattgtccaatgattatgagagatgagacaatcccgtgtcatcgttgtgtggtagcaan

SEQ ID NO: 25216 - DNA, 465 bp, Homo sapiens
  misc_feature (1)...(465): n = A,T,C or G
nttgaccgcctgcggaattttgacgacactgagggnggggaacatgggggctatgctggggaaagcagccatgctccccccgacctccagccgagcatccttcatgagcctgcagaactgctttcctatgtttacccaggggacctcctttcagatgaactgggaagagatgaaatgttttttcatatttaaataaataagaacattaaaaagcanaaaaaaaaaaaaaaaaaaacctcggccccggccccaggatgcgggctttgcctaaggcccgggaaactgccccacttggccctgagggagaacccaaagggttgccttggccgattttggtttcaaaaggacctgggggttggctctcctttgcccccccccagggggtgccaaggggcacccccaacttgggcccccttgcttttcttgttttgccacaaacggccctttgagggcaccctgttgtac

SEQ ID NO: 25217 - DNA, 513 bp, Homo sapiens
  misc_feature (1)...(513): n = A,T,C or G
agcggggnnnnnnatttgatcgactcgcctgcaggaattcggcacgagcccccgtgttcctgccgtcagtgccaactgccgcatgtggaagcatctacccgttcactccagtcccaccccacgcctgactcccctctggaaactgcaggccagatggttgctgccacaacttgtgtaccttcagggatggggctcttactccctcctgaggccagctgctctaatatcgatggtcctgcttgccagagagttcctctacccagcaaaaatgagtgtctcagaagtgtgctcctctggcctcagttctcctcttttggaacaacataaaacaaatttaattttctacgcctctggggatatctgctcagccaatggaaaatctgggttcaaccagcccctgccatttcttaagactttctgctgcactcacaggatcctgagctgcacttacctgtgagagtcttcaaacttttaaaccttgccagtcaggacttttgctattgcaaatagaaa

SEQ ID NO: 25218 - DNA, 506 bp, Homo sapiens
  misc_feature (1)...(506): n = A,T,C or G
tgggtnnnnnattgtcgcctgtcgattcggcacgaggcgacagcaatcccgccccggcctgtcgggagcggtggggcagaggctgcggagccccaggaggatctgcctccgctttcacagtcctccagatttttccaagagcagcagaaaatgaataaatccctggggccagtgtcattcaaggacgtggctgtggacttcacccaggaggaatggcagcagctggatcctgagcagaagataacttacagggatgtgatgctggagaactacagcaatctagtttctggtatcacattatcaaaccggatgttatcagcaagttggagcaaggagaagagccatggatagtagaaggagaattcctacttcagagctatccagatgaagtctggcaaactgaggacctaatagagagaatccaggaagaggaaaataaaccttcaaggcaaactgtgttcattgagaccctgattgaagagagaggtaatgttccttgtaaaacn

SEQ ID NO: 25219 - DNA, 485 bp, Homo sapiens
  misc_feature (1)...(485): n = A,T,C or G
catcgacgcccctnattgaccggctgcggtctgtgctgagatttgaagaccagataatgaaactgaaaagcaaacaattttactgaatctgtctacccttcattcatgagaactccagaatgagtgttgaccactgaagcatcttttaagtctgtgttccattgtgccattcaggtttgctgtcacatatgcatcatctgaaatcatttgaaatttttgtacaataaaatatcctggatttgatcctgaaggaaactagtaagatcagatttttgggtcatgtctgttgtattttcagtaatgtgatttcagatggtcatctggattctcccacttctctactccattatttctctacttttccttccagcaaacctgaaacgtgagggagatggattaatgtgagtaacaggaatgtgtctttaaaaagctagagtggttacatttaatcaggcagtacgataatttgggttcttgagttgatt

SEQ ID NO: 25220 - DNA, 477 bp, Homo sapiens
  misc_feature (1)...(477): n = A,T,C or G
cgggggccccnnnacnaattgacaatcgatccgcgctgcaggaattcggcacgaggtccgatgtgaaatgccagaacttgttcagcacaaactggatgacatttttgagccagtccttattcctgaacccaagatccgggctgtttctccacacttcgatgacatgcacagtaatacagcatccacaatcaatttcattatctcccaagtagccagtggtgacatcaacacaagtatccaagctctgacacagatcgatgaggtcctgagacaggaagacaaagctgaagccatgtccggccatattgatcagtttctgatagccacttttatgcagctaagactcatctacaacacacacatggcagatgagaaattggagaaggacgagatcatcaagttgtatagctgtatcattggcaacatgatttcgctgtttcagatagagagccttgcccgggaggcctccactggagt

SEQ ID NO: 25221 - DNA, 455 bp, Homo sapiens
  misc_feature (1)...(455): n = A,T,C or G
atttgccccgttctgcaggaattcggcacgagcccggatttactctgtcccaccgtccacctccaccccggcctgcacctctcgcttagggtagaggcctggcctccagtgccatctcccgacagcctcccccaggtgaaggtcatgcttcagcactgcctccctgacagaggctctgatgatgggatgctctgactcagactcaggtgagaaatttgaaggaacagaatgctcttgcctagcagttgccgggaggggtcaggtgctgcccccagagaagtgggagagttagaggtccgtgaggcatactttccccaaagggggcagaaagcatgaagtggtcagcatagaaactcgtctccctgccatccacacagtcccaaggcatgctggttctacatggcttgtctggaagctgtccttgaatgtaaagntgttttcagctcaataatgta

SEQ ID NO: 25222 - DNA, 490 bp, Homo sapiens
cattgcaccgcctattgacgcgctctgcggaattcggcacgagttcctaatgctgttctgtgaggtttttggatgcctgttccctttgtgagaatagataatctgaagcacaagaaaaaggccctattgctctatttgggccacagagtgagggtccccatcctctccaaacttgccacaccccagcctgaggacgtcactggggaaagaagatcaaggcccatctgaggactccaaacctctgagcccagaccagggctcacgaaatgtgtcctgactgtctggccaagcagccattggattaattttactggagttttcacaaggtccccaacccactgagagccacctccatcactcaatacaacctctgcattcaccatccttcaagtccatgagacctgattcttccagggtgctggacaagaacctgggtaccaagaggacaaggtgtaagaagctgtcaccctgactgtccactgagctggat

SEQ ID NO: 25223 - DNA, 493 bp, Homo sapiens
  misc_feature (1)...(493): n = A,T,C or G
gggggagtannnaattgacccgcctgcattaattcgccacgagcaggagaggagtcaggccgcgactgtgcaggagatgactttcccagctttgctggcttcagaagcctttgtacataagagatgctgctacccaagcaccaaagacctgttaagcatgtgcactactgaccacgactctggtctttcctgttgttggcccctctggggctctacagaaacaggctgggttccaggagcccatctccccgctgtctccccctgccccgagtctggaagagggcaaggacacttccattcctctgtaccatggagtcctgcagccccttaacccctgcgtggcaactgtgtacagcttacccctgcctccagttgcaccacttctagatgtgcctttaaaagatctaactatgggatgggagaacttgagggtgatcgggaacctcccctgctgagggtggtgtcagggttccgtgactccagtgggccagtg

SEQ ID NO: 25224 - DNA, 511 bp, Homo sapiens
  misc_feature (1)...(511): n = A,T,C or G
gtacatcgannanaganannnnnnnnattgacccgcgctgcattgactcgcgctgcacgaattcggcacgaggaggcgctgaacacggcgcagggcgcgcgcgacttcatctacagcctgcactccacggagaggagctgcctgctcaaagagctgcaccgcttcgagtctattgccattgcccaagaaaaattggaagctccaccacccaccccaggacagctgagatatgtattcatccacaatgcgatacctttcatagggtttggctttttggataatgcaattatgattgttgctggaacccatattgaaatgtctattggaattattttgggaatttcaactatggcagctgctgctttgggaaatcttgtgtcagatctagctggacttggacttgcaggctacgttgaagcattggcttccaagttaggcctggtcattcctgatctcacaccacagcaagttgacatgtggcaaacacggtttagtacacaattgggcaaag

SEQ ID NO: 25225 - DNA, 490 bp, Homo sapiens
  misc_feature (1)...(490): n = A,T,C or G
ggcgccgnnnnntttaaaactgatgactgaggaacgtgcgnaaattcatttatttttcccacaaatcactgaaagtttaggtcagtgggaaataattttaatcaaataattgtacatattcttcccacatatcctgccttgtattaggaaatgacattgtgatccatttcattacaagtaaaatattacaaaatatttacaggaaaatattaaaaataactcaaacacaaaaggcaagatgaaataaactgtttttttttctccagaaatctctactccagtgcccacagcacacaagagtcaaaacaaataagcaactaagatcccccgatcacaaatttccaaagaactggaggaggggaagaaacagggtgaaaatggtggtatgaaagggaatggatgttagcagcactgcttcaataactgatctattctggatgaaatacccttttttatgtgcagtaaattctgaacaaggctaaattttagg

SEQ ID NO: 25226 - DNA, 453 bp, Homo sapiens
attgacccgctttgcccggctgcagcaagcactgctttgaatgctatggctacgacatcatcatcgacgacaagctgaagccctggctgatcgaggtgaatgcgtccccgtctctcacgtccagcactgccaatgaccgaatcctcaagtacaacctgattaatgacaccctcaacatcgccgtcccgaatggtgaaatcccagactgcaaatggaacaagtcgccacctaaggaagtcctcggcaattacgagattctgtatgatgaagaattggcccagggtgacggggctgaccgggagctgagaagccgtcagggtcagtctctggggcccagagcaggccgatcgagagactcagggagagcggtcctcaccacactgaagtgagtcccacctggaccttatcaaaactactcactccacctgggcccctgctgaagccctattttga

SEQ ID NO: 25227 - DNA, 448 bp, Homo sapiens
attgacccgcttgaggacttcggcacgagcaggagaggatggccccaaaacctatttttatacatgagagtaaataaacatattttttttacaaaaataacttctgaatttatcagtgttttgccgttaaaaatattcctctatagtaaattatttattggaagatgacttttttaaagctgccgtttgccttggcttggtttcatacactgatttatttttctatgccaggcagtagagtctctctgcctctgaggagcaggctacccgcatcccactcagcccctccctacccctcaagatttgatgaaaattccaaccatgaggatgggtgcatcggggaagggtgagaaggagagcctgcctgctcagggatccaggctcgtagagtcactccctgcccgtctcccagagatgcttcaccagcacctgcctctgagacctcgct

SEQ ID NO: 25228 - DNA, 482 bp, Homo sapiens
atttgacccgcgctgcatgaattcgccacgaggcagatttcccctctagatgagtgaagggataggaggctggtgaacccaacggctgaaatgtgaagggtgagagggtagggtgagtccccccagccctgagggatgaagggtctgaagatggcactgcacggtgacagctgcagtgactcaggagctccgtttacaaaggaacatgagtgaggaacataacttaatttttttttatatctgacctgaatttctgatttcctcccccattccccacatggtataagtgtaatctcacatcaatttggggaccctttctttccccagggatgtgtagaacttttggggatggcacatttgaagaccttatggagctttgcattttaaaggctgaatcccacactctatcatacatattaatatttacctgcattccacattaaaggggtcagtttatgacttgtgtcctgtcttgtagatac

SEQ ID NO: 25229 - DNA, 488 bp, Homo sapiens
  misc_feature (1)...(488): n = A,T,C or G
tgccncgaagggggnnnttttgattagcatggcttcggcaatcggcacgagaaanaaaaaagcctttaatatgttttaactaacatatatgagtgaatcctaataaaagagttatggcttatgtttttgtttgttcagtaacacgtaagcatccatacattgaacatgtattgagagcctaccactgtacttattgctgggggttggggtggcaaaaaaataagaattagtctcttccctctaaaaagaaacttatagcctaataaagaaagatggaaaaataagatgttccatccttgttgtaaagttgtagaagtctctgttgggtacatgggtaacaaatgtgaaaaaatataattctgaggaagggagatacaagaaagctttcatttaaggtagttgacacctaagtcttgctctgtggttgacaggtaacaggcgtaagttgttcaagccagaaattactagtttggcttcagaagacattt

SEQ ID NO: 25230 - DNA, 471 bp, Homo sapiens
attgcccgcctgcaggaatccggcacgagcacaacttccggttagcgtggcggaggctctcggagtctttgggacctcagcaccgggataccgggagactccctcgtgtccccatgtgggccacctaccagacagaagaggattataccttaaccatgtattttcaacaatattggagagataaaaggctcgcctattctgggatccctctcaacctcacgcttgacaatcgagtggctgaccagctatgggtgcccgacacatatttcttaaatgacaaaaagtcatttgtgcatggagtgacagtgaaaaaccgcatgatccgtcttcaccctgatgggacagtgctgtatgggctcagaatcaccacgacagcagcatgcatgatggacctcaggagataccccctggacgagcagaactgcactctggaaattgaaagctatggctacaccacggatgacattgagt

SEQ ID NO: 25231 - DNA, 456 bp, Homo sapiens
  misc_feature (1)...(456): n = A,T,C or G
ccgggtnaaaaaaaaattcacgccgcggaatcgcaccgctgccgaattggcacaggttttccgagctttacatagcttggaggcgtaaaatggctctgtattttaataacacagaaacatttgagcattgtatttctcgcatcccttctcgtgagcgcttagacctttttctattttagtcggattttgttttggaattttgcttttgtatgaacactcagcagaaaagtacttacttcttgccagttatctattaaccaaaacctttgatttgtagttttaaagattaaccctcagagttctcttcataactgccttgacattttgggttggtctgttctgttaattttcttttgcttttttgtgttttttgtttgtgtttacttttgcatttaagaccattaaatttgattgtgttttgctcgaaaaaaaaaaaaaaaaaaaaaaacggcccgg

SEQ ID NO: 25232 - DNA, 474 bp, Homo sapiens
  misc_feature (1)...(474): n = A,T,C or G
aatgatcggcctcccgaancgctgcgagacctcgtgggaggngacgagagagctggcccccgagttatttgaatcccagcctgatcttctgcatcagttagttaccatcatgaaccccaacgtgctaatggagcatggtgtgcctgtgtacaggaccaatcagtgtgctggcgagtttgttgtgacatttcctcgtgcctatcactctggatttaaccagggctacaactttgctgaagctgtgaacttctgtactgctgactgggtgcccattggacgtcaatgtgtaaatcattaccgacgcctaaggcgccactgtgtcttttcacacgaggaactaattttcaagatggcagcagatccagaatgcttagatgtggggctggctgccatggtctgcaaagaattgactctcatgactgaagaagaaacacgattaagagagtctgttgtacagatgggtgtcctgatgcg

SEQ ID NO: 25233 - DNA, 476 bp, Homo sapiens
  misc_feature (1)...(476): n = A,T,C or G
cattgccncgcantgattagacccgcctgcangaattcggcacgagagagaagcaccgccccccagtcttgtgccagcgcctagagccgcagctcccagggatgctccttccctggaggccgcccaagagagggactctggcagcgttcttcagatttgaggccactgtttctcatttgctggttgactgtttttatttcttaggcttttgctagttttataaaatagcgaagcagcccctgatttgtggattaaaagcaacatttgagcgatgatgctcagcagtccaggaaaatgggcggtggacacttgacgctgacgatgggagttgacatgagcatcgagagggaggtgcgcgctgcttatctgtgattgatgctcacctgagtgtggctgattgtgtacatccagccgttacccttattaaaaattatacttttacatttattttatattcttctcacccccagtaattn

SEQ ID NO: 25234 - DNA, 498 bp, Homo sapiens
  misc_feature (1)...(498): n = A,T,C or G
gacgggtcnnnnattgaancccctttgcacngcctgtangaattcggcacgagggctcaagacggagccatttccactgatgcagaaggaaaggaggaggaaggagaaagtcctttggattctctggcagaaacattttgggaaactactaaatggactgatctctttgacaataaggttttgacatttgcatataaacatgcattagtaaataaaatgtatgggagaggccttaaatttgcaactaaacttgtggaagaaaaaccaacaaaagaaaactggaaaaattgtattcaactgatgaagttacttggatggacccattgtgcatcttttactgaaaactggctccccatcatgtatcctcccgattattgcgtattctaaaataggaaacaagactttaaattttaaaaaaggaagttttatagtgaatggatataaaaacaaatttgtggcatttttagtctaatgcatgttttcatccactatccagtg

SEQ ID NO: 25235 - DNA, 409 bp, Homo sapiens
  misc_feature (1)...(409): n = A,T,C or G
agcgcttcttctggtcactccgccaccgtagaatcgcctaccatttggtgcaagcaaaaagcaatcagcaattggacaggaaaagaatggcattgaagcagatttccagcaacaagtgctttgggggattgcacaaagtttttgaacatgacagtgttgaactaaactgcaaaatgaaatttgctgtctacttaccaccaaaggcagaaacaggaaagtgccctgcactgtattggctctcaggtttaacttgcacagagcaaaattttatatcacaatctggttatcatcagtctgcttcagaacatggtcttgttgtcattgctccagataccagccctcgtggctgcaatattaaaggtgaagatgagagctgggactttggcactggtgctggattttatgatgn

SEQ ID NO: 25236 - DNA, 480 bp, Homo sapiens
  misc_feature (1)...(480): n = A,T,C or G
ggggnntagggnggnnngccggnnnnatttgancaatcgatctgcgctgcaggaattcggcacgaggtggcttggagtcctgctgacccttctgctctgttcaagccttgagggtcaagaaaactctttcacaatcaacagtgttgacatgaagagcctgccggactggacggtgcaaaatgggaagaacctgaccctgcagtgcttcgcggatgtcagcaccacctctcacgtcaagcctcagcaccagatgctgttctataaggatgacgtgctgttttacaacatctcctccatgaagagcacagagagttattttattcctgaagtccggatctatgactcagggacatataaatgtactgtgattgtgaacaacaaagagaaaaccactgcagagtaccagctgttggtggaaggagtgcccagtcccagggtgacactggacaagaaagaggccatccaaggtgggatcgtgag

SEQ ID NO: 25237 - DNA, 471 bp, Homo sapiens
  misc_feature (1)...(471): n = A,T,C or G
cgcgggccggangnttaatgtaccgtcagttaccgcaananncnaagnnanagaacaagnggttaacgaaacggttgacaagcttgaacagaaattacatgaaaagcttgtcctccagaacccatccttgggttcttgtccctcaggagtctcaatgcctacttcagaagaaacattgcttttgccagaaaaccagttcagctggcatattgcttgccacaactgccaaagaaggattgttggcgtccgctaccagtgtagcctatgcccatcctacaatatctgagaagattgtgaagcagggccatatggccatgacactaaccacgtcctgctgaagttgcggagacctgttgtgggctcctctgaaccgttctgtcactcaaagtactctactcctcgtcttcctgctgctctggaacaagtcaggcttcagaaacaggttgataagaactttcttaaagcagaaag

SEQ ID NO: 25238 - DNA, 462 bp, Homo sapiens
  misc_feature (1)...(462): n = A,T,C or G
cttgccccacccccgtataccccgcgctgcaggaattcggcacgaggatttttgcccttgttctgtcctttttttcaaaaaagaaaatgtgttttttgtttggtaccatagtgtgaaatgctgggaacaatgactataagacatgctatggcacatatatttatagtctgtttatgtagaaacaaatgtaatatattaaagccttatatataatgaactttgtactattcacattttgtatcagtattatgtagcataacaaaggtcataatgctttcagcaattgatgtcattttattaaagaacattgaaaaacttgaaggaatccctttgcaaggttgcattactgtacccatcatttctaaaatggaagagggggtggctgggcacagtggccgacacctaaaaacccagcactttggggggccaaggtgggaggatcgcttgagcccaggagttcan

SEQ ID NO: 25239 - DNA, 484 bp, Homo sapiens
  misc_feature (1)...(484): n = A,T,C or G
cggggnggagggggnnnnattgatctgcccggctgcaggaattcggcacgaggtcacttgcatggtggggtcgtataaaactcttgacactgtctagaccattttctgatgtgaatacttttgagaggatcaactattggctcattaatgatatcagtatcataaggtgagttcatcaaggatgtgtgtttattttgaatcatgcctacttaaattattaatacaagacaattaacaaattgacagttaccatttgctttctcatcattctcattaccatttattttatagcaagtctgctatgtgtggaccagggcttcggcttctgtggttagtatgggaagaataaattgttgaaataaaaatacccagactattcagttcacaagaagcccccccaaaagaacagtaaattgtgttgtatgttcatttggaataaagcaatatttttaccactgctaaggtgaactgaaaaaaaaaaaaa

SEQ ID NO: 25240 - DNA, 469 bp, Homo sapiens
  misc_feature (1)...(469): n = A,T,C or G
ngggtttcatagaccgtctgcagaattcggcacgagaagaagcagaagcggctcatcccggagaggacagtatggaagtactttgtgcagctgtgcagcgccgtggagcacatgcattcacgccgggtgatgcaccgagacatcaagcctgccaacgtgttcatcacagccacgggcgtcgtgaagctcggtgaccttggtctgggccgcttcttcagctctgagaccaccgcagcccactccctagtggggacgccctactacatgtcaccggagaggatccatgagaacggctacaacttcaagtccgacatctggtccttgggctgtctgctgtacgagatggcagccctccagagccccttctatggagataagatgaatctcttctccctgtgccagaagatcgagcagtgtgactaccccccactccccggggagcactactccgagaagttacgagaactgg

SEQ ID NO: 25241 - DNA, 468 bp, Homo sapiens
  misc_feature (1)...(468): n = A,T,C or G
ggggaggaccccaagtaaannaaacatcgaacgctctcgatgatggcactagnacaagcacagcttccgcgctcgaggttccgccagttactccccgccacgaaagcggagcagccaggacaagtacgaaaagcggtccaaccggcggtgaggctggaaccagggccagccagccctgcgggcctccgtgctccttcggggtgcggtgtgcggagaaggcctgagctggcagggcaaacacctgagagtgactttgacattaggtcctttgttgtttttaaagaggctgctggccacaggcaaaaaaaatgacctagcaactcttgaggaaacaagtgcaaaggaggatgtcttggcaagtttaagctacttctgcagtgtagtagacttacatattgttgtttatcttgtttggaagtgtgtttcaaaataaacatgtctagaatttaaaaaaaaaaaaaaaaaaaa

SEQ ID NO: 25242 - DNA, 499 bp, Homo sapiens
  misc_feature (1)...(499): n = A,T,C or G
tgaaaggtggccnagggaaaaaaccactgatnaccnttgactgaccgccctgcggaattccgcacgagcgatccatccatctgcagggagcaagacagagacgcaggaatggtaagcggagttcctaacaggatgaaagttcccccatcagttcccccagtacctccaagcaagtagctttccacatttgtcacagaaatcagaggagagatggtgttgggagccctttggagaacgccagtctcccaggccccctgcatctatcgagtctgcaatgtcgcaacctctctgatcttgtgctcagcatgattctttattacaagttttattttttcgtgcactctgctaatcatgtgggtgagccagcggaacagcgggagacctgtgctagttttacagattgcctcctaatgacgcggctcatgaggaaaccaagtgggcaggagttgtttctgacccactgatctctactaccacaaggaggatagcttacgagaac

SEQ ID NO: 25243 - DNA, 493 bp, Homo sapiens
  misc_feature (1)...(493): n = A,T,C or G
cggagggcccctttgatcgcctgcggtagacggnccgaggggatatattctggatgaccacaaaatccaacacctaaggttgcaggggcaaatgccagccttgatgagggtaggaatcttccagtccttccagaagagctcccgagacatacttctctgcacagacatagcctctcggggcctggacagcactggtgtggagctggttgtcaattatgatttccccccaacgctgcaagattacatccacagagcagggagagtgggccgtgtggggagcgaggtgccaggcaccgtcatcagttttgtgacccatccctgggatgtgagcctggttcagaagattgagctggcggctcgccgaaggagaagtcttccaggactagcatcctcggtgaaagagcctttgccccaagcaacctgattttgacaaatctgattaaaatgtgatgctagaacagggatctttcccagtatcttgagtgggtgacca

SEQ ID NO: 25244 - DNA, 483 bp, Homo sapiens
  misc_feature (1)...(483): n = A,T,C or G
nattgaccgcccctcggaannnattgcaccgccctgcggaattcgccacgagctttgctgttcgtgatatgagacagacagttgcggtgggtgtcatcaaagcagtggacaataaggctgctggagctgggaaggtcaccaagtctgcccagaaagctcagaaggctaaatgaatattatccctaatacctgccaccccactcttaatcagtggtggaagaacggtctcagaactgtttgtttcaattggccatttaagtttagtagtaaaagactggctaatgataacaatgcatcgtaaaaccttcagaaggaaaggagaatgttttgtggaccactttggttttcttttttgcgtgtggcagttttaagttattagtttttaaaatcagtactttttaatggaaacaacttgaccaaaaatttgtcacagaattttgagacccattaaaaaagttaaatgagaaaaaaaaaaaaaaaaag

SEQ ID NO: 25245 - DNA, 463 bp, Homo sapiens
  misc_feature (1)...(463): n = A,T,C or G
atgacgcttangaaattgcaccctccccaattcattccagatctatttttctaccagagagaggagcaaagtcctcctcccctgcgcccttacattctgcacttcatagttggattctgagcttaggatcatctggagaccccatggagggacttggaaaggggaactgggatttggggaggggctggaggacttccgcacgcttccacctccttcgacctccactgcgccccacctccctgcctgtgtgtgttatttcaaaggaaaagaacaaaaggaataaattttctaagctcttnnaaaaaaaaaaaaaaaaaaaaaaaaaaaaaaccctggggggggggccgggcccccaattccccctttgggggggggtttaaaaattccggggccgggttttaacaccgggggggggtgggggaagnnnnnntnntnnntnntnnnnnnnnnntnttntttttcg

SEQ ID NO: 25246 - DNA, 515 bp, Homo sapiens
  misc_feature (1)...(515): n = A,T,C or G
agggggaaattgatcggctgtagganatcgcaccgcctgaggaattcggcacgagagcaggtagcctgtgtgtttgacaaacagcagctggcagcgctgcctcctgcccacattcctgccacccgacatcaaagctggcgtgtgacctttccagccatgcgatattccccttggaagatgcttccccaggctataaatttgttctcacaaagcaacatcaataaatcaaaactgtctctcccaaaaaaaaaaaaaaaaaaaaaaaaaaaaaaaaaaaaggggggaggaacaaaaaaaagcccctaaagggggaggggaaaattacatcatttcggattttaaaacacttattggtggggggggggcccnnnnnnacctnntnaaatgganccgcccccccccccggggggggggtttttaaaaaagggggggggggaaaaacggttttgggggaaacccttgctgacattcaaaacctttttttttcctaatctaaccccctggtgactaaattg

SEQ ID NO: 25247 - DNA, 477 bp, Homo sapiens
  misc_feature (1)...(477): n = A,T,C or G
ttgttgccctgaccggctgcggtgancgcantaggccagcgccaacctgcgcagacagaagcctgtgatggtgaataggaagcggacccgccccaccaagagctcctgagccccctgcccccacagcaataaagtcagctggctttctcacctttgtcacaaaaatcaaaggagagatggtgttagggagccctttggagaacgccagtctgggggggggccctgcatccatcgagtttgcaatggggcaacctttctgatcttgggctcagcatgattctttaatagaaggggtaaaatttcgngcactctgctaatcatgtgggtgagccagtggaacagcgggagacctgtgctagttttacagattgcctcctaatgacgcggctcaaaaggaaaccaagtggtcaggagttgtttctgacccactgatctctactaccacaaggaaaatagtttaggagaaaccagctctta

SEQ ID NO: 25248 - DNA, 501 bp, Homo sapiens
  misc_feature (1)...(501): n = A,T,C or G
cggaggaacaaccttttgacccccctnnntttgcaccgcctgtaagaattcggcacgagccctgaccccgctcgcgacatgtccaccccggctcggcggcgcctcatgcgggacttcaagaggttgcaggaggatcctccagccggagtcagcggggctccgtccgagaacaacataatggtgtggaacgcggtcattttcgggcctgaagggaccccgtttgaggatggaacatttaaacttacaatagaattcactgaagaatatccaaataaaccacctacagttagatttgtctctaagatgttccatccaaatgtctatgcagatggtagtatatgtctggacatacttcagaaccgttggagtccaacctatgatgtgtcttccattctaacatccatacagtctctgttggatgaacccaatcccaatagtccagcaaacagccaggctgctcagctgtaccaggagaacaaacgggaatatgaaaagcgtgtt

SEQ ID NO: 25249 - DNA, 503 bp, Homo sapiens
  misc_feature (1)...(503): n = A,T,C or G
ggggggaccttgcatcgcctgtgganattgcaccgcctggcgaaggagaactactatgtgacacacgcaaatgggtccattgatcaacagatgcaagaagattcttctcccaactactgtacctcctgcaacgatgagaatctggctccttggaggcctgctgccattcctgctgctcctctctggcctgcagagacccacagagggttctgaggttgcaattaaaatcgacttcgacttcgcaccaggttcttttgatgatcagtaccaaggctgtagcaaacaggttatggagaaactaactcaaggggattatttcacaaaagacatagaagcccagaagaattattttaggatgtggcaaaaagcccacttagcctggcttaaccaaggaaaagttctaccccagaacatgactaccacacacgctgtggctattttgttttatacattgaacagcaatgttcattctgactttacttgagcatggcctctgttgcagg

SEQ ID NO: 25250 - DNA, 474 bp, Homo sapiens
  misc_feature (1)...(474): n = A,T,C or G
aggcgggcgggatggaaattgagaattagaggcatncggcacgagggnccgcggcagggtcccgcatggcggcgcacaggaagcacgtgtttgtggagaaggtgctgcagagactttttcctcctgttccaagtggccaaggaaagagggaaccccagacgctggccgtccaaaatccaccaaagaaagtgacctctgagaaagtgagccataaacatgctgagcctttgacagacactggctctgagaccccgactgcccgacggctctacactgccagcgggcctcctgagggctacgtcccctgttggccggagcccagcagctgtgggagccccgagaacgcctccagcggggatgacacagaagatcaggatcctcatgaccagcctaagagaagaagaattaggaagcataaatcaaagaaaaaatttaaaaatcccaataatgttcttatagaacaagcagaattag

SEQ ID NO: 25251 - DNA, 348 bp, Homo sapiens
  misc_feature (1)...(348): n = A,T,C or G
cctttgccccgcgctgtaagaattcggcacgagctggcagtctggtggctattctgcagtcagtgggggcagctggactctctgtgacatctaaagttatcgggggctttgctgggacagctcttggggcctggctgggttcacccccttccagctgaacaccacactgaggcagggagttggctctcttggtggagatgactttcctgggcctctggatgacaatcttccaaaggacaagtctcctactcccaaaactatttaaggaagcatgaaaaataaagatgctggttatcttctcctaannnaaaaaaaaaaaaaaaaaaaacctcgggggggggcccgggc

SEQ ID NO: 25252 - DNA, 492 bp, Homo sapiens
  misc_feature (1)...(492): n = A,T,C or G
agacaaaaatttgatcgcctgtagtttgatgcacgatggactagcgatctgnggggtaggggttgggtgggcgaaaggctgtgcctccctcggtggcgtcaacatcctggccatgttgtcacatgcacttgctggcaaaattcccaagccatgcgctcacagtttgtgcagtgatgagtgtggcaaacacagctcagttaaaaataaacatcattttatagattagctgaagaatacaatgtcccacgagactatgtggccatcaggaaattaacttttctgacctaatggcccaggaagcactgcgggcagcgtctcgccccgtgtaacgcagcacccgcagaagtgcccgggatcagcctttgcctcggcgggatcctggttcctggttcttccaagggcatggcgaggtccccgctcccttatcttgaggaaagtaataagtaacccagctctttcaactcccaaggttactttgtcaataaagtgcgc

SEQ ID NO: 25253 - DNA, 488 bp, Homo sapiens
  misc_feature (1)...(488): n = A,T,C or G
ccccccatttgacccgcgctgcaggaatatggcacgagccagcctctccccgctctggatcctgcactctaacactcgactctgctgctcatgggaagaacagaattgctcctgcatgcaactaattcaataaaactgtcttgtgagctgatcgcttggagggtcctctttttatgttgagttgctgcttcccggcatgccttcattttgctatggggggcaggcaggggggatggaaaataagtagaaacaaaaaagcagtggctaagatggtatagggactgtcataccagtgaagaataaaagggtgaagaataaaagggatatgatgacaaaaaaaaaaaaaaaaaaaactcgggggggggcccgggccccaattccccctatagggagccgaataacaatcccctgcccgcggtttaacaacgccgggacgggggggaaagnnnnnnnnnnttgtcgtgnggcccctgccttgctgttgcgtt

SEQ ID NO: 25254 - DNA, 496 bp, Homo sapiens
  misc_feature (1)...(496): n = A,T,C or G
gggagtnnnnnnnagggagnnnnnntttganccgcgctgctggacttgcgctgcaagaattcggcacgagaaccaaaggaacaaggacagggagatttgaaaaagaagaaaaagaaaaagaagggaaaattgcctaagaattatgacccaaaagttaccccagatccagaaagatggctgccaatgcgagaacgttcttactaccggggaagaaagaagggtaaaaagaaggatcagattggaaaagggacccagggagcaactgcaggagcttcatctgaactggatgccagtaaaactgtgagcagcccacccacctccccaagacctggcagtgctgcaacagtatctgcctctacaagtaacatcatacccccaagacaccagaaacctgcaggggctccagcaacaaaaaagaaacagcaacagaaaaagaagaaaggtggaaaaggtggctggtgatgagaatattcttgttgcaggctgtttttaaacc

SEQ ID NO: 25255 - DNA, 466 bp, Homo sapiens
gaaatttgcccgcctgcaggaattttttcccccggctgcaggaattcggcacgagcttctttgtgttcttctttgtatttttttgtcaaatagggatctacatcatccagttggttggcatccctggcctgggggacagcggttggattgcagccctgtctacactggataatcattccctggccatatcagtcatcatgatggtggtggctggcttcttcaccctctgtgccgtgctctcagtcttcctcctgcagcgggtgcactccctctaccgacggacaggggccagcttccagcaggcccaggaggagttttcccagggcatcttcagcagcagaaccttccacagagctgcttcatctgctgcccaaggagccttccaggggaattagtcctcctctcttctctccccctcagcctttctctcgcctgccttctgagctgcactttccgtgggtgcctt

SEQ ID NO: 25256 - DNA, 493 bp, Homo sapiens
  misc_feature (1)...(493): n = A,T,C or G
cgccccatagcccgcgctgcagcnntttgactccgcgctgcaggaattcggcacgagcagaaacgcagagtcaatcaggtttataaaggaaggctgaggggagagaggaggcctgggggcctggacgaagaggcctaggacctgaagagactccagcgagtctcgggaagcccaggggacctgtcaccatctgggcacttcccaggctcaatgctcagccagagtttgctggtggacctcaggattcgaagtgtgcaacagacggagtgcgcttgctgttcagggcggccccgtgcaggagcaccagctcaccctcaggcatctcggactggagggccagcagaaggtcagcaacttactcttaaaacgattgtttcggatcatattgatctctttcctttttccttttgtcctttcactgtatgacttggatcagttttgattctatactgtagtgtttcttgtcgtgaggcacctgccatgtctgtgcgtt

SEQ ID NO: 25257 - DNA, 466 bp, Homo sapiens
  misc_feature (1)...(466): n = A,T,C or G
nactggatcgatcgcgctggcgaanncggcacgaggaactggaccatggggcttcagggtataatcatgatgaaacacagtggtatgaagattccctggagtgtctgtcagacctgaaaccagagcagagtgttcgggattcgatggattctttggcattgtccaatatcacaggggcttcggtggatggagaaaacaagccaaggccatcattgtattctctgcaaaattttgaggagatggaaacagaagattgtgagaagatgagcaatatgggaactttgaactcttccatgctgcacaggagtgcagagtccttaaagagtctaagttcagagttgtgtccagagaaaatcctgcctgaagagaagccagtacatctgccagtgctcagaaggtccaagtctcaatccagaccccagcaggtcaagttctccgatgatgtcattgacaatgggaactatga

SEQ ID NO: 25258 - DNA, 468 bp, Homo sapiens
  misc_feature (1)...(468): n = A,T,C or G
naattgggatcgatgacgatttcggnacgaggacctacgcacacgagaacatgcctctcgcaaggatctccttcatccctctccagaagaggagaagaggaaacacaagaagaaacgcctggtgcagagccccaattcctacttcatggatgtgaaatgcccaggatgctataaaatcaccacggtctttagccatgcacaaacggtagttttgtgtgttggctgctccactgtcctctgccagcctacaggaggaaaagcaaggcttacagaaggatgttccttcaggaggaagcagcactaaaagcactctgagtcaagatgagtgggaaaccatctcaataaacacattttggataaaaaaaaaaaaaaaaaaaaaaaccttcaacccaggttttactttttaaacacccccaagtttagggaaaaactgttctaccaaatcctcatttatgattttgccaattt

SEQ ID NO: 25259 - DNA, 499 bp, Homo sapiens
  misc_feature (1)...(499): n = A,T,C or G
ctcgcccgcctgcgattggaccgcgctgcaggaattcggcacgagcttcccggnggcgtggtcacaagcgccggctccctccctgcagatggaagggcgagaacgtgtccacgcacgaggtggagggcgtgttgtcgcaggtggacttcttgcaacaggttaacgtgtatggcgtgtgcgtgccaggttgtgagggtaaggtgggcatggctgctgtgcagctagcccccggccagactttcgacggggagaagttgtaccagcacgttcgcgcttggctccctgcctacgctaccccccatttcatccgcatccaggacgccatggaggtcaccagcacgttcaaactgatgaagacccggttggtgcgtgagggcttcaatgtggggatcgtggttgaccctctgtttgtactgggacaaccgggcccagtccttccggcccctgacggcagaaatgaccangctgtgtgtgagggaaccctgangctctgatcacn

SEQ ID NO: 25260 - DNA, 514 bp, Homo sapiens
  misc_feature (1)...(514): n = A,T,C or G
agggggaaaattgatcggcttgtcgganattgccncgactgtaggaattcggcacgagccgcagcagggtggtcccactgtgggaccacaaccaggtatgactgtgtgagaagcaggctcactaccaggctaccagggagcacaggggagcaggcgccaccttgaggcataaacccagagaaacaagacctccaagacggccaggcactggggcacacgccggtaacacagcaccgtgggagctgagacggaaggatcgcctgagcccaggattttgaaaccaccctgggcaacacagtgagaccccgtatctacaaaaaaatacacattagccaggcatggcggcatgcgcctggggtcccaagtactcgggaggtagaggagagaaaaatcacttgagcccagagaggtcaaggctacagggagctgagatcgcatcactgtactccagctggggtgaacggcgagactctacctcaaaaataaataaatacatacataattaataaataaa

SEQ ID NO: 25261 - DNA, 486 bp, Homo sapiens
  misc_feature (1)...(486): n = A,T,C or G
tgaagtcccnnnagaagnnnnntttgatnnccctgttgactcgcgctgcaggaattcggcacgaggttttaggcaggtggttatatgtgggaagataattttattcatggatccaaatgtttgttgagtcctttctttgtgctaaggttcttgcggtgaaccagaattataacagtgagctcatctgactgttttaggatgtacagcctagtgttaacattcttggtatctttttgtgccttatctaaaacatttctcgatcactggtttcagatgttcatttattatattcttttcaaagattcagagattggcttttgtcatccactattgtatgttttgtttcattgacctctagtgataccttgatctttcccactttctgttttcggattggagaagatgtaccttttttgtcaactcttacttttatcagatgatcaactcacgtatttggatctttatttgttttctcaaataaatatt

SEQ ID NO: 25262 - DNA, 484 bp, Homo sapiens
  misc_feature (1)...(484): n = A,T,C or G
cgcccattgcccgcctgcagctttttgccaacgcagtgccaagttgggttccttcaactggtatggtgaacagtgctcttgtggtaggtggataacacctgcttttcaaatacataagaatagagtggatgaaatgaaaatattgcctgttttgggatcacaaacaggaaaaatatgaacatgatattttatagcttgggaagaaacttgcagatgatatgtgctgcctttgcttcttatcattcatggcagattgtttgtgctttcaacatttcatttgaaatgggagaagataaaatcacttgatgtaacctggaaactatgctttacatggcaatcaaagccttttgatcatgtacattttatttgatattaaaatcttttataaccagaanacaaaacaaaaaaaaaaaaaaaaaaaaaaacttggggggggggccgggcccccatttccccttatagggggtcggataacaatcagcgg

SEQ ID NO: 25263 - DNA, 339 bp, Homo sapiens
  misc_feature (1)...(339): n = A,T,C or G
cggccacccaatcgaccgccttcgatagacncgcgtgcaggaattccgcacgagtccacgtgtcctgcagcacaaacggcggcgtattgctctgaagaagcatcggaccaagaaaaataaagaagaggctgcagaatatgctaaacttttggccaagagaatgaaggaggctaaggagaagcgccaggaacaaattgcgaagagacgcaaactttcctctctgcgagcttctacttctaagtctgaatccagtcagaaataagattttttgagtaacaaataaataagatcagactctgaaaaaaaaaaaaaaaaaaaaactcgggggggggcccgggc

SEQ ID NO: 25264 - DNA, 477 bp, Homo sapiens
  misc_feature (1)...(477): n = A,T,C or G
cacgctcgcctgcggaattggacaccatgctgggcccctggttcactgcagacagtggcaccccagcaccagagcacaatgagaaacggcagcgccaacaggagcggcggcagatgaagcggttatagccattgacattgtggccacaggccactggccctgggtggctctgtcagggtgcacagcccctcatgcctggagcaatgagggtctagtccaggggccaaaagcagtctgaggtattgggtatacttatactctatagggtcgttgaataaatggcttagaatgtgaaaaaaaaaaaaaaaaaaaaaacttcgggggggggccgggcccccaattccccttatgggggggggaataacaattcctgggccggggttttacaacgccgggagggggaaaaacnntcnccccnccncttnctctncctcccttctgctttagctgggcgggccttcaccggtgtcgcggtcg

SEQ ID NO: 25265 - DNA, 482 bp, Homo sapiens
  misc_feature (1)...(482): n = A,T,C or G
gagggcgggngnnnnnnaattgaaattgatgcgcctgcgcgaattcggcacgagcagatgctgattggaccagacggccgcctgatcaggagccttgggcaggcctccgaagctgacccatctggggtagcgtccattgcctgttcctcatgcgtgcgagccgtggatgggaaggcggtctgcggtcagtgtgagcgagccctgtgcgggcagtgtgtgcgcacctgctggggctgcggctccgtggcctgtaccctgtgtggcctcgtggatctttttaggacgctggtcgtgttgccttatggcccccatgtcagtgccgtcatctagactgatgatgcccgcagtgatcctgtctccagataaggtcatgtcctgaggtgttctgggttaggactttgacgtttgaatggtggggggtggggacacaattcagcccctgacagcagcttttctctcccctccctgacgctgtcgcagct

SEQ ID NO: 25266 - DNA, 506 bp, Homo sapiens
  misc_feature (1)...(506): n = A,T,C or G
tgcgtnnttnnnccttgttcgacctgcatgaattcggcacgagatcactgatgccctgagcacctcagtcaccaccaccatgcgcaggctcatcaaagacacccttgccctctgagcgtcgctggatctctgggagctccttgatggctcccagaccttggcttttgggaattgcactattgggcctttgggctctggaacctgctctgggtcattggtgagacttggaaggggcagcccccgctggcttcttggttttgtggttgccagcctcaggtcatccttttaatctttgctgacggttcagtcctgcctctactgtctctccatagccctggtggggtcccccttctttctccactgtacagaagagccaccactgggatggggaataaagttgagaacatgaaaaaaaaaaaaaaaaacctcgggggggggccgcggccccaattcgccttatagggagccgaattacaatgcacgtgcgcgcgttttacacagtcggg

SEQ ID NO: 25267 - DNA, 507 bp, Homo sapiens
  misc_feature (1)...(507): n = A,T,C or G
tgtgnnntnnnnattgatcgaccgtctgcatgaattcggcacgagcaacatttatggaagaagttctagaacaccttcctggaaaaacacaagatgaagttcaacagcatgaaaaatggtatcaaaagtttctggctctagaagaaagaaaaaaagaggtaataattataatagctattattcattctgtgtttctatgttctaggcactgtactaaacacttaacatgtctcattaactttacagcaatcccatgaagtgtgtttatagttccccgcccccgacaatctaatagaagatgaaactgaggcattgaaagttaagtaattttagccaggcacagtggcttacacctgtaatcccagcactctggaaggttaaggcggatggatcacttgagctcaggagtttgagaccagcctgggcaacatggcaaaaccctgtctctacaaaaaatacagaaaaattagctgggcatggtgccacgcacctgtggtcccagctact

SEQ ID NO: 25268 - DNA, 500 bp, Homo sapiens
  misc_feature (1)...(500): n = A,T,C or G
nggggaattgacggctgtgganatcggcacgcggagcccaggacaggctcacgtcctcagcgacccactggtgactgacttcccagactctcctctgtccctcaggagcagccgtgtcctctcccaggccctaggacactgccagagactgtgggacatacaggcataagtgatgtgtgtgtttctgcttctgttttaaaaatccagggtcattacacacagcatggaaattagcacaaaatgctgtgcaaacgtcagatgctcccaaaccagcaaagggatgggcttgcttcacatcagatgcgggcacgccttacccctgccttccgtgtccccaccccagggtcaagggttcctcagaccagccatgcctcctcctcctgccgcctccttttctagatggggaggggattccgtcacaagaagagccgcccctcggccgtgtgcaggaagccccatgtcgctttgccgagatcagcccttggaggatccccttctnc

SEQ ID NO: 25269 - DNA, 502 bp, Homo sapiens
  misc_feature (1)...(502): n = A,T,C or G
agagatttgacggctgtnganattgaccgccttcggaattaggcacgaggaatgtggaaagaacaacgctgcttggctctcttcttttcaaactataagagtacattttcccatgcaaacaatctatagttcaggtgccatattgtgggctacatatggacatttattgtctaaactgaaaaatatcccacccttattacattgttttttttaatcagaaatgtataccaagatccaaagaattgtctttatctattttattttggaaattcagcttgtccttaatcaaaatctattgtttagggtagtagctagttgcagtggtgccatgattagagcataggtttctatccctagctgtcaaagtaaaataaagagggtgtatagtatcctttgtaagtcttgtattaccccgaatgcatgtaaaagcaaatcacaggttttttttttttatatgccctttgaaattttcaggcccacttaattttggggggagagagga

SEQ ID NO: 25270 - DNA, 458 bp, Homo sapiens
aatcgaccgcctgtaggaattcggtacgaggaccaacacccctccctgccaccaggcactgcctggagggcaaggagtgggagccaatgaacaggcatgcaagtgagagcttcctgagctttctcctgtcggtttgaactgttttgccttcacccataagcccctcgcactctggtggcaggtgccttgtcctcagggctacagcagtagggaggtcagtgcttcgtgcctcgattgaaggtgacctctgccccagataggtggtgccagtggcttattaattccgatactagtttgctttgctgaccaaatgcctggtaccagaggatggtgaggcgaaggccaggttgggggcagtgttgtggccctggggcccagccccaaactgggggctctgtatatagctatgaagaaaacacaaagtgtataaatctgagtatatatttacatgtcttttt

SEQ ID NO: 25271 - DNA, 287 bp, Homo sapiens
  misc_feature (1)...(287): n = A,T,C or G
agcggggntnnnnccttgcttcgacctgcatgaattcggcacgagccaaatgggtcgcagtcgcagccgctctccacggagggaacgtaggcgttcccggtccacatcccgggagagagaacgcaggcgccgagaaaggtccaggtctcgggagagagatcggagaaggagccgctcgcgatccccgcaccgaagacgctcccgatctccaagacgacatagatccacatctccttccccttctcgactgaaagaaagaagagatgaggaaaaaaaaaaaaaaaaaa

SEQ ID NO: 25272 - DNA, 504 bp, Homo sapiens
  misc_feature (1)...(504): n = A,T,C or G
tggnnnnnnnttttgttcgactgcctgcaggaattcggcacgagaaaaaacaacatgggagtaataatgggtcaaaatttgcaaaataaagtactgttttggtgtgggagttgtcatgaggctgtgttgaagtgacttatctatgtgggatattgagtatccattgaaatggatttgttcagccatttacattaatgagcatttaaatgcaacagatatcatttcaggtgacttaacatgaatgaataaaagtcaatgctattggattgttttttgtttgacaagtgctatctgtgccactgatttaacttctgtagtaacaagggcattaccattcttcacctttcctaattctgatcccatagttttacatttttcctgtttattttgattttgttcactgctttatttcttaaagttctagcacatctgtgactcctccacttccacattnttgcactgcttacacttacgtgcgatcttattccttgtctgcacacacaa

SEQ ID NO: 25273 - DNA, 502 bp, Homo sapiens
  misc_feature (1)...(502): n = A,T,C or G
ngagtgcnnnnnaattgatcgactgcagactttgcacgagctcgtgccgaatcggcacgagtccccctcctctgcctggggccattgagcccagcctccagggcccgggtgcgtttgcaggccagtggccactgtccgggctgtgatggcaccaaggcaggtggagcaccaggtaccacacagctgggcttcccaccaggctttcccgcgggggtctcagggagcttctccccagcgctgctcggagtctgcaggaactggccttgttctccttagcccgtcactccatacagtattaggtgaggatggatgcgggcgctgtccttgccgggaagtcactgttgaagttgcagtggcttgttcacacctgtgggaagagaagtgaagactttctccttgcattaaaaagtctgaactgtgaaannnnnnnnnnaaaanaaaaaaaaaaaaaanannaaaaaannnnnnnnnnnnnnnnnnccccccggggggggcccccacc

SEQ ID NO: 25274 - DNA, 493 bp, Homo sapiens
  misc_feature (1)...(493): n = A,T,C or G
catcgcccgcctgcangaattcggcacgagctcgcacctaccggcgatgcatgaactctgacccctccccagttaaggcttctgtagagagcatgctgagtctgcatctcctctcgtctcctccatggtggtcactgcccctggcaggtctctgaaagggaaatgcttttctgcataggcccctgcttgggcagttcacagtgagaccgaccccctctgaatatgataacagcctgtttcacatgaggagatgttaccaatcccgttcgctctgacccttgctggctgatcaccttgagcaacttacttaacatctgtgttcctcagtttctcatgggtaatatacggataattactggcgaaaaaaaaaaaaaaaaactctaggggggcccgggaccccattcttcctatatttggagtaatatacattaacctgcccgtggttttacaagttgagactgaaaaacagcngagtggtntagatgtgccacct

SEQ ID NO: 25275 - DNA, 468 bp, Homo sapiens
  misc_feature (1)...(468): n = A,T,C or G
cgcccctnnnaattgatctcgctgcaggaattcggcacgagtacagaaacaagttgaagtacctggctttcctccgcaagcggatgaacaccaacccttaccgaggcccctaccacttccgggcccccagccgcatcttctggcggaccgagcgaggtatgctgccccacaaaaccaagcgaggccaggccgctctggaccgtctcaaggtgtttgacggcatcccaccgccctacgacaagaaaaagcggatgggggttcctgctgccctcaaggtcgtgcgtctgaagcctacaagaaagtttgcctatctggggcgcctggctcacgaagttggctggaagtaccatgcagtgacagccaccctggaggagaagaggaaagagaaagcctagatccactaccagaagaagaaacagctcatgatgctacggaaacaggccgagaaaaacgtcgaganaaaaatga

SEQ ID NO: 25276 - DNA, 326 bp, Homo sapiens
caaatgttgataaacaaacctccagattctggcaagaagacgtcccgtcaccccctgcaccaggacctgcactatttccccttcaggcccagcgatctcatcgtttgcgcctggacggcgatggagcacatcagccggaacaacggctgtctggtgtgctcccaggcacgcacaagggctccctgaagccccacgattaccccaagtgggaggggggagttaacaaaatgttccacgggatccaggactacgaggaaaacaaggcccgggtgcacctggtgatggagaagggcgacactgttttcttccatcctttgctcatccac

SEQ ID NO: 25277 - DNA, 490 bp, Homo sapiens
  misc_feature (1)...(490): n = A,T,C or G
agcgtgtgnnnaattgacattcgtgcgncaattcggcacgagaagacctcggctctacctccttcagtggctaaaatctgataaggccctaatgatgctctttaatgatggcacctttcaggtgaatttctaccatgatcatacaaaaatcatcatctgtagccaaaatgaagaataccttctcacctacatcaatgaggataggatatctacaactttcaggctgacaactctgctgatgtctggctgttcatcagaattaaaaaatcgaatggaatatgccctgaacatgctcttacaaagatgtaactgaaagacttttcgaatggaccctatgggactcctcttttccactgtgagatctacagggaagccaaaagaatgatctagagtatgttgaagaagatggacatgtggtggtacgaaaacaattcccctgtggcctgctggactgngtggaaccagaacaggctcaggcatacagttcttg

SEQ ID NO: 25278 - DNA, 457 bp, Homo sapiens
  misc_feature (1)...(457): n = A,T,C or G
cattgacnccgcgctgcagtaattcggcacgagctacacacaactccagaggcgccatttacactgtagtctgtacaacctgtggttccacgtgcatgttcggcacctgtctgtgcctctggcaccaggttgtgtgtgtgtgcgtgtgcacgtgcgtgtgtgtgtgtgtgtgtcaggtttagtttggggaggaagcaaagggttttgttttggaggtcactctttggggcccctttctgggggttccccatcagccctcatttcttataataccctgatcccagactccaaagccctggtcctttcctgatgtctcctcccttgtcttattgtccccctaccctaaatgcccccctgccataacttggggagggcagttttgtaaaataggagactctctttaagaaagaatgctgtcctagatgtacttgggcatctcatccttcattattctctg

SEQ ID NO: 25279 - DNA, 461 bp, Homo sapiens
aatagacaccctctcgcccgcctgcaggaattcggcacgaggtagcttccactcacttattcttgcattcagagtcacaatgatcatcttacccatgtggtttttgagaaagaaagatcaattctttgtttgcagtaggtaatcttagagatggagatgattgtagaattattcctagatgagtgtcaatttatttaattccattgtcatataaggagtcaaattgtttcttatcatttgttcattgaagaacagagacctgtctggaaaatcgatctctacaaattcaattaaataatgatccccaaatgctgaaaaagtgaaatacagcaattcaacagataatagagcaatgtttagtatattcagctgtatctgtagaaactctttgacgaacctcaatttaaccaatttgatgaatacccagttctcttcttttctagagaaagatagttgcaacc

SEQ ID NO: 25280 - DNA, 461 bp, Homo sapiens
  misc_feature (1)...(461): n = A,T,C or G
aactagcaccggntgtcggaattcggcacgaggtgattctgtggagagtgcagagaaggagatcggcttgtggtttcaccctgaggaactggtagattacacgagctgtgctcagaactggatctatgaatgacaggagggcagaccacattgcttttcacatccatttcccctccttcccatgggcagaggaccaggctgtaggaaatctagttatttacaggaacttcatcataatttggagggaagctcttggagctgtgagttctccctgtacagtgttaccatccccgaccatctgattaaaatgcttcctcccagannanaaaaaaaaaaaaaaaaaaaaaaaaaaaaaaaaaaaaaaaaaaaaaaanccccgggggggggggccgggcccccatccccccttagggggggggtttaaaaattccggggggggggttttaaaaaggggggggggg

SEQ ID NO: 25281 - DNA, 484 bp, Homo sapiens
  misc_feature (1)...(484): n = A,T,C or G
ggaaaaaaaatttgcccgcctgctggaattccgcacgagggaagtaacgtcagcctgagaactgagtagctgtactgtgtggcgccttattctatgcacttgttgggcagaatgtcacacctgccgatgaaactcctgcgtaagaagatcgagaagcggaacctcaaattgcggcagcggaacctaaagtttcagggggcctcaaatctgaccctatcggaaactcaaaatggagatgtatctgaagaaacaatgggaagtagaaaggttaaaaaatcaaaacaaaagcccatgaatgtgggcttatcagaaactcaaaatggaggcatgtctcaagaagcagtgggaaatataaaagttacaaagtctccccagaaatccactgtattaagcaatggagaagcagcaatgcagtcttccaattcagaatcnnnnntnnnnnnnnnnannnaaannnnnnnnnaaaanaaaaaaaaaccccggg

SEQ ID NO: 25282 - DNA, 507 bp, Homo sapiens
  misc_feature (1)...(507): n = A,T,C or G
tgtgtnttnnnttatgttcgacctgcgtgaattcggcacgagctgcccagcaggtggctacccaggctactgctaagactcgtacttcccagtttggtgtgggcagctttcagactccatcctccttcagctccatgtccctccctggtgccccaactgcatcgcctggtgctgctgcctaccctagtctcaccaatcgtggatctaactttgctcctgagactggacagactgcaggacaattccagacacggacagcagagggtgtgggtgtctggccacagtggcagggccagcagcctcatcatcgttcaagttctagtgagcaacatgttcaacaaccgccagcacagcaacctggccagcctgaggtcttccaggagatgctgtccatgctgggagatcagagcaacagctacaacaatgaagaattccctgatctaactatgtttccccccttttcagaatagaactanttgggtgaggataanggggtggggagaaaaa

SEQ ID NO: 25283 - DNA, 502 bp, Homo sapiens
  misc_feature (1)...(502): n = A,T,C or G
agcgggcnaattgaccatagaccgcctgcggaattcggcacgagccactggtgactgggctcatgcctccaagtcagagtttccctggtgccccagagacaggagcacaagtgggatctgacctggtgagattatttctgatgacctcatcaaaaaataaacaattcccaatgttccaggtgagggctttgaaaggccttccaaacagctccgtcgcccctagcaactccaccattgggcactgccatgcagagacgtggctggcccagaatggcctgttgccatagcaactggaggcgatggggcagtgaacagaataacaacagcaacaatgcctttgcaggcagcctgctcccctgagcgctgggctggtgatggccgttggactctgtgagatggagagccaatctcacattcaagtgttcaccaaccactgatgngtttttatttccttctatatgattttnagaatgtgtttctgcattctgtaaagaaacatatn

SEQ ID NO: 25284 - DNA, 486 bp, Homo sapiens
  misc_feature (1)...(486): n = A,T,C or G
agcgggtnnnattgacttcgttagcaattcggcacgagcttcattttaatgtaattagctacacgtggctagtagctgttgcagcggacaccacaggtctaaggaaacaacacagaacattcagctaggggtgtaccctcatagcctgtgagtgtctcttactcactgtcatgggggaaggtgagttacacagggaggtaccttcttgccgcctcttttaggatttcctaagtatctctccttcatcctacctgccatcattctttgactttatgtccattttctaaacctttgcctacacttgctcttatctacatggagttgttcaacctgccgaagtgattaaattctgtgtacacaggccgtatatattgcagctaattaaaacaacaaacatcctangcatgcacaaaggtataattcaccgttataacaggcagcaacttgtatgtctaatattagacatcttgctttctgtctgtaggc

SEQ ID NO: 25285 - DNA, 471 bp, Homo sapiens
  misc_feature (1)...(471): n = A,T,C or G
cgggccccattgacnatcgatccgcgctgcaggaattcggcacgagtggagctgccgcctggtcaccttcacccatggagtcctctctataggcctctccgcttatattggcttcattgatggcccatggccttttacccacccaggctcacccaatacacctctccaagttcatgtcctgtgtctcaccttgggctacttcatcttcgacttgggctggtgcgtctactttcagtctgagggtgccttgatgctggctcatcacacattgagtatcttgggcattatcatggcccttgtgcttggggagtctggcacagaggtcaatgcagtcctctttggaagtgagcttaccaaccccttgctacagatgcgctggtttctccgggaaacagggcactatcacagtttcactggagatgtagtggacttcctctttgtggctctgttcacaggagtgaggattggtgg

SEQ ID NO: 25286 - DNA, 464 bp, Homo sapiens
  misc_feature (1)...(464): n = A,T,C or G
nctgaaatcgtgacgctgacgaattcggcacgagcaacaggaaggtggatatccaaatctctctcttcgcaatgagtttccagttagatggaggagagagtaataaaacacagagctgagattcctgacttcacagatccctgaggagatgtttactaaagggaatcttctggtcactgttaccttcctccgtacttacctgcctcatggataacactgaagaatgcagtttacttacatctttttctgtttgacagaagacagttattagaacccgaaaggaagaagctatacgactggggacacatgtcttagaagcacactcattagataaagtgtcgcatactctttgataagaacatggctaccgacaacgtcccagggctgaagagaaacgtcaaccaagaagataccaatatgaaccctttttaatagagagagatggagaaggagaaacctcagag

SEQ ID NO: 25287 - DNA, 486 bp, Homo sapiens
  misc_feature (1)...(486): n = A,T,C or G
catcgacccccctnattgaccggctgtggaattcggcacgagaaaattatggaaacagatgaaaagcctctgttttgatatgggtagtattttttacattttacacactgtacacataagccaaaactgagcataagtcctctagtgaatgtaggctggctttcagagtaggctattcctgagagctgcatgtgtccgcccccgatggaggactccaggcagcagacacatgccagggccatgtcagacacagattggccagaaaccttcctgctgagcctcacagcagtgagactggggccactacatttgctccatcctcctgggattggctgtgaactgatcatgtttatgagaaactggcaaagcagaatgtgatatcctaggaggtaatgaccatgaaagacttctctacccatcttaaaaacaacgaaagaaggcatggacttctggatgcccatccactgggtgtaaacacatctagtn

SEQ ID NO: 25288 - DNA, 484 bp, Homo sapiens
  misc_feature (1)...(484): n = A,T,C or G
ccccccccttgacatcgttcgccttcggacgagggcggaggagcaggacctggtgcttgatggtcgaggccatctcctgggccgcctggcggccatcgtggctaaacaggtactgctgggccggaaggtggtggtcgtactctgtgaaggcatcaacatttctggcaatttctacagaaacaagttgaagcacctggcttttcttcgcaagcggatgaacaccaacccttcccgaggcccctaccacttccgggcccccagacgcatcttctggcggaccgagcgaggtatgctgccccacaaaaccaagcgaggccaggccgctctggaccgtctcaaggtgtttgacggcatcccaccgccctacgacaagaaaaagcggatggtggttcctgctgccctcaaagtcgtgcgtctgacgcctacaagaaagttttgctatctggggcgcctggctcacgaaggtgcttggagtaccangcan

SEQ ID NO: 25289 - DNA, 504 bp, Homo sapiens
  misc_feature (1)...(504): n = A,T,C or G
agtcgcgcnnnattgancgctagattcgcctgtcggatcggacagacatataggatattcccaagccgaccttccctccgccttctcccacatgaggccatctcaggagatggagggcttggcccagcgccaagtaaacagggtacctcaagccccatttcctcacactaagagggcagactgtgaacttgactgggtgagacccaaagcgagccctgtccctctagtgccttctttagaccctcgggccccatcctcatccctgactggccaaacccttgctttcctgggcctttgcaagatgcttgagtgtgttgaggcttttaaatatatattttgtactttgtggagagaatgtgtgtgtgtggcagggggccccgccagggctggggacagagggtgtcaaacattcgtgagctagggactcacggaccggtgctgcangagtgtcctgcccatgccccagtcngccccatctctcatnctttaagataagttctattt

SEQ ID NO: 25290 - DNA, 482 bp, Homo sapiens
  misc_feature (1)...(482): n = A,T,C or G
nattgccccgcgctgtggtctcagtgaaagcactcataagtactatgaaaccgtgtcagatgtattaaactctgtgaagaagatggaagagagcctgaaaaggctgaaacaagccagaaaaaccactcccgccaaccccgtcggtcccagtggtggcatgagcgacgacgacaaaatcaggctgcagttggccctagatgttgagtacttgggagagcagatacaaaagttgggactacaagcaagtgacataaaaagcttctcagctctcgcagagcttgttgctgctgccaaggaccaggcaacagcagagcagccttaagcatcttggaagatcccgaggttagattcttaagcaagagaagagttggacttccaggctgaaggggagaaagtgactctgttctcttagcaaccgtctgtagcaaagaagtgcttccagcatcactccagcaacacgcccatgcgtcttctctcagcgn

SEQ ID NO: 25291 - DNA, 458 bp, Homo sapiens
  misc_feature (1)...(458): n = A,T,C or G
aattganccgcgctgcagtaattcggcacgaggtgatgcccgaggatgacgtgttctttatcgtggatgtgaagatagaggacattggggtatacagctgcacagctcagaacagtgcaggaagtatttcagcaaatgcaactctgactgtcctagaaacaccatcatttttgcggccactgttggaccgaactgtaaccaagggagaaacagccgtcctacagtgcattgctggaggaagccctccccctaaactgaactggaccaaagatgatagcccattggtggtaaccgagaggcacttttttgcagcaggcaatcagcttctgattattgtggactcagatgtcagtgatgctgggaaatacacatgtgagatgtctaacacccttggcactgagagaggagacgtgcgcctcagtgtgatccccactccaacctgcgactcccctcagatg

SEQ ID NO: 25292 - DNA, 555 bp, Homo sapiens
gtcgctcgctcggctgttgcacctgcatcggtttctgatatatagatatattatctatagaacatccgtgaggacggaacgaaaaaaattcgacacgcctgcggtttcggcaccagctctgagaggccttgggggggtggggtttgtccacagagctgctggagcagcaccaagagccagtcttgaccgggatgaggcccacagacaggttgtcatcagcttgtgccattcaagccaccgagctcaccacagacacagtggagccgcgctcttctccagtgacacgtggacaaatgcgggctcatcagcccccccagagagggtcaggccgaaccccatttctcctcctcttaggtcattttcagcaaacttgaatatctagacctctcttccaatgaaaccctccagtctattatagtcacatagataatggtgccacgtgttttctgatttggtgagctcagacttggtgcttccctctccacaacccccaccccttgtttttcaagatactattattatattttcacagacttttgaagcacaaatttattg

SEQ ID NO: 25293 - DNA, 472 bp, Homo sapiens
  misc_feature (1)...(472): n = A,T,C or G
gtgggggnnnnaattgaaattgatccgcgctgcacgaattcggcacgagccaaaacaaaaaagaaagatttgtctgttttccacatttattcaattctttatatgttatggatatgcatttattttattctttaggttataatccagtactaaaaattatttaccttgttgttcttgttgttccagctttgcccaatgggccctccttgaggttggtttttgtgtccctttgctatagctcatccttttgttttttgagccccttcttactttatgatgctacaagatgctctgggctcatcttgtgttttccctgacctacgcctagaatcagccatttcaccaatgaaccctaattccttttattggagcatggtatttagaaaccaagatctgggcgctaggtgtgtttggtttggtgctattggaatgccattgcttctaggccttctcagcagacagagctaggtan

SEQ ID NO: 25294 - DNA, 506 bp, Homo sapiens
  misc_feature (1)...(506): n = A,T,C or G
agcntgttnnnaggnngannnnnnatttgannngcccattgacccgcgctgcaggaattcggcacgagagaccaaaaagatggctccaagctatgtcatgttacctgtaataaaatcttttcttctagattctttctatgttggcagataatctccccttgtagcttccactcacttattcttgcattcagagtcacaatgatcatcttacccatgtggtttttgagaaagaaagatcaattctttgtttgcagtaggtaatcttagagatggagatgattgtagaattattcctagatgagtgtcaatttatttaattccattgtcatataaggagtcaaattgtttcttatcatttgttcattgaagaacagagacctgtctggaaaatcgatctctacaaaatcaattaaataatgaacccccaatgctgaaaaaatgaaatacagccattcacagaatataagagcaatgttaggataatcacgctgatctgtagaaactct

SEQ ID NO: 25295 - DNA, 472 bp, Homo sapiens
  misc_feature (1)...(472): n = A,T,C or G
gtggggccattgancattgatccgcgctgcaggaattcggcacgagtgaagctattttttccagcaagtagattcttccagtttttccaacgagtaatatccccgaattggcataccacggcgtggacagctgatatttcacccagctgctggcttgtgggtgtggctctttgctttatatatatatacacacatgtgagtctggctgggctggtattttgtttgatcttcctggaaatgagcagagactaacgctcacataactggtttttttttttatctgggctgatgaatacatttacctaaaaaactcatttcgttttacttaaaaggggaagagcagtctttttttggcagttcaaaatccaagcacttgattcgctgggcttggaaaactccttttttggccttctatgggctcagccataacaattcctttaagcacgaaggttagccaacgacaaaaaaaaaa

SEQ ID NO: 25296 - DNA, 468 bp, Homo sapiens
aggtggtttctgcccgtcgtgagaattcggcacgagaaaaggtgaaggctgaaatctcgtttgtgctctgcaaggaccacgtgcgctctctgcagaaggaggggttttggcctgaggccttctctgaagtggctgagaaacacaacaacaggaacagacaaactcaaccagaactcccagctgagccacagttatcaggagaggagtccagctcagaagatgattctgacctgtttgttaacacaaaccgcagacagtatcatgagagtgaggaggagagtgaagaggaggaggcagcctgagactccaggacccaattctccacttgctcagggactggcccctggctcttctgggcttggacattcccagggtgctctgcacatcttcacccctgcatgaggacaaagcagggctcctctctgaactgatcttttgattcagagaattaaacccctggtggggtgg

SEQ ID NO: 25297 - DNA, 489 bp, Homo sapiens
  misc_feature (1)...(489): n = A,T,C or G
cgggtgccaattgacattcataggctttcggcacgaggcgcaaagcctgccgtatggaattctgctccacctgcaaagccagctggcaccctggccagggctgcccggagaccatgccgatcaccttcctccccggggagaccagtgctgctttcaaaatggaagaagatgacgcgcccatcaagcgctgccccaagtgcaaagtctacatcgagcgagacgaaggctgcgcgcagatgatgtgcaagaactgcaagcacgccttctgctggtactgcctggagtctctggacgatgatttccttctgatacactacgataagggaccctgccggaacaagctgggccactcccgggcatctgtgatctggcatcggacacaggaatcatgttgacctcagcttttgcaattactgagacatctataagcctttccatcattctctcgggccagntacttcttggactgttgaattaaacacaaagatg

SEQ ID NO: 25298 - DNA, 448 bp, Homo sapiens
  misc_feature (1)...(448): n = A,T,C or G
nactgatngcgtgcgcgattcggacgaggttgaatttgcatatctgtttattgccttatgtaaatgagtgtggccatctgtataagcctctttgacattttcacccagctctttcttaatgtctgtgttggcttctgcatcagcagaaatctttttaaaagggttgttatatatgtaaaaaatgttaacaggaaaatgagagaaaataaagcagctgaggatacaaatgtgctggtagggagcgatattcaagatatattgtgaagtgtgaaaaagtaggttgctgaaccatgtatatagtatgttcccctttgtgtacaaaagggtatgtttgtttaacctctgtctcttatctctgtatgtgtatgtatctttgtatgcatatatacatgtatctgtatgtgaatagactttgaaaaaatacagaataaacttcatggtggttgcn

SEQ ID NO: 25299 - DNA, 482 bp, Homo sapiens
  misc_feature (1)...(482): n = A,T,C or G
natttgannnccccnatttgcnccgcgctgcaggaattcggcacgagcatgtgacttgtgtctactgcttaaatctttatgctgtgttgatgatattatattgacatatgaagctgtatatgtgtatgtattttgtggagaaagggattacaagatgtatgagtataatgacttgctaacctttcaggattcagagaaagatgaagaaagaccatatctaaataatacacttcatcattttcatgtgtataaatgcttaaagtaccatctttgttgaggcggttcatgtatccagtttatccagtacagttatttgtcaagcttagctttgatttcaaaggacacgcttaccttgtctagcataagaaataatgctcatgtctgcagtggttggggtaagcctgcttaggagattaaaaaaatcctcttttccgttcggtgaatggtgcagtcagaacccccactcacttggatgtattatt

SEQ ID NO: 25300 - DNA, 380 bp, Homo sapiens
agacccccccattgaccatagtatcgcctgcacgaattcggcacgagcacgggctctacctgaccctgcagagacagggtttcaccatgctggccatgctgctctcgaagtcctaacctcaggtgatccacccgcctcagcctctcaaagtgctgggattacaggtgtgagccactgcgcccagcaggaatattcctaaatataagaggtgtgtctgccacccgcccttctcaagtggagctctgggttgagagagggagggggtgaattttgggctaaggagcctgctgatgtcacttttcttgtcttttcaattatctgtattggctttttgattgtcaaagtaaaaaaatgtgaagattaaaaaaaaaaaaaaaaaa

SEQ ID NO: 25301 - DNA, 495 bp, Homo sapiens
ctttgacccgcgctgcaggaattcggcacgagctacgccgagtgacagagacgctcaggctgtgttctcaggatgaccgagtgggagacagcagcaccagcggtggcagagaccccagacatcaagctctttgggaagtggagcaccgatgatgtgcagatcaatgacatttccctgcaggattacattgcagtgaaggagaagtatgccaagtacctgcctcacagtgcagggcggtatgccgccaaacgcttccgcaaagctcagtgtcccattgtggagcgcctcactaactccatgatgatgcacggccgcaacaacggcaagaagctcatgactgtgcgcatcgtcaagcatgccttcgagatcatacacctgctcacaggcgagaaccctctgcaggtcctggtgaacgccatcatcaacagtggtccccgggaggactccacacgcattgggcgcgccgggactgtgagacgacaggctgtggatgtg

SEQ ID NO: 25302 - DNA, 505 bp, Homo sapiens
  misc_feature (1)...(505): n = A,T,C or G
cattcgaccngcccttngggannattgcacccgcgctgcaggaattcggcacgaggcctcaggaggccagcctgccatgagagcacatgtcctctggccaggagtagtggctgagctctgtgatcgctgtgatgtggacccagctccagggagcagagtgtcggggatggaggggcccagcctggactgactgctacttcctgtctctgtttccattatcacccagagagggacaagataggacatggcctggaccagggaggcaggcctcccactcagagtctgggtctcactggccccaagtctcccacccagaactctggccaaaaatggctctctaggtgggctgtgcaggcaaagcaaagctcagggctggttcccagctggcctgagcagggggcctgccaccagacccacccacgctctgacgagaggcttttccacctccagcaagtgttcccaggcaccagctccatcctggctggttgcttccatttccgtgtag

SEQ ID NO: 25303 - DNA, 455 bp, Homo sapiens
  misc_feature (1)...(455): n = A,T,C or G
nattgaaaaattgagcggcgctgcaggaattcggcacgagcacagtgctgtctggcggcaccaccatgtaccctggcattgccgacaggatgcagaaggagatcactgccctggcacccagcacaatgaagatcaagatcattgctcctcctgagcgcaagtactccgtgtggatcggcggctccatcctggcctcgctgtccaccttccagcagatgtggatcagcaagcaggagtatgacgagtccggcccctccatcgtccaccgcaaatgcttctaggcggactatgacttagttgcgttacaccctttcttgacaaaacctaacttgcgcagaaaacaagatgagattggcatggctttatttgttttttttgttttgttttggtttttttttttttttgggctggcctcaggattaaaaaactgaaccggtgaaggtgacaccatccgg

SEQ ID NO: 25304 - DNA, 464 bp, Homo sapiens
  misc_feature (1)...(464): n = A,T,C or G
ctttgaccccccctnnaattgaccccccgctgcaggaattcggcacgaggtcaacttgacatagagtggagactttttcaaaatggcttttacatcctaatgaaagtttgggaagtatatcctctctgccttttcatcagtgctttgtggtccagctggcaccctttctgaggtttgtgttttgtgctaaatggttttgtccttaaataggagaggctcaaaaacatcaagatttcaggaaaatggcgacagctgcataatggaacccccctgcttctattttgttcttttaattactatttatagccccagttaccttctgaattctgaagtgtatatacctccatgttcctgaaaacaagaaaactcttacttcctgatattccatagactgccttcccaggtgattgagaacatagagaatgttacacatttattttactctaaatgatcttttacccctg

SEQ ID NO: 25305 - DNA, 499 bp, Homo sapiens
  misc_feature (1)...(499): n = A,T,C or G
ganagtgnccaggnggntnnnaattgaccgcccttcggaattcggtacgagacgggaaggaaaagctgtgtgcgacacagaggaaactccattatttgaacacatttctttggctcttgacaaatacttgcttttcctctaatcttgcaagagctatggctcttctattttccaatcacacagcttggcatgtaggaaaggttgaatgatcctctaagactgtgttggtcttcgtattctgtaaaacccatttttttttttggggccttacagatgtttaaaaagtggcacaggttactgaattgtctacctgccagcattctgatatagcacaaaaagctattttcctttattttttggataattttttatttttctggcattgagctctaggggggatgagggtttatggtcctctgatcataagctccattctaaaaactggtcactgttagctgaaattgctttggttccccaaatgccttggaactccagaccn

SEQ ID NO: 25306 - DNA, 482 bp, Homo sapiens
  misc_feature (1)...(482): n = A,T,C or G
nattgacnccccatctgcaccgcgctgcaggctgaagcggaggcggccgctgctcgagagattcatgaattacacacataacactattctctggagtagctgtgaagctctacgaggctgtgaggttggaggcgcttctccctgcctgttaagctgctcccatcacatcacgacaggatggactttatttttctcttttcaattaaatctttacaacagttcgaatgctctttccagaatgcatcagttcaaaggctttgttgatttcctcaaaagacagattgtgagtcacaaattcatcaacttttatctttttggacatatattcagacaccaactttgggacactttctacattcttccatcctccaaaggcagtgcctttctatgtgtgacctggtaccagctggaatggacgagtggcaagttcttcaccctgaggcgctactccaaccaccacgctgatgccccagccttgtgac

SEQ ID NO: 25307 - DNA, 390 bp, Homo sapiens
  misc_feature (1)...(390): n = A,T,C or G
gtggnngnnnnaattgacatcgatccgcgctgcaggaattcggcacgaggccacccccaccagctggaggacccagcctcacagtgtgtcctttgtgccagaccaagcggcccgtggggggtggggggcagggagtgtaccacacagggccattgtctcacctcccaaagggaccgcctgcccccagctcatcccagagcgtccctgctgcaaccctgacagccgtctcccaggccgcttccccaacatccccgccccagcctccctcttaccccagaaaggtcaggtatgacctcccggggaggaatcccacctgcctgtataccccagacttgcctctggggcctgattaaataaggctgttttgataaaaaaaaaaaaaaaaaaaaa

SEQ ID NO: 25308 - DNA, 450 bp, Homo sapiens
  misc_feature (1)...(450): n = A,T,C or G
nttggccacctcgctgcacgaattcggcacgaggcacctctggcatgaaatagtcacaggagcgaacacaactatctcttggaagcatgcagtttgactcatggaatcaagcatgtgctgtactataataacttgtctctccatgccgtaatgccatcctgactgagatttacctggcccttcaatatagcattttgcatatctacctatgacatgatgggaggtggctaatggggagggatgcgccctggggagttttgtgaatgtgttaagtggagttaagagacctactgcatgctattgtatagattatacattatatatttaaccatttgttgctgtacagtgaagctttttctagtatttcttttttgctattataaacaatgttgcagtaaatatcctaaatactctaaaaaaaaaaaaaaaaaactcgagggggggcccggc

SEQ ID NO: 25309 - DNA, 485 bp, Homo sapiens
  misc_feature (1)...(485): n = A,T,C or G
cggagggacnnnttcgcccgcctgcatgaattcggcacgagcagcaccagccatggaggacgagatgcccaagactctatacgtcggtaacctttccagagatgtgacagaagctctaattctgcaactctttagccagattggaccttgtaaaaactgcaaaatgattatggatacagctggaaatgatccctattgttttgtggagtttcatgagcatcgtcatgcagctgcagcattaactgctatgaatggacggaagataatgggtaaggaagtcaaagtgaattgggcaacaacccctatcagtcaaaagaaagatacaagcagtagtaccgttgtcagcacacagcgttcacaagtcttagttcacttgcacatggattcacataaactgaatggtgtaatgtctgggcaaccaaaactgttggctcttgagaaaactgtcaaatactttaacatcaaactgttgcaatgcaagatca

SEQ ID NO: 25310 - DNA, 492 bp, Homo sapiens
  misc_feature (1)...(492): n = A,T,C or G
cgcccccttgacgcttgagccgatcctacaataacatttttctctatttgttttacacatgtcaatctgcctatccatccctctatccattcatttatccattttattaatgtatttcaaagtaagttgcagacatcattacatttcacttctaaacacttcagcatacagctgagttttatgcaagaaacttaagctctcagctgggtacagtggctcacacctgtaatcccagcactttgggaggctgaggcaggaggattgcatgagattgggagtttgagacgagcctggaaaacagcaagacctcatttctactaaaaattttaaaaattagccgagcatggtgggggagggtgaagaaggaggatagcttgagcccaggagtttgaggctatagtgagctatgatggcgccacttcagtctgagtaacnagcagacactattaaaaaaaaaaaagagcccggcgcagnggctcacacttgtatccc

SEQ ID NO: 25311 - DNA, 449 bp, Homo sapiens
  misc_feature (1)...(449): n = A,T,C or G
natgatnatcgtgagcaattcggnacgagtgccactgtccttgcctccacaccaccaggcgccaccgccgctgctgctgctgctggaatgggaccgaggcccatggcaggatccactgaccagattgcacatttacggccgcagactcgccccagtgtgtatgttgctatatatccatacactcctcggaaagaggatgaactagagctgagaaaaggggagatgtttttagtgtttgagcgctgccaggatggctggttcaaagggacatccatgcataccagcaagataggggttttccctggcaattatgtggcaccagtcacaagggcggtgacaaatgcttcccaagctaaagtccctatgtccacagctggccagacaagtcggggagtgaccatggtcagtccttccacggcaggagggcctgcccagaagctccagggaaa

SEQ ID NO: 25312 - DNA, 503 bp, Homo sapiens
  misc_feature (1)...(503): n = A,T,C or G
catcgcccccccntgngnnnnnatagaccngcgctgcaggattccgcacgagcagcaaacgagggccaagaccatctgagccagccccacatctagaactcccagaccctggacttagccaccagagagctacattttaaaggctgtcttggcaaaaatactccatttgggaactcactgccttataaaggctttcatgatgttttcagaagttggccactgagagtgtaattttcagccttttatatcactaaaataagatcatgttttaattgtgagaaacagggccaagcacagtggctcacgcctgtaataccagcaccttaaaggtcgaggcaggcggatcacttgaggtcaggagttcaagaccagcctggccaatatggtgaaacccagtctctactaaaaatacaaaaattagctaggcatgatggcgcatgcctataatcccagctactcgagtgcctgaggcaggagaattgcatgaacccgggaggaggagg

SEQ ID NO: 25313 - DNA, 515 bp, Homo sapiens
  misc_feature (1)...(515): n = A,T,C or G
tcgaaatataaaatatatgggnaaaaaaanccggaagaaananggtttganncgccntttttgcatcgcgctgcaggaattcggcacgagtatgggtcagcatgaccattaattactgagtagaaattgactaaactttgatttcctttttttaaatcgtgttgcatttgattcctgagcaaattccctcaaagtgaactcttgttcttaaattttgaattttatggtgagattgtaaagatagaggcaattgaaacattgttccttatttatgaactgcttgaagtgaatacttaatttaagtttgcactttaataccaaacttaaaaccaaacactcatttaaaagtaggttaagtgatcatggatcattgttattagctttgtggctttgtgaaattctaaaggaatcaaataattcatcatgatttaaattttctagagattttgatttttttataatgtttctttcctgtagattgggntcttggttctctctctctctctctctctctc

SEQ ID NO: 25314 - DNA, 487 bp, Homo sapiens
gggctccccccaattgacggcctatggaacggcctagctgcactccaacctgagcaacagagtgagacaccagctcaaaaaaaattttttaataataataaaagtcctattattcaactggttatgtacattatggttgaaagggaacgttttaatccagtctcaatccagggcaatagaattacaaagcatgttgtatttcagttcaaatggtattgtattataaaattacagctacattttcctttcggcgatcttcagcataatttcccagaggcccctttttcctccctataggccatcttattaacagattttaaaatttatagtaatgacaaatgacttatcagtgttcatcatctgaaagctaagtggttcgttcaatcactttttcaaagttgatagtagattgcatggattcatgtttcctcatattgcgttattaattctatttaatcaaggaaaataacttcagattccataaagt

SEQ ID NO: 25315 - DNA, 438 bp, Homo sapiens
  misc_feature (1)...(438): n = A,T,C or G
nttggccccgcgctgcaggatttcggcacgagctcaagtccaagtgcctctggaagcctctccaattacattcccaccaccctgtgccccagaaaggccccccatcagcccagtcccaggcgcccgtcaagcaggcctctgagagtgctacccttctcttgtaaccttgcagccaacacccctgcccggcccctgagctgcctcctccagcccatgctcttacaggccctgcacagagtagcactcattaattcttggttaaggaatgaatcaacgaatgaatggctatgcatggacctctgggcagggagacctgggtcttctctggctgagaggggaaggctaaggcatggctgagattcaagccaccattccaggcctctttgcccaagaaagaaacttctgtcacccttgcactctcctgtgttctgagcggca

SEQ ID NO: 25316 - DNA, 494 bp, Homo sapiens
cttcgcccgcgctgcaggaaatcgcacgacgataaaagaaacagacaaaattaaggaagatatccttaccgatgaagatgaaaaaacaaaaggactgtgggattccattaaaagtttcacagtaagcttgcataaagaaaacaaaaaggaaaaagatgtcctaaacattttttcagttgcttctggtcatttatatgaacgttttttaagaattatgatgctttctgttttgcgtaacaccaaaacaccagtgaaattctggttgctaaaaaattatctctcaccgacatttaaagaagtaattcctcacatggctaaagagtatggattccgatatgaactagttcaatataggtggccccgttggcttcgtcaacagactgaaagacagaggattatttggggttacaaaattcttttccttgatgttcttttcccactagcagtggacaaaatcatttttgttgatgctgaccagattgtgagacatgatt

SEQ ID NO: 25317 - DNA, 483 bp, Homo sapiens
aactcgatcgccttcggaattcggcacgaggcgaacgaccaagagggtgttcgactgctagagccgagcgaagcgatgcctaaatcaaaggaacttgtttcttcaagctcttctggcagtgattctgacagtgaggttgacaaaaagttatagaggaaaaagcaagttgctccagaaaaacctgtgaagaaacaaaagacaggtgagacttcgagagccctgtcatcttctaaacagagcagcagcagcagagatgattacatgtgtcagattgggaaaatgaggtacgttagtgttcgcgattttaaaggcaaagtgctaattgatattagagaatattggatggatcctgaaggtgaaatgaaaccaggaagaaaaggtatttctttaaatccagaacaatggagccagctgaaggaacagatttctgacattgatgatgcagtgagaaaactggttaattcgagccatataaataaaacc

SEQ ID NO: 25318 - DNA, 483 bp, Homo sapiens
  misc_feature (1)...(483): n = A,T,C or G
atttgacggcctcggaannatcgatcgccttcggaattcgcacgagggaagtggcggatatggtagcagaaggttctaaaaacagcagaaatgggctacagttcttagcttgagagagagcgaggagttgtcaggaaagctgcaggttactttgagacagtcgtcccaaatgcattagaggaactgtaaaaatctgccacagaaggaacgatgatccatagtcagaaaagttactgcagcttaaacaggaaacccttcttgttcaggactgtcatagccacagtttgcaaaaagtgcagctattgattaatgcaatgtagtgtcaattagatgtacattcctgaggtcttttatctgttgtagctttggctttttctttttcttttcattacatcaggtatattgccctgtaaattgtggtagtggtaccaggaataaaaaattaaggaatttttaacttttcaaaaaaaaaaaaaaaaactg

SEQ ID NO: 25319 - DNA, 484 bp, Homo sapiens
  misc_feature (1)...(484): n = A,T,C or G
ggggannanatttgaccccatttgaccgcgctgcaggaattcggcacgaggagacgaaaagaaattgcatcagcctgggcgggggacagttctgtgtttaagttgcctgtattgaaagagggaacttgcgtaaatacactttcaagcctgtaggtgctgtagtgtttaccaaccagagcacccactcttcaaggaattctgttgttaccagaaaagaaattgtccatcaaagacccttccccccacacccccaaatgtatgggatcctggctctgctacttaccagctgtgtgaccttaaactaactgcctgacctgtggctctgtttacttttctttaaaatgagggtcgtgattgtacagtacctaccacagaagctgttatgaagactcaatgaactaatccatatgaagtccacgttgtaattgtttgctgttcagtattattaagacttcctgggataggtgttacctcaatacacatn

SEQ ID NO: 25320 - DNA, 483 bp, Homo sapiens
  misc_feature (1)...(483): n = A,T,C or G
nattgatcgccntcggannnnccnattgacccgccttgcggaattccgcacgaggtggtactggctgcgagtgttcctgagagttgaaagtgggatgacttatgacacttgcacagcatggctctgcctcacaatgatgcagtcagccacctggtgaagaagtgacctgcgacacaggaaacgatgggacctcagtcttcttcagcagaggacttgatattttgtatttggcaactgtgggcaataatatggcatttaagaggtgaaagagttcagacttatcaccattcttatgtcactttagaatcaagggtgggggagggaggggaggagatggcactttcaaatcgcccaagtgatgaataaagtatctggctctgcacgagnaanattatgtgcccctgagnacacgcgtcattattnagagttttggggggggggccgcgcccccaattcccctagttggggggggaaaaacaatcc

SEQ ID NO: 25321 - DNA, 470 bp, Homo sapiens
  misc_feature (1)...(470): n = A,T,C or G
ntggatcnccttnnnatttgccccggctgcaggaattcggcacgagggtgaggatggaagacccccaaggctggatgtaaccttgttcccaagaagtgtttggaatgtgctgtaagaatggaggaagtcgtttccactgtcagcatcctccctggaccgcgtggctggctcatcttttgagaagggttgggactgccaagttctcctggaggaagagttgcgtccggctgggattccactcactgggactgtaccgccaggtgtcatgcgtctctctgaggtttcctgattaaaggttgtctcggtttccccannnnnaaaaaaaaaaaaaaaaaaaaaaaaacctttgggggggggcccgggccccaattcccccttaggggaggggttataaaattccggggccggggtttaaaaccggggggggtgggagacaananntgtntgngttctgtgctcgtgttctattg

SEQ ID NO: 25322 - DNA, 548 bp, Homo sapiens
ctacctgtcgcgcatgttcatctatctaccatctcattgacgctagatcacttacgtacttcactgaggaacagaggaaaaaaatttgaccgcctgcggattgacctccctggctaattttttgcatttttttgtagagacttgatcttgctatgttgtccaggctgctctctaactcctagcctcaagcaatccacccatcttggcctcctaaagtgccggattacaggtgtaagccaccatgcccagcctgttttgtcaatgtatctgttttctgtcttattttactataagcactaagaagaaactaagctatatctctaacactagacttgaaaatttcctcagctaaacatccaagttcatcatttattcaacttttcacactactgtagtagacaatttagatagataaactttttgccactatatgacaaggattccctttcttccattttccaataaaatcttcatttccttctaaaccatcactagaaatgcctttaacattcatactactaccatcttggaaaggcaatctagttttt

SEQ ID NO: 25323 - DNA, 554 bp, Homo sapiens
  misc_feature (1)...(554): n = A,T,C or G
gtgctcgaccatcgccgataatatatcgtcgctccaggacttttaaggcacttgctactctaagaggaggagacaaaanaaaatttgaaacccctggaatttgcacccgctgcaggaattcggcacgaggcagaccagacttcgctcgtactcgtgcgcctcgctttgcttttcctccgcaaccatgtctgacaaacccgatatggctgagatcgagaaattcgataagtcgaaactgaagaagacagagacgcaagagaaaaatccactgccttccaaagaaacgattgaacaggagaagcaagcaggcgaatcgtaatgaggcgtgcgccgccaatatgcactgtacattccacaagcattgccttcttattttacttcttttagctgtttaactttgtaagatgcaaagaggttggatcaagtttaaatgactgtgctgcccctttcacatcaaagaactactgacaacgaaggccgcgcctgcctttcccatctgtctatctatctggctggcagggaaggaaagaacttgcatgttggtgaaagaagaa

SEQ ID NO: 25324 - DNA, 466 bp, Homo sapiens
  misc_feature (1)...(466): n = A,T,C or G
tgtggtgnnnnaactgacatcgtgagcgatttcggacgagcacagatctgacgtaatcaaactccagcccttgcccgtgatggctccttgtggtctgcctgcccacccacatgagcccgcgagtatggcagcaggacaagccagcggaggaagtcattctgatatggagttggcattggaagcttattctttttgttcactggagagagagagaactgtttacagttaatctgtgtctaattatctgatttttttttattggtcttgtggtctttttaccccccctttcccctccctccttgaaggctaccccttgggaaggctggtgccccatgccccattacaggctcacacccagtctgatcaggctgagttttgtatgtatctatctgttaatgcttgttacttttaactaatcagatctttttacagtatccatttattatgtaatgcttcttagaaaaga

SEQ ID NO: 25325 - DNA, 489 bp, Homo sapiens
  misc_feature (1)...(489): n = A,T,C or G
cgcgcccccatcgcncgcctgagttagaccgcctgcggatcaccaacttcttgaaaactgatttcgtattgattggttcaatttgagacaaacatgaagggcaagaacatcaagaaaacttctccccactcttgatcagaatttccaggtggcctacccagactactgcccgctcctgatcatgacagatgcctccctggtagatttgaataccaggatggagaagaaaatgaaaatggagaatttcaggccaaatattgtggtgaccggctgtgatgcttttgaggaggatacctgggatgaactcctaattggtagtgtagaagtgaaaaaggtaatggcatgccccaggtgtattttgacaacggtggacccagacactggagtcatagacaggaaacagccactggacaccctgaagagctaccgcctgtgtgatccttctgagagggaattgtacaagttgtctccactttttgggatctatta

SEQ ID NO: 25326 - DNA, 454 bp, Homo sapiens
atttgacccgctctgcaggtcattttcaggtgccattttatagtatagcagcacggcttttactctgtgtatgcacagatgcagtctggggcatggtttgtgtgctggactttctcatggccatcatcagtatgcttatggatttgatgacaggcatagcctgggcatatcacctcattggtaaagggctagagcctttcttttttatggcacttctttttttgagatagggtcttactctgtcaccctggctagagtacactggtacaatcacggctcaatgtaggcttaacctcctgggctcaggtgtatgtcactatgcccggctactttttgtattttttggtagagacggcttccccacgttgcccacgctgcaagcgatatgcctaggctcaagcgatctgcccacctcaactcttcgaagtgctgagactacaggtgtgagccactg

SEQ ID NO: 25327 - DNA, 490 bp, Homo sapiens
  misc_feature (1)...(490): n = A,T,C or G
catcgcccgcgctgcggaattggagcccacttgttgtatctaattattttggttgttaatatggtgataatggaaagtcaagttaaattttaaatattaagaattctgatttattgagattgaattatgccaccacgtttatgtaaaaatgaaggtggcaccgtggtgagacctaatgagaaatagttactcagttgtaaaaattttgatttattctctttcttctgacctccttgcctcttgtcttgaaccatagcaaaaggatactgcatctctcattactgtagtgctgaggttattgaagttatacaaaacacatctcagtctctgtttcttggaaaggtatctattacatcctgctagctgactgacaaaactaagcagggagaataaagataattgtattttatgttttgcacacaaacgcagaatttgtataaccatatgacttcatagttgtgatctcanaaaagaagaatttctctttgtt

SEQ ID NO: 25328 - DNA, 483 bp, Homo sapiens
  misc_feature (1)...(483): n = A,T,C or G
natcgcccgcctgtggcggccctctcggcttctccagcttcggtaggagaggatccggcgccgaatcactgactggcacaggtgttgggaaaatgatccacagtctatttctcataaactgttccggtgacatatttctagagaagcactggaagagcgttgtgagccagtctgtctgtgattatttctttgaagctcaagagaaagctgctgatgttgaaaatgtaccacctgtcatttcaacacctcaccactacctcatcagtatctaccgggataagctcttctttgtatctgtcatacagaccgaagtgccacctctctttgtaattgagttcctacatcgagttgctgacacttttcaggactactttggtgagtgttcagaggctgcaattaaggataatgtggtcatagtatgaactcttagaagagatgttagacaatggatttccactggctaccgaatctaacatttttgaa

SEQ ID NO: 25329 - DNA, 473 bp, Homo sapiens
  misc_feature (1)...(473): n = A,T,C or G
gatggggnananaattgaaattgatccgcgctgcacgaattcggcacgagccaaggggccagggccctcagccaggacagaaaggcctccagttgccagccagccagcctgctgccaggtggaccaatcattttcggtttcatggaaacaaaccataaatcaatgtaagaaacagccaagccgcagtttctgaacacagccaacgtttactgaccgtcctgcgtcttggaccagcctacttttgacccagtgaactattttcacttgaagccagcacagaaggttttcaggcccaggatgctgtctaaatcgggttgatggacaaagagaggctgtttgagcctctgagccaggtgagtttgggatccacagccctcagaaaaccttcaccccttaggaacagagaccaaactgaaataatgacctgtggaatgattccatgcctgctaaaaactcgagggacaaggaacagn

SEQ ID NO: 25330 - DNA, 469 bp, Homo sapiens
  misc_feature (1)...(469): n = A,T,C or G
ctcgctttgcccccgctgcaggaattcggcacgagaattaatccttgaaggaaatgacattgagcttgtttcaaattcagcggctttgattcagcaagccacaacagttaaaaacaaggatatcaggaaatttttggatggtatctatgtctctgaaaaaggaactgttcagcaggctgatgaataagatctaagagttacctggctacagaaagaagatgccagatgacacttaagacctacttgtgatatttaaatgatgcaataaaagacctattgatttggaaaaaaaaaaaaaaaaacctcgggggggggcccgtgccccaattccccttataggggggcgaattacatttcacgggccggggttttacaacgccgggactgggggaaacnngcggcncgntcngcccctgcttcnccggcctcgcctgttttgtgctcntgtgggtcggggggggctccctnt

SEQ ID NO: 25331 - DNA, 489 bp, Homo sapiens
  misc_feature (1)...(489): n = A,T,C or G
nacggggncttgaattcgtgagcaattcggcacgagggccagtatgtgctcactggcttgcagagtgggcagcctaagcatttgctactggtggaccctgagggtgtggttcggactaaggatcaccgctttgaaagtgtcagtcaccttatcagctaccacatggacaatcacttgcccatcatctctgcgggcagcgaactgtgtctacagcaacctgtggagcggaaactgtgatctgccctagcgctctcttccagaagatgccctccaatcctttccaccctattccctaactctcgggacctcgtttgggagtgttctgtgggcttggccttgtgtcagagctgggagtagcatggactctgggtttcatatccagctgagtgagagggtttgagtcaaaagcctgggtgagaatcctgcctctccccaaacattaatcaccaaagtattaatgtacagagtggcccctcacctgggcctttc

SEQ ID NO: 25332 - DNA, 531 bp, Homo sapiens
  misc_feature (1)...(531): n = A,T,C or G
ggactgcgctgcgatcgccgaggctttgaattctgcaacagaactagtaacaaagggccgagtgccatatccaggtatggtgaaccgtgaagtactagaacaagtggagcgaggatacaggatgccgtgccctcagggctgtccagaatccctccatgaattgatgaatctgtgtcggacgaaggaccctgatgaaagaccaacatttgaatatattcagtccttcttggaagactacttcactgctacagagccacagtaccagccaggagaaaatttataattcaagtagcctattttatatgcacaaatctgccaaaatataaagaacttgtgtagattttctacaggaatcaaaagaagaaaatcttctttactctgcatgtttttaatggtaaactggaatcccagatatggttgcacaaaaccacttttttttccccaagtattaaactctaatgtaccaatgatgaatttatcagcgtatttcagggtccaaacaaaatagagctaagatactgatgacagtgn

SEQ ID NO: 25333 - DNA, 466 bp, Homo sapiens
  misc_feature (1)...(466): n = A,T,C or G
nttagcctcgcgctgcaggaattcggcacgagcaggtgggctccttctccaaggatgcgatacacagaccactgtgcagccttatttctccaatggacatgattcccaagtcatcctgctgccttttttcttatagacacaatgaacagaccacccacaaccttagttctctaagtcatcctgcctgctgccttatttcacagtacatacatttcttaaggacacagtacactgaccacatcaccaccctcttcttccagtgctgcgtggaccatctggctgccttttttctccaaaagatgcaatattcagactgactgaccccctgccttatttcaccaaagacacgatgcatagtcaccccggccttggttctccaatggccgtgaacactagtgatcatgttcagccctgcttccacctgcatagaatcttttcttctcagacagggacagtgcggcctcaa

SEQ ID NO: 25334 - DNA, 518 bp, Homo sapiens
ggcggtgggccatgccgcctgtggaatattgcacgagctgaggagagggagcagcgtcacgggcgcccggcccgttaaaacgctgctggctggagccacctccctccctgcagcccgcaacgggaatggagtaaagggagacccgtcgacctggccacggggatcagcgatggaattaaagcaatctttgtccacccatctggaagccgagaagcctctgaggcgctatggggcggtggaggagacggcttggaaaacggagagactggggagaaatcagctggacatcatctccatggcggagacaaccatgatgccagaggagattgagctggagatggcaaaaattcagcgtctccgggaagtcttggtccgccgggagtctgagctcaggttcatgatggatgacatccagctctgcaaggacatcatggacttgaagcaggagctgcagaacttggtcgccatcccagaaaaagaaaaaaccaaactgcagaagcagagagaggatgagctaa

SEQ ID NO: 25335 - DNA, 488 bp, Homo sapiens
  misc_feature (1)...(488): n = A,T,C or G
ncgggttttgcctccccggctgcagaattcggcacgaggacacagacagagatagtgacagtgatagagctagacatagtgagccagacactcagagatggagagatagatatagagacagagattaaggagagctgggagcccagctgctgaccacgggtgggacatgaaccagcggatggagtccatcaggggagtgggaaagtgggcttgagctgctagctagacagtagggatgtaaaggcctgggagctagaccctccccaagcccatccatgcacattacttagctaacaattagggagactcgtaaggccaggccctgtgctgggcacatagctgtgatcacagcagacagggtcgctgccctgatggcgcttacattccagtgggtctaatgaccatatcttaggacacagatgtgcccagggaggtggtgtcactgcacaggaagtatgaggactttagtgtcctgagttcaaatcctg

SEQ ID NO: 25336 - DNA, 468 bp, Homo sapiens
  misc_feature (1)...(468): n = A,T,C or G
ttagctctgcacccgctgcaggaattcggcacgagcagcaagcatgagtatgacgagtccggcccctccatcgtccaccgcaaatgcttctaggcggactatgacttagttgcgttacaccctttcttgacaaaacctaacttgcgcagaaaacaagatgagattggcatggctttatttgttttttttgttttgttttggatttttttttttttttgggtgccctgagaacttaaaacctgaaccgccaaaggtaacagcctgcggttgaaacaagcatcccccaaagttcaaaatgggcccggggactttttgaccgaatcgttgcctttttataccaaatccacaattgcaaactcgggctgcctggaatcccctgtggaccttaaaagctaccgaacttctttctctgggaatgggcctgcccttttcctattcctccaagggggagggaggaccatctttttn

SEQ ID NO: 25337 - DNA, 479 bp, Homo sapiens
  misc_feature (1)...(479): n = A,T,C or G
gagactannnattgancggcttgaagaactctgcacgagctgngatgtagtagtatcatgcagaggtgtgtgggcccttttgttcacctctgcagactgtgaatcctagctgccagtttgcctattatatgccaaggcatttgcaaaaatctcattaatctaaatcaaaatagctttaaagaaaaatgcatacacttcctcagatcatcaaacagactctggtccaaggttggtaatgaaatgactgttcctgacagggaggaatagcagggcccaatcttctgagatggcttctgggtctttccatggtcagagaagatctatagtccgtcctgaggtctgtcaatgtcacaggaaaaggcaaacttgaggggatcgtcgcctgctggctaagaccagggagctaaaaacttgaggaagggaacctgcctgggtgggtgctacttctgattcattggccttgtccctgtcataagtac

SEQ ID NO: 25338 - DNA, 524 bp, Homo sapiens
  misc_feature (1)...(524): n = A,T,C or G
agacggctgggnactgaacgctgtngaatattgcaccgcctgcaggaattccgcacgaaggaaaactgcatgttaatcattttcctaagctgtccttttgaggcttagtcagtttattgggaaaatgtttaggattattccttgctattagtactcattttatgtatgttacccttcagtaagttctccccattttagttttctaggactgaaaggattcttttctacattatacatgtgtgttgtcatatttggcttttgctatatactttaacttcattgttaaatttttgtattgtatagtttctttggtgtatcttaaaacctatttttgaaaaacaaacttggcttgataatcatttgggcagcttgggtaagtacgcaacttacttttccaccaaagaactgtcagcagctgcctgcttttctgtgatgtatgtatcctgttgacttttccagaaattttttaagagtttgagttactattgaatttaatcagactntctgattaaagggtntctttt

SEQ ID NO: 25339 - DNA, 471 bp, Homo sapiens
  misc_feature (1)...(471): n = A,T,C or G
gaggggnntnnttatggactgatggctgtggaattcggcacgagcctgtgcatggcacggctcaagacagtcctgaaatacgtgctgtttcttctgggtacactggtcatcgccatgtccttgcagctggaccgcaggggcatgtggaacatgctggggccctgcctctttgccttcgtgatcatggcctccatgtgggcttaccgctgcgggcaccggcgccagtgctaccccacctcgtggcagcgctgggccttctacctcctgcccggcgtctctatggcctctgtgggcatcgccatctacacctccatgatgactagcgacaactactactacacccacagcatctggcacatcctgctggccgggagcgcagccttgctgctgccgccacctgaccagcccgccgagccctgggcctgctcgcagaaatttccactgccactatcagaactgccagaacgatcg

SEQ ID NO: 25340 - DNA, 499 bp, Homo sapiens
  misc_feature (1)...(499): n = A,T,C or G
accccatagacggcctattgatcggcctaggaanaaccgcgagctattaaccatggtcaacgcccaccgtgttcttcgacattgccgtccacggcgagcccttgggccgcgtctcctttgagctgtctgcagacaaggtcgcaaagacagcagaaaattttcgtgctctgagcactggagagaaaggatttggttataagggttcctgctttcacagaattattccagggtttatgtgtcaaggtggtgacttcacacgccataatggcactggtggcaagtccatctatggggagaaatttgaagatgagaacttcatcctaaagcatacgggtcctggcatcttgtccatggcaaatgctggacccaacacaaaaggttcccagtttttcatctgcactgccaagactgagtggttggatggcaagcatgtggtgtttggcacagtgaaagaaggcatgaatattgtggaggccatggagcgctttgggtccaggat

SEQ ID NO: 25341 - DNA, 491 bp, Homo sapiens
  misc_feature (1)...(491): n = A,T,C or G
cccccccccatcgaccgccttccgaattgcaccgcctgcaggaattccgcacgagtgatgacagacgcaggccaaccacattccgaagcagattatacactggggccactgctctgctgcggagataagtcattttggaattcagcttccttcaacactgagacttcataccttcatttccctgctttccacggagaactcactgctgacgtgtgcttcttttttaagaccacagtttcctctggggtgtttatggagaacctggggatcacagacttcatcaggattgagctgcggggtaggctggccactctggacaagtcacagggtacccattatttagcaataaaagctttaactcaaaaaaaaaaaaaaaaaactcgggggggggccgggcccccatttccccttatagggagccgaataacaattcacgggccgccgtttaacaacgcggcgatgcgggaaaaaannacttggnngnnnntccg

SEQ ID NO: 25342 - DNA, 488 bp, Homo sapiens
  misc_feature (1)...(488): n = A,T,C or G
gagggaattgcctgcttgtagcaattcggcacgaganagaaccagtaccaggaatttacttgaccattccccttatttttcatctagaggaatctcggattcagccctttcattgctaagacaccttttcactgaggttcttaccagctcagccaaatctccactctgctatagcagaagcaataatgtttgctttaaaaagatttcttgacctatgccttttcttagaaagtttgatagattagttagaacttcagatcatcagatcagtctcaaatgggtttcttggaattttatatttgacaatatttatactataccaaactcatttgcagttcttaggtttgttggttaaaacatttttttaaagcagtaagtttatagaaaatgttttcatttaatggaaggctggggaatgtccagcatcaacccctatggcatgcattcccagtggccttctcatctgggcctggaacctttggttcagg

SEQ ID NO: 25343 - DNA, 417 bp, Homo sapiens
  misc_feature (1)...(417): n = A,T,C or G
tgcgcgggnnnnnnattgcattgcccggctgcaggaattcggcacgagctcggcctcgctggagcctggagaactggccgagctggtgcggtcagtgcgtcttgtggagcgtgccctgggctccccaaccaagcagctgctgccctgtgagatggcctgcaatgagaagctgggcaagtctgtggtggccaaagtgaaaattccggaaggcaccattctaacaatggacatgctcaccgtgaaggtgggtgagcccaaaggctatcctcctgaagacatctttaatctagtgggcaagaaggtcctggtcactgttgaagaggatgacaccatcatggaagaactggtagataatcatggcaaaaaaatcaagtcttaaaaataaagtgccattctctgaaaaaaaaaaaaaaaaaa

SEQ ID NO: 25344 - DNA, 495 bp, Homo sapiens
  misc_feature (1)...(495): n = A,T,C or G
cggnnnnnaatagatgcctgagacatcgccgagccatgtgctcggtccttccgaggaagctaacgctgcgttggggtgaggccctcacttcatccggcgactatcaccgcgtccggcagcgccagccctacactcgcccgcgccatggcctctgtctccgagctcgcctgcatctactcggccctcattctgcacgacgatgaggtgacagtcacggaggataagatcaatgccctcattaaagcagccggtgtaaatgttgagcctttttggcctggcttgtttgcaaaggccctggccaacgtcaacattgggagcctcatctgcaatgtaagggccggtggacctgctccagcagctggtgctgcaccagcaggaggtcctgccccctccactgctgctgctccagctgaggagaagaaagtggaagcgaagaaagaagaatccgaggagtctgatgatgacatgggctctggctttttgactaaacctctt

SEQ ID NO: 25345 - DNA, 288 bp, Homo sapiens
  misc_feature (1)...(288): n = A,T,C or G
agatggatgnnaaatgatcgctgcaggaatactgcacgagccgtaccgatactggtcaagatgaacacggaggcgcagatcgacatcttcgtctacatgctgggcgtaccactctttgtgcgtggcgttacatatcactacgtgggcgaccacaatcccaagaagcaggaatgaaagtggcgctttctccgccccagggttccaggacatagtctgaggcaagatggagggtatgaggggccttcacacttcacttcatcccttctacccatcacaacatacaaagca

SEQ ID NO: 25346 - DNA, 475 bp, Homo sapiens
  misc_feature (1)...(475): n = A,T,C or G
agagggnntnnaatagaactgcatgccgtcagacattcggcacgagcagcggcggtttctgaggttcttcactcgcgactgacggagctgcggtggcgtctccacacgcaaccatgaagttgaaggacacaaaatcaaggccaaagcagtcaagctgtggcaaatttcagacaaagggaatcaaagttgtgggaaaatggaaggaagtgaagattgacccaaatatgtttgcagatggacagatggatgacttggtgtgctttgaggaattgacagattaccagttggtctcccctgccaagaatccctccagtctcttctcaaaggaagcacccaagagaaaggcacaagctgtttcagaagaagaggaggaggaggagggaaagtctagctcaccaaagaaaaagatcaagttgaagaaaagtaaaaatgtagcaacttgaggaaccagtacccaaaaagaatttgaagtgaa

SEQ ID NO: 25347 - DNA, 504 bp, Homo sapiens
  misc_feature (1)...(504): n = A,T,C or G
gagccccnnnaattgaaatagatcggcttcggaattcggcacgagccaaggtgctcggtccttccgaggaagctaaggctgcgttggggtgaggccctcacttcatccggcgactagcaccgcgtccggcagcgccagccctacactcgcccgcgccatggcctctgtctccgagctcgcctgcatctactcggccctcattctgcacgacgatgaggtgacagtcacggaggataagatcaatgccctcattaaagcagccggtgtaaatgttgagcctttttggcctggcttgtttgcaaaggccctggccaacgtcaacattgggagcctcatctgcaatgtaggggccggtggacctgctccagcagctggtgctgcaccagcaggaggtcctgccccctccactgctgctgctccagctgaggagaagaaagtggaagcaaagaaagaagaatccgaggagtctgatgatgacatgggctttggtctttttgactaaan

SEQ ID NO: 25348 - DNA, 470 bp, Homo sapiens
tcgtagcctcgcgctgcagaattcggcacgagggtggaggaagtcacctacgacgtggcccagtatataaagttcgagatgccggtacttaaaagcttcattcagaagctccaggaggaagaagatcgggaagtaaagaagctgatgcgcaagtacaccgtgctccggctaatgattcgacagaggctggaggagatagccgagaccccagcaacaatctgagccatgagaacgaggggatctgggcaccccaggaaccgccattgcccataagacccccaggaagctaggcactttctttccatggaaacatttagacacaaacctccccagctccggccaagccatcatttgctacctggagctggatgtagaagtcagcagacagctccgtatccctggacccctgccctccttttttctgctcacaaggacttttgattttagttataaggaggacccaaaatgtg

SEQ ID NO: 25349 - DNA, 499 bp, Homo sapiens
  misc_feature (1)...(499): n = A,T,C or G
ggggnagtngcccngggaaanaaacaatcgatcgccntcgttagtacggcactagatttcaaacgccagacccgccgtggcttcctacccgttcaccaccctgaagccccacgtcgggatcgtccactacgaaggccacctacaaatagcagtggccgacatccccggcatcatacgaggcgcccaccagaacaggggtctggggtccgccttcctcaggcacatcgagcgctgccgctttctcttgttcgtggtggatctttctcagcctgagccgtggactcaagttgacgatttaaaatatgaactggagatgtatgaaaagggcctgtctgcgaggccccacgcaatcgtcgcaaacaagattgacctccctgaagcccaagccaatctgtcccagctccgggatcacttgggacaggaggtcatcgtgctgtcggcgttgaccggcgagaacctggagcagctgctgttgcacctgaaggtgctgtatgacgcc

SEQ ID NO: 25350 - DNA, 467 bp, Homo sapiens
  misc_feature (1)...(467): n = A,T,C or G
ggggccaatgaccttctgaggaattcggcacgagtgggagtgcccactgcaccttcagcactgcccagaaagcaattgggaaggacaacttcacagccattcctgagggcaccaatggtgtggaggagcggatgtctgtcatctgggacaaggctgtggccacagggaaaatggacgaaaaccagttcgtggctgtgacaagcacaaacgctgccaagatcttcaacctgtatccccgcaagggaagaatatctgtgggttctgacagcgacctcgtcatctgggatccagatgctgtgaagatcgtctctgccaagaaccaccagtctgcggcagagtacaacatctttgaagggatggagctgcgcggggctcctctggttgtcatctgccagggcaagatcatgctggaagatggcaacctgcacgtgacccanggggctggccgcttcataccctgcagcccg

SEQ ID NO: 25351 - DNA, 533 bp, Homo sapiens
  misc_feature (1)...(533): n = A,T,C or G
agacgggatggggaaactcgacgcctgtangaanattgcacgacctgcaagaattctgcacgagaaaacacccctcagaataatgagtgcaaaatggtggatctgaggggggccaaagtggcttccttcacggtggagggctgcgagctgatctgcctgccccaggctttcgacctgttcctgaagcacttggtggggggcttgcatacggtctacaccaagctgaagcggctggagatcacgccggtggtgtgcaatgtggaacaagttcgcatcctgaggggactgggcgccatccagccaggagtgaaccgctgcaaactcatctccaggaaggacttcgagaccctctacaatgactgcaccaacgcaagttctagacactggaaggcctcctaagaggactcaaagtgtcacctccccagagaactctcacatcatgccgcattctgtccctggtctcatgtctcctgggataattccaccaacaggtctgacagcagccgctgcagcagctgctgctgctaccaatg

SEQ ID NO: 25352 - DNA, 425 bp, Homo sapiens
  misc_feature (1)...(425): n = A,T,C or G
tcatccttcgggctcatttaacacttactatttctatactgtgaatggcaacaagattttccctacctcaacctgactttgagcaggagctgttgctggctaagcagcctgaacaattcacatgctcagacgcttgtgcttttttcacatggcccctccaggacacctctgcactgggctgcagctgcagggaaggccgaatgtgtccagtcactgctggagttgggaatggacagcaacctgcgggacatcaatgagagcacgcccttggcctatgccctgtactgcggtcacacggcatgtgtcaaactcctctcccaagagagcagaacagagcctactcgaccccctccctcccagagcagtcggccccagaagaaggagagacggttcaacatgctcaaccaaatattctgcaaaaacan

SEQ ID NO: 25353 - DNA, 532 bp, Homo sapiens
ggaactcacgcctgacggcgtcgaattcgccgagattaatcctagagaaaacttctacacctttatccctcacataaaacaagtgctcttttcttaccgtgcccttgcaaggtctatatgtaaaagaaatctgaaatttaactgtataataaaactcgataaataaaaagaaaaaacatacatttctccagttggtttgctctttgcttgttgaagtaataaaccgttttacagagaaaatacttgctgtaaacccccagtgccttcaactcttttggcagaatatttttaaagaaatccagcaagcaaactttgaggtgctaatgaaagaccaagaaggcggtatttctagctttggcagaaatgaaaagtgtctcacaagagacatcactacccacgtggggtctggctgctttctaccaaagacatttatagaagtgaattgagtcagggtgatggtgaacactacatattttatagatggataagttgagaattaattatgtttatcatggatggctactaataccag

SEQ ID NO: 25354 - DNA, 466 bp, Homo sapiens
  misc_feature (1)...(466): n = A,T,C or G
agggcgtntnnnataggactgagggctccgaatcggccgagtgaaagttgattcttgtttaagtttgtttaaagcagtgggtctcaaagtgtggtccgtagaccagcagcctcagcctcacctgggaacgtggtagagatgtttggccccaccccagacttcccaggccagaaacttttagggtggggtccagcaactggtgcttaacccttaagtcatcacgatgcgagccttagtttgaagactactggtttaaatctgcaaatggtcacttgaaaacaagttagatctcccacaaactcaagcagcaaaggcagaacccctctccgatgttaaattaggacccccaaacttgactgctatgcgaatggtgagaaccaggttcctccgtccacttagaagcaaaggaccccggcccctccaccagggtaactaaaatgggggttggagtcgatgtctgtgatct

SEQ ID NO: 25355 - DNA, 477 bp, Homo sapiens
  misc_feature (1)...(477): n = A,T,C or G
ggnnaaggaggccccccccctgaccccgctgtagactgcgctcgagattactggcctagcccaatgagcttgcattccagcctcacattaccaatcatcctgctcctgagtattggagttccattgcttactttgaaatgcccagacacgtacgagagacatttaacgttccttcaagctgccctattgttactgttgatggatacgtggactccttctggaggagatcgcttttgtttgggtcaactctccaatgtccacaggacagaagccattgagagagcacggttgcacataagcaaaggtgtgcagttggaatgtaaaggtgaaggtgatgtttgggtcatgtgccttagtgaccacgcggtctttgtacagagttactacttagacagagaagctgggcgtgcacctggagatgctgttcataagatctacccaagtgcatatataaaggtctttgatttgcgtcagtgg

SEQ ID NO: 25356 - DNA, 478 bp, Homo sapiens
  misc_feature (1)...(478): n = A,T,C or G
gatagtcccctgatcccttaactancgtcctgcggaaagccggcccttcgggtgtcccaggcgctgatccgctccttcagctccaccgcccggaaccgctttcagaaccgagtgcgcgagaaacagaagctcttccaggaggacaatgacatcccgttgtacctgaagggcggcatcgttgacaacatcctgtaccgagtgacaatgacgctgtgtctgggcggcactgtctacagcttgtactcccttggctgggcctccttccccaggaattaagaccaagaagcctggggggcctgagagacttgaacaagtgtcaataaacgctggcctctgaaaaaaaaaaaaaaaaaaaaaaaaaaaaaaaaaaaaaaaaaattcctggggggggggcccgggccccaatccccctttaaggggggggttaaaaaaattcgggggcgggttttaaaaagggggggggggggaagatannnnn

SEQ ID NO: 25357 - DNA, 476 bp, Homo sapiens
  misc_feature (1)...(476): n = A,T,C or G
aggcncaaattgaccgctttgaggaactctgcacgagccccagtgaggcctaagggccttcccgacacagccttccagaccatcctgctagtccatggagatagcagatacgctgcaagctttctgatcctgagactgcacttgtcctcggcaccatagcctgtgaccgtaagagaatagactgtccgggggctttgtcaagaagcacgatgttccttagtctcatgggctcttggctaaggaaagagtcccagggtcatgtcttctacctccaccttaggcaggattcacccttggggcacccccggaaggcgcttgtgagctggaacctaattgctctgcaaagtgatgcagtttatggaatttttttttttaacagaacagagatctgtttccttgcaactctgcccgctattcctgatacaaggttactcacttttccacctgacagccctttggatattctgatattcgaa

SEQ ID NO: 25358 - DNA, 509 bp, Homo sapiens
  misc_feature (1)...(509): n = A,T,C or G
tggnatgtgccngaggaanannaaaaactgatagccntcgactgancagcnctgccganaaccgcacgaggaagaaactaaagagatgcccaagctgcagtgtgaactctgtgatggagacaaagcagtgggggctggaaaccaaggaaggccccaccgacatcttacttctcggccatatgcctgcgagctctgcgccaagcagttccagagcccttccacactcaaaatgcacatgagatgtcacaccggggagaagccataccagtgcaagacctgcggacggtgcttttcggtgcaaggaaacttacagaaacatgaacgcatccacctgggcttgaaggagttcgtctgtcagtattgcaacaaggcattcaccttgaatgagaccctcaaaatccatgaaagaatccatactggagaaaagcgttaccactgtcagttctgctttcagagatttttgtatctctccaccaaaaggaatcacgagcagaggcatattcgggagc

SEQ ID NO: 25359 - DNA, 503 bp, Homo sapiens
  misc_feature (1)...(503): n = A,T,C or G
aagtccnnnnnaattgancgtctgtangacttctgcacgagccagcttccctccacttccaggtggtgctgggctcaccgagggagcactggtgggtgctctgaaaacccacaggatcccacctccaggcccacctgggtcccatctcactctcttcttctttcaccaattgctaacatagaccttgttgggatcacgatggcttcacaagccagctgttgggtttgctatgtcactgtggctcagtcacatccctgcgtgtatactgtctgcggggcacatatgtatccatttagagctaaaggaatcagtgtacactacagctaatcctaataaatccgatgttttcggaanaaaataaaagaggacagcagaaagaacaaggtaaactcnggggggggccctggccccgcatggggggggcccggagccctttcccatatttagtgagggggtaattacaccccgcgccgggggagtataggnnngggcgccacataatn

SEQ ID NO: 25360 - DNA, 465 bp, Homo sapiens
  misc_feature (1)...(465): n = A,T,C or G
aggagttcnnagggggngnnnnnnaatagtangccatagatcagcctgcangaattcggcacgagagctgcatcacagtgatggccaagctgcatcagccgcactctcctggacgccatatagctttaagatcgggggagggtaaataatgcaaaaattgcacagtggaagaaggggtctcacaaaaagcaatccatcctgtagtataggtaatggagttgggggaagcagcttccattctggatgtttggaaccctttagctttgttttggaatggcccaccattctcactggaaaacagtggtctgctgtgaaaggccagctctcggcagcccctgtggtttcagcgctgccgctctgtgtcattcaggttgtgcacattgtttttcttctgacttccagaaataaaagtgtttccatgggaaaaaaaaaaaaaaaaaaaaaaactcgggggggggcccgggc

SEQ ID NO: 25361 - DNA, 404 bp, Homo sapiens
ctctgcccccgctgtatcccccgcgctgcaggaattcggcacgagcggagctacgcgagagcacgtccagcgaccggagggacttctggaatccatctgcaaggaatgccagctggtggctcttaaatacccagaaacctaacaaagagtactggacaatgtggaaacttaagaagtgggacaacataggcactaccagctatcggggtgtaagagaggggagttatgggtgaattgcattcagtgaaggcttcacagaggaagagaaggtgaacctgagtcttaagatttagttatacaaagagaaagcaagggaatttcaggttggaaggactatgcagggaaaagggaaaataaaagagtctgttgagagccaatgtaaaaaaaaaaaaaaaaaaaaaaaa

SEQ ID NO: 25362 - DNA, 510 bp, Homo sapiens
  misc_feature (1)...(510): n = A,T,C or G
tgggaagttgcccnagggnnagnnnaaaactgatngccctcnactgantcgcnctgcggaaanccgcacgagctcaaagcctgtcagcagagggaaggacagaactaccagcagaactgtatcaaggaagtggagcagttcacccaggtggccaaggcctaccaggaccgctatcaggacctgggggcctacagttctgccaggaagtgcctggccaaacagaggcagaggatgctgcaagagagaaaagctgcaaaagaggccgccgctgccacctcctgaggcagctgtgggtgcccctgctgtgtggctctgtatgactgttgctgaaatataaagccctgcaacctgaaaaaaaaaaaaaaaaaaaaaaaaaaaaaaaaaaaanccctggggggggggccgggccccaattcccccttaaggggggggttttaaaattcccgggccggggttttaaaaaggggggaaggggagaaaaangnggntgnttgntgggnnntttgggtg

SEQ ID NO: 25363 - DNA, 481 bp, Homo sapiens
  misc_feature (1)...(481): n = A,T,C or G
aatagaccgcctgatgaacnctgcacgaggacaaagtggcccatcatgaaggattaattcgactgatagaaccaggttcaaagaaccctcacctgatcactaactggggacctgcagctttcactgaggcagaacttgaagagagagagaagaactggaaagagaaaaagaccacggagtgactgagcttgctggcagtcacgtcagttatgtagatactgcatggcaggagagctttacgctaaagacaaaagaaacagctttgggggccgggcgtggtggctcacgcctgtaatcccagcactttgggaggccgaggcgggtggatcacctgaggtcaggagttcaagaccagcctggccaacctggtgaaaccctgtctctactaaaaatacaaaaaaaattagctgagcgtggtggcgggcgcctgtaatcccagctacttgggaggctgaggcaggagaatcacttgaacgtgggn

SEQ ID NO: 25364 - DNA, 473 bp, Homo sapiens
  misc_feature (1)...(473): n = A,T,C or G
nttagannnttttgacccgcgctgcaggaattcggcacgaggcaatccgggaccccggaggagccagagccagagctggaagctgaggcctctaaagaggctgaaccggagccggagccagagccagagctggaacccgaggctgaagcagaaccagagccggaactggagccagaaccggacccagagcccgagcccgacttcgaggaaagggacgagtccgaagattcctgaaggccagagctctgacaggcggtgccccgcccatgctggataggacctgggatgctgctggagctgaatcggatgccaccaaggctcggtccagcccagtaccgctggaagtgaataaactccggagggtcggacgggacctgggctctctcttaataaaaaaaaaaaataaaaaaaaaaaaaaccggcccggggggggggccggccccccattcccccttaggggggggggaaaaaat

SEQ ID NO: 25365 - DNA, 470 bp, Homo sapiens
  misc_feature (1)...(470): n = A,T,C or G
nataggacccgtggtagaagcattccgcacgaggcgatttcctgtcaggacctctggccctactacgctgtagactcagggagagcacagtctggctgtgctgccaaacctctcctctgctgcagtttattccaaacaggagccccctggctgtcagtgcacaataatagacacacatttcttcaacgttccattcctaggtgattttcacatttttagttcctcagcatattttattgctgtgtgttgacacaatctggcataaaaaactttctctggattcagaggaagtttgaggaatcaggagaggaccaggccttctcctgtgcctgggtgaaggtacagacctcgctgtgtctccgatgaggtcacaagtgtctctatttcataccacaaaggaacccaagtgggagtagggaacagatggatggcgcgaagacctctgtgtctccccagagaaaggaagaaan

SEQ ID NO: 25366 - DNA, 473 bp, Homo sapiens
  misc_feature (1)...(473): n = A,T,C or G
aatagaaaagcggtaaggcgctgcaggaatatcgnacgaggaccangggagggggagatgctccgtctagctcagacgccacgcaggctgccgtcacccttccgggtgacataccggccttggggccatgattgattccggagcgcagttaatcaaggcataatggcatggacttgacacagcaagcaaaagacatacagaacataacagtccaggaaaccaacaaaaataactctgaaagcattgaatgcagcaaaataacaatggatctcaagttcaacaattccaggaaatatatttctatcactgtgccatccaaaacccaaacaatgtcaccacacatcaagtcagttgacgacgttgtggtacttggcatgaatctcagcaagtttaacaaacttactcagtttttcatatgtgttgctggagtttttgtattttacctaatttatgggtatttacaggaattaata

SEQ ID NO: 25367 - DNA, 477 bp, Homo sapiens
  misc_feature (1)...(477): n = A,T,C or G
nttgacaagcccctnaaaatttgcccccgctgcaggaattcggcacgagagaaggctgactattcctatgggagagaccacacagaaactaaaaatacttggaagaggagaggggctcagttgagcccaaccttccagccaactccagcagggtggcaagtatgagagtgaggatatcttggagcctcagcaacctgtgctatccaatagctatcagccacatgtgactactgagcactcaaaatgtggagcatcctgcatgattctatagcactcaacaggtgtctgccaagcggacagactacagacccctccggccgcatgatgctgagcttccccttggacacatgaagattaagttagtcaagcatggagattcctccctctccttcacaaactccagatgtttggcatctccccaatatcctaagacctcctggactgggaacaaaatgagcgtagtgaaagaggaagcag

SEQ ID NO: 25368 - DNA, 493 bp, Homo sapiens
  misc_feature (1)...(493): n = A,T,C or G
aggatgtgcnnnnnaatagannnccctagatcagcctgcangaattcgcacgagcctaagcccaccttcctcccccattagagaacacccatcctaggtgctctccaggctgtgtcattggcagggcttcacatgcaggaggcctctctcaggtgagtccaggttaaactgttgagttgtggcttcaacagatatgtatggcatgctgggatgtgccaggtgcctgcgttgtgccagttgctggagaggtagtgtgagcagagcagctgaaatcttgccatcaagcaaccctcattctcatgcctgtaggtttccattgctctgtcccaggacacttgcgtgccagagacgccacaacttcatgtccctgtctcttgcaagctccccgtgctgccagtacttcatgccttggatgtggtcccaccagcccagtggccggngtcagcttaagctctgcttcccagtggacgggtgtgctaagggtttattttat

SEQ ID NO: 25369 - DNA, 477 bp, Homo sapiens
  misc_feature (1)...(477): n = A,T,C or G
ncttgaaccgcccttnaagtttgccccgcgctgcaggaattcggcacgagccggctaagaggccaaagatgggtgacatcgttatgctctgcctttattttttctttcttacccacttagcttcctaattggaggaaggaggcgtggtaaaggtatatgaagactatggtttaattagaccagaaaacactgtcataatctctggggtcatcagaatgtccagttttgtctttgggccaagataagggcagtgggatttatgatgtgttgtttatagtctgaaactactctggtgatcaccagggtcagtttctttaatgatggtttccaactggcctaatacattaagtaagactggctgataacatgaccagacagacataaagaccctgttgggaatgacattgaactctcaaagtcaagatttcttacacaaatctatcagctggagaaaatgaaggcagtgtggtatatgtg

SEQ ID NO: 25370 - DNA, 462 bp, Homo sapiens
cctttaccccgcgctgtatgttcaagtccattcttggggctggtggggaggcaggagaatacccctccctaagcccttagtgtgtgccgagcttgctttgtgatgttggcaggggaggggagacctgggtggtgactgagttccctttatcaaacccttcaatgggcacaaaattgagtgcttgattttaggttttatttttttatgaatgtccaaatctgtgtttccccctgccctcccagactgtgtggccagttgaaagtgtctggtttgtgttcatctctccctcatttctggagcagggcctgagaccctgccacatctcctatgctctgcatccacgcctcttttggacattaaaggttgattgatgcacctcaaaaaaaaaaaaaaaaaaaaaaaaaaaaaaaaatttgggggggggggccgggccccaattcccccttaaggggggaaaaaaaa

SEQ ID NO: 25371 - DNA, 538 bp, Homo sapiens
aggtgcccgacggcttagaattcgcacgagaatttgtgttctgagatcccagtttactccgtggccaggccccacctgtgtttccaagtcgggctggagacgcaggatggggtaggccttgtgctctgagcaaccccagctctgcctcacaggcaggcaggcccggtgcaagagtggactctgggttcctaaagcaataaatgcaaacaagccaacagctctgctgcctagcaatttccatcttagccacacttctcccttcaggggcttcggaggagaggtcagggctaaggccggggatgagactgcaggagagagagcagcggagggccacattcggagcctccgtccactccagttttatcagcttttgccttttgcacggagtgctaaacaaattctagctctgtgtttttttcccattcccagatttactatcagttctccttaaaaagtatctaagctgttacagtagctttcccttcacttgattctaataggggtttctatgtttggaataattacacccaaatatcta

SEQ ID NO: 25372 - DNA, 502 bp, Homo sapiens
  misc_feature (1)...(502): n = A,T,C or G
ggggngttncccagannnnnnnnaaaatcgatagctctccattgagggctctaagaacnggcgcgccctttcagttctgcttgctgtcggcaccgctgcgttacccggaaccgccgggccgaacagcatgacgtccgctttggagaactacatcaaccgaactgttgccgttattacatcagatgggagaatgattgtgggaacactgaaaggttttgaccagaccattaatttgattttggatgaaagccatgaacgagtattcagctcttcacagggggtagaacaagtggtactaggattatacattgtaagaggtgacaacgttgcagtcattggagaaatcgatgaagaaacagattctgcgcttgatttggggaatattcgagcagaacctttaaattctgtagcacactgaggaaaaactacatacttggacatctgtaaatctttgtacagaaactgattattctgaggatgatatatggagtttttatgagtg

SEQ ID NO: 25373 - DNA, 471 bp, Homo sapiens
  misc_feature (1)...(471): n = A,T,C or G
nattgaccgccttagtagaccccctgacggaccccgtggagaagcggctggtggtgttggtggtacttctggcggcaggactggtggcctgcttggcagcactgggcatccaataccagacaagtaggtgccttcgtgttgcatggtgggcttgactcactcctgcacccggctccgtcagctcgggcgaggggggcttccctgcttaagccggggcagggctctgaggctaaggagggagccaggcccaggggggtctgggtgctgagatagaccaagacccgggaagtgggcagcgtgggtgatataaaggtctcgcacttgagtccacatcctgtcccagcaacttactggctgtgtgacctcggacaagtcacttattccctcagcctgtgtcttctctaatttaaatgggaaaacagtacccaactgggggatgggtctgcggactagagataacatatgtcccat

SEQ ID NO: 25374 - DNA, 458 bp, Homo sapiens
  misc_feature (1)...(458): n = A,T,C or G
ttgacccttgagcatcgccgagatagaccccagtctccatagcgctcccaggcttattatgaagaagaaattcctgcctaataaattttggtcagaccggttgctctcaaaaccctgtctcctgataagatgttatcaatgacagtggtgcctgaaacttcattagcaattttaatttcaccctggtcctgtggtcctgtggtcctgtgatctcgcgatctcgccctgcctccatttgccttgtgatattctattaccttgtgaagtacttgatgtgtgtgactcacaccctattcgtatactccctccccttttgaaactccctaataaaaacttgctggttttacggcttgtggggcatcacagaacctaccgacatgtgatgtctcccccggatgcccagctttaaaatttctctcttttgtactctgtccctttatttttcaagctggncaatg

SEQ ID NO: 25375 - DNA, 506 bp, Homo sapiens
  misc_feature (1)...(506): n = A,T,C or G
aggggtganaattgatnccccntncctcgatcgcctgtcggaattcggcacgagcgccaccacgcccagctgatttttgtatttttagtagagacggggtttcaccatgttgaccaggatggtctcaatctcttgacctcgttatccggctgcctcctcctcccaaagtgctgggattacaggcgtgagccaccatgcctggccacatctacttttttaaatgtgtcattatatttgtgatattgtcatgatgttttctacttatattttattcaaaaattttatactttaagttcttacctttaggtctttgatgcatttttatttgtttatggtgtagggtaaatgttcaacttcatccttttgcttgtggatatccattttttcccagcaccaattgttataaagacagtcctttgcccattgaacggtctttgtatccccatcaaaaattatttgaccatatgctgctttatactgttccagtgtccatatgtgtgtctctt

SEQ ID NO: 25376 - DNA, 484 bp, Homo sapiens
  misc_feature (1)...(484): n = A,T,C or G
ggagtccnnnnaatagannccctagacagcctgcaggacccgatggcaccgcttcttctaggagcccgcaaggatgctgagctcctgtgctgggatctccggcagtctggttacccactgtggtccctgggtcgagaggtgaccaccaatcagcgcatctacttcgatctggacccgaccgggcagttcctagtgagtggcagcacgagcggggctgtctctgtgtgggacacggacgggcctggcaatgatgggaagccggagcccgtgttgagttttctgccccagaaggactgcaccaatggcgtgagcctgcaccctagcctgcctctcctggccactgcctccggtcagcgtgtgtttcctgagcccacagagagtggggacgaaagagaggagctgggccttcccttgctctccacgcgccacgtncaccttgaatgtcggcttcagctctggtggtgtgggggggcgccagactcca

SEQ ID NO: 25377 - DNA, 467 bp, Homo sapiens
  misc_feature (1)...(467): n = A,T,C or G
ctcgccccngcgctgtagcccccgcgctgcaggcgcccagatgccgagaaaaaagaaatgaaaacaatcacggggaagacgttttcatcccgctaatcttgggaataagaggaggaagcggctggcaactgaaggctggaacacttgctactggataatcgtagcttttaatgttgcgcctcttcaggttcttaagggattctccgttttggttccattttgtacacgtttggaaaataatctgcagaaacgagctgtgcttgcaaagacttcatagttcccaagaattaaaaaaaaaaaaaaaaaaatccccctggaccacctaaattccttttttttattttccctccctcacttcctttttctcccacccttttttccaagctgtttcgctttgcaatatattacgtggaatgagtggcaggataatgcagccataactggttttctcctaagtattggagtca

SEQ ID NO: 25378 - DNA, 480 bp, Homo sapiens
  misc_feature (1)...(480): n = A,T,C or G
catcgacccgccngnnngattgcaccgcgctgcaggaattcggcacgaggccctggggtgatgcccaggtcatcctcgggagccctgccaggccccccttctctttccagccgcctgctgagcagacccctcggagagctttctgctcccttcccatcagcagcttgctttctgggaaccttttatctgccttactcccctttaaacacctgcggcatcgtcacatggcttgtgattaccgttttatctcccttgctcccctttaaaacacctgcggcattgtcacttggcttgtgattaccatttcgtctttaaagcaggtttgttaacagttttaacactcggagtatttaaagccagccaggtgtgggcgtgcctgcacccagatgtggaggtttattttaaggctgtgccccaaggggacccagtttgggggtggctgtgcccgccctggtcctagcatagccctggcccagagca

SEQ ID NO: 25379 - DNA, 542 bp, Homo sapiens
  misc_feature (1)...(542): n = A,T,C or G
agcggatcattcgcgtctgcggttgcattatgtgttaattntcttgcatctaanaaagcatagaattcctactcacacagctcagcaacaaccattttgatggtaacagttaatttctttcattagttttttaaattcagggttctggatattaaattaaaatggcattcttaaagattttcttcaaaaagcaatcctaaatgaaagtgtgtaaattataagaagctggcgatcttttgatatgctgtttcacaggatcctgacactggagggcagctgtcttgtgcattacttgtgtttccagcaccaaagttgtgggacatgttgctgtagactgctgcgcagtcctgggtgcattcagtctctctgcctctgcctgcctcctggtccccactntanaggctgtgcagctccttaaataataaagctggaaaatatttttagtcgggttatcaaatttgatttacanaaacgctnanncttgttgaatgcanacaggtttaaaatatggataaagaccttgattcttggagcgtgattgg

SEQ ID NO: 25380 - DNA, 503 bp, Homo sapiens
  misc_feature (1)...(503): n = A,T,C or G
gggtgggcctcgaannccnnaaatcgaccgcctgcggtgctcccaggcggtgacttgctggtgacgggcagcgccgatggccgggtcctgatgtacagcttccgcacagccagccgagcatgcacactgcaggggcacacacaggcctgtgtcggcaccacctaccaccccgtgctgccctccgtcctcgccacctgctcctggggaggggacatgaagatctggcactgagctttttgtcactgaaccttcccgatgccagctgggctcttggactcccctcttcctcaagggtagatgagaggaacgagcacagaggttggctgtgggtcctgggtaccaccttctgagcctcagtttcctcatctgtaaagtggggagaaaagtctgtttgcctcaggagtgtgaggactacactagtgaaagcgcctggcgggcagccggcgatgcccaataaatgtgtgttttgctggttgttaagtgatttcagcaaaaaaaaaaaa

SEQ ID NO: 25381 - DNA, 450 bp, Homo sapiens
cttgtgaccctcgctgcacgaattcggcacgagctgggtgatgtctgtctgctgccaggatggagcagaggagcgccacacatggaggaaagcccctgtaacgttacctaccttaaactccactcatcaaatctgagaaaagtatccactggtccccagggtttcagtcatgcttttgggggtcattgggtattagagaagtaagtatcttttctgagagagggggagtcaccccccctactggggattcctctgggctttattcactcccagccctggccctgacctttgtgggcctccctaatgcccagggcatggatggcttcagaggagtttttgaatcgaagcccacggtccttgttgatgtttcttctccgagccacacttggaggaaagttgcaggtgggttgggcagggagcaggcatggatctgctttgctagttggcttg

SEQ ID NO: 25382 - DNA, 450 bp, Homo sapiens
  misc_feature (1)...(450): n = A,T,C or G
ntgtgcccctggctgcacgaattcggcacgaggagagagagagagagagagagagcaactctattgtgttcaccaagctcacaccattcatgcttggagccttggtcgccatgtatgagcacaagatcttcgttcagggcatcatctgggacatcaacagctttgaccagtggggagtggagctgggaaagcagctggctaagaaaatagagcctgagcttgatggcagtgctcaagtgacctctcacgacgcttctaccaatgggctcatcaacttcatcaagcagcagcgcgaggccagagtccaataaactcgtgctcatctgcagcctcctctgtgactcccctttctcttctcgtccctcctccccggagccggcactgcatgttcctggacaccacccagagcaccctctggttgtgggcttggaccacgagcccttatcaggg

SEQ ID NO: 25383 - DNA, 482 bp, Homo sapiens
  misc_feature (1)...(482): n = A,T,C or G
ataggaaaactcgatcgcctgtcggaattcggcacgagcagagatgccgccaagatgcccgagagcgcttggaagtttctcttctacctgggcagctggagctacagtgcctacctgctgtttggcaccgactaccccttcttccatgacccaccatctgtcttctacgactggacgccgggcatggcagtgccacgggacattgcagccgcctacctgctccagggaagcttctatggccactccatctacgctacgctatacatggacacctggcgcaaggactcggtggtcatgctgctccaccacgtggtcactctcatcctcatcgtctcctcctacgccttccggtaccacaatgtgggcatccttgtgctcttcctgcacgatatcagtgacgtgcagcttgagttcaccaagctcaacatttacttcaagtcccgcggcggctcctaccatcggctgcatgccttggcagcagn

SEQ ID NO: 25384 - DNA, 472 bp, Homo sapiens
  misc_feature (1)...(472): n = A,T,C or G
cggcggccanannnnaattgaccctgctgcaggaattcggcacgaggagccctaggatccagggcctctctcacctctgacccagctccatgccagagcaggagccccggtcaattttggactctgcaccccctctcctcttcaggggccagacttggcagcatgtgcaccaggttggtgttcaccagctcatgtcttccccacatctcttcttgccagtaagcagctttggtgggcagcaacagctcatgaatggcaagctgacagcttctcctgctgtttccttcctctcttggactgagtgggtacggccagccactcagcccattggcagctgacaacgcagacacgctctacggaggcctgctgataaagggctcagccttgccgtgtgctgcttctcatcactgcacacaagtgccatgctttgccaccaccaccaagcacatctgtgatcctgaagggcggccgt

SEQ ID NO: 25385 - DNA, 477 bp, Homo sapiens
atagacagcttgaggaacctccacgaggtcacctgatccttatcactgcctcataatcgcctccaaggaagatcttattatattaaaaagcaattgccctctatgctgggaacactaatagatttttgtgtgatatttatacaggatttcgttgtcagctcacgagatgctgttcccttccttctgcctctttcctgctcccttcgtctttgcccaagtctcctatgatttcagtttcctgcaggtcgctgtctgcaaggtgatcggctccatgagggcaatgcacctgacttcttgactgctggatcgtcagcatgggaagcatgcttggagcatagtaggcataccatttcatctagcaacttcattcattcattcaacagatggagctgaggtctggagggggagatatgccaaaaaccaaacgaataaataaaataataaacagttatcagggctttgaaataaataagtagg

SEQ ID NO: 25386 - DNA, 352 bp, Homo sapiens
aaaagctcaggcaacaagtgtgattcgtcatacagctgatgcccagctatgtaaccaccagacctgcccaatgaaagcagccagcatcctcaactatcagaacaattcttttagaagaagaacccacctaaatgttgaggctgcaagaaagaacataccatgtgccgctgtgtcaccaaacagatccaaatgtgagagaaacacagtggcagatgttgatgagaaagcaagtgctgcactttatgacttttctgtgccttcctcagagacggtcatctgcaggtctcagccagcccctgtgtccccacaacagaagtcagtgttggtctctccacctgcagtatctgcaggg

SEQ ID NO: 25387 - DNA, 522 bp, Homo sapiens
  misc_feature (1)...(522): n = A,T,C or G
ngacggtggggaaattgacgcctgtggaattttgcacgaccttattgngaaaaattggactgccctgaatttagcaccaattgcattaacgcacatctcttccacaactaacagacttaaaataacagtgtccttcgtattaatatctgtgccattcatttagaattagcagagctaatatggaggggctgaactagtagccacatcttgttcatcacatagactaatagaaaggaggctgtggctaaagcagaaatggaacttccggatctgaaattagccaatataatgttcttttgtatttgggtatttttcatcttaatttttacagcatatactcttcttaccagtatccttagaatccaaatgtctagataagttgaggacacatacctgcattgttgagcttctctactggggacgccccggcattattttattcccaagccagcagaccggcccagacagccaggctgtggctggtccagaccaactgctatggtggaaaatgcagcttccagg

SEQ ID NO: 25388 - DNA, 474 bp, Homo sapiens
cgggaattttaattcgacgctgtagaactctcacgagccgccccctgcatcagctggctaccgactccaccttctccctggaccagcccggtggcaccctggatctgaccctgatccgtgcccgcctccaggagaagttgtcacctccctacagctccccacaggagtttgcccaggatgtgggccgcatgttcaagcaattcaacaagttaactgaggacaaggcagacgtgcagtccatcatcggcctgcagcgcttcttcgagacgcgcatgaacgaggccttcggtgacaccaagttctctgctgtgctggtggagcccccgccgatgagcctgcctggtgctggcctgagttcccaggagctgtctggtggccctggtgatggcccctgaggctggagcccccatggccagcccagcctggctctgttctctgtcctgtcaccccatccccactcccctggtggcctga

SEQ ID NO: 25389 - DNA, 505 bp, Homo sapiens
  misc_feature (1)...(505): n = A,T,C or G
aggccnnnnnnnttttgacaatcgaccggctgtangaattcggcacgaggagacaccagagaatgagtattgagacactacctatttggtattatgccaattacatggatgataaaatggtctgaacgccaaacccctatgacgtgcaatgcccatgtaaccaacctccagatgtaccccttgaaactaaaataaaagttttaaaggaaaaaaaaggaacctggaagttggtccatcctatgcaatggacactttcaggtgcaaagtttgagaagatgaggatgagagacgttgtccagccctagctgataaatggaaaccttcctttctacttgctatggttgctttgcaacccagtggctagtaaagggctgttttttaaattaccaaaatgctcaaatattagtaactaattgtccaacttggaaaaagcaagtcttctgcagttggaannannnnnnnnaannnaaaaaaaaatttggggggggggccgggcccaatttct

SEQ ID NO: 25390 - DNA, 490 bp, Homo sapiens
  misc_feature (1)...(490): n = A,T,C or G
aggagtccnnnnaatagannnccactgacagccatgcaggaattcgccacgagtcgcttcggcggagcctgggctgaccagccaggacagcggggtaaacccgaacaattctgctcgaggtaaggaggccatggcgtccggcagtaactggctctccggggtgaatgtcgtgctggtgatggcctacgggagcctggagtttgtactgctatttatttttgcgaagaggcaaatcatgcgctttgcaatgaaatctcgaaggggacctcatgtccctgtgggacacaatgcccccaaggacttgaaagaggagattgatattcgactctccagggttcaggatatcaagtatgagccccagctccttgcagatgatgatgctagactactacaactggaaacccagggaaatcatagttgctacaactatctgtataagatgaaagctctggatgccattcagacctctgagatgccatttcattctgaa

SEQ ID NO: 25391 - DNA, 501 bp, Homo sapiens
  misc_feature (1)...(501): n = A,T,C or G
gtggcgtgnnnnggggattgannncccctcgagcgccttcggaattcggcacgagagacgcccctaaagactgacacatttagggtgaaaaagtcgccaaaacggtctcctctctctgatccaccttcccaggaccccaccccagctgctacaccagaaacaccaccagtgatctctgcggtggtccacgccacagatgaggaaaagctggcggtcaccaaccagaagtggacgtgcatgacagtggacctagaggctgacaaacaggactacccgcagccctcggacctgtccacctttgtaaacgagaccaaattcagttcacccactgaggagttggattacagaaactcctatgaaattgaatatatggagaaaattggctcctccttacctcaggacgacgatgccccgaagaagcaggccttgtaccttatgtttgacacttctcaggagagccctgtcaagtcatctcccgtccgcatgtcagagtccccgacg

SEQ ID NO: 25392 - DNA, 448 bp, Homo sapiens
  misc_feature (1)...(448): n = A,T,C or G
tggggngaggggggnaattgacttgcttggcattcggcacgagcgtgtatgagttcttcaatacctaatcactaaaaggcaagaagagtggagggctggcaagtgaagtagcactgaacgaagccaggggttcagatgacactgctgcatcctggtcacattctctgtctcctggaatgctcccacctcaagtggagttagaaggaaggtagaggggctctcccccaggattttggtgttttgactaacaccagttcctgccaacctctgttgccaccacctttccttccaggccctaagcacgtgcagcaaagcacaccacagcacctttgataacctctctccatcctgggcctgatgacctgctctagactgttatagagggataagcagctcattcccctggttcctaataaaaagcctttaaattaaaaaaaaaaaaaaaaaa

SEQ ID NO: 25393 - DNA, 392 bp, Homo sapiens
  misc_feature (1)...(392): n = A,T,C or G
nggagaattgannnccttcgccggctgcangaattcggcacgagcccgctctcttggcttctgcctgttggggtctcattcctttctgttccccagtgccccggggcggcattttactgctcagaatttggagggagggagcagtaccttcccggagtccacgcatgtgagttgggtcaagtgcattggacctagggaaagagaaagaaagaataaaagctggagagagagtgaagtgaatgcaagatacaaagtgggatggaagaattaaatccagagttccaggcaatcaaaatgagtgcaggttgaaagaaaacaggtgaattttagtggcatatggatgataaagctgtaaataaaattcttttgatgaaaaaaaaaaaaaaaaaaaa

SEQ ID NO: 25394 - DNA, 468 bp, Homo sapiens
cattgaccggctgtcatgagacggcacgaggagagagagagagagagagagagagagagagagagagagagagagagagagactttatctcacagaggacactctgcattctctctctctggagggtgcgcgcagtggtgccagtgtgtgtgtgcagagtgtctaccccactggtgcatcagcaccccattctatcatcaacgggcacaaacgagttctggtcttgtgtgtggagacagaacacaccttcccacttgctgaaaaggacagggccttcttgggagatacatctgtctttgtgggtgctgcccctgtgggtggtgccaacacaggtgcttctgctggtggtgcacccccatctaggggtgaacccaaagaagagtcgggagagtcgcacgaagatatgggatttggtctctttgtctaatcaccaaagagcaccccacttagcctgttatatgtgcaaag

SEQ ID NO: 25395 - DNA, 448 bp, Homo sapiens
  misc_feature (1)...(448): n = A,T,C or G
atagacttgatctccgctgcaggaattcggcacgaggtaagttagaggagtcttgattttttagacttcactgcggagttctgtacaccctttgccctgatgaatttgaatgggtttgatttgcaaatttggatttacacccattgttttggaagcacatcagctgaataaagttgaggtttattttatttagaaaatcacattttgtaaaagaattcgatattcatttttataactaatggccccctttttttatgtttctaggccagagattctcaaacactgctccatggccaggggctgggctggctgcttcagaagcagtggggaagctttttaaaattacatattcctggggcctaccccagatctgaattagaaccttttttaaatctctaaggtgattttattttattttttatttttgagacagtctcgctctgtcacn

SEQ ID NO: 25396 - DNA, 467 bp, Homo sapiens
atcgaccccctaattgaccgcctgcggaattccgacgaggccgccgccgccgggcagctggacgccctatagggctcttggcagtccacgaaagacctggagtccgcctccccatttctccggtcggtgagtggcaggaggaaatcgccaaacatgttttcccgctttgcctccccaactcggaaacttgcaacttgccgtgtcctggaggttgagacaatttggggtctcttggctgccgtccaacagatttatctctgagggcagtgtccttggtgagaggtccaagtaggtgtgggcgacattttcctccatctcatgagggagcagccctgcacactagggcccaaaactctgcgaaggagcttggaagttcttcatccgttccacttgttttgctactccacacacccttctaggacatgttgattgccaactgctctgtgcagctttcccatagctgtctg

SEQ ID NO: 25397 - DNA, 466 bp, Homo sapiens
  misc_feature (1)...(466): n = A,T,C or G
catcgaccggccttcatagancgccctcagggagaccancgcgangaacacggngctgtcgcgggcgaactcactgttcgccttctcgctgagcgtgatggcggtgctcaccttcggctgcttcatcaccaccgccttcaaagacaggagcgtcccggtgcggctgcacgtctcgcggatcatgctaaaaaatgtagaagatttcactggacctagagaaagaagtgatctgggatttatcacatttgatataactgctgatctacagaatatatttgattggaatgttaagcagttgtttctttatttatcagcagaatattcaacaaaaaataatgctctgaaccaagttgtcctatgggacaagattgttttgagaggtgataatccgaagctgctgctgaaagatatgaaaacaaaatattttttctttgacgatggaaatggtctcaagggaaacaggaat

SEQ ID NO: 25398 - DNA, 501 bp, Homo sapiens
  misc_feature (1)...(501): n = A,T,C or G
aggggtannnnnnnacgngnnnnnnnnattgaccatcgaccgcctgcggtttccttcttagaccaggtaacatgaggaagggggaaaaaaacccaaacaaaatagtccccccacatgacaggtgtcttcagcttgccatattgatccaaagttcatacattttatgtacaagatacattagacttacaataaagtctaattattagacttttatgtcagtggattgtgcttgcagaaatacagaagtaacatactgaccctaggtgaggagtttcttacatggttaactggattgacccaattggagtaaaagatttttgctgttacctcgatgctcctgcagttgttacctcagcatgccactgtagtccttgactctcacattaaaactaactttggctaggtactggtggctcacacctgtaagtaatcccagtactttaggaggctgagactggaggattacttgagtccaggagttggagaccagcctggccaatt

SEQ ID NO: 25399 - DNA, 494 bp, Homo sapiens
  misc_feature (1)...(494): n = A,T,C or G
tggggnnaagagggggnnnccttgacctacatcggcatgccgaatncggcacgagccgaaaggccgtgatcaaaaatgcggacatgtcggaagagatgcaacaggactcggtggagtgcgctactcaggcgctggagaaatacaacatagagaaggacattgcggctcatatcaagaaggaatttgacaagaagtacaatcccacctggcattgcatcgtggggaggaacttcggtagttatgtgacacatgaaaccaaacacttcatctacttctacctgggccaagtggccattcttctgttcaaatctggttaaaagcatggactgtgccacacacccagtgatccatccaaaaacaaggactgcagcctaaattccaaataccagagactgaaattttcagccttgctaagggaacatctcgatgtttgaacctttgttgtgttttgtacaaggcattctctgtactagtttgtcgtggttataaaacaa

SEQ ID NO: 25400 - DNA, 479 bp, Homo sapiens
  misc_feature (1)...(479): n = A,T,C or G
gcgctgcccccattganaatcgatcggctttcggcaancgccacgaggactcgggactgacgaagacacaatcatcgatatcatcacgcaccgcagcaatgttcagcggttgcagatccggcagaccttcaagtctcactttggccgggacttaatgactgacctgaagtctgagatctctggagacctggcaaggctgattctggggctcatgatgccaccggcccattacgatgccaagcagttgaagaaggccatggagggagccggcacagatgaaaaggctcttattgaaatcctggccactcggaccaatgctgaaatccgggccatcaatgaggcctataaggaggactatcacaagtccctggaggatgctctgagctcagacacatctggccacttcaggaggatcctcatttctctggccacggggcatcgtgaggagggaggagaaaacctggaccangcacgggaan

SEQ ID NO: 25401 - DNA, 465 bp, Homo sapiens
  misc_feature (1)...(465): n = A,T,C or G
nttgcancgcctgatgaattcggcacgagctcagcagatgcgtagcatttgctgcatgggttaattgagaatagaaatttgcccctggcaaatgcacacacctcatgctagcctcacgaaactggaataagccttcgaaaagaaattgtccttgaagcttgtatctgatatcagcactggattgtagaacttgttgctgattttgaccttgtattgaagttaactgttccccttggtatttgtttaataccctgtacatatctttgagttcaacctttagtacgtgtggcttggtcacttcgtggctaaggtaagaacgtgcttgtggaagacaagtctgtggcttggtgagtctgtgtggccagcagcctctgatctgtgcagggtactaacgtgtcagggctgagtgttctgggatttctctagaggctggcaagaaccagctgttttgtcttgcgggtctgn

SEQ ID NO: 25402 - DNA, 505 bp, Homo sapiens
  misc_feature (1)...(505): n = A,T,C or G
gggaggggggnnattcccggctgttgcatccggcacgaggagaaccctgctccctacccatccacccaacaccaagccaaggtaggagtgagtggccaatgtcaccactgaacctagggtaaagccgaggtccatgatgcacttttctaaggcaacaaggtgctatgatcaacagggacacatgaagtggcatggaggagcattcagtgaggcaaagggaactactggaccaggctcacatctgatttacagtagatttagctccccttcctcaagagacccaaacatattctgtccttaagccattctgtcatagaacctgtctggcttcagggaaagggagaaggcatggtagtataggctaaagacccatttgaccagttgattggcttttgatgatcagtagacacacccctcaatgctgcgaagaaaatgaaggccactcttctaaggttgtaaaaagataaatcattattcatgtgaaaaaaaaaaaaaaaaaaaaact

SEQ ID NO: 25403 - DNA, 496 bp, Homo sapiens
  misc_feature (1)...(496): n = A,T,C or G
cggacgggnnnnnnnnccttgacgccttcggaattcggcacgaggtaacgctgtcacctcattcatttttaatgagtacaaactggccgtttcaaactgttctttttcctaattaatgtagctttcggatgacataaatccagtatctctgcttatgacataaatccagtacctctgcttttcttttgctgtgctcttgtttttaacttattttttttttaacaactgtagtacactaccctgagacactgcatctcgatttctatctctagttagagttgtacttttaaaaaaattaacgggaaagaaaataactttgtgaagccagtgtattctgtttttaaaactgtgcctgcagtgcaatactccttctggtgtattttatccattatttcacttgctggtcgtcatttcacagccagctttgacatgcccgtgaggacaggagccgccgcttcagttgtcactgcagagccatcgtatgtcagttgcaatt

SEQ ID NO: 25404 - DNA, 478 bp, Homo sapiens
  misc_feature (1)...(478): n = A,T,C or G
gggtggggnnaggnnggaaatgagnnnccttgacaagcatcgcagaaancggaacgaggaggctcgtctggaccagagagtgctgcctttgagctctgctccaaccctggtgttcttcttcctccacctgccttaaaaggggctggtgctctttacaacccatctcaggtgcctcagctgcccacggacactaacctgaatcggccaaatcgcctagctcagcgtcgctatcccacccagccatgctgagaataaacacacgtgccaggctcatctcccaggactgaaactgtcttgctctctttttctcaatctaccagcccctctctaccatatagggaccctcaagaggattgtgctagcccgatgcctccaccgggcacttataaggcaagaggacaggatctctcaagacacagcacacttcagtctcttaagattaacttcacaatgatggaaattatttcatcaggtggaa

SEQ ID NO: 25405 - DNA, 470 bp, Homo sapiens
  misc_feature (1)...(470): n = A,T,C or G
nggtggagnnnggnggaaatgaaagcangatgnatntgcacgaggtgaggccgtcagtcttggtgtgatgcggggtgggctgggccgctggagcctccgcctgcttcctccagaagacacgaatcatgactcacgattgctgaagcctgagcaggtctctgtgggccgaccagaggggggcttcgaggtggtccctggtactggggtgaccgagtggacagcccagggtgcagctctgcccgggctcgtgaagcctcagatgtccccaatccaagggtctggaggggctgccgtgactccagaggcctgaggctccagggctggctctggtgtttacaagctggactcagggatcctcctggccgccccgcagggggcttggagggctggacggcaagtccgtctagctcacgggcccctccagtggaatgggtcttttcggtggagataaaagttgatttgctctaaaa

SEQ ID NO: 25406 - DNA, 513 bp, Homo sapiens
  misc_feature (1)...(513): n = A,T,C or G
ngcggggggggncctcccggctgcagaattcggcacgagcctaattcgtcatcgcgggattggctaacagatgtgtgtgaaaagaataagtggagtcacaagaattcccctatcatctggagagagctgttggatcgtggaggaaagggtttgcttttgggaggatataatgagttcctggagcatgctcagctttactatgatgtcacctctagcatgacgactgaactgatgatggcaattgctcaagagaacctgggggcacatatagaataagagcaggaggaagaagccctgaaaacttgcatcaaccccttgcaagtctggatcaccagtgcctctgctcctgcctgctacaacctaattcccatattgacgagtggcgaagtgtttgggatgcatacagaaattagcataactctatttgacaacaagcaggcggaagagcatctcanaagccttgtggtggagacccaagacctggcatctcccgtccttggcagtgtctccatc

SEQ ID NO: 25407 - DNA, 469 bp, Homo sapiens
atcgaccgccctcattgaccgcctgtcagaattcccacgagggagcgatgacatttgagctggtcctcaagtagtgggtgaggattacatccatgcaagagccctgtgaacccagatactgaagtatgtctaatgacaaggatgataagttgatatggaaaaaaatatcacaggtgtttctgctcacagcaagcccagcagtactccaagagcagtacttaacttgggtgtcatgggctatgctctctatacagaagattacattagagtcttgtcttaaaaaccctttttgggaaaattatcataattcatttttttctaatatccaatgacttttacgcttttgctactttgattcatcagtacgttgatgataccttctcctctttgtcccattcctgcttcatgataatttaatgaaattaaagtaatggatttaattagcacctacatctatgattatatgtat

SEQ ID NO: 25408 - DNA, 478 bp, Homo sapiens
  misc_feature (1)...(478): n = A,T,C or G
aattgcccgcctgcaggaattcggcactagggcatctcggcaaggccccaggaaccccgcacagccacaccaaaccctacgtccgctccaagggccggaagttcgagcgtgccagaggccgacgggccagccgaggctacaaaaactaaccctggatcctactctcttattaaaaagatttttgctgacaaaaaaaaaaaaaaaaaaaaaaaaaaaaaaaaaaanttttgggggggggggggggggccaaacccccaaaaaaaggggggaggggggaaaaaaacgggccccctttgggggcccccctccggaaagggggaaaaaaaattaaaaacccccccccccccaagaactttttttttttttggggaaaaaaaaaaaaaaaaaaaaaacctggggggaatcgccattggggttcttaaaaaaaaaaaagggggggggggcccgggaaaaaaaaaaacattttcggtggaaggga

SEQ ID NO: 25409 - DNA, 488 bp, Homo sapiens
  misc_feature (1)...(488): n = A,T,C or G
cgcccccccattgaaatcgatcgcctgcaggaattcggcacgagaatttcacaaaatatccaacttatgtgactaaacgcagtagtttttttaaaaggggagatagaaaataaatggttttgttggagtgcattttagtaagcctttgcagtaaaatgacggttgtaactactaaaccaaatttagttttcacagcatggttttgttgttttccccttgtttttcagaggtaaattttgcattatatccttcagtattttaacactattttggcagtttacacattactttttgtttttccttcctttttgtgaaatgtattaagttgtggttcttattgaaacagtattatataatgtttgcttaattatatcatgtgatgctcagntctattttgatttattcattagtattcacttttacctttaaaagttacttgtagcaaatatgtttacattgataaagccagatatgttttgacaatgaan

SEQ ID NO: 25410 - DNA, 489 bp, Homo sapiens
  misc_feature (1)...(489): n = A,T,C or G
tggggagaagggggnnccttganttccgttagcaattcggcacgagtaacaaacaagatttgaggaactcattgtcactttcagaaattgagaaattgttagcaatgggtgaactgagctcatcaactccttggcatttgcagcctacctgtgcaatcataggagatggcctaaaggaaggacttgagaaactacatgatatgatcattaaaagaagaaaaatgttgcggcaacagaaaaagaaaagatgaatatcaatacctattatatctgtgtggagtaggttttctctggtctgattttgacaaatagaagagtgtctacagcgtggtttgcctgtctgccctcctggatgctattaaagctttgttttgttgaacaatcagatgcccaactctgttgccttgtggaagatgagtaaatgcagtgcttcttaaagtggtctcttctccctaccccacaaatcttttggtactaccatttggggaa

SEQ ID NO: 25411 - DNA, 468 bp, Homo sapiens
catcgcaccgccttaatcgcacggcgttctgcaatgcccttggtgccacagacaccattcatgagtcgacaacacggtacatcaaggaagtggaagcagaaatttgccaatctgtacatgaggagggcctggaaagaactgtattagcattgctagtgtgggatgaagctatggaaaagataggaagggctaaatgtgtggattcatgagatgaggactggctgaaaataaacggtagggacaaaagcactgttgtgaggctgaaagcccaatacatttatgatcatattactcacggtcaggaaaaagctaaacccttctcaactcatggtttattatctattattaattatttttaagaaatatatattcagtaaggtgtctttaaacagaaacacacataaaacagggtgacttatcgatcagcggatacaagtgttgtggccatgggctcacggggactaaccg

SEQ ID NO: 25412 - DNA, 480 bp, Homo sapiens
  misc_feature (1)...(480): n = A,T,C or G
catcgacggctgtggtagacgnccgaggggagacatgactttattagaaaaataaaaaacaactgaggtgatgggttggtcttcagcggatgccttggtggatgaggctgcttttggctgcactggccttctcccgctcccgccgccgcgcagggtccaactcaaaacagcgccatagcctcagggtctcatctgctgctgcggatgccactgtggccccatctgggctcatggtcagactcaggacccgggatgtgtgacctttgagttcagccaccttggccatggatgggtacttccaaataactagctggttctgtgcaaagccatggcctgagatgagctccttgtaatggggagaccagaggatggagcacacctgggaatgggcatccacggcactcagacaggccccagagcacacattccagatgcgaatgtgtcgatcactggtgccccctcctgttgccaggacattgg

SEQ ID NO: 25413 - DNA, 504 bp, Homo sapiens
  misc_feature (1)...(504): n = A,T,C or G
gagacgagnnnnnngnaattggatncccaatagcagcgccntgaggaattcgccacgagaaatatttatcaagcaccagccacgtgccatgcactgtgcttaaacaaaggtatttacaaagatggagaggtggtccctgcccttcagttatgtgtagtgtaatgatgagacacatacccattcttcccttgctcttgccttacttgtgtgtcccagcagctacaggataactgctaatctgggtatatctgtctactcaggaggtcagagttctggttatgtaagacttttatgatcttaacaggaagcctatcctatgcttctctgacttgggaggcaactgaagccttgacatctaagttctgtacccaagttagccatcagagagtcttgacataccatttacacctaaattccttaacagataatgaagaatatgagatctttgttcttggtgcttaaaaggtagtaagcacttacacagcttcttcccattcaggacat

SEQ ID NO: 25414 - DNA, 492 bp, Homo sapiens
  misc_feature (1)...(492): n = A,T,C or G
agggcgatnnnnnnncttgatcgcctgtggaattcgcacgagcttctctccgccagcttgcccagaaatacaactgcgacaagatgatctgccgcaagtgctatgctcgccttcaccctcgtgctgtcaactgccgcaagaagaagtgtggtcacaccaacaacctgcgtcccaagaagaaggtcaaataaggttgttctttccttgaagggcagcctcctgcccaggccccgtggccctggagcctcaataaagtgtccctttcattgactggagcnnaaaaaaaaaaaaaaaaaaaaaaaaaacccttgggggggggcccggcccccaattcccccttaaggggggggaaaaaaaattccggggccggggttttaaaaccgggggggggggagaaacnnntnnnnntnnnnnttttgnnnngncttttttatttttttggtgggctttntnntnttgnnnntttttggggtggggctggttccttttttg

SEQ ID NO: 25415 - DNA, 476 bp, Homo sapiens
attcgcaccgcgctgcaggaattcggcactagcagacctgctgggatcctacggctccttggctcgtttgcgcaacatctgtcgcattatgcgagtcaacaacagtaccatgctgggtgcctctggcgagtacgctgatttccagtatttgaagcaagttctcggccagatggtgattgatgaggagcttctgggagatggacacagctatagtcctagagctattcattcatggctgaccagggccatgtacagccggcgctcgaagatgaaccctttgtggaacaccatggtcatcggaggctatgctgatggagagagcttcctcggttatgtggacatgcttggtgtagcctatgaagccccttcgctggccactggttatggtgcatacttggctcagcctctgctgcgagaagttctggagaagcagccagtgctaagccagaccgaggcccgcgacttagtagaacgct

SEQ ID NO: 25416 - DNA, 497 bp, Homo sapiens
  misc_feature (1)...(497): n = A,T,C or G
gggggggannnnnnttttgacgcccgtggaattccgcacgagacttgctgcgtttaaagaaacaaatgagagtattttgtcagatatgtcaacattacctgaccaacgtgaatactactgttaaggaacaggccttcactattctgtgtgatattttgatgatcttcagccatcagattatgtcaggagggcgtgacatgttagagccattagtgtatacccctgattcttcattgcagtctgagttgctcagctttattttggatcatgtcttcattgaacaggatgatgataataatagtgcagatggtcagcaagaggatgaagccagtaaaattgaagctctgcacaagagaagaaatttacttgcagcattttgtaagctaattgtatatactgtggtggagatgaatacagctgcagatatcttcaaacagtatatgaagtattataatgactatggagatatcatcaaagaaacaatgagtaaaacaagg

SEQ ID NO: 25417 - DNA, 500 bp, Homo sapiens
  misc_feature (1)...(500): n = A,T,C or G
gggggaagnnnnngaattganncccatcgancgcctgcgngaaatgtcgcaaacgaacctaaaagtgagtggtgccctttacagagaaataactttgaaagtagctgaggttcagttgaaatcagactttgctgcacagaaactgagtaatttataattataatttcaatttgatcatattttaaaatatgttttcaccaccatataagattttggttctacttgctatatgcctcctttgtaaaaataaacaccgaggcttactgtagtagaaactttagttttgatgatgcacaaaataaacagcagtggttctcaactagggccattttatctccctctcctctaccccaaggggcatttggctatgtctggagatatttttttttggttgtcagaagttgtggggtcaggaaggggtgaggcaggggtgctatgggcgtctagtggatagaggagaccagagatgctgctaaacatcctactatgcacaagacagg

SEQ ID NO: 25418 - DNA, 485 bp, Homo sapiens
  misc_feature (1)...(485): n = A,T,C or G
attgatcccgntnggnnnnnncncggtcacccgctgcaagtttttttatacccaacatccattgatctttatttgatttgacaaaatctgcatttttaaaagacaggtaacaaaatctgaggttatactgaatctgacaaattgagttctatagtatctagaatatcatataagaaatatcaactgagggaaaagagaagtaccacatgcagatgctcctggcaaggggggaactgtatctgcaggtgaggtccagagtgtgcagtgcataagaaaatcctacagaaaatgccgttaacttacttggatgaaatgtttttcctttgagggggaggaagacgtggtnnnnngcgcaggaattcaaaggcatatgcagaatggcttctccatttcaaaatggtaataaaaatatttaaatcatggcactagggcacctttgaggaaaagaacatcttaaccagagtaggctcattgcataattcttc

SEQ ID NO: 25419 - DNA, 470 bp, Homo sapiens
attagaaaaccttcgaccgcctgcaggaattcggcacgagcccaccagcctaagaagctctggccccaggcttgtcactagcagctgcagtcaacagttcaaagaagtcatggcccaaatccagtgtgcacccctccccattcacagagcctttttcacaattccatttccagttcatctatggcagtccagccagctcctgggcagcttgagagggcaaacccaaaacctcatgacagccagagcctgtctttcagcattcagtccgcctggccggctccagtttccccatggggctgcgggacagaggaccattacaactagatcaaggagcccagaaaacctccagtagtggacaacaggttttcaccatagcctacgttaacccatttttgagccaagcttcaaccctcagccttgaaaaacaagtctttaatttaatttttgttttttgcctaaatccaaagaaa

SEQ ID NO: 25420 - DNA, 462 bp, Homo sapiens
  misc_feature (1)...(462): n = A,T,C or G
gggatggggcccncnnaattgacnnccaattgaccccgcgctgcaggaattcggcacgagccaaaacccagctggccttaacactccttaaagacagaagtcacacttgaacaaaacccacacacaacaaaacctgatttgggagacggtgtctccactgagcacctgctgggctgagcttctacctacgagtgaaactctgtcctcccgcgaggaccaggcatcgctgtgtgaggacggcacggccagcgcctgctgtgagtgggtctcccaagactaggcctcaggacgcggggggagccatccccgccgccctcacaggacccaccaggcagcggagacatgtggaattagagtattttgaggtgtcctttctttacaaaataatggggtcttgggcatttcacatcactccatttctactgagactttcagaatcacacaggccctttccgtggattt

SEQ ID NO: 25421 - DNA, 473 bp, Homo sapiens
aggcgccaattgcctctctgcggcattcggcacgagaagagttttattgtgttggaacagctcagaggagtgggtggctcctctctgtacgcaattatcccattgggtgttcagctctcagctgagagaaggcgctgaaaagagtggctcctctctgcaggcaagtcattcacatgtctgcaggtctctgaagctctcagcagacggcagctcctctctgctaacagtttctctctgaaggtgggcgcccatcatctcccgttatcagtagaggactcctctctgcagctggtcatcccgtcatcctctgccctgctctggctgagcccagggcttttacggaccttccaaatataatacagaagccacatttggattttccgatgtcccaagtgtgtctaggcactgcggaacgtcgtcatgtctttgggttctctgctggggacgcaccagtcatcagcctcgtgggtggg

SEQ ID NO: 25422 - DNA, 483 bp, Homo sapiens
  misc_feature (1)...(483): n = A,T,C or G
gcgcccatttatacctccgcatcgcaanagcgacgagatctcaattttcacgaggcgcagcaggcgtgtctggaccaggatgctgtgatcgctttcttttaccagctgcacgacgcctggcggagcgggctggactggagcaatgccgggtgtctcaaagatggctctgagcaccatcccatcacaaagcccagagagccctgtggtggccacaacacagagcccggagtcaggaactacggattttgggataaagataaaagcagacatgatgttttctgttttacatacaatttcaatggccgtttttactatctgattcaccccaccaaactgacctatgatgaagcggtgcaagcttgtctcaatgatggcgctcagactgcaaaagngggccagatatttgctgcctggaaaattctaggatatgaccgctgagacgcaggctggttggcggatggcaacgtacgctaccccatcttn

SEQ ID NO: 25423 - DNA, 498 bp, Homo sapiens
  misc_feature (1)...(498): n = A,T,C or G
agccnnnagnnngnccgnnnnnnnnnnnaattgaccgactggaggacttcgcgacgaggcaagggagaaatgtgttgcgttgtcttagctttaaaacagtcacaggtcttgctctatcatagatgaacaaatactttcttgatcattctgtaagaccaggaggttggtaagagcgactaaccagcctaactttaatacacatgtataaagatgttcacagagaaagatgctctgtagagaatttgctaccgaagttggctcaagaatttgtttttagtgttatttaccaagattaggacgtcagtggcttaaattctttgaattcttttcaaggactgcaagattatttgataaagagcagcatgaatcttgtgctctaatattacacagtcagttcaaagaaaggatgtaagtcaaagacttgttacatagagggaaaatggactgtgatagaggacagactggaagcttctttctttcatatcacatgtatagaga

SEQ ID NO: 25424 - DNA, 354 bp, Homo sapiens
  misc_feature (1)...(354): n = A,T,C or G
aattgacnccgctgaggaattcggtggagctcgcccctgcctcctagagggaggtctgggttcccttctatggctgaccagtgcctgtggggtgactgccaagcaccaggctccctccctccctgtgacatgacctgggctgacaacactccctctcctgggacctccttgcctcaggtgggtgttcaaaaactgtgccttcccactcgtctgtgcagaggctgggcctgaggtctcagtgtggagagcagcagaagacccaggaaagcacagttggcttccgtttctcctgctccctgtgtgtgttagaattttaacataaattccactttcattttnnnnggaaaaaaaaaa

SEQ ID NO: 25425 - DNA, 476 bp, Homo sapiens
cttcgacattcgatcgcgctgcaggaattcggcacgagtgcacttctcagccgggcatggtggctcacgcctataatcccagtactttgggaggccgaggcgggcagatcacttgaggctaggaattcaagaccagcctgtccaacattgtgaaaccctgtctctcctaaaaatagaaaaattagctgggcgtggtggtgggcgcctgtggtcccagctgctcgggaggctgatgcaggagaattgcttgaacccaggaggcggagattgcattgggccgagaacgtgccactgcactctagcctgggagtgacagagcgagactctgtcccaaaaagaaataatcaaccaatcaatcattgcccttcccttcccgtatttgaacccctttgtcagaggagaaaaccctgcatctcttgtgccttcccaggcctgaccctgtcttctcctcgccccaggtctgccctgcaggtgcc

SEQ ID NO: 25426 - DNA, 475 bp, Homo sapiens
  misc_feature (1)...(475): n = A,T,C or G
aggggncnattgncactgtnccgcgctgaggattcggcacgagccgagatgaagccggcggtggacgagatgttccccgagggcgccgggccctacgtggacctggacgaggcgggaggcagcaccgggctcttgatggacttggcagccaatgaaaaggccgttcatgcagacttttttaacgattttgaagatctttttgatgatgatgacatccagtgagatgccctctggctgcaggcggggccaagcccttggtacagagccgcagtgtgagcctgcgcaggacagtttcaggtggttttaaagaacacgtggaaatcccttgaatttaggacctggttaaccagaaagataagactgttcttaacgacctagatgattctgttcatctctgaacgggatcaggttttgtcctcactccaattaaaagaaagcaatgtcaaaaaaaaaaaaaaaaaaatctcggggggga

SEQ ID NO: 25427 - DNA, 478 bp, Homo sapiens
  misc_feature (1)...(478): n = A,T,C or G
agggtgncataganatcgtgagcactgccggaanncggnacgagctttccatggatctgaagaaatacttggattctatccctcctggacagtacatggattcttcacttggtcagagttatttatactcaggtcctacaggggattgagttttgtcactctataagagatcttcacagagacttaaaacctcaaaatctcttgcttgatgacagaggaacaattaaactggctgattttggccttgccagaacttttggaatacctatgacagtatatacacatgaggtagtaacactctggtacagatctccagaagtcttgctggggtcaactagtaactcgacgacgagggacagtctaactctacgcaccatatttgctgaactagcaactaagaaaccacttttccatggggatccagacccagataaactcttcaggattttcagagctttgggcactcccaataatgaag

SEQ ID NO: 25428 - DNA, 470 bp, Homo sapiens
  misc_feature (1)...(470): n = A,T,C or G
tatttaaagcatatttacagtcctcgcggaannccgcacgagcggcggctcacggtgcagccctcgcgcccgccaggccttcatgccccgaggactagcagactaacaaggacctgaggaatgtgatgcagttgctcttttaagtctcatcaactcctgcgatcacttcgtggttgatcgaaagaaagtcacagaggtaattaaatgtcgtaatgagatcatgcactcttcagagatgaaagtatcttctacgtggcttcgagattttcagatgaagatccaaaattttctgaatgaattcaagaacatcccagagattgtggcagtatactccagaatagaacagctgttgacgtctgactgggctgttcacatccccgaggaagatcaacgagatgggtgtgaatgtgaaatgggaacttacctgagtgagagccaagtcaatgaaatagaaatgcagttactaaatg

SEQ ID NO: 25429 - DNA, 474 bp, Homo sapiens
  misc_feature (1)...(474): n = A,T,C or G
agggggcaattgcccctgtgcggcattcggcacgagcaggactctctcattgagatcatctgctccagaaccaaccaggagctgcaggaaattaacagagtctacaaggaaatgtacaagactgatctggagaaggacattatttcggacacatctggtgacttccgccagctgatggttaccctggcaaagggtagaagagcagaggatggctctgtcattgattatgaactgattgaccaagatgctcgggatctctatgacgctggagtgaagaggaaaggaactgatgttcccaagtggatcagcatcatgaccgagcggagcgtgccccacctccagaaagtatttgataggtacaagagttacagcccttatgacatgttggaaagcatcacgaaagaggtgaaaggagacctggaaaatgctttcctgaacctgggtcagtgcattcagaacaagcccctgtatttn

SEQ ID NO: 25430 - DNA, 449 bp, Homo sapiens
attagaccgctctgcccgcgctgcaggaattcggcacgaggcgagctgagccctggccgccgccacaatgggccgcgagtttgggaatctgacgcggatgcggcatgtgatcagctacagcttgtcaccgttcgagcagcgcgcctatccgcacgtcttcactaaaggaatccccaatgttctgcgccgcattcgggagtctttctttcgcgtggtgccgcagtttgtagtgttttatcttatctacacatgggggactgaagagttcgagagatccaagaggaagaatccagctgcctatgaaaatgacaaatgagcaacgcatccggatgacggttccctgtctctgaaagacctttctctggaagaggagtctgcattgtagtgtctcaaagacacaataaacttcctatggtctgcaaaaaaaaaaaaaaaaaaaaaaaaaaaaa

SEQ ID NO: 25431 - DNA, 504 bp, Homo sapiens
  misc_feature (1)...(504): n = A,T,C or G
cgctcccattgaccgcctgtggnaattgccacgcgctgagcagtacagggcgacactaggtgctgatgctagtaaggaaactgcatcacgattgaaagaggaacagacccaaatctgaacctcttttgagtttactgcatctgtcagcaggctgcagggagtgcacacgatgccagagagaacttagcagggtgtccccggaggagaggtttgggaagctccacggagaggaacgctctctgctttcagcctctttccattgccgtcagcatgacagacctccagcatccacgcatctcttggtcccaataactgcctctagatacatagccatactgctagttaacccagtgtccctcagacttggatggagtttctgggagggtacacccaaatgatgcagatacttgtatactttgagccccttagcgacctaaccaaattttaaaaatactttttaccaaaggtgctatttctctgtanaacactcttttttggcaagtn

SEQ ID NO: 25432 - DNA, 464 bp, Homo sapiens
actagatcgccctcgtgaatcggcacgagaataattgaaccataaccatgtaatattatgtaaaggcctggaaattactgttgctaaaaaaagtcatgtagtttcatgtagtgtagcatccttggcatcgttttccaaaatttgttccttctcccttttttttttctttcggggggggcatgagggggtatctgggtaaatatgatggtatatgtgttactccgatatgtaatccatttcactggctgagtttggcccctagccatgtgttaatataaagtaggcatggcttcccaatggaaatctctgagaatgacaggggagttgtgcaagcattttacattgccacataattgacttgccattttatggttaaaaacggcacattaggcagttgaatatgacgttaccttgcagactaaaaggttgaaggcccgaaactaacttttagctaacaataaggg

SEQ ID NO: 25433 - DNA, 470 bp, Homo sapiens
  misc_feature (1)...(470): n = A,T,C or G
aattagaacaaccttcgaccgcctgtangaattcggcacgagcgtggttgagcagatgtgtatcacccagtacgagagggaatctcaggcctattaccagagaggatcgagcatggtcctcttctcctctccacctgtgatcctcctgatctctttcctcatcttcctgatagtgggatgaggaaggtcttcctgttttcaccatctttctaatctttttccagcttgagggaggcggtatccacctgcagcccttttagtggtggtgtctcactctttcttctctctttgtcccggataggctaatcaatacccttggcactgatgggcactggaaaacatagagtagacctgagatgctggtcaagccccctttgattgagttcatcatgagccgttgctaatgccaggccagtaaaagtataacagcaaataaccattggttaatctggacttatttttggacttan

SEQ ID NO: 25434 - DNA, 496 bp, Homo sapiens
  misc_feature (1)...(496): n = A,T,C or G
gggagttnnccgggggggnnnnnaaattgatnngcccctcgatcgtctttgcggaanncgcacgaggaagagttgaggcctagaggttggatccacagaagacgcattctgtctgtatcctgtgatggcaaaggtgggataaagggcctctgcctgagaggctgaagtaggagaaagcctgagattcttccaggtttgggttgcctgggtgtggggagcaacaactgactcaaggagagaaagcctgactcagcctgtgctttgactgtgcagggggagggcccccatgatgttccttccccaatttcaattcagagacatacgtactttcctccaaactgccacttaattatatgctggcttgactgcaaggacactgagcaaattcatttacattgagaaaattgaggacaaatgaaaaattttaatgttctcatgtcccccaccccccaccccccagtttataatttggaggaaggaagtaaatttaatgcan

SEQ ID NO: 25435 - DNA, 465 bp, Homo sapiens
  misc_feature (1)...(465): n = A,T,C or G
aatagatcgccttaggaattcggcacgagagaaggtgctgtaggtggctactacccagaacccagtaagctttgtcacttggatcaaagtgattctgatttccatggagatcttacatttcaacacgtatttcataaccacacttaccacttacagccaactgcaccagaatctacttctgaaccttttccgtggcctgggaagtcacagaagataaggagtagataccttgaagacacagatagaaacttgagccgtgatgaacagcgtgctaaagctttgcatatccctttttctgtagatgaaattgtcggcatgcctgttgattctttcaatagcatgttaagtagatattatctgacagacctacaagtctcacttatccgtgacatcagacgaagagggaaaaataaagttgctgcgcagaactgtcgtaaacgcaaattggacataattttgaatttn

SEQ ID NO: 25436 - DNA, 466 bp, Homo sapiens
aatagaccgccttaggaattcggcacgagcatgggcaaccacctgccgctcctgcctgcagagagtgaggaagaagatgaaatggaagttgaagaccaggatagtaaagaagccaaaaaaccaaacatcataaattttgacaccagtctgccgacatcacatacatacctaggtgctgatatggaagaatttcatggcaggactttgcacgatgacgacagctgtcaggtgattccagttcttccacaagtgatgatgatcctgattcccggacagacattacctcttcagctttttcaccctcaagaagtcagtatggtgcggaatttaattcagaaagatagaacctttgctgttcttgcatacagcaatgtacaggaaagggaagcacagtttggaacaacagcagagatatatgcctatcgagaagaacaggattttggaattgagatagtgaaagtgaaag

SEQ ID NO: 25437 - DNA, 468 bp, Homo sapiens
  misc_feature (1)...(468): n = A,T,C or G
atagaaaactttgcacggctgtangaattcggcacgagttcatactcctgtgataacccattaatccattaacccatgaatgaaggcacagccttacgatccaatcacatctcaaaggccccacctttcagtattgccacattagggattaagtctcaacatgagtgttggagggaacattcctggcacccagagcaagttttcaggaacacaagtccaccgagaggcattttctatggctcaccgtgagaataggtctaatcaagccctgtatagccttactcccagccacctgcctgtttaacgcctactcgtctttcagggttcaattcaatcctacttctgcctggaaaccttctccatgacctccccacttccagcatgggttagtggccccacccaggtacttccttgtacctggcatctgtttacctgctggttcctcattgggactgggagctcctggan

SEQ ID NO: 25438 - DNA, 444 bp, Homo sapiens
atagaccagtctgcacgctctccggacgaggcgcactgcacacacctcatgctagcctcacgaaactggaataagccttcgaaaagaaattgtccttgaagcttgtatctgacatcatcactggattgtagaacttgttgctgattttgaccttgtattgaagttaactgctccccttgcgtatttgtttaataccctgtacatatctttgagctcaacctttagtacgtgtgcgcttggtcacttcgtggctaaggtaagaacgcgcttgcggaagacaagtctgtggcttggtgagtctgtgtggccagcagcctctgatctgtgcagggtattaacgtgtcagggctgagtgttctgggatctctctagaggctggcaagaaccagttgttttgtcttgcgggtctgtcagggttggaaagtccaagccgtacgacccagt

SEQ ID NO: 25439 - DNA, 448 bp, Homo sapiens
aatagacagctcgtgcccgcgctgcaggaattcggcacgagacacctccctatcccccccctcaaccggaaggctgactgcccggagaatgccaccatgtctctgaagcatctcaccaagaagctgctaaaccgggatatccaggttgggaagagcggacattcctctgtggaagatgcccaggccaccatggagctatataagttggttgaagtcgagtgggaagagcacctagcccggaatccccctacagactagtggcagtggggacgctggtgatatgaggaggcagaggcagcacccaggagaaacagggcagtggaccaatggacagctccaccagctccacatctttggaagctagatttggggagagagaagctctaccccagacttaatacccattgaaatttcacctcaggtgttgtgtcctgtgtctggttaagtg

SEQ ID NO: 25440 - DNA, 476 bp, Homo sapiens
  misc_feature (1)...(476): n = A,T,C or G
nattcgcccgtcctgcaggaattcggcacgagaggaggggcagcgcatgtgtgcatgtgctgtgtgagtgagcacacccgtgtgcacactcatacacatgtgcacacacacgcactctccccgctcaggggcctggaggtctggctgagcccctggggaaaggtgagttctttcatctccctcctccaggtcggagtgcctggagtcaggtgtcgaggccacattgctggctgccccctctttgtagctcctataaagggcccacacctggtggatacctggttgagcgtgtggtctctgccccagcctgtccttgtcacgatcacaggccttgcttttgtaacaatgatgaccccggcctgtctcatcttctgaagaggaaaagtcaaagtgttgctgtggctccatatttcaactaaaaatatatctgttggagaaagaaattaacaataaagaattttcataggagaaaaaaa

SEQ ID NO: 25441 - DNA, 490 bp, Homo sapiens
  misc_feature (1)...(490): n = A,T,C or G
gacgcgcgaaannttaaaaattgatgactggagaacctgcacgagctcacatcaatatacttgtttagaaaaacttcaagacattcaaaaactaggaaggagtatgtttaatagtatttgtataaatttggtggttatgtttttttattttgtttctgttttgtgtagaggtaaaaactatagttttattacagcataattcattttgagctccactatgacatttcaaagactgcccagtttggaagtctgtcatgatttttactctttcactccaattcagtaattgttgatagtattacttacctagtccatccatactcatattattcaaatatataggtggtacttttgaaacaattacattggttctcttggtttaactgaggtttatgaatattcaaacctttgctgggggaaagaaatgaaagttaatgagcatgcttgctatgagagagggatttttaatttaacttgtagttatagttan

SEQ ID NO: 25442 - DNA, 465 bp, Homo sapiens
  misc_feature (1)...(465): n = A,T,C or G
gtggtgntnaacccaggctcgcaccgcatgcagcaattcggcacgagcagagacagacctatacctgcctgtcccacaggtatgggctctacgtgtgcttcttgggcgtcgttgtcaccatcgtctccgccttccagttcggagaggtggttctggaatggagccgagatcaataccatgttttgtttgattcctatagagacaatattgctggaaagtcctttcagaatcggctttgtctgcccatgccgattgacgttgtttacacctgggtgaatggcacagatcttgaactactgaaggaactacagcaggtcagagaacagatggaggaggagcagaaagcaatgagagaaatccttgggaaaaacacaacggaacctactaagaagagtgagaagcagttagagtgtttgctaacacactgcattaaggtgccaatgcttgtccttgacccagccctgc

SEQ ID NO: 25443 - DNA, 404 bp, Homo sapiens
  misc_feature (1)...(404): n = A,T,C or G
gtggagtaaccaccnatttgaccgccctgcatttgagggcccggccttgccaggcttcagtctccagtgccaaaggaggaaatgcccaggctgtcagcatttccagatgagagcagaagggagaagcttaaacccaagtcacacatccagcaatggagtccgacagcccagcaccatctgggaactgagaagcacctctgcccggcccccacaccgtgtggaaagtgaggagcacctctgcctggccgccaccccgtctggcaagtgaggagcgcctctgcccggccgctgtgcaaccttccaagtgtgaagtgacagccttgtgtgtgatgttttctgccttccccaagtttgcactttcgacattaaagtttactttttagttaaaaaaaaaaaaaaaaaaa

SEQ ID NO: 25444 - DNA, 469 bp, Homo sapiens
  misc_feature (1)...(469): n = A,T,C or G
nttggaccatctcccccgcgctgcaggaattcggcacgagaattgccttcgcccgccctgcccctcgcctgcttcagaagcttacacgaactcccgggtcggcgacccagcccgagccgcctggggccccacgggaagctgaacgccctgtgggctcctgggatggatctttccgatctttgcgccgccttcacccattgaagagcctgtgcccaccctgcccagtcgctctcggggccgaggaggagcttccgctgccatcttcggatcctgtgtttcgcacgggggctccaccagggcagggatggtgcagaatggggaaatggagagagaacctgatagagccccaaactcgaggacctattgctccccaagaataacatcttccagaagaactagacagaaaactaggcgtctgggaactgtgagatccttggaggagtagcatcatcatgaccctctgtgttcc

SEQ ID NO: 25445 - DNA, 480 bp, Homo sapiens
  misc_feature (1)...(480): n = A,T,C or G
cattgcacccccattgataggtctgagcgaaanccccacgaggaattacctaagggaacaccgacaatttataccactattaaaaatgtagctcatgtaaaacaattatatgtctgcatagttgggaaaggacaaagaaattgacagtattccttcccaaacagagcaccaatgtggccctgctctttctctcttatttattgccttacctttttccccactagaaaatatgctggcttgtgtgtagccagcatcggctctatgactaatttccattaacacagcttggttaaaaccagtgtggttaaaaccacaatactctgtcatcactatattaatagcaaattgaaaatttttttagtgataagaaccagccaatagtttggaaaaattagtttggaaaaatttcacaactaattatactttatggcccaaggtttaaaatattggggaaatgaactaagcatggcttattctcac

SEQ ID NO: 25446 - DNA, 473 bp, Homo sapiens
  misc_feature (1)...(473): n = A,T,C or G
ggaggggntnnntttggcttgcattgtcagtacgaattcggcacgagcagcagttcacccatctcgaaggagaaactaccaaacgcagagactgagaaattctggatgttttaccgttttgatgccatcagaaccttcgggttcctgtcacgactgaagttggcacagactgccctgacagtggtagctttgccaccaggctattacttgtactcccagggcctcctcactctcaacaccgtgtgcctcatgagtgggatatcgggctttgccctgaccatgctgtgctggatgagctatttcttacggagactggttggtatcctgtatctgaatgagtctggcaccatgctgcgggtggcccatctgaacttctggggctggcggcaggacacatactgtcccatggcagatgtgattcccctgacagaaaccaaagaccggcctcaagagatgttgtgcgtatccagcgg

SEQ ID NO: 25447 - DNA, 478 bp, Homo sapiens
  misc_feature (1)...(478): n = A,T,C or G
atcgaccgccattgaacgcgtgcangagacggcacgaggcgacacagcccatcccctcgaccgctcgcgtcgcatttggccgcctccctaccgctccaagcccagccctcagccatggcatgccccctggatcaggccattggcctcctcgtggccatcttccacaagtactccggcagggagggtgacaagcacaccctgagcaagaaggagctgaaggagctgatccagaaggagctcaccattggctcgaagctgcaggatgctgaaattgcaaggctgatggaagacttggaccggaacaaggaccaggaggtgaacttccaggagtatgtcaccttcctgggggccttggctttgatctacaatgaagccctcaagggctgaaaataaatagggaagatggagacaccctctgggggtcctctctgagtcaaatccagcggtgggaattgtacaataaaatatttttggcacg

SEQ ID NO: 25448 - DNA, 463 bp, Homo sapiens
atttgccctgctgcggccgctgcgaagggagccgccgccatgtctgcgcatctgcaatggatggtcgtgcggaactgctccagtttcctgatcaagaggaataagcagacctacagcactgagcccaataacttgaaggcccgcaattccttccgctacaacggactgattcaccgcaagactgtgggcgtggagccggcagccgacggcaaaggtgtcgtggtggtcattaagcggagatccggccagcggaagcctgccacctcctatgtgcggaccaccatcaacaagaatgctcgcgccacgctcagcagcatcagacacatgatccgcaagaacaagtaccgccccgacctgcgcatggcagccatccgcagggccagcgccatcctgcgcagccagaagcctgtgatggtgaagaggaagcggacccgccccaccaagagctcctgagccccctgcc

SEQ ID NO: 25449 - DNA, 474 bp, Homo sapiens
  misc_feature (1)...(474): n = A,T,C or G
atggatcgccttaggaattcgtcggagctcttgatgngcatcgncactgtcatgaaccatgggctacgcaacggtggtggcgtgggcgacattctccgcaagccctccaaagatgagtctctcttcccagcccgagtggtctatgacctcctgttcttcttcatcgtcatcatcattgtgctgaacctcatctttggggtaatcatcgacaccttcgctgacctgcgtagtgagaagcagaagaaggaggagattcttaagacgacatgcttcatctgtggtctggagagggacaagtttgataacaagacagtgtcatttgaggaacacatcaagctggagcacaacatgtggaactacttgtacttcattgtgctggtccgcgtgaagaacaagaccgactacacgggccctgagagctacgtggcccagatgatcaagaacaagaacctggactggttcccccggatgcgn

SEQ ID NO: 25450 - DNA, 495 bp, Homo sapiens
  misc_feature (1)...(495): n = A,T,C or G
attttgacccgcgctgtatgaattcggcacgagctgggctctcccagaccatcagcagtgcatccagccccctggggcctgggctgctgctggttcttcatcagtcccttggtctctagcctcggccagggctgctctgctctccgccctcctttgtgtatcaagtgtcgctcacagccccattcactggggagcctttcggatctatttggtctttctcatgtcccccactggtctgtaccccagggagcgggtgcttgtactgtgtgaatccagtgttcacattcacacttaatgacttccttggcaccaatcatgtatttcaccgtttgcactttttgtatttcaataaaaatgttgatgccccnnnnnnnnnnnnnnnnnnnnnnnnnnnnnnccccggggggggggcccgggccccaatccccccttaggggaggggataaaaattcccgggccggttttacaacgggggaaggggaaaaaaacnnnncg

SEQ ID NO: 25451 - DNA, 500 bp, Homo sapiens
  misc_feature (1)...(500): n = A,T,C or G
gatgggnannnnnnnntttcgaacggctgtgtngaagcctgcagactttgagcgcctgcgctacttgaaggaacagtacgcctggagacatttctactggtaccttaccaatgagggtatccagtatctccgggattaccttcatctgcccccggagattgtggctgccaccctacgccgtagccgttcagagactggcaggcctcggcctaaaggtctggagggtgagcgacctgcgagactcacaagaggggaagctgacagagatacctacagacggagtgctgtgccacctggtgccgacaagaaagacgaggctggggctgggtcatcaaccgaatttcagtttataggcggatttggtcgcggacgtggtcacccacctcagtaaaattggagaggattcttttgcattgaataaacttacagccaaaaaaccttaaaaaaaaaaaaaaaaaaaaaaaactggagggggggcccgtggcccattatgccctttg

SEQ ID NO: 25452 - DNA, 483 bp, Homo sapiens
  misc_feature (1)...(483): n = A,T,C or G
agattcgtaaaccctgataccctgactgagcgcntgcgagaanccgcacgaggcattgagtagtgcctttttagctttttcacattactttgtcaccatatcctttgtgttctctaaatacattgcccacttccagaaatgttcagcatgaaaaaaagggcttcagtgtcgattgagattgcttttgttcatctcagggatttcaatagtcaagaatgaattcagttaaaggtatttagggttcaaagaagacaaactgtacaagcccatttcattccttgttgtatacctttccatctgccctcccattttaactatctactgtggcctttttatggaaacagagcaagatcaatgaaggctaatggcaagaataagaaaaagagttgagatttaaccaatagcggagcataaaggatcatgacaaaatcaaattataaaagcatacttgaaataggtggagctttttcttttgaaaatata

SEQ ID NO: 25453 - DNA, 490 bp, Homo sapiens
  misc_feature (1)...(490): n = A,T,C or G
ncgggtttgacctccccgcctgcggttggaaagcgtcgcaataagacgcacacgttgtgccgccgctgtggctctaaggcctaccaccttcagaagtcgacctgtggcaaatgtggctaccctgccaagcgcaagagaaagtataactggagtgccaaggctaaaagacgaaataccaccggaactggtcgaatgaggcacctaaaaattgtataccgcagattcaggcatggattccgtgaaggaacaacacctaaacccaagagggcagctgttgcagcatccagttcatcttaagaatgtcaacgattagtcatgcaataaatgttctggttttaaaaaatannaaaaaaaaaaaaaaaaaaaaaaaaaaaaaaaaaaaaaaccttggggggggggccgggcccccattccccctttaggggggggtattaaaaattccgggggggggttttaaaaacgggggaggggggggagaaaannnnnnnnn

SEQ ID NO: 25454 - DNA, 504 bp, Homo sapiens
  misc_feature (1)...(504): n = A,T,C or G
agtgagggggnntttgacggcgttgcccggctgcggattcggccgagcttatgtctcccagcatggccttcagggtgcacagccgcaacggcaagagttacacgttcctgatctcctctgactatgagcgtgcagagtggagggagaacatccgggagcagcagaagaagtgtttcagaagcttctccctgacatccgtggagctgcagatgctgaccaactcgtgtgtgaaactccagactgtccacagcattccgctgaccatcaataaggaagatgatgagtctccggggctctatgggtttctgaatgtcatcgtccactcagccactggatttaagcagagttcaaatctgtactgcaccctggaggtggattcctttgggtattttgtgaataaagcaaagacgcgcgtctacagggacacagctgagccaaactggaacgaggaatttgagatagagccccaggctggcctcagaactgtgttttttatgtggccac

SEQ ID NO: 25455 - DNA, 504 bp, Homo sapiens
  misc_feature (1)...(504): n = A,T,C or G
tgcgtnntnnaaactgtccgccttgcggaattcgccacgaggaagaatcaaacaccaacaaagaagtatgatggctacacatcatgtccactggtgaccggctacaaccgtgtgattcttgctgagtttgactacaaagcagagccgctagaaaccttcccctttgatcaaagcaaagagcgcctttccatgtatctcatgaaagctgacctgatgcctttcctgtattggaatatgatgctaaggggttactggggaggaccagcgtttctgcgcaagttgtttcatctaggtatgagttaaggatggctcagcacttgctcatcttggatggcttctgggccaaaactgcagtcactgaatgaccaagagcagcacgaaggacttggaacctatccttgtaaagagttccttgatgggtaatggtgaccaaatgcctcccttttcagtacctttgaacagcaaccatgtgggctactcatgatgggcttgattctttgggaa

SEQ ID NO: 25456 - DNA, 467 bp, Homo sapiens
  misc_feature (1)...(467): n = A,T,C or G
nagcggggnnnnnccttgatacgcatgaccncttgcagcacgacgacaaagtgagttcagagcctagcggcgtcacctgtggtgctggaggagcggaggactcaaggtgcaacgtccgagagagccttttctctctggatggcgctggagcacacttccctgacagagaagaggagtattacacagagccagaagtggcggaatctgacgcagccccgacagaggactccaataacactgaaagtctgaaatccccaaaggtgaactgtgaggagagaaacattacaggattagaaaatttcactctgaaaattttaaatatgtcacaggaccttatggattttctgaacccaaacggtagtgactgtactctagtcctgttttacaccccgtggtgccgcttttctgccagtttggcccctcactttaactctctgccccgggcatttccagctcttcactttttg

SEQ ID NO: 25457 - DNA, 482 bp, Homo sapiens
  misc_feature (1)...(482): n = A,T,C or G
aggggacggnnattganncccattgaccagcgctgcaggaattcggcacgagctagaactcaagcacagctcccgccgatcctggggcggcgccgcctctccacccgcagcctgcggaggcggggacttgggtgtcggcttttctgagggtgatcttttgttttccgagtttgggattcggctgttgggaaaaaaaaatcgcgtttgtaccttttccccccacagatgagaagtgtttgtaatggatttgtatttttcttaattttatgctctttagacgtttaaaagaaccaaaaaagaaacttttgcttcttcgttttcggttgggatttgcagtttaatggcctcagatccttctccagatccccagggtttctttgtcttatttatggagaaaaaccggtcactttgtccagcgcactgtgaggcccccactcaggccagccctggcccccccttggtacttggacccgagttacaga

SEQ ID NO: 25458 - DNA, 501 bp, Homo sapiens
  misc_feature (1)...(501): n = A,T,C or G
ngaggttnnnnnnattgatcgactgaggaacctggcacgaggagcagctccactggcccgaccccgcgggatgagaagacagcttggctccccgcaggggccgtcggaaaatacccctggggttggtctgcgaccatgacgagcgaccctattggcccaataccgggaagcgaggcggagcttcctcttctccgagccccacctgggctttcagcccgcctcaggactgtgcgcctgcgcgaagtgcactggctgtgagctggacctgggctgtcttgtgtatttggagttggacagccaactacgtgactgcagccgggactggggacgatggaagcggactgggtagtacctgttgagcctaacaaagggtacaaccccagagtactggtgcttgagcaaggaatccccctgctcacctttcatgtgcaagtcctgtttgaaaatcagtacttcacagtgtaataaaattcacctggcatttactgaggaaaaaaaaaa

SEQ ID NO: 25459 - DNA, 503 bp, Homo sapiens
  misc_feature (1)...(503): n = A,T,C or G
cggcccggnnaattgacnaattgacngcctntgcggaattcggcacgagctgngacaaagctgcctttgccgctgggctttccgggactgtggagggagcacaggcggggaagctccacttcagacagggcttggtggggcaggacatggctcccattttgaagggaggtctccatgtggtccgagtgaggtgagacggccctcgtcctggtgttcctgatcatcttgaaaggttcttctggaactcctgtccccttagtcatgagaacagaaagtgcaatatttcctttcacctggcaggggaggggggatttatttctgaaagaaaaatatataaacagatcttctacatttatatttttaatcttctgttaaatacactttccgatattgccttgccttttgagctcttgctacagtcgcctttgctactgctttaagagaatttacaggtattgataaagaacaagactgttttattaaaagctttattcaacttgaag

SEQ ID NO: 25460 - DNA, 506 bp, Homo sapiens
  misc_feature (1)...(506): n = A,T,C or G
ggtgcggggnnnaattgtcggctgtggaattccgacgagccgagatgatgttcccatggaaaccctctcgtcagaggagagctgcgatagttttgactcactagagtcagggaaacaggtcgcggagtcagatttgagtgatgatggccaagcatctttggtgagcgaggaagaggaagatgacgaacacgatcaagctacccctagaagaagcaggtctagaagaagtagtattggacttcaagtagcctttcagctccccaccaagaagctggccaacataccagataataacagttcttgcgagcagttgttttctagcgcacgcttacagaatgagaaaaaaacaattcttgatagatagaacgactgttgacaggcgatacatagggaagattctacctctgagtctgaggatgactctcgggatgagagccangagagttcagatgctttgctgaaaaggaccatgaacatcaaggagaacaaagccatgttttggcgtt

SEQ ID NO: 25461 - DNA, 486 bp, Homo sapiens
  misc_feature (1)...(486): n = A,T,C or G
tttttagagaccntgatcggctgtggaattctgcacgagccgcacacagctggtcaacgtggccatttttggccccccttggatggcattcaaggagaggaaggtgtgggtgaaagagaatatggtgttgaatctgtcttgtgaagcgtcagggcacccccggcccaccatctcctggaacgtcaacggcacggcaagtgaacaagaccaagatccacagcgagtcctgagcaccctgaatgtcctcgtgaccccggagctgttggagacaggtgttgaatgcacggcctccaacgacctgggcaaaaacaccagcatcctcttcctggagctggtcaatttaaccaccctcacaccagactccaacacaaccactggcctcagcacttgcactgccagtcctcataccagagccaacagcacctccacagagagaaagctgccggagccggagagccggggcgtggtcatcgtggctgtgattgn

SEQ ID NO: 25462 - DNA, 461 bp, Homo sapiens
  misc_feature (1)...(461): n = A,T,C or G
agcgggnaaatttgggaagggtggctgcgagaatccgccgaggggttctggaaaaactgatgaccttagcatcctgtaatataacttatggtagcagattggggaaaatgaagcagcccactgaataattgacaaagtctgcttggagaacattctaaggtacaatatcatggagctcctttttcctttctccactaattgcgtgatgagctattgttctggctggtaattctccaactcggctgtcatttgaagtggcagacttaatatggaaagtttttataattatgagtttgaaaaagcattttaagatgatacagaaagtatccaaaacaacagaaaaaaaaagccacatcattttagatgaattgcgtgccttaaaatggtgaacgttagaaaattaaacaagtctggattccacaagtagttccaagtcaccaagtgacaaaaacaaggttaat

SEQ ID NO: 25463 - DNA, 308 bp, Homo sapiens
  misc_feature (1)...(308): n = A,T,C or G
tgtgagaaacaaccnttnttnttccnncctacttgnnnacatgtttttatttgccatatatgcctgactgaattaagcttgcttgttttaaacaaccaaatcattgtaacagaataggatttatcaaacaagaatgcatgatctcagcgtgattaaaaaaaagatttgtggaaataaatgatcatataaggtgcttttcaaaacaactgctattataattctcaaagtcctactctgccaaaagaagattaaaagtcatacattacattaccacggaaatgttatgtggaagaaggttgctgaaaatc

SEQ ID NO: 25464 - DNA, 419 bp, Homo sapiens
  misc_feature (1)...(419): n = A,T,C or G
gagggngnnccttttggaatcgaccggctgtangaattcggcacgagactcccttccctctactcccagagcccgcccggcaggaccaccgagcaaggccttggaaaaccagagagattagagcgcagaatggggaaatggagagagaacctgaaagagccccaaactcgaggacctattgctccccaagaataacatcttccagaagaactagacagaaaactaggcgtctgggaactctgaaatccttggaggagtagcatcatcatgaccctctgtgttccttttggcaaaggacttgctcccattgtttgcttgttccattgtctgtctgttaaataaataaaacccttttcatatatctttaaacttaaaaaaaaaaaaaaaaaaaaaaaaaaacctggggggggggccgggcc

SEQ ID NO: 25465 - DNA, 471 bp, Homo sapiens
  misc_feature (1)...(471): n = A,T,C or G
ntttgaacngctggatccgcgctgcaggaattcggcacgagctaggctgagcaatctgaccctatgggtctaggacacagttcctgggaacatcacattcctctgcccttcctgcaggcaggaacaaacagggctgccttctggccttgtaagacccttattgctgtcctggaggggctggggacttgtgtctgcggggatcagagcgcacagggagtgcacatatccaggcaccaggactagggctggagtgaggggggggtatttcaattaccttctattggtctcccttctctacactcttgtaataaaatgtctatttttaatgtttgtacacaacaatccttctattctagcctgcattgagcttgcatgcttgcataagagcttaagaaccattgatttaatgtaatagggaaaattctaacccaggtatccaaaaatgtgtaagaacaactacctgagctaaat

SEQ ID NO: 25466 - DNA, 501 bp, Homo sapiens
  misc_feature (1)...(501): n = A,T,C or G
gtggcnggggaattganaaatcgatcggttgcggaattcggcacgagctgngacaaagctgcctttgccgctgggctttccgggactgtggagggagcacaggcggggaagctccacttcagacagggcttggtggggcaggacatggctcccattttgaagggaggtctccatgtggtccgagtgaggtgagacggccctcgtcctggtgttcctgatcatcttgaaaggttcttctggaactcctgtccccttagtcatgagaacagaaagtgcaatatttcctttcacctggcaggggaggggggatttatttctgaaagaaaaatatataaacagatcttctacatttatatttttaatcttctgttaaatacactttccgatattgccttgccttttgagctcttgctacagtcgcctttgctactgctttaagagaatttacaggtattgataaagaacaagactgttttattaaaagctttattcaacttgaan

SEQ ID NO: 25467 - DNA, 494 bp, Homo sapiens
  misc_feature (1)...(494): n = A,T,C or G
gaattagaanacaactgatagccctcgacttgagcgtcntgcggaattccgcacgagcttaatcgaaccctgaagaagatgggacagagaccttgatgatattcacacacattcaggaacctgttttgatgtattataggcaggaagtgtttttgctaccgtgaaacctttacctagatcagccatcagcctgtcaactcagttaacaagttaaggaccgaagtgtttcaagtggatctcagtaaaggatctttggagcccgaaaaaaaaaaaaaaaaaaaaaaaaaaaaaaaaaaaaaaaaaaaaaaaaaaaaaaaaatatataaaaaaaaaaaatttctggggggggggggggcgacccaactgcccttttagggggggcgttaaaaaaaagggggggcgggtgtctaaaaaggggggggggggaaaaaaannnnnncngntnccgctctcaattctacagtgtttttaacagcaggtcccggtgtctcgag

SEQ ID NO: 25468 - DNA, 456 bp, Homo sapiens
  misc_feature (1)...(456): n = A,T,C or G
agaggggnaaattggctgcgctgcacgaattcggcacgagcttaaaccttgggtgtgctgtgccccacaaggagacatgatctatgaccccagctggcaccatccgcctccactgataccctattattccaagatggtctttgaaacaggacagtttgacgatgctgaagattgagtgtggagctttctgccttgtaggtgggcgggcctccacgtcaagatctcttttcctgtcttggaggtgaaaagtcatatctgagaaaatgtttgcagtgacccctagtctggggtacacagaccagtgttccttattgacagtgttcaataaggccccgtcattctcgccagtctgttgttgttcttaatgggctcctccttgaaatgtgtgtgtgtttgtgtcaagaggagttgtgttctttgtaaataaaggttaaaaaaaaaaaaaaaaaaaaaaaa

SEQ ID NO: 25469 - DNA, 511 bp, Homo sapiens
  misc_feature (1)...(511): n = A,T,C or G
agtgggtnnnnnnaattgcancggctgcaggaattcggcacgagctcctctgttactacagcaacagtctgcgttctgtggtggggataagcagacccttccagatcccgcctggctccttgagggaggacccactgggtgaagcacagccacagatctgagccaggatgggagtgaatcccaggcggaggccagagctggcagccagctctgcctttccactgccgggagtgctgggggcccagcctggccccctgaagagacagccaagtgtcgtccacatactcctcccagagtgagctctaaccaggctcatttgctctctccactactcatctctggaattagccgcttaaatacaggtttttgttgctgaaaaaaaannnnaaaaaaaaaaaaaaaacccctggggggggggccgggcccccatttccccttatagggaggggattaacaatcccgggccggggtttaaaacggggggaggggagggggaagnnnnnnnnnnntn

SEQ ID NO: 25470 - DNA, 496 bp, Homo sapiens
  misc_feature (1)...(496): n = A,T,C or G
gagctncnnnnaatgatgatgatcgccatgacaacantctcaagatgactgctgaactggaaaaactgatcttacctagccatatggcctgctgcctctgtcaatttaaaaacagcattgaagctgtctgcaagacagtcaagctgcattgcaacagtgcatgtctgacaaacaccacacattgtgctgaataagcatcggtagggaatccagatggagcgtacatgaaggtggtacaagcccggatgaactacacaagcactgagctgattggtgagccataggagctctcaaactgcactgtcatcaacttgtcaggcttgggagtgagcatctagacaccaaagacgagagtgattttatcagtacactacgttacatcttgccttatttctcagcggtaaacctagatgtgaaatcactgttacaccgttaattaaactgccaaccacaggaaacagcctggcaaagattcaaactgtatgccaaaaccggc

SEQ ID NO: 25471 - DNA, 505 bp, Homo sapiens
  misc_feature (1)...(505): n = A,T,C or G
cggggccggggnaattgaanaaatcgatngccatgcaggaattcggcacgagatttaggataaacttgaaatgagttccatagggcactggagatgcagaggtgaacaagatcccacctgtgagaacgcagatgcggggccgatcattgcggcaggacaggagccttggaataagcccacatgtgagattatggagcacagagggcagccaggcatctccagaagacctgctggaagaggccggtccaccccacctcctccagcccagtacacctgggctctcctacgagggcctgggctctgctcttgtggggtttatcagcaaatgaccatggtaaatggagatgactcaaatcggccttgctgggaagtgtcagttgactgttcctggttgtgaatgtccttaaactgcccctccctttcagcatcacctgtttcagaagacacccctggcacagtaaggagagggtatgccaagattacctccttcctagacctgaactgg

SEQ ID NO: 25472 - DNA, 497 bp, Homo sapiens
  misc_feature (1)...(497): n = A,T,C or G
ggagatcnnnnnnaattgannttttgacncgcctgcaggaattcggcacgagcagtcgccacacctttgcccctgctgcgatgaccctgtcgccacttctgctgttcctgccaccgctgctgctgctgctggacgtccccacggcggcggtgcaggcgtcccctctgcaagcgttagacttctttgggaatgggccaccagttaactacaagacaggcaatctatacctgcgggggcccctgaagaagtccaatgcaccgcttgtcaatgtgaccctctactatgaagcactgtgcggtggctgccaagccttcctgatccgggagctcttcccaacatggctgttggtcatggagatcctcaatgtcacgctggtgccctacggaaacgcacaggaacaaaatgtcagtggcaggtgggagttcaagtgccagcatggagaagaggagtgcaaattcaacaaggtggaggcctgcgtgttggatgaacttgacatg

SEQ ID NO: 25473 - DNA, 498 bp, Homo sapiens
  misc_feature (1)...(498): n = A,T,C or G
ggggttttaganactttggangaccnnnanaannntttgcaccgcctgcaggaattcggcacgagtggggcgctgagccagctccgcacggagcacaagccttgcacctatcaacaatgtccctgcaaccgacttcgggaagagtgccccctggacacaagtctctgtactgacaccaactgtgcctctcagagcaccaccagtaccaggaccaccactacccccttccccaccatccacctcagaagcagtcccagcctgccacccgccagcccctgcccagccctggctttttggaaacgggtcaggattggcctggaggatatttggaatagcctctcttcagtgttcacagagatgcaaccaatagacagaaaccagaggtaatggccacttcatccacatgaggagatgtcagtatctcaacctctcttgccctttcaatcctagcacccactagatatttttagtacagaaaaacaaaactggaaaacacat

SEQ ID NO: 25474 - DNA, 473 bp, Homo sapiens
  misc_feature (1)...(473): n = A,T,C or G
nggattgaccgcgtgaggaattcatcgaaggccttgcggagctggtggtcgtgggcctggctgacctcctgagcaagcacgacagtcagcacaagctcagcgaagtgatcacaggggacctgttgatcatcatggcccagatcatcgttgccatccagatggtgctagaggagaagttcgtctacaaacacaatgtgcacccactgcgggcagttggcactgagggcctctttggctttgtgatcctctccctgctgctggtgcccatgtactacatccccgccggctccttcagcggaaaccctcgtgggacactggaggatgcattggacgccttctgccaggtaaccaccctgaagagaaggggtggcatcaggaaccgcagggaaccaagcagcctttggtccagtgctgctccttggaacagttgagtgtggcctcaaaccattctcctgggtagctcagtcataaaa

SEQ ID NO: 25475 - DNA, 459 bp, Homo sapiens
agagaaaaatttgctcgcccgcgctgcagaattcggcacgagagacaaggaggatcagtgagaggcctcttccctctccacagagactggattgtcattgttccttcatttatatcgtagggcttaacatttcactcaaaaaaaagcccctctttttctaatccttaatctttgtttcaaggaaagccagtttttcttctaccacattttccaggatcgactttaagaaaaatgcaacatctattgaaaaaaagtggggtgtatgcatgtggtttaattccagattgcttttgggtttaagtgggatcaaatttcagtatatttctgtcttatgcgaaagaaatatattactaaaacgtcagtgagcaataatgtcagctgtcaagcactagatttatttctgcaggatatggagggcaatgaactgagtcaatatggcaaggtgtatgtgatctgagg

SEQ ID NO: 25476 - DNA, 494 bp, Homo sapiens
  misc_feature (1)...(494): n = A,T,C or G
tggagtaataatatgggaatataaagggaagaaanggtttgaccgcctgtggaattcggctcgagatcagncgctaccctgtgaacctgtggaggatctgaagtacctgtttaaaaggcatccaatagatagaatctatcaagctacaaatggctatgttgcctgaagccccagacatcatcctacaagaaataagtccagacttcttaatttccccctggatagagcaggccaccacgctgtaagaaagcacaaagtcttcatagagaaaccatctggagggacctcaagctcccagccaacagccagtcctgcaagaggagtgttcagctgagttcagtcccaacctgagttgcatcaactgagctttcagacatcatggagcaaagacaaagccatctctgctgggcctgaatcctaggccacataatacacaagcaaaacaaaatggctgttttccccccattgcagtttggggtgatactgtggcctgg

SEQ ID NO: 25477 - DNA, 463 bp, Homo sapiens
  misc_feature (1)...(463): n = A,T,C or G
aagcgggnnnnnaattgacatcgatggcatcgcagacgcgcctcggcgtncaacctggacctgggcgagcagcgggagcgctgggagacgttccagaagcggcagaagcttacctccgagggtgccgccaagctcctgctagacacctttgaataccagggcctggtgaagcacacaggaggctgccactgtggagcagttcgttttgaagtttgggcctcagcagacttgcatatatttgactgcaattgcagcatttgcaagaagaagcagaatagacacttcattgttccagcttctcgcttcaagctcctgaagggagctgagcacataacgacttacacgttcaatactcacaaagcccagcataccttctgtaagagatgtggcgttcagagcttctatactccacgatcaaaccccggaggcttcggaattgccccccactgcctggatgagggca

SEQ ID NO: 25478 - DNA, 464 bp, Homo sapiens
  misc_feature (1)...(464): n = A,T,C or G
agtgagannaaaattgggaatttcaggctgcgganatcccgccgaggacacatcgccatgtttcagggcttcaacggcattgtattttggactttgaccgtattttttttctcttaacctactgagactcttccttaagagcaggatctatagctttaaaatgtcttcttctatgggaaatttcctgccaagccagggcactaaattctttcatcattagagctttcctgaagtccggccatatactgagtacctgctctgagttctgggcagcttacaatatcttaaacagattttcagaaaaataatgcgactatattttctagtgtcaactgtatgcaaacagtgcggcaaataccttttaattagtcctccacccacctggagtacagggggtgcgtttattattctgatttcactgatgaggaaatgggctcagaaaggttaagccccttcctgaaatn

SEQ ID NO: 25479 - DNA, 474 bp, Homo sapiens
  misc_feature (1)...(474): n = A,T,C or G
ngtgggaatgcctgatcgcctgcggaattcggcacgaggaggcgccggtgtttcgagccgtggcaccggcatcggctgacactgctgcctccagctagttatttcgtcctcttccgttcttcacccctacaccttggaggtgaacttctcacctgagggctgtaaagactcgtttgaaaatggagagccaagaaccaacggaatcttctcagaatggcaaacagtatatcatttcagaggagttaatttcagaaggaaaatgggtcaagcttgaaaaaacaacgtacatggatcctactggtaaaactagaacttgggaatcagtgaaacgtacaaccaggaaagagcagactgcggatggtgtcgcggtcatccccgtgctgcagagaacacttcactatgagtgtatcgntctggtgaaacagttccgaccaccaatggggggctactgcatagagttccctgcaggtctcn

SEQ ID NO: 25480 - DNA, 464 bp, Homo sapiens
  misc_feature (1)...(464): n = A,T,C or G
nttgaccgtgtgaggacttcggcacgaggaggatgcgagctgtcaggaagcatgccaagggcctgcacatagtgcctcggctcctgtttgaggactggacttacgatgatttccggaacgtcttagacagtgaggatgagatagaggagctgagcaagaccgtggtccaggtggcaaagaaccagcatttcgatggcttcgtggtggaggtctggaaccagctgctaagccagaagcgcgtgaccgaccagctgggcatgttcacgcacaaggagtttgagcagctggcccccgtgctggatggtttcagcctcatgacctacgactactctacagcgcatcagcctggccctaatgcacccctgtcctgggttcgagcctgcgtccaggtcctggacccgaagtccaagtggcgaagcaaaatcctcctggggctcaacttctatggtatggactacgcgacc

SEQ ID NO: 25481 - DNA, 497 bp, Homo sapiens
gaaaaaatttgacccgctgcagaatttggcacgacgtgaaatgccatctctactaaaaatacaaaaattagccgggcatggtggcacgtgcctgtaatcccagctactcatgaggctgaggcaggagaatcgcttgaacctgggaggtggaagttgcagtgagctgagatcacgccattgcactccagcctgggcaacaagcgaaactctgtctcaaaaaaaaaaaaaaaagacagtaccatatgttcatgtcaagcacctctcataacagtcgagttccaaggaaaaattccagcgttttctgcattgggtgctgtgtcatctgaaatcggcacattccatggaggaaggagtcctgctttgttgcatgtatcctagggtttaatgtgggtaaatgagtcactctagcattggtagaaggctccctgagactcctgcagcagtcgaccaagcccaaggacataattgaatctggagagtcctggggccttgttttg

SEQ ID NO: 25482 - DNA, 500 bp, Homo sapiens
  misc_feature (1)...(500): n = A,T,C or G
aggttccnnnaaattgatcgcctgagngatcttgcacgagggcacgccacgtgggccctgaaggtcgcctgcagcaggtccctgagctgaagaaccggatcttctcggggggtctgagccccagcctgcggcgcgaggcctggaagttcctcctagggtacctcagctgggaaggcacagctgaggagcacaaggcccacatacgcaagaaaacggatgagtatttccgcatgaagctgcagtggaaatctgtgagccctgagcaggagcggagaaactcacttctgcatggataccgcagcctcatcgaaagggatgtgagccgcactgacaggaccaacaagttctacgagggtcccgagaacccggggctgggcctgctgaacgatatcctcctcacctactgcatgtatcacttcgacctcggctacgtccagggcatgagtgatcttctctccccgatcctctacgtcattcagaacgaggtggatgctttctgg

SEQ ID NO: 25483 - DNA, 477 bp, Homo sapiens
  misc_feature (1)...(477): n = A,T,C or G
ngcgtgattgacgcctattcgcccggctgcaagaattcggcacgagcctgaccctccctcccaggctcaaccgtcccccaacaaccgccagccttgtactgatgtcggctgcgagagcctgtgcttaagtaagaatcaggccttattggagacattcaagcaaaggttggacaactacttttccagaacagaaaggaaactcatgcatcagaaaaggtgactaataaaggtaccagaagaatatggctgcacaaataccagaatctgatcagataaaacagtttaaggaatttctggggacctacaataaacttacagagacctgctttttggactgtgttaaagacttcacaacaagagaagtaaaacctgaagagaccacctgttcagaacattgcttacagaaatatttaaaaatgacacaaagaatatccatgagatttcaggaatatcatattcagcagaatgaagccctgg

SEQ ID NO: 25484 - DNA, 528 bp, Homo sapiens
  misc_feature (1)...(528): n = A,T,C or G
tagtnccntcnnaagggtgncgccaggggnnnnnnnnaattgaacgccactagagagctttccgaagcagnccnagnnngattattctctcagatattgttcttctttaaaaatctttcccagaagctggttcctagaaaactcaataccatcatctcttatctctatacagggactaggtaataaaaccttcaaaggttgtcaaaggtcatcaagcagagttcatttatcctgtcacatgtatctgtttctatagcaatttagaaattgcaaatagttaacttttcatcatgtacaaagttaacattatcctatttccatacataccatggacggcggcgtggcctgagttgtcagtctttaatcctgagtcatgtggctctcttttcatctttgatgtcagttccaattatttggcatcaaaaaccttcatggtaggtagagttttatgtaaaagtggatctaaggttactttctttattaacatttcctagataactgaatcgagagacatactctgctactatg

SEQ ID NO: 25485 - DNA, 518 bp, Homo sapiens
  misc_feature (1)...(518): n = A,T,C or G
ggtcnntnnaagggtgncccaggggnnnnnnnaattgatcgccataggaagcgttccgagggacatcatagctttccctttgcaggattacggtgggatcatggcagggctgggctccgatccctggtggaagaaaaccctttacttgaccgggggagctttgctggccgcagctgcgtatctgctccacgaactcctggtcattaggaaacagcaagagattgactctaaagatgctattattttgcatcagtttgcaagacctaacaatggtgttccaagtttatctcctttctgtttaaagatggaaacttatttaaggatggctgacttaccgtatcagaactattttggtggaaaactctctgctcaagggaaaatgccttggattgaatataatcatgaaaaagtttctggcacagaattcataattgactttctggaagagaagctngggagtgaattaacanaaaccttggccctcatggaagagccatctncagagcggtgaccangan

SEQ ID NO: 25486 - DNA, 488 bp, Homo sapiens
  misc_feature (1)...(488): n = A,T,C or G
aggggagntgcagggnnnnnnnaactgggactgaccgcctgcggattccgacgagccgatggtcagatatgatttctgcaacccatcttgaccttgagtatgtgaaggggtactgtactttattcctgatacattttggtttccatgtaggtgttgagctcctggttttctgtgtttggatgatgaagatttggacccttccattcataatccctttctaagtgaagggagaggctggcttggctgttccttgttattccgaaagccctggtttggggcccatgttcacactggctctcagtctagtcaggtgcaatgttcttgagaggtggggacctaattattaccagagtagcagcaagagaggaaacgttgtgaattaagtattcaattaaaaggaaacatgatttctttnacaaagagaaactaaaaaaaaactcgggggggggcccgggcccaattccccctatagggagtcggattacaat

SEQ ID NO: 25487 - DNA, 498 bp, Homo sapiens
  misc_feature (1)...(498): n = A,T,C or G
aggggnangngnncgggnnnnnnnnttatgacccactggcggacttcgcgacgagacttagcataaatagttaaaatattaagagttgtaattaagggaaatttcagctcaatatgacttcaacagtttaaaaaatgtattatttcacataagaccatggagagaggaattggaagccccagaattgattgggtcagaaattgaaaatgatactatcattgacccaggtttgaatgtctctctccacagcattgacttcactaatggatgtgacctggttggcagcagtagcttgcacaacatgcttgtttgcagtgagtagtacagagaaggttttgctttcccagaaactctgaaaaaggtcatcaaacctaaatttccttagccttcttctttcatgagcaaatcactagcagatgattgctagcaaggtgttactattacaatgaacccctaagtgtcagagaaagagttagtttggggaaatatcctctccac

SEQ ID NO: 25488 - DNA, 471 bp, Homo sapiens
gcgcgttcgcccccatcgcccggctgcggaattcgcacgagatttccacagagttccacagatgaagaaataacatttgtatttcaagaaaaggaagatcttcctgttacagaggataactttgtgaaacttcaagttaaagcttgtgctctgagccagataaatacaaagcttctggcagaaatgaagatgaaaaaggatttatttcctgttgggagagaaattgctggaattgtattagatgttggaagcaaggtatcattctttcaaccagatgatgaagtagttggaattttgcccctggactctgaagaccctggactttgtgaagttgttagagtacatgagcattacttggttcataaaccagaaaaggtcacatggacggaagcagcaggaagcattcgggatggagtgcgtgcctatacagctctgcattatctttctcatctctctcctggaaaatcaggg

SEQ ID NO: 25489 - DNA, 504 bp, Homo sapiens
  misc_feature (1)...(504): n = A,T,C or G
ggggggggnaagggggggnnnnnnaatagtannnccttagacccgccctgcaggaattcggcacgagcctatcatgtacagcacggaccctgaaaatgggcacatcttcaactgcattcagcgagcccaccagaacacgttggaagtgtatcctcccttcttattttttctagctgttggaggtgtttaccacccgcgtatagcttctggcctgggcttggcctggattgttggacgagttctttatgcttatggctattacacgggagaacccagcaagcgtagtcgaggagccctggggtccatcgccctcctgggcttggtgggcacaactgtgtgctctgctttccagcatcttggttgggttaaaagtggcttgggcagtggacccaaatgctgccattaaagaattataggggtttaaaaactctcattcattttaaatgacttacctttatttccagttacattntttttctaaatataataaaaacttacctggca

SEQ ID NO: 25490 - DNA, 507 bp, Homo sapiens
  misc_feature (1)...(507): n = A,T,C or G
aggggnnatgctgnacgggnnnnnnnnnnaattgatnngactgacgcgctctgcaggatatgcgtttgagtctgtcgctcctggctctcccgacacaacagcggcgcccacctgcccgcaacggactcccaggagcctcgagctcctcatttccaaagctgaactgccccgtgtctgattccgatttctcttgagcgcgtttcggagccggcccagaacagagggaagccagacacaccatacccggcccaacagtggcagggcggctgcgggtgctggtcaagctgggtcacccggcactgagtgacgatcagcaaatactcagtggacgaaatatttgcagtgcagtgaggtgaggggcataaccgcggagcgtattctaagagatgagagagactggggattatgccacgcttgaagggaagaatggtttgagcaccgaggacaagaattaattcctcaggcctgggttccagccttgtgcggctatcacgtgcttgaaacctg

SEQ ID NO: 25491 - DNA, 476 bp, Homo sapiens
  misc_feature (1)...(476): n = A,T,C or G
ntttgaaccctcgacngccctgcaggaattcggcacgagtctcagccccgcgtacggcctttcacgagtcttcaagccttcaggctttcttctagtcaagatgagtgataaaccagacttgtcggaagtggagaagtttgacaggtcaaaactgaagaaaactaatactgaagaaaaaaatactcttccctcaaaggaaactatccagcaggagaaagagtgtgttcaaacatcataaaatggggatctcctccaaagagcagatttcagcattgcctgacagtcttggttttaggcttgtttttttgtaaacctgtgtgtttgtagagatttcagacatcttctgatttcttctcacctatattccctggttaagaggtcaggggtagtgaatgtttccttaagttcctttttaaacttcccattggtatgtaaattccaaatggcagatgctgtcaataaccttgccatggatg

SEQ ID NO: 25492 - DNA, 445 bp, Homo sapiens
  misc_feature (1)...(445): n = A,T,C or G
nattgccctgcctgangaattcggcacgaggaaggaagggcagagcagccctcctggagctgttccagtggtggattggcaggaccgggtgcctacccggtactccttaccaaaggagcccctggtagtgcccacctagcccaggacaaggagtggaacgggagctgcagctgcagtggtcacgaaggcagcctggaggaggtggccatggaggatagccttcgttatcgtcagcctctggtgagaagcagcagcatccttccagagagtcacttctgatccccaagtttccaaggaaacaagactctaggtccactttgccgtccagacctgaagcggacccttcatacacagccctgtgatacttggagcctgcttgcctcanaacactgcttgctttacacttcacctaactccacccttcccttcaattctttaataaccn

SEQ ID NO: 25493 - DNA, 461 bp, Homo sapiens
  misc_feature (1)...(461): n = A,T,C or G
nttcccgcttggaatcgcacgagctaggtgcagtgcccagggggcggngtgcagaagaatccgagtgtttgccaggcttaaggagaggagaaactgagaaatgaatgctgagacccccggagcaggggtctgagccacagccgtgctcgcccacaaactgatttctcacggcgtgtcaccccaccagggcgcaagcctcactattacttgaactttccaaaacctaaagaggaaaagtgcaatgcgtgttgtacatacagaggtaactatcaatatttaagtttgttgctgtcaagattttttttgtaacttcaaatatagagatatttttgtacgttatatattgtattaagggcattttaaaagcaattatattgtcctccccctattttaagacgtgaatgtctcagcgaggtgtaaagttgttcgccgcgtggaatgtgagtgtgtttgtgtgcatg

SEQ ID NO: 25494 - DNA, 503 bp, Homo sapiens
  misc_feature (1)...(503): n = A,T,C or G
agtatgtcntggcnngnnnnnnnnnnnaattgatncgcctgcaggaattcggcacgagctgtgcaggagatgactttcccagctttgctggcttcagaagcctttgtacataagagatgctgctacccaagcaccaaagacctgttaagcatgtgcactactgaccacgactctggtctttcctgttgttggcccctctggggctctacagaaacaggctgggttccaggagcccatctccccgctgtctccccctgccccgagtctggaagagggcaaggacacttccattcctctgtaccatggagtcctgcagccccttaacccctgcgtggcaactgtgtacagcttacccctgcctccagttgcaccacttctagatgtgcctttaaaagatctaactatgggatgggagaacttgagggtgatcgggaacctcccctgctgagggtggtgtcagggttccgtgactccagtgggccagtggtagcctgtcccagaca

SEQ ID NO: 25495 - DNA, 469 bp, Homo sapiens
gagtgttcccgctgctcgctcgcgtcgatttggccgcctccctaccgctccaagcccagccctcagccatggcatgccccctggatcaggccattggcctcctcgtggccatcttacacaagtactccggcagggagggtgacaagcacaccctgagcaagaaggagctgaaggagctgatccagaaggagctcaccattggctcgaagctgcaggatgctgaaattgcaaggctgatggaagacttggaccggaacaaggaccaagaggtgaacttccaggagtatgtcaccttcctgggggccttggctttgatctacaatgaagccctcaagggctgaaaataaatatggaagatggagacaccctctgggggtgctctctgagtcaaatccagtggtgggtaattgtacaataaattttttttggtcaaatttaaaaaaaaaaaaaaaaacccggcgcgaggggg

SEQ ID NO: 25496 - DNA, 475 bp, Homo sapiens
  misc_feature (1)...(475): n = A,T,C or G
ngagtgttcgncgctgttggcacggctgcaggaattcggcacgagtataagtcaagcaagaagatgggcagtccctggaagagtattttgatgggacaggagtgggagagctcgtgggtttacattgctctcaactgtcacattgagcatgcttggcctctagtgtgttgataagcattggaagagtctgcctactcagcagcattgtgcctggagtggcagacttttggaatgggggaagcaaatttgagcagaggaaactgtcgttagaaactagtttagaggcagtggttaaaaatgcagcctatgtgtgagggttagcagaaggcctaccattttgttagatgaatggggtttgcttttctcttgggtgtatcaggacccaaagatgtaagaaccccatggcttcctagctgagcacagcatttttctttgtctcttgcaaattgtgaggatatttccaatgggaatacta

SEQ ID NO: 25497 - DNA, 482 bp, Homo sapiens
  misc_feature (1)...(482): n = A,T,C or G
ntttgacncccctnnnnnannnnnnnttttgatccgcgctgcaggaattcggcacgagagattgccgagacctgaagagggtaagtgacttgcccaaggtcagagccacttggtgacagagccaggatgagaacaaagattccatttgcaccatgccacactgctgtgttcacatgtgccttccgtccagagcagtcccgggcaggggtgaaactccagcaggtggctgggctggaaaggagggcagggctacatcctggctcggtgggatctgacgacctgaaagtccagctcccaagttttccttctcctaccccagcctcgtgtacccatcttcccaccctctatgttcttacccctccctacactcagtgtttgttcccacttactctgtcctggggcctctgggattagcacaggttattcataaccttgaaaaanaaaaaaaaaaaaaaaaaaaaaaaaaaaaaaaaaaaaaaang

SEQ ID NO: 25498 - DNA, 515 bp, Homo sapiens
  misc_feature (1)...(515): n = A,T,C or G
gaatataggggaatanngnnnntttgatgccttgngttttggcacgacagtcacttcccctctttgtctcagactcttcattcataaaatacaaatatcaatcccttcctgccaggctgttttcagagtcaaggatatgtatataaacactgaccagtgtttctggtacatggaaaacactctggaaatgccaattctgtgaacactcagtaagggcttgaggttctgttcatcgtctgagaccacaaagaatggaaatagaagggttccaggctggttcatagcacaggccattctccatttaaattttaaattaaaacaaacatatgaatgtaaaaactgtcaacactgcacaaataacttgaaatcttagaaacataaatattgaatgaactgaatgaatacagaaaaagtattatttgaaaagtgaggtggaatgtcagacttcaataatgtaaggtataatttaatgctgatacaaagttagtaccattaagtataaaaaaaaagaaccn

SEQ ID NO: 25499 - DNA, 475 bp, Homo sapiens
  misc_feature (1)...(475): n = A,T,C or G
ggaggggnttttnaataganctacagtgtcaattcggcacgagagctatagcacttagcacctctgatcttgtttttcctcgtccgtaaaaggagattaacagtgcttttctgcccacctcttggggagaagggaataatttagttggtaaaaaaaaaacttttgaataataagcaactctgtctttatataagtagccaagcattattaattatccaccccatatcactggtagatacctgtattcaagctatgtggacataaaagcagtcacattttagaagtcatgaagttggtgctaataaacctaatctacagaaaaactcttgaaagcacttgagcatttgttctgtgaatagaaaggtttgagattcagagcaagttcagagttggatggtctaagaatggaaaagccctccattccattagaagagccagggagcaatttctggttatggaaccaagngctctcagg

SEQ ID NO: 25500 - DNA, 497 bp, Homo sapiens
  misc_feature (1)...(497): n = A,T,C or G
aggggnnagggncagggnnnnnnnnaatcgaccgcatgaaggactttgcgacgagcgtctatctgcccactcgggtctgcagacctggttcccactgaggccctttgcaggatggaactacggggcttacaggagcttttgtgtgcctggtagaaactatttctgttccagtcacattgccatcactcttggactgcctgccaccgcggaggaggctggtgacaggccaaaggccagtggaagaaacaccctttcatctcaaagtccactgtggcactggccacccctccccagtacaggggtgctgcaagtggcagagtgaatgtcccccatcatgtggtccaactctcctggcctggccatctccctccccataaacagtgtgcatgggttattttggagtgtaggtgacttgtttactcattgaagcagatttctgcttgcttttatttctataggaatagaggaagatatgtcagatgcgtgcccagctcttc

SEQ ID NO: 25501 - DNA, 460 bp, Homo sapiens
  misc_feature (1)...(460): n = A,T,C or G
tgcgagaaaaanttttgttcgcctgcggtaattccgcacgagcagcgacagcagcagcagcagccagtattcgggaaaggcagacaggtactcatttatgacagatttggccaagatataatctctcctctgctatctgtgagggagctaagagacatgggaatcactctgcatctgcttttacactctgatcgagatcctattccagatgttcctgcagtatactttgtaatgccaactgaagaaaatattgacagaatgtgccaggatcttcgaaatcaactatatgaatcatattatttaaattttatttctgctatttcaagaagtaaactggaagatattgcaaatgcagcgttagcagctagtgcagtaacacaagtagccaaggtttttgaccaatatctcaattttattactttggaagatgatatgtttgtattatgtaatcaaaataagg

SEQ ID NO: 25502 - DNA, 468 bp, Homo sapiens
  misc_feature (1)...(468): n = A,T,C or G
ntttgacctggctgcacgaattcggcacgaggatggggcagagctgacggcagagttcctctacgacgaggtgcaccccaagcaacacgccttcaagcaggccttcgccaagcccaagggcccagggggcaagcggggccataagcgcctcatccgcggcccgggtgaaaatggggatgacagctaggaggctggagcagggccggccacgtgtggactgtggggctgcccaccttccgctccctgccaccatcctccttcctgggctccaggaaagtgtttctgggaggtcaggagggctggcagctgaacgcacttgcagcgtccgagggccaccgggctggcattttgtgacccttccctgttgctgtccctgcatctcgtctgtgtgcccanggtgtccggggaccctgcctggctggcttaanggggctgggtcagggngcctgcatgaacctgggcctccgg

SEQ ID NO: 25503 - DNA, 497 bp, Homo sapiens
  misc_feature (1)...(497): n = A,T,C or G
gaaaaataaaatttgcaccgcctgcattagttggcccgagagcactaaaaccaaatgagctatcaagccatgtaaagacacggaggaaatttaagtgcatattgccaagtgaaagaagccaatctgaaaaggctacatactatatgattccaactatatgccattccggaaaaggcaaaactagggaaacagtaaaaagatgagtagtttccaggagttagtggggagacagagataaataggtgaagcacaggggatatttagtgcatcggaactattttgtatgatactacaatggtggatacatgtcattagatatttatcaaaatccataagatgaccaacaccaagagtgaagcctcatgcaaactatggaccttgggtgataatgattcattataacaaatgtgccactctggtgtggaatgttgatagtgggagaggctaagcagttgtaggggcagggaatatatgggcactctatttcctgatcaatn

SEQ ID NO: 25504 - DNA, 469 bp, Homo sapiens
  misc_feature (1)...(469): n = A,T,C or G
attggccactcgttccgngctgcaggaattcggcacgaggagagagagagagagagagagagagagagagagagagagagagagagagagagagagagagagagagagagagagagcgcgcgcgccgaaatatatatcacacatatagaccccggccaccgcgagtttttttttttttttttttttttttttttaaaaaaaaaagaagggggtttttggtcccaaccccccccgggggggggggggcccaaaaaaaaaaaacatctctggaaggggggaaaggggttttttttaaagggggggggaaaaaaacccccttaaaaaacccgggggggtggggggaacccccccaaaaaaaaaacgggggggggggaccccccccaagagatccgcccccccccccacggccccttttttgagggggggggggggggggggacaccaaaaaaaaaaaagggggggggggggc

SEQ ID NO: 25505 - DNA, 494 bp, Homo sapiens
  misc_feature (1)...(494): n = A,T,C or G
ggaggccgggnnnnnnnnccttgatcgctcgtagaacttgcacgaggggaaaccgngagtcgggcaggtggcgtaacccagaaagggaaggagagccggattgattggggtgagagaggaaggaagcacgccaagttaggcctgggagaactgagggacctgaggagggaggagggagaccaacacagggtgggaaggcggaaatggccaaaccccaggcatcaggtctgtccagaggctgacgtagacagtgaagggtgaagggtaggttttaggagtagggggagttatgattatttggttacattttgggattatttggtctcacaggtagaagggagcctgctggtctctgtgtaacggatggcttaaaagcaaggttgtctgcgtcttggattactgtctgccattcagcctttgccaaaaaatttggcactgatctgcacatttttatagtcatttaaaattgtatgactctgtcaaatgatttaagn

SEQ ID NO: 25506 - DNA, 478 bp, Homo sapiens
  misc_feature (1)...(478): n = A,T,C or G
nattggagcgccnatcgcaacgcctgcaggaattcggcacgaggacatactcaggaacaaaggctgctccagctctaccagtgtcctcctcacccttgacaacaacgtggtgaatggttccagccctgccatccgcactaactacattggccacaagacaaaggacttgcaagccatctgcggcatctcctgtgatgagctgtccagcatggtcctggaactcaggggcctgcgcaccattgtgaccacgctgcacgacagcatccgcaaagtgactgaagagaacaaagagatggccaatgagctgaggcggcctcccctatgctatcacaacggaggtcagtacagaaataacgaggaatggactgctgatagctgcactgagtgtcactgtcagaactcagataccatctgcaaaaaggtgacctgccccatcatgccctgctccaatgccacagatcctgatggagaatgctgt

SEQ ID NO: 25507 - DNA, 463 bp, Homo sapiens
  misc_feature (1)...(463): n = A,T,C or G
aggcgtgnnaannanaacctgaattcgctgcagtattcggaacgagccggagcagggtgccctgcaactggaagaaggagtttggagccgactgcaagtacaactttgagaactgtggagcgtgagatgggggcacatgcaccaaagtccgacaaggcaccctgaagaacgcgcgctacaatgctgactgccaggagaccatccgggtgaccaatccctgcacccccaagaccaaagcaaaggccaaagccaagaaagggaagggaaaggactagacgccaagcctggatgccaaggagcccctggtgtcacatggggcctggcccacgccctccctctcccaggcccgagatgtgacccaccagtgccttctgtctgctcgttagctataatcaatcatgccctgccttgtgcctctcactccccatccccacccctaagtgcccaaagtggagagggacat

SEQ ID NO: 25508 - DNA, 494 bp, Homo sapiens
agaaaaaaaaaattcgcccgcctgcgtagttcggcacgagatttcctcgtctgtaaacattaagtatctacattcactaaaagtagttctgaatgaatgttatttaatggtgccaatgatgttggaggatacctgtggaaacctggattagaagcatgtgctgctctcagacctggcctacagagaagaactgacacagacttccttagatgtgttgtcttcctgtcactggtgcattccttatcaatgtgggtggctccgcactcagccctgtgatcacctgagtaatgggaagtcagtgagtgcagtgcctgcagagggagcgtgcttgccaatcaccatcacccacttttgcacttgtgccagaggatgtgcccaagccaacctgagaaagatgaaagacacatggctcagacactccattaccccatcccagggccattaacctgccaggcataatccaaaattcttatcaagttatcttcaatctatgc

SEQ ID NO: 25509 - DNA, 476 bp, Homo sapiens
  misc_feature (1)...(476): n = A,T,C or G
aggggggngtnnttttgatactgcatggctgtcagtgagagtggagcctccgtttcttttccctcttctatccttgttacttgaacaatctcagtctctaagtggtgggtggggacatgaagaggtgtgggtccaggttaggcaggagagagaacttctttggtctcggagtttggggtctcaagaattcaagtagccccatctctctctcgggcaagcccaaagctcaggtcccatacgctacccttagatcctatccccagggctagggtgaaccatgccaaaggaaggggccagcttctctgtgtgtgtgtgtagcctgtctcctagtctgcctatgtctttctctgctatatgtttctgtcctgctgtctgtcaaaagtctcacagagagagggcctcaaggagctgctgaggggtgctgagcctggctcanggagctggngacccctcccttcaacacacatactcacagn

SEQ ID NO: 25510 - DNA, 478 bp, Homo sapiens
  misc_feature (1)...(478): n = A,T,C or G
atttgaaacatttataantttgaccccgctgcagtttgcctacaagagtccatttatattcacaacattaaagacatgaagctgttgaagaccctcctggatattcctgcaaacccaacaggtctatgtgctctctctatcaaccattccaattcttacctggcctatcctggaagcctgacttcaggggagattgtgctttatgatggaaactccctgaaaacagtctgcactattgctgcccatgagggaacactagctgccatcaccttcaatgcctcaggctccaaactagcaagtgcgtctgaaaaaggcacagtcatccgggtgttctctgtccctgatgggcaaaagctctatgagttccggagagggatgaaaaggtatgtgacaatcagctctctagtgttcagtatggattcacaattcctctgcgcctccagtaacaccgagacggtacacatcttcaagctggaac

SEQ ID NO: 25511 - DNA, 471 bp, Homo sapiens
  misc_feature (1)...(471): n = A,T,C or G
nattgagcgcctttggaattcggcacgagtggatgcctaaggagtggccagtcatactcctggctgaccactgccaggcaccgtggttttcctcactgaactcaaggagtcaccctccgtggggaggccacactcacagctccaggcctgccatttagcccttggggcttggctgtaaagttgcccaagaggattacaggagctgccagccaagtttaatttggccaccttagagaactgcagcaaggccctatcagcttcccattagacaaacaactgcatttaaattaaataaagtttgcacctctagggagtgctgacctgaaaataagaaccttctgtctgtgattatagagtacacttgcttttattaattgctgattcttagtttacaaaaaaaaaaattagaaaagcattaccatttactttccaaggggcaagagattctctacaatacccttcccccaaccc

SEQ ID NO: 25512 - DNA, 508 bp, Homo sapiens
  misc_feature (1)...(508): n = A,T,C or G
naattggatcgcgcccactgcagnnganattcgcgcactttagtgtagagcaggatgagagacacagaggaccatgacgagatagattagcagacgagaacaccaccggagagcactcatgagagagcagagagaaccgatcctcagcagcgccagcaggcgtcagaggcggacgccggagcagcaaccttccgggcagacgaccatcagcatatccgctacaacccgctgcaggatgagtgggtgctggtgtcagctcaccgcatgaagcggccctggcagggtcaagtggagccccagcttctgaagacagtgccccgccatgaccctctcaaccctctgtgtcctggggccatccgagccaacggagaggtgaatccccagtacgatagcaccttcctgtttgacaacgacttcccagctctgcagcctgatgcccccagtccgggacccagtgatcatccccttttccaagcaaagtctgctcgaggagtctgtaaggtcatgn

SEQ ID NO: 25513 - DNA, 486 bp, Homo sapiens
  misc_feature (1)...(486): n = A,T,C or G
naattggatgngctnctcngnaannnccnnnattngacccgcgctgcaggaattcggcacgagatactattcaccaacccttgaccagtggaccccaattgccgccatgttaagaggccaaagtgatgttggagttgccgtctttgaaaataaaatctatgttgttggtggatattcttggaataatcgttgtatggtagaaattgtccagaaatatgacccagaaaaagatgagtggcataaagtttttgatcttccagagtcacttggtggcattcgagcctgtacactcacagtttttccacctgaagaaaaccctgggtcaccttctagagaatcacctctttcagcaccttcagatcattcttaggtctaaggtgtaacacctttgcagtacgtcatgggtgatctaatacttccccttcagttgtatcttcttacagtgattggtacagttattagatataaaggtaactgatgttattc

SEQ ID NO: 25514 - DNA, 457 bp, Homo sapiens
  misc_feature (1)...(457): n = A,T,C or G
ggacccnnnnagacgncaatgacngcctgaatgatgccatagaccaactacctcaaaatcctctggaggaaaaaggactttcatccactgtgtttctttctgcctgaactatcccttctttgtttcccggcatacccctagggcccagttatgtgccacctcctctaggaagccttcttcaaaccttttcctctgggcccgaatgcctgttttatagttcatttactcattaacatctaattaaataagtgactgtactgaacactgttaggcccaggaaatattgcaccaaacagaactgacaaggtctccacgttcatggaacttacattctagtgaagggtgatagacatagaaaagaaaaagagaaggagaaaaattaacagggattgaaaggtgatgaagtgaagagttaataagctgtagggacactatttaaattggatcatagaaaaac

SEQ ID NO: 25515 - DNA, 469 bp, Homo sapiens
  misc_feature (1)...(469): n = A,T,C or G
atggcccatcgactccccgctgcaggaattcggcacgaggctaactgaaatgatggcgactggaacgccagagtctcaagcgcggttcggtcagtccgtgaaggggcttctcacggagaaggtgaccacctgtggtactgacgtaatcgcgctcaccaagcaggtgctgaaaggctcccggagctccgagctgctaggtcaggcagctcgaaacatggtactccaggaagatgccatcttgcactcagaagatagtttaaggaagatggcaataataacaacacatcttcaataccagcaagaagctattcagaagaatgttgaacagtcatcggatctacaggaccagttgaatcatctgttgaaatagaatgacatgtaagagtgctgtaggactcctttgcctaatgctgaggagtaaataccttacacagctgtcctctgggtttggttttctattttcttctcn

SEQ ID NO: 25516 - DNA, 487 bp, Homo sapiens
  misc_feature (1)...(487): n = A,T,C or G
ggatagganccgcgctgcangannnccnatagaccccgcgctgcaggaattcggcacgaggtaactagccaatatcacagcttttgaaaaattaaaaaatcacactatattaatatttcatatttgccaacagaaacatggcagataggtatcaatatgttttcaatgcctgatgacctataagaagaaagtattgaaaagaagagagattagaactgttagaaggagttgaaattttctaaaagacatagtatttagtttataattaaatgcattcttgaagtccagtgtgaattttattaatgctatcatctcgaccaagctcaaagcctacttattagaaacaatgaagttcacaataggtcataaggtctcttccttttctaaaattgaaagacaagaaatttagtgccaatattgtacagacagaaattccatgtatgagtctcaacaaagactacctttggctaaatgtctagaagcagag

SEQ ID NO: 25517 - DNA, 487 bp, Homo sapiens
  misc_feature (1)...(487): n = A,T,C or G
aggggnagatnccggnnnnnnnnaatcgancatgacggcctgcggaatcgtatgagcgtatcataccgccatctagagtagggccctgcctccacactcccctataccgagagccagtacccctctctgcccatcgcacaacaacgtcaagactgtgaaaaatggcagggggtctcatgaaggcacccccattcccaccctgtgccttccttgcgggcagagagggagagaagggctccccagatctacacccctccctcctgcatctcccctggagtgttcacttgcaagctgccaaaacatgatggcctctggtgttctgttgaactccttgaacgtttagacccaaaaaggagtctatacctggacacccacctccccagacacaactcccttccccatgcacacatctggaaggagctggcccctcagtcccttcctactccccaacaaggggctcactatccccaaagaaggagctgttggg

SEQ ID NO: 25518 - DNA, 332 bp, Homo sapiens
  misc_feature (1)...(332): n = A,T,C or G
acgctgtctatcaaggatggagtgatggtgctcagcgcaacccaccggtacaagaagaagtacgtcaccaccttgttatacaagcccatatgaagagctgggggcggatggtggcccaggagacagcacaccaccaggctccacacgtgcatgctttccccaagagggaatggactgtacattgctcatttcacactcttcagaagacatttcatacctgccctggtcctgcttgaaggtttgtccaggcagagcagctcctgcagcgcctcggtctgtgacagtcctcctagcacccccatggctttgagcctcggggactcatcaagtcn

SEQ ID NO: 25519 - DNA, 464 bp, Homo sapiens
atgtgccccgcgctgcaggaattcggcacgagtgtaagactaggttttggctaaggtgagataaaacatagtccctggtgcctcttaggggccagagcgggcaggaggttggataacaaaaatagagcatcagcaaccctttccaggtagaaattccagcgggagttcaggttcccaagcaatttcacgtacatggctggtaagtgactgatctttccccccgcttggtagcctcacagatgagtcttggatgcattcacagtcatttctggtctgtgcaccaaaggatgcattcagtgacctatgaaaaaccctactgaagggtccagagaccctggtgctcaccttagcctttgtctttgagcaaataacttaccttcttccttcttatgcctgggttttctcacacttaaatctgtactactgtttgccaatgtctgatgtgtgatccctgttcacaagaa

SEQ ID NO: 25520 - DNA, 472 bp, Homo sapiens
  misc_feature (1)...(472): n = A,T,C or G
gatgtccnnaggtgcccgtaccgaggctctacagataccctaccggannncgctgcatgcgcttgttcctccaggctaccctgagcctttcctggcccagtcctcaccacagtccacagaagccacaaacaggctcatagccaagctgtgacctggtcctgaccatctggggcacgagggcctgggctggccctgctaggctggagaagccctgtcacctgtgcacatcttgctggtggaggcatggcccactgtgcaggaccccaccctcgggggctttcggctcccacactgatgattctccccagcatccacaccgggcctggcgctacgtactcaggcccccagctctcgtgtcctggaggaagagctagctccagacatgggttgatcacctagaggagctctggctaaggcacagttttctagaaataaaacatttattcggtttttaaaacaaaaaaaaaaaaaa

SEQ ID NO: 25521 - DNA, 493 bp, Homo sapiens
  misc_feature (1)...(493): n = A,T,C or G
nagaggggaattgancatcgcatcggctgaggcacagtccgcaccgccaggcacatacatcatatgcctgcagaatgatcacaaggcagtgatgaagcaggtggaggagagccctgcaccagctgcacgctcgcgacatggagaagcaggcccgggacatggctgatgcccacaaagaggccatgagccgcaaactgggtcagagtgagagccagggccctgcacgggccttcgccaaagtgaacagcatcagccccggctccccagccagcatcgcgggtctgcaagtggatgatgagattgtggagttcggctctgtgaacacccagaacttccagtcactgcataacattggcagtgtggtgcagcacagtgaggggaagcccctgaatgtgacagtgatccgcaggggggaaaaacaccagcttagacttgttccaacacgctgggcaggaaaaggactgctgggctgcaacattattcctctgcaaag

SEQ ID NO: 25522 - DNA, 479 bp, Homo sapiens
ccgcgccccaattgatcatcttaggacttcggcacgagaatgtcggaaatggctgagttgtccgagctgtatgaagagagcagtgacctgcagatggatgtgatgcctggcgagggtgaccttccgcagatggaggtaggcagcgggagccgggagctatccctgcgtccctcccgcagcggggcccaacagctcgaggaggaaggcccaatggaggaggaggaggcccagccaatggcggcgccagaggggaaacggagccttgctaacgggcccaacgctggggagcagccaggccaggtggcgggcgcagacttcgagagcgaggacgagggcgaggaatttgatgactgggaggacgactacgactatcccgaagaggagcagctcagtggtgccggctacagagtatcagccgctcttgaagaagccgacaagatgtttctgagaacaagagaaccagccctggatggcggggt

SEQ ID NO: 25523 - DNA, 466 bp, Homo sapiens
ttttgaccctcgctgcaggaattcggcacgagaccaggtgcgagtgccaggatggggagaaccagagcgtgtaccataacctgtgccgggaggcagagggcaagccactgtgcagcgggcgtggggactgcagctgcaaccagtgctcctgcttcgagagcgagtttggcaagatctatgggcctttctgtgagtgcgacaacttctcctgtgccaggaacaagggagtcctctgctcaggccatggcgagtgtcactgcggggaatgcaagtgccatgcaggttacatcggggacaactgtaactgctcgacagacatcagcacatgccggggcagagatggccagatctgcagcgagcgtgggcactgtctctgtgggcagtgccaatgcacggagccgggggcctttggggagatgtgtgagaagtgccccacctgcccggatgcatgcagcaccaagagaga

SEQ ID NO: 25524 - DNA, 469 bp, Homo sapiens
  misc_feature (1)...(469): n = A,T,C or G
ntttgcccatcgcccccgcgctgcaggaattcggcacgaggattggtggatatgttttgctttgtttaaagccgtgggaaaatgacacaactttacctctgtgggagatgcaacactgagagccaaggggtgggagttgggataatttttatataaaagaaggtttttcactttgaattgctaaaagtgagatttttcctatgtgcagccactcctctcatttctaaaatagggacgagaccaggcacggcggctcatgcctgtaatcccagcactttgagaggccgaggcacgcggctcacgaggtcaggagatcgagactatcctggctatcacggaaaaaccctgtttctactagaagtacaaataattatctgggcgtggtgatgggcacctgtagtgccagctactcgggaggctgaagcaggagaaaggcatgaatgcatgatgcagagcttgcattgagctg

SEQ ID NO: 25525 - DNA, 484 bp, Homo sapiens
  misc_feature (1)...(484): n = A,T,C or G
cattgcccgcctgcangaattcggcacgagtgaaactgaagaaactcgcaaattcttgatgatatctgtgtggcaaaagctgttgaatgccctccacctcggaccacagccaggctccttgacaagcttgttggggagttcctggaagtgacttgcatcaatcctacattcatctgtgatcacccacagataatgagccctttggctaaatggcaccgctctaaagagggtctgactgagcgctttgagctgtttgtcatgaagaaagagatatgcaatgcgtatactgagctgaatgatcccatgcggcagcggcagctttttgaagaacaggccaaggccaaggctgcaggtgatgatgaggccatgttcatagatgaaaacttctgtactgccctggaatatgggctgccccccacagctggctggggcatgggcattgatcgagtcgccatgtttctcacggactccaacaacatncaag

SEQ ID NO: 25526 - DNA, 467 bp, Homo sapiens
  misc_feature (1)...(467): n = A,T,C or G
ntttcccccgtgctgcaggaattcggcacgagcaggcccagaaagaagaaaacccgaagaaacacagaagccatccttacaagcacagcttccgcgctcgaggttccgccagttactccccgccacgaaagcggagcagccaggacaagtacgaaaagcggtccaaccggcggtgaggctggaaccagggccagccagccctgcgggcctccgtgctccttcggggtgcggtgtgcggagaaggcctgagctggcagggcaaacacctgagagtgactttgacattaggtcctttgttgtttttaaagaggctgctggccacaggcaaaaaaaatgacctagcaactcttgaggaaacaagtgcaaaggaggatgtcttgggaagtttaagctacttctgcagtgtagtagacttacataatggtgtttatcttggtttggagtgtgtttcanaataaacatgtcta

SEQ ID NO: 25527 - DNA, 474 bp, Homo sapiens
  misc_feature (1)...(474): n = A,T,C or G
attagacagcctttgcgccgcctgcaggaattcggcacgagtcacaacattctgaaattttttggttattgtaatgatgttgatcgggagttgagaaaatgcctgaagaatgagggtcttgctctgtcacctaagctggagtgcagtacggtgatcgtaactcacggaagcctcaaactcaagtgatcctcccacctcagcctcctgagtagctaggacgacagtacgtagaaaacaggaccaagagcagggagcatggcattgcaatgcgaaagaaactttttaatcctccagaggaatccgaaaaataaattgtattttcactcgatgccttggctgagagaagacctaaagactctgggttgatacctgaaagaatcctgtcttatttggtctccataatcctttgaatggaaagtgacctgtgagagattgaaccatggagaaatatgaaaaccctggattctgagtatn

SEQ ID NO: 25528 - DNA, 471 bp, Homo sapiens
attagaccggcttcaggcgggatccaagcaaaggggtctccgggccacagtgtagccgctgttctgcgccttgctgctgtcactcggtcgcttcgtccggggcgacggcgtgggaggagaccccgcggtggcgttgccacatcgccgtttcgagtacaaatacagcttcaaggggccgcacctggtgcagagcgacgggaccgtgcccttctgggcccacgcggggaatgctattccaagttcagatcaaattcgagtagcaccatctttaaaaagccaaagaggctcagtgtggacaaagacaaaagcggcctttgagaactgggaagttgaggtgacatttcgagtgactggaagaggtcgaattggagctgatggcctatcaatttggtatgcagaaaatcaaggcttggagggccctgtgtttggatcaactgatctgtggaatggtgttggaatattttttgattc

SEQ ID NO: 25529 - DNA, 474 bp, Homo sapiens
  misc_feature (1)...(474): n = A,T,C or G
ntttgacngcctgcagaattcgttggagcacatgtccacattattttttatttctccagtgatcagaaacattgatatcaatccctattaaattagtggggggaatattaactttatctacagtgtattactgtatattaaactgaaatagtccattaaaggatttttttataaatttattttggattaaaaatatcaacaccaataagtttttagaccaagttgtaatttttccaatatagagtctttgcatcacactgaggcatcttgcacagctgcagttaaggtgagaaagaatgctctgtgtgaagacagtgtacacaatgggttccgggnnnnntgaccttgtgcagtatcctttatttctgtgctgttctctcctgagcatgaaaaatgatcattatccaatttgtatttccttggtacatattttaaaaacaacacagtcattgactttacaattcagtaatgaag

SEQ ID NO: 25530 - DNA, 462 bp, Homo sapiens
  misc_feature (1)...(462): n = A,T,C or G
tgaagaaaaaaattagannccttgccccgcctgcaggaattcggcacgaggaagaaagagaggatcctgactactgagagaaattgctgcggcaccattatgagcagcagcaagaagatctagcccgaaatctgggcaaaggaaaaagaatccgtaaacaggtcaactacaatgatggctcccaggaggaccgagattggcaggacgaccagtccgacaaccagtccgattactcagtggcttcagaggaaggtgatgaagactttgatgaacgttcagaagctccccgtaggcccagtcgtaagggcctgcggaatgataaagataagccattgcctcctctgttggcccgtgttggtgggaatattgaagtacttggttttaatgctcgtcagcgaaaagcctttcttaatgcaattatgcgatatggtatgccacctcaggatgcttttactacccagg

SEQ ID NO: 25531 - DNA, 469 bp, Homo sapiens
cttggcacctctgcgccgcgctgcaggaattcggcacgagcttcaatctagttaccaccagcttggctagaattttattgaacgcaacttgctagttatgacagagaggaccagggtgagaactaatgctcaagagagcaagattctgtaatcctcttgccctctcacatcacaaattctgatatgccaaacatttggcccaatgagaatgactgatagacttgctgatgtgcatgtggggggatgaggtgtgtatatgcctttctcctgactggccattcagtgttcaggctgtcattcaaattggataggagaaagttggtgaggaaggaatggagagagcaggatccctggactccctggtccccaaactccttgactgtcacttgtaattggatataatttttgtgtttcttgctccatttcctcatgctgtcatccttaaagtccatctgggaaggggaaaatg

SEQ ID NO: 25532 - DNA, 468 bp, Homo sapiens
  misc_feature (1)...(468): n = A,T,C or G
ggtgcntttganaatgtcaccgctgcaggaattcggcacgagcaataaccggagtaggagaagcaggtttcccatcaagttcctgttgagctgtagatcttgagggctgaaagtcttttccctcttccatgacatttctctcttcatttggcgtgacaagtgggtattgtttggctggccacagatcagcatgtgtttccttcacccattcttcaacaacaaaggcttcttttaatccagggaacaggttttcatactctgttgggtcagcaagggattctgctgctttctgattgacttttgagagattctctctccagagtttcactacccttgaaacctgactgggtaagtaagttcgggccaagaaggcagcttctggcagccgtccagttctaattaagagctctaggcaggcatcaaccttgccctgtaaaaagtagctcatgaatgccacattatttttgc

SEQ ID NO: 25533 - DNA, 496 bp, Homo sapiens
  misc_feature (1)...(496): n = A,T,C or G
aggggagtncncgngnntnnccnnctactgancgccctactgaattgcgtacgagccaccacgttgtgcccacagaacctctcccagcccctggacctgcaagtgttactgagtagattggatttaagacaaaaagcaagtcccccatgagtgtccacttctttgccctgccctctcagcttgtgagacaacacaggagccttctatagtatgttgatatgctagatctgtgccgttaataggcatcgtctctcagcctgagggaggctggattctgggttcctgtagtcacagggaggaaaagctttcttaaaaatggacatgtatgtgcgtgtgagtgtgtgtgtagatttatagtttttggtagtggcaggaataaaaaaaatccatcctacaaannaaaaaaaaaaaaaaaaaaaaaanaccctggggggggggccgggccccaattcccccttaagggggggggtttaaaaatcccgggccggggttttaa

SEQ ID NO: 25534 - DNA, 504 bp, Homo sapiens
  misc_feature (1)...(504): n = A,T,C or G
tggtgcngggggnnnnnngnnaattgctcgccctgcggaattcggctcgagcctcaatagcacaaaggctaaacttctgaagttgacaagcagcagcatagaccctggtctgagtatcaagcagttgggtggtttgtatattaatttcaatgcagataaactacagtctaacaagagaaccctaacacagatcaaggagaaaaagaaaaatgagcttctgcagaaagccgtcattacacctgattttgaaaaaaaccactgtgttccaccatatagtgaatcaaagtatcaacttcagaaaaaacgcagaaaagaacgacaaaaaacagcaggggatggctggtttggtatgaaagctccagaaatgacaaatgaactgaaaaatgatctcaaagcactgaagatgagagccagcatggacccgaaaagattttacaagagaaatgatagagatggcttccccaagtacttccagattggaaccattgntgacaatccagctgn

SEQ ID NO: 25535 - DNA, 474 bp, Homo sapiens
aatttgacaacctttgcaccggctgcaggaattcggcacgaggccttgcgcaagggtcctgcgggctggctggactggcctctgcggcggcgcctgccgaaatgccccacttggaaaacgccgtgctttgtcgcgagtctgacgggtacatcttgcagtccttgtttggagagagacatcatttcagctttccatccatttttatttatggacatactgctagtggaaagacctatgtaacacaaacgttgttgaaaactttagagctcccacatgtgtttgtgaattgtgttgaatgctttacattgaggctgcttttggaacaaattttaaacaaattgaatcatcttagttcttcagaggatggatgttctactgaaataacctgtgaaacatttaatgactttgttcgcttgtttaaacaagtaaccacagctgaaaatcttaaagatcagactgtatatattgttctag

SEQ ID NO: 25536 - DNA, 478 bp, Homo sapiens
agggtgcaatagccctcgtgcaggcggtttctgaggttcttcactcgcgactgacggagctgcggtggcgtctccacacgcaaccatgaagttgaaggacacaaaatcaaggccaaagcagtcaagctgtggcaaatttcagacaaagggaatcaaagttgtgggaaaatggaaggaagtgaagattgacccaaatatgtttgcagatggacagatggatgacttggtgtgctttgaggaattgacagattaccagttggtctcccctgccaagaatccctccagtctcttctcaaaggaagcacccaagagaaaggcacaagctgtttcagaagaagaggaggaggaggagggaaagtctagctcaccaaagaaaaagatcaagttgaagaaaagtaaaaatgtagcaactgaaggaaccagtacccagaaagaatttgaagtgaaagatcctgagctggaggcccagggagatgac

SEQ ID NO: 25537 - DNA, 465 bp, Homo sapiens
  misc_feature (1)...(465): n = A,T,C or G
ntttgccccgtcctgcaggaattcggcacgagaaatgaaattcttacagcctgaaggcagacgtgtgcccagatgtgaaagagaccttcagtatcagccctaactcttctctcccaggaaggacttgctgggctctgtggccagctgtccagcccagccctgtgtgtgaatcgtttgtgacgtgtgcaaatgggaaaggaggggtttttacatctcctaaaggacctgatgccaacacaagtaggattgacttaaactcttaagcgcagcatattgctgtacacatttacagaatggttgctgagtgtctgtgtctgattttttcatgctggtcatgacctgaaggaaatttattagacgtataatgtatgtctggtgtttttaacttgatcatgatcagctctgaggtgcaacttcttcacatactgtacatacctgtgaccactctttggagtggtgcagctt

SEQ ID NO: 25538 - DNA, 473 bp, Homo sapiens
attagacgactttcgaccgcctgcaggaattcggcacgagctgagagctaaattaattgaatgtggctggaaggatcagttgaaggcacactgtaaagaggtaattaaagaaaaaggactagaacacgttactgttgatgacttggtggctgaaatcactccaaaaggcagagccctggtacctgacagtgtaaagaaggagctcctacaaagaataagaacattccttgctcagcatgccagcctttaagattgaattagattgtgttgttgtggatatatttctgaaagtaaaacttgccataaattagaaaacaatttcccaaaataaaatccttttttgtatgatggtatacagttttcagtaatgatgtatacattgtattgatttttttccctaaatgtgttattttaataaatatctcatgaatgagtttgaagtttgcttggattttgaaatgaatgggactttg

SEQ ID NO: 25539 - DNA, 455 bp, Homo sapiens
  misc_feature (1)...(455): n = A,T,C or G
atttgccccgctctgcaagacttcggcacgaggttttgttagcctggtgcagcttagattgtttttaaagaatttcaaaagctggaaagctaatggtttgtgtcaatgcaatgatcattgtctatttgtctaaaaacaaactctaacaaaaattgccaaaaaatgaatgacctggtggttgtagacgatttgtccaattctcttgcctgtctaaggaatgacacaatttgctctttctgcctgttgttaatgtttccttgtaaattcagtctgcctacctaggtcagtaagcacacactaactgtggcacttagacaggcttctgttgctgacaaagactggcagaatccaagtgacggtgcttgcaaatttgcagtttattgcaagaaaatgataaaatatagaaactgcattaaagtaaagatgtgtatcacagccgtaggctggctcagggn

SEQ ID NO: 25540 - DNA, 459 bp, Homo sapiens
  misc_feature (1)...(459): n = A,T,C or G
attaggcacggtctgccccgcgctgcaggaattcggcacgagcagaaggtaaccagtctcaaacatgcttatcccattatcaaccctgaaagtttgcttgtcctttaagataaaaatgtaatgttgtgatattccttccagtaatgccactgtattttgtctccaaataaaagaagcttattgtagtatgtttgcagaaaaattctaaacaaaaattatacagcttattacagtgtgggaatagggatctaaattttaaataaaattatatatatatataaattggtgctgattttataattgcgcagtttggttagttttttcttacttttaaattccaacttaaaattatgagggttcagaaatatattgaaagtttaacaatggttaaaaatagaaaagcatgagtgttcatgctttaaaacgatttttaaatttgtattttatattggtttatcn

SEQ ID NO: 25541 - DNA, 484 bp, Homo sapiens
  misc_feature (1)...(484): n = A,T,C or G
cggcgtgggnnanggnngnaaattgatnanccattgatacgcgctgcaagaattcggcacgagctcactctgatcccggccccataatgtcctcagtggaaggtgactgggggccggtgctgtggggagagtagaaagaggggttggcatgactaaaaataccagtatgtgtattaagtattttgagaatgaaatgccaaggagtgcctactgtatgccagctctgctctaggaatggagtagacagtggacacaagaaggacttacgccctgagcacaggtgccaacggtgacaagactggcaagacgtgagggcatgaatggttcattcaggcagctgctgcaggtgtggtcacctggtgccatctgctgctcccttttccacttttctatgtcctccttccaccccaagtcccggatcactcgctgttttctggctagctcttggcatctccatctgagcctaaagttgcccactggcacn

SEQ ID NO: 25542 - DNA, 446 bp, Homo sapiens
  misc_feature (1)...(446): n = A,T,C or G
cgcgggtaaannnaatgancgcctgaggaatccggcacgagaaaagatactgtacatggaagcttctcaggctaaatccattaatataaaaatacattgtggatactgatgagatggctaattctgtcaacttgactaggctacgggatgccttgatagctggtcaaacaacatttctaggtacatctgtgatggtgtttctggaagagactagcacttgaatcagtagacttgagtaaagaagactgccttcacccatgtgggtgagcgtcatctaatccattgagggcctgaatagaacaaaaaaggggaagaagggtgaactgctgggacatccatttcgtgcccccagatgttggtgctcctggtcctcaggccttcagactaggacttaacgttattgcctcccctgattctcaagccctcgggtttggaactacactggc

SEQ ID NO: 25543 - DNA, 225 bp, Homo sapiens
aattgaatcgcgctgcaggaattcggcacgagcggtctttagccatgcacaaacggtagttttgtgtgttggctgctccactgtcctctgccagcctacaggaggaaaagcaaggcttacagaaggatgttccttcaggaggaagcagcactaaaagcactctgagtcaagatgagtgggaaaccatctcaataaacacattttggataaaaaaaaaaaaaaaaa

SEQ ID NO: 25544 - DNA, 496 bp, Homo sapiens
  misc_feature (1)...(496): n = A,T,C or G
agggccnnnnnnagggggaatgaccgcctgcggatagaccgcgtgcctgactcctgctatgagaagataaccagcctcattttctcagtgccccagaggtctaagataggatttctaaactggaatcatccttaatcaccttgaagatcccttaagaggcatttgactggtgctgccgtctgtgtcctcaaagcaatgctggtggcagcgtcctgtgtacacatgcagagctaatacccaaactaaaaactgggtaactggccctgaagtgcttcccaatcagtaagccacagggaaatgtttgatttttatgttctgttggattttggtttgcttggcatatctaaaggtgcctttactttactttttttttttttcctttcggcttggcttggaagaacttgttctaacagggaaaacaggcccaaaaaactttcctttgactgtaacctttgccccaggccacccaaaactttaatgctaagtgttaataaag

SEQ ID NO: 25545 - DNA, 490 bp, Homo sapiens
  misc_feature (1)...(490): n = A,T,C or G
aggccggnnnnnnnnnnntttatgatnatcgatgcgcgctgaggaattaggcacgagaaaaggtccccctgcggactttcgttcagacattgtacaatgtagaactctgtccaacactaatttattttgtcttgagttttactacaagatgagactatggatcccgcatgcctgaattcactaaagccaagggtctgtaagccacgctgctcttctgagacttccattcctttctgattggcacacgtgcagctcatgacaatctgtaggataacaatcagtgtggatttccactcttttcagtccttcatgttaaagatttagacaccacatacaactggtaaaggacgttttcttgagagttttaactatatgtaaacattgtataatgatatggaataaaatgcacattgtaggacattttctaaaaaacacaannnaaaccaaaaacatacctagtcccggggggggccccggcccccaattcccc

SEQ ID NO: 25546 - DNA, 508 bp, Homo sapiens
  misc_feature (1)...(508): n = A,T,C or G
cgcggcccccnnnnaggggnnaataganngccctnggaatagatccgcctgtangaattcggcacgagggaggccgcgggtctcattgccctcaccatcgccctcttcaccatctatgtcctctggacgctggtctccttccgctaccactgccagctgtactccgagtggagaaagaccaaccagaaagttcgcctgaagatccgggaggcggacagccccgagggcccccagcattctccactggcagctggactcctgaagaaggtggcagaggagacaccagtatgaatgctgggctctccggaccctgcagcagagaggccagaggtagctggtgataccctgtcctgtggaaggacttccacttcaacacttccacttcaacagttcccgcacggactgaacgcttcttaggccaagagacaccatgcggagcctagtctgtgatactgtgtgaagatattttcagaggttattgagttttttttttgcatatggaggacag

SEQ ID NO: 25547 - DNA, 496 bp, Homo sapiens
  misc_feature (1)...(496): n = A,T,C or G
agggccnnnnnnnagcgnnaatgatcgcctgtggattgaccaccactaaggactaacggctagatattatatataatctgtgccattcctactgggaagttgaaacaatgaaaataataaattattttctttcagatgagccataattgaaacttttaagattagcataattgtatcgttgaataataaagagaaaaattacctcctttgttaattttatcatatgtgaattagtaactaatggtttctttgaaatcctttggtttagctgcaatggctcctgctctcatgtagctaaaaagaacatgttggaaaaatgcaaatgactttataactcttgggattgatgtttatacccttcagctatttccagttaatttttaatgccataatcattatgtattatgattatcattaccataccaactctgctgtctctggtttttacaagagtaacacatttaaatttacagaggtaagaatttccttggagaaa

SEQ ID NO: 25548 - DNA, 485 bp, Homo sapiens
  misc_feature (1)...(485): n = A,T,C or G
cggagtgcggnnangngnnnggaaacttgaaagngcattcgagaacnctgcacgagangaccnggnggatgggggctcctaccagaaagccatgttcatatttctcagcaatgctggagcagaaaggatcacagatgtggctttggatttctggaggagtggaaagcagagggaagacatcaagctcaaagacattgaacacgcgttgtctgtgtcggttttcaataacaagaacagtggcttctggcacagcagcttaattgaccggaacctcattgattattttgttcccttcctccccctggaatacaaacacctaaaaatgtgtatccgagtggaaatgcagtcccgaggctatgaaattgatgaagacattgtaagcagagtggctgaggagatgacatttttccccaaagaggagagagatttctcagataaaggctgcaaaacggtgttcaccaagttagattattactacgatgatn

SEQ ID NO: 25549 - DNA, 462 bp, Homo sapiens
  misc_feature (1)...(462): n = A,T,C or G
nttgcccggctgcggaattcggcacgagcttggcttcagccagcccccagccagagtcctggctaggacagtgacctgatctcctcctcatgaccttctgccctggacaagccccctgaactggatttgggactgtcaaagcaactctacccctgctctggtaaactgagtataatcacaagggcctctgtaaaggaggcaggagtgtcagagtgacggaagaaaatgtatgtaacaatggaagcagaggtcagagtgatgcaattgctggaggaagagccatgagccgaggaatgcagacagcctcttctcctctggggcctcaagaagaatgcagtcctgccaataccttgattttaagccctgtgaaactgatttcagattgctgacctccagaacagtaagatcataaatttgtgtggtttcacatgtgtgaaaacacatgtgtgataatttgttacc

SEQ ID NO: 25550 - DNA, 483 bp, Homo sapiens
  misc_feature (1)...(483): n = A,T,C or G
aggcggnnnnnnnnnnttctgaatctgactgcccatttcgaacgaggcgtggtctacgccgagtgacagagacgctcatgctgtgttctcaggatgaccgagtgggagacagcagcaccagcggtggcagagaccccagacatgaagctctttgggaagtggagcaccgatgatgtgcagatcaatgacatttccctgcaggattacattgcagtgaaggagaagtatgccaagtacctgcctcacagtgcagggcggtatgccgccaaacgcttgcgcaaagctcagtgtcccattgtggagcgcctcactaactccatgatgatgcacggccgcaacaacggcaagaagctcatgactgtgcgcatcgtcaagcatgccttcgagatcatacacctgctcacaggcgagaaccctctgcaggtcctggtgaacgccatcatcaacagtggtccccgggaggactccacacgcattgtgcgc

SEQ ID NO: 25551 - DNA, 456 bp, Homo sapiens
atttgcaccgcgctgcaggcgacaccgtaactatccgcactagaaagttcatgaccaaccgactacttcagaggaaacaaatggtcattgatgtccttcaccccgggaaggcgacagtgcctaagacagaaattcgggaaaaactagccaaaatgtacaagaccacaccggatgtcatctttgtatttggattcagaactcattttggtggtggcaagacaactggctttggcatgatttatgattccctggattatgcaaagaaaaatgaacccaaacatagacttgcaagacatggcctgtatgagaagaaaaagacctcaagaaagcaacgaaaggaacgcaagaacagaatgaagaaagtcagggggactgcaaaggccaatgttggtgctggcaaaaagccgaaggagtaaaggtgctgcaatgatgttagctgtggccactgtggatttt

SEQ ID NO: 25552 - DNA, 531 bp, Homo sapiens
  misc_feature (1)...(531): n = A,T,C or G
tggaggttnnnnagggaggaanaanttttgaaacgcntgttgacnccgcgctgcaggaattcggcacgaggttccttcgcgcgtgaggctgcggctctgacgccccataggctccttcaatttccgtgatcctcggagtccccaggagaccaggtgatggcagcagccagactcctgccagtgccggcaggaccccagcccctgtcgttccaggccaagctgaccttcgaggatgtggctgtgctcctctcccaggatgaatgggaccgcctgtgccctgctcagaggggcctctacagaaatgtgatgatggaaacctatgggaatgtagtctcattgggacttccaggatccaagcctgacataatctcccagctggagcgaggggaagatccctgggtcctggacaggaagggggctaagaagagccagggcctgtggagtgactactcagatcctgtgccccagaaaccgtgagatgtctcaattcccatgcaggcaaaggaggggagcttcacactcagcagacct

SEQ ID NO: 25553 - DNA, 492 bp, Homo sapiens
  misc_feature (1)...(492): n = A,T,C or G
ngtggtnnnggaattgacggctgtggaattcgccacgagggttggagttgcaccatcaagcttttatcacaaattccttaatgaatcctatatggatggttaaaacccgaatgcagctagaacagaaagtgaggggctctaagcagatgaatacactccagtgtgctcgttacgtttaccagaccgaaggcattcgtggcttctatagaggattaactgcctcgtatgctggaatttccgaaactataatctgctttgctatttatgaaagtttaaagaagtatctgaaagaagctccattagcctcttctgcaaatgggactgagaaaaattccacaagtttttttggacttatggcagctgctgctctttctaagggctgtgcctcctgcattgcttatccacacgaagtcataaggacgaggctccgggaagagggcaccaagtacaagtcttttgtccagacggcgcgcctggtgttccgggaagaan

SEQ ID NO: 25554 - DNA, 448 bp, Homo sapiens
  misc_feature (1)...(448): n = A,T,C or G
ggtgggtaaannnaattgatccctatggagagaaccggcacgaggtgaaatgttaggcgatgaattcctgagcaccttgtttttcttccaaggttcgtagctcctctctgcccttccaagcctgtaacctcggaggactatcttttgttctttatcctttgtcttgtttgagtgggtcagccccagaggaactgataagcaaatggcaagtttttaaaggaagagtggaaagtactgcaaataaaaatccttatttgtttttgtagactttgtaatgcatatcattagccctcactgtgatcattactgctgtggctctgaactggcacatagtacagtggatggaaggtgcccgcacaccagctgagaactggttctggcctaggtgggctctagaaccatttacacagcatgaaagaaacaggttgggttaggagcagaaagaaat

SEQ ID NO: 25555 - DNA, 474 bp, Homo sapiens
  misc_feature (1)...(474): n = A,T,C or G
ggagtcggnagggnggaaactgaaaggcatcgagancgtggccggncccgcgctccttggagcgagaagtggggacgacatccggggtgcagtttggctgggacgtggcgttcatagcaggggcgtgtcagcgcatgcgcggcctccgatgtttaacagattaaggcttgttttctggagccacagttctcggaaaggtgctggaccatcgagacaaggtatatgagcagctggccaaataccttcaactgagaaatgtcattgagcgactccaggaagctaagcactcggagttatatatgcaggtggatttgggctgtaacttcttcgttgacacagtggtcccagatacttcacgcatctatgtggccctgggatatggttttttcctggagttgacactggcagaagctctcaagttcattgatcgctcagcaacagcctcaccaaggactccatgaatatcaaagcccn

SEQ ID NO: 25556 - DNA, 452 bp, Homo sapiens
  misc_feature (1)...(452): n = A,T,C or G
ggtgggtannnnnnaatggaccgcctttgaccccgctgcaggaattcggcacgaggcaacatatatcctcgaccagatgcagtgctataagaacagaacgcattttggatgttattattaagaaccaaatgtcaatacagaattcatgttgccggtttcccacttttctttttacattaatgcatagctgcttccatttatgagactttagagtttgagtttctgtagggctgaatgactctttttcctgcccagggcccattcttgcttctcaggcaccttccgtttattaattgccattgctcctgacatcactaagatgggtccccttctggctgcatgaatggaaatgagtgactggaaatcccataggccacaagaatgactttcacaagggcaggaacattgtggaaagactgcatcattctgatgaggcaaaatcctccagctat

SEQ ID NO: 25557 - DNA, 462 bp, Homo sapiens
  misc_feature (1)...(462): n = A,T,C or G
nttgaccccgcgctgcaggaaaaattgtcccccggctgcaggaattcggcacgaggagacaccaagctctggctctagaagagctctctcctggagtggggagtctggaggggactgggtgggtgcaggtaaagccagattctctctggaagggaattttctatgaatggatgatttccaggctcagggtgggctgtgtgttagttctgagcaaatccctcaccaagacccttccctcccaagccctcaaagaaatgaggcaaagcccttccctgcaagaccccttgtggatgtttttgcatctacctgatttttagccccacccagggagactttataccccatgatcctgccccaccgttgctgttgtctgccagctgggtctagcatcacagggaagggggggatttatactcatggaaagactactgatcctaccggaaaccaacctgtttactgtac

SEQ ID NO: 25558 - DNA, 484 bp, Homo sapiens
  misc_feature (1)...(484): n = A,T,C or G
agggggttnnnaattgacggatcgagaactgtcgcgagccgggctcgctgctgcaccacgcgtcacccacgcagaccatggcagccgccgacggttcgctcttcgacaaccccaggacgttctccagacgtcccccagcccaggcgagtcggcaagcaaaggctacgaaaagaaaataccaagcgtccagtgaggctcccccagcgaaacggaggaacgaaacttcatttctcccagccaagaaaactagtgttaaagaaactcagaggacttttaaggggaacgcacaaaaaatgttttctccaaagaagcattcggttagcacaagtgatagaaaccaggaggagagacagtgcattaagacttcatcactgtttaaaaacaaccctgacattccagaactccacagacctgtggtaaagcaggtgcangaaaaagtgtttacttcagctgcttttcatgagctgggcctncacccacattn

SEQ ID NO: 25559 - DNA, 467 bp, Homo sapiens
  misc_feature (1)...(467): n = A,T,C or G
cttgaccgcctgtagacttccgtcgagagcancngagcctgcgatgcgcgggaagacgttccgctttgaaatgcagcgggatttggtgagtttcccgctgtctccagcggtgcggctgaagctggtgtctgcggggctccagactgctgaggaactcctacaggtgaaaccctccgagcttagcaaaggtaacgactcctgatggcaagctgaggcacaccggccgccgtcagcgccgcctcagtcttcgttctctcgcctcggccttcagcccagtctccgttagattctgcttcctcccacgtccatgtttacagcgtgaaagagctcctcgactccacttacaagttgtctgaatggttaggagaactgtggtcgtgaaaacatttactaattgcttttcctctggcaatgcctgctgaatgctntgaggattgtctcatttaaccctcaacccgcttacgtag

SEQ ID NO: 25560 - DNA, 460 bp, Homo sapiens
cgcgccccttgaattgactcgcgctgcaggaattcggcacgagcggcagtacggctcggagggccgcttcacgttcacctcccacacgcccggtgaccatcaaatctgtctgcactccaattctaccaggatggctctcttcgctggtggcaaactgcgggtgcatctcgacatccaggttggggagcatgccaacaactaccctgagattgctgcaaaagataagctgacggagctacagctccgcgcccgccagttgcttgatcaggtggaacagattcagaaggagcaggattaccaaaggtatcgtgaagagcgcttccgactgacgagcgagagcaccaaccagagggtcctatggtggtccattgctcagactgtcatcctcatcctcactggcatctggcagatgcgtcacctcaagagcttctttgaggccaagaagctggtgtagtgccct

SEQ ID NO: 25561 - DNA, 504 bp, Homo sapiens
  misc_feature (1)...(504): n = A,T,C or G
cgggcccnnnnnaattgatcgctcggctgcagaattcgcacgagcaccatctaagaggaaaaggtgagttgctcatgctgattaggattgaaatgatttgtttctcttcctaggatgaaaactaaatcaattaattattcaattaggtaagaagatctggttttttggtcaaagggaacatgttcggactggaaacatttctttacatttgcattcctccatttcgccagcacaagtcttgctaaatgtgatactgttgacatcctccagaatggccagaagtgcaattaacctcttatgtggcaaggaggcaggaagtgcctctttagttcttacatttctaatagccttgggtttatttgcaaaggaagcttgaaaaatatgagaaaagttgcttgaagtgcattacaggtgtttgtgaagtcacataatctacggngctagggcgagagaggccagggatttgtcacagataccttgattaattcattccaatgtactgag

SEQ ID NO: 25562 - DNA, 480 bp, Homo sapiens
  misc_feature (1)...(480): n = A,T,C or G
nnggtgtctgcngctgttgcatcggctgtcatgaattcggcacgagctcatgctgccagattatctgggtgtggtggcactagaatggagatacttcatgggaataatactcattgttcttgaccccactgggtcagtgctgaccctaccaccacccactctgcagcagcacccagatgctagccttgtacagaaagccccagcatctctttacagtcaatgagctctctctttattgaggtatttcaaatatacaaacacttcagagctttttagatatgtgaaggtccaatttagtgaagcggattaacaaaacatgattctaaaagcctgcctcctctagaccaaggccatgtaaaagatttatgtaccaatcagcatcttttccttttaataatcttcaggatgttgtgttgggtccccagattcccatttgattttcttgcatcattttctcagactgtttgcttccttgcttcc

SEQ ID NO: 25563 - DNA, 455 bp, Homo sapiens
  misc_feature (1)...(455): n = A,T,C or G
cgtgggaatgactgcctgacgtggagctggaccggaaggtggctgaccagcagagcacactggagaaggcgggggtggctggcttctacgtgaccaccaacccacaggagctgatgctgcagatgaacctgctggaactcatccgaaagctgcagcagaggggctgccgggcagggaatgcagccctgggactgggaggtccctggcagtcgcctgctgcccagtgtgaccagaaaggcagccctgtcccaccatagccacaggcagcagaagtctgggcagagttcatcttcttgacctttggccactgccttcccagctgcccgcagggggttccccctgctgaggagagaccaggtggaccccagctgcctgtcacccttcatctgggacttgctgtcaaaccctaggatagtctcataaaggggaggctgggccagcctgctgctgtctgn

SEQ ID NO: 25564 - DNA, 447 bp, Homo sapiens
  misc_feature (1)...(447): n = A,T,C or G
cgagcgtnccccctttgagccccatgaccccgctgcagccagggccccgaatcccaaccttattcaggcgtcagcatctctgcaccccaaatgcctgttagggaggatagtgaaggctgagccctcctgggctcatcaaaagccagcagtgagagaacacccccatctctctgaggtgaccttgtagggcagtccgtgctgtctggctggcctgggtgaggtgggcagggaccaaggcctggcgcctgggcctcgctggccttgctctgcgtgctgacttcatcctgatagtaccttgattttcctactgtgacttccccttctgtcgacttcctcaccaactttaaaattccgtattgagagcagtttcctaagttacctcaaatcctattcagaagaaggttcttcctggaagttgggagggcggaaaacaagtttagtcacaga

SEQ ID NO: 25565 - DNA, 471 bp, Homo sapiens
  misc_feature (1)...(471): n = A,T,C or G
gagggacnnnaactggattgcatggcgatttcggaacgagaaagcattaagaatgtgacagagctgaagctttctgataatcctgcctgggaaggggataatggaaacactaaaggtgacaagcacgatgacctccagcgggcgcgtttcatctgccccgttgtgggcctggagatgaacggccgacacaggttctgcttccttcggtgctgcggctgtgtgttttctgagcgagccttgaaagagataaaagcggaagtttgccacacgtgtggggctgccttccaggaggatgatgtcatcatgctcaatggcaccaaggaggatgtggacgtgctgaaaacaaggatggaggagagaacgctgatagcgaagctggaaaaaataacatagaaacccaaggcagcagagtctgtttcaaaaccagatgtcagtgaagaagccccagggccatcaaaagttaatacaggg

SEQ ID NO: 25566 - DNA, 481 bp, Homo sapiens
  misc_feature (1)...(481): n = A,T,C or G
cggancnngnattganngcattgacccgcgctgcaggaattcggcacgagcttcagcccactagtagtgcgctggtaaatgctacggaatggccaccttttgtggtgacattggatgaggtagagctgatccactttgagcgggtccagtttcacctgaagaactttgatatggtaatcgtctacaaggactacagcaagaaagtgaccatgatcaacgccattcctgtagcctctcttgaccccatcaaggaatggttgaattcctgcgacctgaaatacacagaaggagtacagtccctcaactggactaaaatcatgaagaccattgttgatgaccctgagggcttcttcgaacaaggtggctggtctttcctggagcctgagggtgaggggagtgatgctgaagaaggggattcagagtctgaaattgaagatgagacttttaatccttcagaagatgactatgaagaggaagagga

SEQ ID NO: 25567 - DNA, 462 bp, Homo sapiens
  misc_feature (1)...(462): n = A,T,C or G
ggaactctaanaattgaccgcgctgcggaattcggcacgaggtgaagtggtgtatgtggaaggtcggaggagtgttacaggagtacctatggagcctagccgaggccagggactctgcttctactactggggcctatttgatgggcatgcagggggcggagctgctgaaatggcctcacggctcctgcatcgccatatccgagagcagctaaaggacctggtagagatacttcaggacccttcgccaccacccctctgactcccaaccactccggggaccccagattcctccgatccctctcacttgcttggccctcagtcctgctggtcttcacagaaggaagtgagccacgagagcctggtagtgggggccattgagaatgccttccagctcatggatgagcacatggcccgggagcggcgtggtcaccaagtggaggggggctgctgtgcactggttgg

SEQ ID NO: 25568 - DNA, 486 bp, Homo sapiens
  misc_feature (1)...(486): n = A,T,C or G
ggagtnccnnnaaggagnnnnatttgatcgcgctcttgactcgcgctgcaggaattcggcacgagctcaccggatttgtccctgaggccttatttagttcacttggagaggccatgttttcttcctggatggcgctgatggtagtagatgttcttcactgactggacattaaaaacttgtgcatgcaccaccatatgagaggtttaaaagatagagctacaaaagagaaaagaacccagagttgatctctgcagcatgccatcactgctggggatgaagaaacggtgatttcaggactgttttttctgtctcttcagagcctctttcagtgatctgaggttaaaaccagacggacaatcagtggagccttgtttctgccgtgttgctttactctcacgcccaagaatcagaattcagaacttttaataagaaaagctttcagaactagtgaaggacaaggaagacattctggttgtccatgcttaa

SEQ ID NO: 25569 - DNA, 462 bp, Homo sapiens
  misc_feature (1)...(462): n = A,T,C or G
ntggcccttgcccgcctgcaggtgattctgccaaaaaggtacttctggaaaaatacaaatatgtggagaattttggtctaattgatggtcgcctcaccatctgtacaatctcctgtttctttgccatagtggctatgatttgggattatatgcacccctttccagagtccaaacccgttttggctttgtgtgtcatatcctattttgtgatgatggggattctgaccatttatacctcatataaggagaagagcatctttctcgtggcccacaggaaagatcctacaggaatggatcctgatgatatttggcagctgtcctccagtcttaaaaggtttgatgacaaatacaccttgaagctgaccttcatcagtgggagaacaaagcagcagcgggaagccgagttcacaaagtccattgctaagttttttgaccacagtgggacactggtcatggatgcat

SEQ ID NO: 25570 - DNA, 326 bp, Homo sapiens
taccaaaccttcatcatcacaagttccagtatatcttctaattcctgagccacctgatctcctgcatcctcattaatggtgcccagtacttcaggcgcatcagtgagtctggcatcaagaaaatgtgtaggaacatttttgttcttcagcagaatttgccaacatcaccatgtcgcgggaggcagacctggactttgcaaggcagtactacgagatgctttacaacacacctgacgagctcctgaacctggtggtggaccaaggtgtgaagtacacagacctggagtacatccacgctctgaccctgctgcaccgcagccaaactt

SEQ ID NO: 25571 - DNA, 507 bp, Homo sapiens
  misc_feature (1)...(507): n = A,T,C or G
ggggnnnnnnnntttcattcgcccgcctgcaggaattcggcacgaggtcttgatgatgagaatgagtttcctcctataatcttgtgccgtggaaatcagaagggcaaaacgaagcagtcatgatgagaagcacacctcagaaatcaggacatcccccctatcaggtggttttggagaaaacaaggaaggcggaagaatggagtgcaattgtgtgagcagaaaggggggcaggaatcccgggtgctccactgcttaaaccacaggacctggttaactcctcaccaagcttcccacgaccctggttgccaatgggcgcgggagacattgtatacacatcatgctatttaaaatacgttcaaactatagtgtaaatgctaattaaccatattggtatataacccgaattttatattanaaggggcctncttttttaatatatgccgtgtaaaaatgtacttataggaacatctctttgaaatggnattctttgatattacatacctagaa

SEQ ID NO: 25572 - DNA, 507 bp, Homo sapiens
  misc_feature (1)...(507): n = A,T,C or G
agcggggnnnnnaattcgctcggctgcaggaattcggcacgagctttctttgaagtacctgatgctgattgattccactaatagtaggaagcaagagacttaactatgagggacgttatgtgaatcttaagtcttaccagtccttgcattagtacattaaatttggatgttttggaagcaaattcatatgatcgtgagtgatttctccaaagaaaaaaagccttgtccagcctgaccaacatggtgaaaccccatctctactaaaaatacaaaaattaactgggtgcagtggtgcgcatgcctgtagtcccagctacttgggaggctgaggcaggagaattgcttgaaccctgggaggcagaggttgcagtgagtcgagatcgcgccactgcactccagcctgggtgacagagcaagactccatctcnaaaaaaaaaaacaaaccaaaaaaaaaccctgatgccattcccagtccccgttgaggacatcacatttataaatccaggg

SEQ ID NO: 25573 - DNA, 493 bp, Homo sapiens
  misc_feature (1)...(493): n = A,T,C or G
tgtgccaanantnatanaactactacgctccgtacgatncgcntggggagnnacggccaagggccctagagcccacccggtgtcctgaagtcctcggggggaggccagcccctggctcactggcacagggcaggtgggctctcggggaaggtgtcgggggccccctatgagggagcgctggggacattgccatgggacggaagtctgcttggcagtggctttgataagcgatgcttgggggtcagaccaccccctagaggagccacgtgccgcccagccaccttcaatgcctgccaccctgcccgaggatgtacagagccgtgcccacacatttccttgcaacttgatcaaatttcttaaagcaaacaacaaaaatgtacatttctgtttttccttttaataaacaggtgtactctttatcaaaaaaaaaaaaaaaaaaacctggggggggggccgggaccccatttccccttatagggagccgatttacatt

SEQ ID NO: 25574 - DNA, 480 bp, Homo sapiens
  misc_feature (1)...(480): n = A,T,C or G
cggactacanattgaccgcgctgaggtncggctccagagatggatgaagaggaagtagcccactggttcctcccccgggagcacattattgacacgtttgtagtggagagccccaacggtaaactgactgagttcctgagcttctatacgctcccctccacggtgatgcaccaccctgctcacaagagcctcaaagccgcctactcattctacaacatccacacagagacgcccctgctggacctcatgagcgacgcgctcatcctggctaaatcgaaaggatttgatgtattcaatgcactggatttgatggaaaataagacattcttggaaaaactcaagtttggtataggagatggcaatttgcagtattacctgtacaattggaggtgtccaggtacagattctgaaaaggttggactagtactacaatagatggatatttttatttctagaactctgacatcatcatttgttaat

SEQ ID NO: 25575 - DNA, 470 bp, Homo sapiens
cattcgcccatctgccccgcgctgcaggaattcggcacgagccaagacgtccacgtccggatctgtaaccaagagattgtcaaatttgacctggaggtgaaggcgcttattcaggatatccgtgattgttcaggacccttaagtgctcttactgaactgaatactaaagtaaaagagaaatttcaacagttgcgtcacagaatacaggacctggagcagttggctaaagagcaagacaaagaatcagagaaacaacttctactccaggaagtggagaatcacaaaaagcagatgctcagcaatcaggcctcatggaggaaagctaatctcacctgcaaaattgcaatcgacaatctagagaaagcagaacttcttcagggaggagatctcttaaggcaaaggaaaaccaccaaagagagcctggcccagacatccagtaccatcactgagagcctcatggggatcagcag

SEQ ID NO: 25576 - DNA, 489 bp, Homo sapiens
  misc_feature (1)...(489): n = A,T,C or G
agatgtctccnnnnagtaganaaactcgatnngccctatttgctngcgctgcaggaattcggcacgagacaaccccagaggttacaaatgctgccctggatgaagctgtcaccatcgataatgataaagatacaacaaagaacgaaacctctgatgaatatgctgaactagaagaagaaaattctccagctgagtcagagtcctctgctggagatgatttacaggaggaagccagtgttggctctgaggctgcttcggctcaaggctaatctccagccggtagacatttcagcaacaaatgccatagggtgtctgataagtgcttttgtgtttttagtacacttagtttaaaaaaaaaaagacttattttctagaaaacgttaatgggtcttgaagatttttggcatccactgatagattttaggactgagagacttgagattggacatttcttactactcttctactgcctgagatcagaatatgaca

SEQ ID NO: 25577 - DNA, 515 bp, Homo sapiens
  misc_feature (1)...(515): n = A,T,C or G
nggtcggggnnnnnnngnnnaattcgtcggctgcangaattcggcacgcgcaggtgatgagggacaactggaagatgagggaagccaggaaaagcagggcaggtccgaaggtgagggcaagccacaaggcgagggcaagccagcctcccaggcaaagccagagagccagccgcgggccgccgaaaagcgcccggctgaagattatgtgccccggaaagcaaaaagaaaaacggacagggggacggacgattcccccaaggactctcaggaggacttacaggaaaggcatctgagcagtgaggagatgatgagagaatgtggagatgtgtcaagggctcaagaggagctaaggaaaaaacagaaaatgggtggttttcattggatgcaaagagatgtacaggatccattcgccccaaggggacaacggggtgtcangggagtgagggngtgaggtaggggccaaaggggcttacacgatatcccatacctttaatgcctttggccttccattctga

SEQ ID NO: 25578 - DNA, 450 bp, Homo sapiens
attgccctcctgcgcgatcggcacgagagaactctgtaaagactggaatattccatttaagcagccatcatatccatcagtgaaacggtataatcggaatcggacactaacacaaaagctacggatggaggagcgatttaaaaagaaagaaagattactcaggaagaaattagctaaaaaaggaattgactatgattttccttctttgattttacagaaaacggaaagtatttcaaaaactaatcgtcagacgtctacaaaaggccaggttttacgtaagaagaagaaaaaagtttcaggtactcttgacactcctgagaagactgtggatagccagggccccacaccagtttgtacaccaacatttttggagaggcgaaaatctcaagtggctgaactgaatgatgatgataaagatgatgaaatagttttcaaacagcccatatcctg

SEQ ID NO: 25579 - DNA, 495 bp, Homo sapiens
  misc_feature (1)...(495): n = A,T,C or G
tggggntgnnnnnnaattgatcgtctgaggacttcggcacgagctgaagtctctgggagaggagattcaagagtcactgaagactctggaaaaccagagccatgagacactagaaagggagaatcaagaatgtccgaggtctttagaagaagacttagaaacactaaaaagtctagaaaaggaaaataaagagctattaaaggatgtggaggtagtgagacctctagaaaaagaggctgtaggccaacttaagcctacaggaaaagaggacacacagacattgcaatccctgcaaaaggagaatcaagaactaatgaaatctcttgaaggtaatctagagacatttttatttccaggaacggaaaatcaagaattagtaagttctctgcaagagaacttagagtcattgacagctctggaaaaggagaatcaagagccactgagatctccagaagtaggggatgaggaggcactgagacctctgacaaaggagaa

SEQ ID NO: 25580 - DNA, 480 bp, Homo sapiens
  misc_feature (1)...(480): n = A,T,C or G
gagcccccattgncattttacccggctgcaggaattcggcacgagcctgcctctacctggtctgccgtacggagggcacgccgcacatgctcctggacctcagcgacctgctccaggtagacagcctccgtcctgcatctttccccacctggggttgtgacctgggggttgtgaccagggttgtgaccggggtgtaccccaggtgcctccacgcatctcagtggccggtctgtgctgcctgcccagtcaggaagttttggtctgtaggatgaggggccttcatgacatgggggtcacagtccgagacttgtgggagtgtgggtctccatggcaggagggcacctgccaatgctgggcacggttgggtgttagctaggcctgggtgaacagtgaacttttgtcctacacaaaggagattattttcaattaaaaaatttttttgtgagtaaaaaaaaaaaaaaaaaaaactcggtctcaagg

SEQ ID NO: 25581 - DNA, 505 bp, Homo sapiens
  misc_feature (1)...(505): n = A,T,C or G
agagngnnnnnaattgatcgcccggctgcaggaattcggcacgagtttaaccagaagattgctgctgcccttagggtctcagctccctcctcaggaatccctcttaggaaggaccctcaggacaccctctctgcaccctgtgggcctctagagtagctagctctgaggccccaaggtgggtacaaagcaggtatggccctcagagatgcagcctgctgctggcttttcagtcagagggttgggggctggccagccaagctgccttgccctggccgctcttactccctccctctgctgtctcacttcaggtccatgtatttcacttttcttaaataaaagaatcaggtaaccctttnnnanannnnnnnnnnnnnnnaaaaactcgggggggggcccgggccccaattccccctatagggagagcgataacaattcacgtgccgcggttttacaacgcggggagggggggaagnnnnnnnnnnnnnnnnnnntnnttnnnnnnngn

SEQ ID NO: 25582 - DNA, 450 bp, Homo sapiens
aatagcattctgcccggctgcaggaattcggcacgaggtggcccatgggcaggcacctgagatgcctctagtgaagaaaaagaagaagaaaaagaagggtgtcagcaccctttgcgaggagcatgtagaacctgagaccacgctgcctgctagacggacagagaagtcacccagcctcaggaagcaggtgtttggccacttggagttcctcagtggggaaaagaaaaataagaagtcacctctagccatgtcccatgcctctggggtgaaaacctccccagaccctagacagggtgaggaggaaaccagagttggcaagaagctcaaaaaacacaagaaggaaaaaaagggggcccaggaccccacagccttctcggtccaggacccttggttctgtgaggccagggaggccaaggatgttggggacacttgctcagtggggaagaaggg

SEQ ID NO: 25583 - DNA, 444 bp, Homo sapiens
cattgaccccgctgcagtagttcggcacgagaattgttggagcaggcagtggaggatgcaagatggactgcagccttcaatggcatcaccaactctgaatttcatactggtcaagcagagaagattttgccagggctgctaaagtcaaaggaagatggacagtcaattgttgctgtggtgaacccagcccgtgccggactgcattacaaggtgattcaagccattcgaaacttcagggccatccacacgctagtttttgtttcctgcaagctccatggtgaatccactaggaatgtcattgagctgtgctgtcctccagaccctgctaagaagctcttatgcgagccctttgtcctgcagcaagctgtacctgtggatttgttccctcacaccccacattgtgagctggtgctcctctttactcgataagcagcctcctagaag

SEQ ID NO: 25584 - DNA, 546 bp, Homo sapiens
  misc_feature (1)...(546): n = A,T,C or G
agggcgttcgatcgctgtctgcangaattcggcacgagtcttgtctggcctggacactgnggtgctgacacatggggctctgtggagctgcccattgtggggaaggctttcatccgacccttccgggagcaccacattgacccgacagctatcacacggcacgacttcatcgagaccaacggggacaactgcctggtgacactgctgccgctgctaaacatggcctacaagttccgcacccacagccctgaagccctggagcagctatacccctgggagtgcttcgtcttctgcctgatcatcttcggcaccttcaccaaccagatccacaagtggtcgcacacgtactttgggctgccacgctgggtcaccctcctgcaggactggcatgtcatcctgccacgtaaacaccatcgcatncaccacgtctcaccccacgagacctacttctgcatcaccacaggtgcggncaccagtggcggggaatggggcttccnncacccagccactgcacaatcttcgaggtcaggaggcaggaacacagag

SEQ ID NO: 25585 - DNA, 453 bp, Homo sapiens
atttgaccctcgctgcgcgctttgtttgaaaatgtaaagaatttcctagaaaaaaattcatgaaatcaaaaagtagactatttcaccctattgcagctaagtggtcctggggcatggagtcttcaacctctctatgaatggcacaccttagtcacttatgttacttttgtgtccccaccatgggttgggggattttttgtttattctgatctatgagttttgaaaaagtgaataatcaaaaggaaaataattccttgttgttcataaattaagcatcactaaagtctcttgaaaggcatttctgtattgggcaagatttaaaatactaaagccttaggtcctattcatatttaaagtagcatgtttgtaacctgttactatttggagaagagaagcagttgcctgccaaattgaagactacctttcaaatagcaaaagagagagagaaggctg

SEQ ID NO: 25586 - DNA, 465 bp, Homo sapiens
  misc_feature (1)...(465): n = A,T,C or G
cttgcccatcgaccgctctgcggaattcggcacgagaggaagctccgtagtcaccgacgagaccagaagtggcatgataaacagtataagaaagctcatttgggcacagccctaaaggccaacccttttggaggtgcttctcatgcaaaaggaatcgtgctggaaaaagtaggagttgaagccaaacagccaaattctgccattaggaagtgtgtaagggtccagctgatcaagaatggcaagaaaatcacagcctttgtacccaatgacggttgcttgaactttattgaggaaaatgatgaagttctggttgctggatttggtcgcaaaggtcatgctgttggtgatattcctggagtccgctttaaggttgtcaaagtagccaatgtttctcttttggccctatacaaaggcaagaaggaaagaccaagatcataaatattaatggtgaaaacactgtagtan

SEQ ID NO: 25587 - DNA, 478 bp, Homo sapiens
  misc_feature (1)...(478): n = A,T,C or G
aatcgaccggcnatagacacgcctgccgaatctcgcacgagctggagggtatggggttccgtgtgggccaggctctaagcgagaggctgccccgggagacgctggccttcagggaggagctggatgtcctcaagttcttgtgcaaagacctgtgggtggcggtgttccagaagcagatggacagcctgcgcaccaatcaccaggggacctacgtcctgcaagacaacagcttccccctcctcctcccgatggcctctggcctgcagtatctggaggaagcacccaagttcctggccttcacctgcggcctcctgcgcggcgccctctataccctgggcattgagagcgtggtcaccgcctccgtggcagccctgcccgtctgtaagttccaggtggtgattccgaaatcctaagcctgcctcgcacctgctgagccgcactgctgcccctggcctcaccggcctcaggagacggtggg

SEQ ID NO: 25588 - DNA, 479 bp, Homo sapiens
  misc_feature (1)...(479): n = A,T,C or G
agagtgccnnnnagagnnnnttatgaccccctgctgaattccgcacgagccacagttcagcagctggaaggaagatggcgcctggtggacagcaaaggctttgatgaatacatgaaggagctaggagtgggaatagctttgcgaaaaatgggcgcaatggccaagccagattgtatcatcacttgtgatggtaaaaacctcaccataaaaactgagagcactttgaaaacaacacagttttcttgtaccctgggagagaagtttgaagaaaccacagctgatggcagaaaaactcagactgtctgcaactttacagatggtgcattggttcagcatcaggagtgggatgggaaggaaagcacaataacaagaaaattgaaagatgggaaattagtggtggagtgtgtcatgaacaatgtcacctgtactcggatctatgaaaaagtagaataaaaattgcatcatcactttggacagga

SEQ ID NO: 25589 - DNA, 449 bp, Homo sapiens
  misc_feature (1)...(449): n = A,T,C or G
nattgaccatcgtgagcaattcggcacgagctatgatgagcatgaagggccagcgctgtattacatggactacctggcagccttggccaaggccccttttgcagcccacggctatggtgccttcctgactctcagtatcctcgaccgatactacacaccgactatctcacgtgagagggcagtggaactccttaggaaatgtctggaggagctccagaaacgcttcatcctgaatctgccaaccttcagtgttcgaatcattgacaaaaatggcatccatgacctggataacatttccttccccaaacagggctcctaacatcatgtcctccctcccacttgccagggaacttttttttgatgggctcctttatttttttctactcttttcaggcgcactcttgataaatggttaattcagaataaaggtgactatggatataattgan

SEQ ID NO: 25590 - DNA, 446 bp, Homo sapiens
atttgcctccgctgcacgaattcggcacgagaatttgggacctgggagtttgggagaaaagcaaagaaggcctggggttgagtgagacacagggtcccagccagcagctagaacacgaggagaaaagaagaaaggactcactgaaagggaattgctgaagaggacctttatatctgagggctttactttgtgctttgtaatttccctttgtcatcctcatcttttaggaaactgattaaccactataatttacgtcgtattagcaacgccttatagaatgaaggaggaactgtacttattcttggagcgtagcctggagagaggcagaagccttcaggagctgttactaggtagtaggaaatcactctctctagagtcctctgaaacagtctggaagagaatggatttcctgctgttgtgcacgatgagggtttgagtacagtaat

SEQ ID NO: 25591 - DNA, 483 bp, Homo sapiens
  misc_feature (1)...(483): n = A,T,C or G
cggaacnanaattgannncattgaccngcgctgcaggaattcggcacgagcagactgcaccctgcacggctttgtgcacggaggtgtgaccatgaagctcatggatgaggtcgccgggatcgtggctgcacgccactgcaagaccaacatcgtcacagcttccgtggacgccattaattttcatgacaagatcagaaaaggctgcgtcatcaccatctcgggacgcatgaccttcacgagcaataagtccatggagatcgaggtgttggtggacgccgaccctgttgtggacagctctcagaagcgctaccgggccgccagtgccttcttcacctacgtgtcgctgagccaggaaggcaggtcgctgcctgtgccccagctggtgcccgagaccgaggacgagaagaagcgctttgaggaaggcaaagggcggtacctgcagatgaaggcgaagcgacagggccacgcggagcctcagcccta

SEQ ID NO: 25592 - DNA, 454 bp, Homo sapiens
  misc_feature (1)...(454): n = A,T,C or G
atttgaccccgctgcaggaatncngcatgaccccgcgctgcaggaattcggcacgagcagcatcctgctgtacgtgcaggccttccaggtgggcatgccaccccctgggtgctgcaggggccccctgcgccccaagacactcctgctcaccagctccgagatcttcctcctggatgaggactgtgtccactacccactgcccgagtttgccaaagagccgccgcagagagacaggtaccggctggacgatggccgccgcgtccgggacctggaccgagtgctcatgggctaccagacctacccgcaggccctcaccctcgtcttcgatgacgtgcaaggtcatgacctcatgggcagtgtcaccctggaccactttggggaggtgccaggtggcccggctagagccagccagggccgtgaagtccagtggcaggtgtttgtccccagtgctgag

SEQ ID NO: 25593 - DNA, 452 bp, Homo sapiens
  misc_feature (1)...(452): n = A,T,C or G
attggccctctcccccgcgctgcaggaattcggcacgaggatccgccctcctcagcctcacaaagtgctgagattacaggcgtgagccaccgtgcccagcctggaggagagtgattttaaaaggtggctagacttgaatgcctcaggaaagtggacagatggagagagtatgtttcttccatcagacatgggcaagtacatgagcacaaggtgctggtggttcttatcaaaggtgtaatggacgggtgaggcaagtggaaacatttggtagtcatgaatcanaaaggaaagaaaactgaggttttagagcaagttggaaaggaaaagtcaagaaacaaaggaataaaacagaaacaggaataggcggctacttctggggcagaaaacaaggccagataccttgggggtttcctcacaagccttctgcacatccatctctcatgctccacaca

SEQ ID NO: 25594 - DNA, 482 bp, Homo sapiens
  misc_feature (1)...(482): n = A,T,C or G
aggcccnnagtattaattagctagctgcttagtggctntggcaanacaaagcccattgctttatctgctctctgagggttcaggtacactggctaaggcagaaccccaaatttcaaggctctttctatcaatattggacctctgggagctaatactcctctttgctcaccaccatgtgatcattgatcagatgtggtgagtgagtaggggactcgacttgcgggatgcagttttgccattgcagcaaagttcattgaggaaaattgtaccatgaaaaagcattttgattatttcatttctggaggatgaccttgagggaagctttttaatattagtttcaagctttccttaccctacaactttaaacaaaagctttaattttgtttgcactcctattttgagcttgtaactggaaaagcatgtcttgcactgttcaacctcctgagtggtcgctttaacaacctccaaattgtgtacagtgg

SEQ ID NO: 25595 - DNA, 479 bp, Homo sapiens
  misc_feature (1)...(479): n = A,T,C or G
gcgcgcccaatgantttgcccggctgcagcttgcccaggacgcgcatcaacgccggcatgctagctcaattcatcgacaagcctgtctgcttcgtagggaggctggaaaagattcatcccaccggaaaaatgtttattctttcagatggagaaggaaaaaatggaaccatcgagttgatggaaccccttgatgaagaaatctctggaattgtggaagtggttggaagagtaaccgccaaggccaccatcttgtgtacatcttatgtcccagttaaaagaagatagccatccttttgatcttggactttacaatgaagctgtgaaaattatccatgacttccctcagttttatcctttagggattgtgcaacatgaatggatcttgatggattttcatacgattgtaaatgagctatattaaagtctattaaaggaagcccttcttgtttgagggagaataaaaaaataaaaaaaaaaat

SEQ ID NO: 25596 - DNA, 506 bp, Homo sapiens
  misc_feature (1)...(506): n = A,T,C or G
agcnntnncnnnnncagnngnnnnnnnnnattgaccnattgacncgcgctgcaggattcggcacgagctccattcatccttccatccatctttccatccattacctccatccatccttccaacatatatttattgagtacctactgtgtgccacgggctggtgggacagtggtgacatagtctctgccctcatagagttgattgtctagtgaggaagacaagcatttttaaaaaataaatttaaacttacaaactttgtttgtcacaagtggtgtttattgcaataaccgcttggtttgcaacctctttgctcaacagaacatatgttgcaagaccctcccatgggggcacttgagttttggcaaggctgacagagctctgggttgtgcacatttctttgcattccagctgtcactctgtgcctttctacaactgattgcaacagactgttgagttatgataacaccagtgggaattgctggaggaaccagaggcacttccacctt

SEQ ID NO: 25597 - DNA, 506 bp, Homo sapiens
  misc_feature (1)...(506): n = A,T,C or G
tggggctccccaattttattaaattatcgatttctctttctatctattcgccctgcaggaancgccacgaggagaaacagggcagtggaccaatggacagctccaccagctccacatctttggaagctagatttggggagagagaagctctaccccagacttaatacccattgaaatttcacctcaggtgttgtgtcctgtgtctggttaagtgtcccatggaaggggaaagccttcacgtcagaacccaaccctataccttttacttcttaaatggtgctaaccacaggtgtcccagggtgctctgtgccagttaagatttttaactttcaaggggcagggcatactgggaaatgtagtttcccaaactgccttatcacttgggtggacatatgtctccttttatgccttttggtcttgagtaattaacagcatcctcttccacgctcagaagtgttctggttggggccaggcatggtggctcacgcctgtagtcccaacactta

SEQ ID NO: 25598 - DNA, 478 bp, Homo sapiens
  misc_feature (1)...(478): n = A,T,C or G
caggcccctcgccatcgacccgcctgcaggagatttcttcaagaaaatccaggctatcacatagtctttctgtgtgacttattaggagataggaagagcattgggaaacttgcacagctagctatgcatctacattttggtttggggttagttatgaaatgttcttaatatgacgtgttcaataacttcacataaacttcctgttctccaaaacctcaaagagatagagttaatgagttgttgtttttttttaaatgggggtagttttctatctgtcatgggctctagcatctactccgctacccaattctgtcatctccaagctgagtttcctcttctgaggcagaggctggagcagttctttttcagttctcatcctctccatcccaatccagtatatcaatcaactctaactcggagacgtctagctggcaatgtttctaaaactttcactggatttctttagacattgaagcan

SEQ ID NO: 25599 - DNA, 468 bp, Homo sapiens
  misc_feature (1)...(468): n = A,T,C or G
aatgaaaaacttggaccgcctgcangaattcggcacgagcttgagcccactgagcagatatggtgggtggctggaggcttctctttctcagtccctgcctgtctgccagcctgcagctctcctgcttgacactgacttactacttgaaactttatttattgcaccatgttggtgtggtgggcaggtggagggcctgccctggacacaggggccctgctgagcagtggccccatcctggaacttgaccagattccccccagtgctgctgctaaccccacaccacccaggcctccacctccccagggagtctccaagagcctcgatcctctgctcactcagcccagccatccatagccctgggaattccacctgccaaggatcccagcaggctggatgagggatagtagggcatgaggagaaggagccctgtaaggactgaggccccggccagcccttctcctccaccag

SEQ ID NO: 25600 - DNA, 474 bp, Homo sapiens
cgccccatcgcatcgcccgcctgcggaattcggcacgagagtatgtgttgcagcttcctacttcaattgctgctggaggggaaggacttacggatgtctacccagaaacaaccaccccggagcccccgtcttccgctgcagtttccccgggaacagaggaacctgctggcgacaccattaaaaaaattgacattttgctaaaggctgtgggagacactcctattatgaaaacaaagaagtgggcagtatagcgaacacgaaccatccaaggactcattgacttcatcaaaaaggttcttaaacttgtggcctcagaacagttgtttatttatgtgaatcagtcctttgctccttccccagaccaagaagttggaactctctatgagtgttttggcagtgatggtaaactgtgtttacattactgcaagtctcaggcgtggggatgaaccacagagaaaatcaacttgctactac

SEQ ID NO: 25601 - DNA, 511 bp, Homo sapiens
  misc_feature (1)...(511): n = A,T,C or G
catagaccgccnatagagaggccgtcgngaancggcacgaggaaaatcgcatctttggagaggaatagtcagcatcaccttgattgaagggagagacctcaaggtcatggattccaacgggttgagcgatccctacgtgaagatccggcttgggcatcagaagtacaagagcaagattatgccaaaaacgttgaatcctcagtggagggaacaatttgattttcacctttatgaagaaagaggaggagtcattgatatcactgcatgggacaaagatgctgggaaaagggatgatttcattggcaggtgccaggtcgacctgtcagccctcagtagggaacagacgcacaagctggagttgcagctggaagagggtgagggacacctggtgctgctggtcactctgacagcatcagccacagncagcatctctgacctgtctgtcaactccctggaggaccagaaggaacgagaggagatattaaagagatatagcccattgaggatattn

SEQ ID NO: 25602 - DNA, 454 bp, Homo sapiens
  misc_feature (1)...(454): n = A,T,C or G
aattgacccnccnntgnaatagacccccggctgcaggaattcggcacgagctgtaccgtgcctcagtttccccacttataaaaagaggttactaaaaaggatgcttcactcaagggtgtgaagacccagtgaatgaagtgttaataagagctccacgtatagcgatgctgctgttcagctgcaccagggtggactcccttgacttgctgggagttacaatgaggaaggaaggaccgttaaacctgtaggtctttccagagaaagtgcgtttcctaaaaccaaatcctgcccttgctccaaaactgtcagtggtggtttcccatgaccacgccacagtcccagggtctcccctggccttcaaggctggcacagtctgaccctgccaacgtccctagtgccaccatctgtcagcccctccttgctcctgctcctggtctgcacatgctgttctctt

SEQ ID NO: 25603 - DNA, 475 bp, Homo sapiens
  misc_feature (1)...(475): n = A,T,C or G
ntttgacccgcgctgcaggaattcttgacgagcctcactggaggccttatcccttcgtggagcccactaggtgccgacccctcagaatataaccctcatgcctggacccctgagagcttctgatcccagctattagggacagaagaagcctccaaatctggaaggtgctgaatgccctgctgactgggaaagtttcagggcactgatggggtctacctggtaagcggagggcctgaggaaacctgtagcttcaatcatgtctggtaaccgggtgcctgagccccaatctgggttgtgaggaaataggggagaggtatcctgggccacatcccagcctaacacctgtgaggttcattttaggaactaacctcattagctataaggatcatgcagaggcagcaaagccgggtgcgatgagctcagcctttactcattcacatacaccatcacactttaattccaatctgtatattgg

SEQ ID NO: 25604 - DNA, 501 bp, Homo sapiens
  misc_feature (1)...(501): n = A,T,C or G
aggggttnnnnnnccgnnnnnnnnnnaaatgaccgtctgtagacttcggcacgagcctgactgggacctcaagagagatgtggccaagaagctggagaaactaaaaaagcggactcagagggccattgccgagctgatccgtgaaaggctgaaaggccaggaagacagcctagcctctgcagtggatgctgccaccgaacaaaagacctgtgactccgactgaggcatgccctgccccaccactcgcccatcaggcctgtcctgcaggggatggtcttgggcagggatgggggctaggcttgccatcacctccagtttggcttctgagcagagactccctgcccatcaagtctgaaacccccatggatgaggtcagctccttgtctgctgggtggcccctgccattctgaatggaggcagaaccagcaacaactctgggcgtgcctgtgtctgcacatgtggatgtacatatgtctgtatatatgtatatattttgaactt

SEQ ID NO: 25605 - DNA, 351 bp, Homo sapiens
  misc_feature (1)...(351): n = A,T,C or G
nattgacnngttgtgcggcaattcggnacgagcagaggtggagggtggggggcgctgagtagggactcagggccatgcctgcccccctcatctcattcaaaccccaccctagtttccctgaaggaacattccttagtctcaagggctagcatccctgaggagccaggccgggccgaatcccctccctgtcaaagctgtcacttcgcgtgccctcgctgcttctgtgtgtggtgagcagaagtggagctggggggcgtggagagcccggcgcccctgccacctccctgacccgtctaatatataaatatagagatgtgtctatggctgaaaaaaaaaaaaaaaaaaactcag

SEQ ID NO: 25606 - DNA, 492 bp, Homo sapiens
  misc_feature (1)...(492): n = A,T,C or G
ngagggctnnncatcgtcgccattgaatnccccgagtgaagacgccagaataaatggcagtaagaagaaaaagagcaaagataagaagagaaaaagagaagatgaagaaacccagcttgatatgttgaggaacgcagctgctcaccagcaacggaacaaagctggacggagaatgactttgaagagctgagagaaggcttcagacgatcaaattactctgagctacgggaggacattcaaaccaaaggcaaagaagttgaaaactttgaaaaaaataaatgtacattaattaacgtggaatctggtgaacagtaacaaactttggtgaaatttcaggaaccatagccattgaagtggatgagggaacctatatacatgcactcacaatggtctttttaccctgggagctccacacaaagaagaatcgccctgaaacctggctatggaaaatatcttagtataaattcagatgaacttgttgttggcgttcag

SEQ ID NO: 25607 - DNA, 482 bp, Homo sapiens
  misc_feature (1)...(482): n = A,T,C or G
aatagatcnccntgnagnaanntttgacccgcgctgcaggaattcggcacgagcacaccggagccaggcgcctgctcatgttgaagtgcgctgttcacacccgctccggagagcaccccagcagcatccagaagcagctgcagtgttgctgccaccaccctcctgtctgcctcttcaaagtctcctgtgacattttttctttggtcagaagccaggaactggtgtcattccttaaaagatacgtgccggggccaggtgtggtggctcacgcctgtaatcccagcactttgggaggccgaggcgggcggatcacaaagtcaggacgagaccatcctggctaacacggtgaaaccctgtctctactaaaaatacaaaaaaaaattagctaggcgtagtggttggcacctatagtcccagctactcggaaggctgaagcaggagaatggtatgaatccaggaggtggagcttgcagtgagccgag

SEQ ID NO: 25608 - DNA, 450 bp, Homo sapiens
cgggcgccaactgccccgctgcgtagttcgcacgaggcggccggagtgcggcgctgggcggaacctaccatggcggccgagagaaagacaaagttgtccaagaatctgctgcgcatgaagtttatgcaaaggggactggactcagaaaccaagaaacaactagaagaagaagaaaagaaaatcattagtgaagagcactggtacttggatttgccagagcttaaagagaaagagagtttcataatagaagagcagagtttcttactatgtgaagatcttctctatggaagaatgtcattcagaggatttaatcctgaggttgagaaattgatgcttcagatgaatgctaagcacaaagcagaagaagttgaagatgaaacagtagagcttgatgtgtcagatgaagagatggctagaagatatgagaccttggtggggacaattgggaaa

SEQ ID NO: 25609 - DNA, 483 bp, Homo sapiens
  misc_feature (1)...(483): n = A,T,C or G
aatagaaagccatagaaaaannttttgcccgcgctgcaggaattcggcacgagtaaggccctgccaggctgggagggaattgtccctgcctgcttctggagaaagaagatattgacaccatctacgggcaccatggaactgcttcaagtgaccattctttttcttctgcccagtatttgcagcagtaacagcacaggtgttttagaggcagctaataattcacttgttgttactacaacaaaaccatctataacaacaccaaacacagaatcattacagaaaaatgttgtcacaccaacaactggaacaactcctaaaggaacaatcaccaatgaattacttaaaatgtctctgatgtcaacagctacttttttaacaagtaaagatgaaggattgaaagccacaaccactgatgtcaggaagaatgactccatcatttcaaacgtaacagtaacaagtgttacacttccaaatgctgtttcn

SEQ ID NO: 25610 - DNA, 317 bp, Homo sapiens
aaagccccgcctgcagaattcgcacgagatacagcctgtgggtttatcagtgcaacagcctggaacaagcacaagccatttgcaaggttttatccaccgcttttgactctgtattaacatctgagaaaccctgaatcctgcaatcaagtagaagtcaacttcatctgaaagttcagctgttttcaaactgcaatgctgaaatgttatgcaaataatgaagttatcccttgctctagattttctgaagaaaatggattgtgtaaaatgctgatcatttgtttattaaaatgtgtcctattaaaaaaaaaaaaaaaaaa

SEQ ID NO: 25611 - DNA, 442 bp, Homo sapiens
  misc_feature (1)...(442): n = A,T,C or G
agggtntnnnaggggntncccccnnaatagatcncccattgcaccgcctgcacgaattcggcacgagattcaggatacagaggagagccccagcgtaggccttggagaggcctcttctcaagcccaggagtcccattacctgccgtgtgactggcgagtcacctaagttctctgaacctcagctgcgtgtctcatgtattaaatgggcgcgacaacactggccttcagaggggatgtgggagtaaaaacaaaagcatctccagaggcccagtagacatgcaccacctgcttgaacgtttgctgagtgaattcaccttggccagggcctgattgggctgggctagtgtctgtcctcccccgacagagacgggcacacccagggatggacaagagtttggtccaaagttggcactaatctccctttaaaaaaaaaaaaaaaaaa

SEQ ID NO: 25612 - DNA, 528 bp, Homo sapiens
  misc_feature (1)...(528): n = A,T,C or G
agcntgtcccagggntgnnnnnnnaatagatcggctgtaggaattcgctcgagccacaacaaatctagctctagttgttatatttaggcaaaactttgtagtcttctttcccttttatgatggattttgataaaagtacaaaacagggtttttcttttttatcacctttgaatttggaaattttgagcacccaagctcttctgtacctatttaaagtccaccaaggggactgcagctcctagaacatgagaatcaagcctcttaattttaaactgcggaatgtggcctctgcttcctccgtcctcctgcccaaggacgacgaggattgctccagggctgctgggtagtttaccgtcccttctataggcatggagttggcactgacatcacagcttcataaccccaccaccggccagcttccctgcctcctacatccagtctgttcttgttcatagagagaatcctgtgttcccacttcagtgacacctgaattggttggtggtgtttttttttttattgcgtaaagaa

SEQ ID NO: 25613 - DNA, 495 bp, Homo sapiens
cgcccattgatcccgctgcaggatttggcacgacgattgatgatttcttcattaaaatcgaaacatggcacaaaccagacttgggaacattagaaaatgtacatggtttagatccaaacacatggaaaactgttgaaattgtccatatagatattgcagatagaagtcaagttgaaccagcagactacaaagctgatgaagacccagcattattccagtcagtcaagaccaagagaggccctttgggacccaactggaagaaggagctggcaaacagccctgactgtccccagatgtgtgcctataagctggtgaccatcaaattcaagtggtggggactgcaaagcaaagtagaaaacttcattcaaaagcaagaaaaacggatatttacaaacttccatcgccagcttttttgttggattgacaagtggatcgatctcacgatggaagacattatgagaatggaagacgagactcagaaagaactagaaacat

SEQ ID NO: 25614 - DNA, 480 bp, Homo sapiens
  misc_feature (1)...(480): n = A,T,C or G
cgcgaangnaattgaacgcattgaggacctcttttcatcttttaaagacttaatttatattgtaacctcagacatattatcagcgcctcagatataatttaatcttaagtctttaaaggccccctgaaacaaaagcatactttttatttaggcttcctcactttctggtagtcactttcacccagtctccagttttaccctgacttatagtccacaaacttcatcagaccctctgtgctcatggacttgggcctttctagagggaagcctaaggctcggctccagatgagctgtgccagtacacccaatgctcgtgacaccccaaacaggaccgtgtagtaattcatctccgtcatgccataatactggagcagcaccccactgtgagcatctacattgggccaaggattcttggctttaccctgctctaagaggacattgggcacaatcttgtacagctgagcaaccaacttaaacatg

SEQ ID NO: 25615 - DNA, 533 bp, Homo sapiens
  misc_feature (1)...(533): n = A,T,C or G
agggatncccaggggnccnccccnatttgacncccatagcacgcctgcggcagganaaaaagaggaggaatacactttattctacagatttctaaggatattacatcaaaaaaagtacaaaatgacaattttacagttagaaattatgttctattctaaaatgaataaagttttctagttttgcatttttttttcaaaagaattcacttcaaaaaaaaacttgtgaattagcataaaataaccccttatcacaaaggagcccaaactaaggaggcaccaactaaggctgaaacaaactgagcattcttattctcagcacctgcgcctggcctggcccagggtgacatgcaggggcttggagcccactatgcggccattcatctcatccactgctttggtagcctcttcaaaagaggaaaagcagaccacaccaaatcctttgccttgccccacttccatcatcactttggcccgactaattgacccaaaggaagaaaattcctccttcagtttttcatcattggatggctcat

SEQ ID NO: 25616 - DNA, 449 bp, Homo sapiens
  misc_feature (1)...(449): n = A,T,C or G
gaattgatnncccttnnnnnnncactgaccccgctgcaggtaacatccagctctatgtgggaaaaaagaaatcctggtttgtaatgtttgtcagtaaatactcccactatgcctgatgtgacgctactaacctgacatcaccaagtgtggaattggagaaaagcacaatcaacttttctgagctggtgtaagccagttccagcacaccattgcatgaattcacaaacaaatggctgtaaaactaaacatacatgttgggcatgattctacccttattgccccaagagacctagctaaggtctataaacatgaagggaaaattagcttttagttttaaaactctttatcccatcttgattggggcagttgacttttttttttgcccagagtgccgtagtcctttttgtaactaccctctcaaatggacaataccagaagtgaattatccn

SEQ ID NO: 25617 - DNA, 490 bp, Homo sapiens
  misc_feature (1)...(490): n = A,T,C or G
acgtggttttaactaatncccctactgatcgccctgtggaattcggcacgaggagatatctctttgttgtggaccgtctcattgcacttgatgctgcagaagagttctttaagcttgctcgtcgaacttaccccaagaagcctggggttccatgcctggcagatggccagaaagaactgcactaccttccgtttccaagtccctaaaggagaggctcaggggcagaatgggaattcttccatgaggactcagcagtcaaccaaagttggacaattacatgtagaagagagtgagcaaatagagtttgcttagtgaaaaatgatactgaattctacataaatgtaaagtctttaatctgaggaccctgccccatgaattgtgcaggctgcattgaaacgccttggtgatctcatatttaggaagaaagttaaagagttggtcagatggatagttcataatgggtggttccattctgagagcccattgcccc

SEQ ID NO: 25618 - DNA, 312 bp, Homo sapiens
  misc_feature (1)...(312): n = A,T,C or G
ngaggggcnnnaattgaancctcatcgatncgccttcangaattcggcacgagcctcaaccagctccctcaggagtgtttgcttcaagtgatggccggtgagctgcggagagctcatggaaggcgagtgggaacccggctgcctgcctttttttctgatccagaccctcggcacctgctacttaccaactggaaaattttatgcatcccatgaagcccagatacacaaaattccaccccatgatcaagaatcctgctccactaagaatggtgctaaagtaaaactagtttaataaaaaaaaaaaaaaaaaaa

SEQ ID NO: 25619 - DNA, 516 bp, Homo sapiens
cattcgaccggccattagcaacgcctgcacgaattcggcacgagccgggaggcagctgtgtcggcgtccgacatcctacaggagtcagccatccacagccctggaacagtggagaaggaggcaaagaagaaaaggaagttgaaaaagaaagccaagaaggtggccagtgtcgactcggctgtcgctgccaccacccccaccagcatggccacagtccagaagcagaagtcaggtgagctcaacggggaccaggtgtcgcttgggaccaaaaagaagaaaaaggcaaagaaggccagcgagacctctccattcccaccagcaaagagtgctacagctatacctgcaaactgaacccagccatgggcacagggctcagccagctccaaggacaaggtgtcccccccaccctggggacaaggcatttccaagccccacctccctctccaagttcaaggactgggctggcaaacccagactggccatgagaccctgatggtgatgaaagcttgctcgaaa

SEQ ID NO: 25620 - DNA, 493 bp, Homo sapiens
  misc_feature (1)...(493): n = A,T,C or G
acgtttntcactgatccatagaggacttcggcacgagctagcgtattactgttctgtgacttccctgtgacctctgcagaactcctcatcctgcgtttggtctccaggtgtcccctttctgccgtgttcctaacattttgattcctgtcttgaaaaaagcacctgctgcaccgtaagcccagggatgtggcagctgcagtgggcttggctttgtgaggaactgagtgtgtccacgttgggggaacatcatacttgatacacacgtttttatttgcacaaagaaaatgctgtttttggagccagaattttcatgtctgatttatggtgattttcttaagaaccagaactgctggcagaaagggggcacccacacgcttagatagccgatgtcttattagagggcagtttgtggttcctgatttggaaattaacattctccanacattccagtccaatgaaagtntatccgctttccatataanaatcttccatg

SEQ ID NO: 25621 - DNA, 345 bp, Homo sapiens
cttgcaccgcctgcaggaattctgcacgagcaaactcaggcactgtatagatgaccactttcgtaaactactgacctagcttgttgccaattgttgattgaacttcccataactccacttcgtgtctgttcctctgtatacagccaccttctgttcccgtcatgagcctttaggtctccatttgcatattgcaaatactatgttccatgtaggtagctcattcagggccttgctcttcacttcaaaaaaggttcccttgaggactggctgtcaatttgtgttgctgtgttggttgttgatgaaaataataaaatgattgattacataaaaaaaaaaaaaaaaaaa

SEQ ID NO: 25622 - DNA, 504 bp, Homo sapiens
  misc_feature (1)...(504): n = A,T,C or G
agcaggcccccaatgacgcctggatgaccgcctagccgacatcttccagtaattcgccaaaatgacgaacacaaagggaaagaggagaggcacccgatatatgttctctaggccttttagaaaacatggagttgttcctttggccacatatatgcgaatctataagaaaggtgatattgtagacatcaagggaatgggtactgttcaaaaaggaatgccccacaagtgttaccatggcaaaactggaagagtctacaatgttacccagcatgctgttggcattgttgtaaacaaacaagttaagggcaagattcttgccaagagaattaatgtgcgtattgagcacattaagcactctaagagccgagatagcttcctgaaacgtgtgaaggaaaatgatcagaataagaaagaagccaaagagaaaggtacctgggttcaactaaagcgccagcctgctccacccagagaagcacactttgtgagaaccaatgggaaagagcn

SEQ ID NO: 25623 - DNA, 507 bp, Homo sapiens
  misc_feature (1)...(507): n = A,T,C or G
agacgngnnnnatttgaccccttgcaccgcgctgcaggaattcggcacgagagacaggtaaaaaaggagctggaggagttccctgagacctgggacacctggcaggtacccattgtctagggactcagcagagaattcaagctttaagaggaattttcttgctggactctgagtccctgtcagccctcctaagtcttagatcatgcctctgagccctgtagtactgaatcaatggggatgctttggctgcaagtaacaaaacccaaataacagtaagtaagattaagcagagctcagatctcccaaagatgctctctgctcttggaaggtctctgtacacaggaatgggatatcagtgccacttccagcaagttcctgcatgggacaggtagccataaaggctgagtgtctggagttcagagtaataggttttgtcttcttgagtcacagcctctntaatatgttgatgagaagcccanggaacgttgatgtacaaagttggacata

SEQ ID NO: 25624 - DNA, 501 bp, Homo sapiens
  misc_feature (1)...(501): n = A,T,C or G
aggtgtcnctattgatcgcctgaggacttcggcacgaggtgatctgaggttctgccccaactgcacagcagttgggctgcttgttaaaaatgcaggccaggtgcggtggctcacacctgtaatcccagcgctttgggaggctgaggcaggtggatcacttgagctcaggagttcaagaccagcttgggaaacatggcaaaacccgtctttatgtgcctggaatcccacctgctcaggtggctagggtggatggatcgcttgagcccaggaggtggaggttgcagtgagctgagattgcaccactgcattccagcctggatgacagagcaaaaccctgtctcanaaaaatgcagactggccaggcacagtggctcacacctgtaatccgactgtaagctcatcaccttgggaggccactgtangaggatcaattgagcctagaagttcaagaccagcctgggcanagtanggagaccccttctctacanatagtaataaaan

SEQ ID NO: 25625 - DNA, 443 bp, Homo sapiens
  misc_feature (1)...(443): n = A,T,C or G
nattgacctcgctgcgcaattcggcacgagctcctgtccaggtgctgctgctaacatctgcagaagatttggactgcactcctggatttcagcagaaagtgttccatatcaatcagccagctgaattcattgaggaccagtcaattctaaacttgaccttcagtgactgtaagggaaacgacaagctacgctatgaggtctcaagcccatacttcaaggtgaacagcgatggcggcttagttgctctgagaaacataactgcagtgggcaaaactctgttcgtccatgcacggaccccccatgcggaagatatggcagaactcgtgattgtcggggggaaagacatccagggctccttgcaggatatatttaaatttgcaagaacttctcctgtcccaagacaaaagaggtccattgtggtatctcccattttaattccagag

SEQ ID NO: 25626 - DNA, 447 bp, Homo sapiens
  misc_feature (1)...(447): n = A,T,C or G
ntttgaacatcgatccgcgctgaggaattcggcacgagccaatgatttcagcatggacaacatcagtgacagcggggcatccaatgagacaaccaatgccctccaggaaaattcactggctgatttttctctgccccagacaccacaaactgacaacccctcanagggccgaggagaaggcgtctccaagtcatttagtgatcatggtgtctattccccttcctccacgctgggggactcttcgttggttgatgaccccttggagtatcaggctggcctcctggtgcagaatgccattcaacaagccatagccgagcaggtggataaagctgtgtccaaaaccagcacggatggagcagagcaacagggacctgaagcgactgtagaggaagctgaagctgcggctttcggctcagaaaagcctcaaagcatgtttgagccacctcn

SEQ ID NO: 25627 - DNA, 466 bp, Homo sapiens
tggcgaaaaaaaaaaatttgtttgtctgcgctgcaggaattcggcacgagaggaggtggaattgaaagtatggcaattacagaagcttttggagaatttcgtactggaaaaacccagctttctcataccctctgtggtgaacatcagatggagctacttgattatgtagcagcaaagttccatgaagaagctggcatcttcaagctattgattatcgattcaataatggcactttttcgagtggatttcagtggccgtggggagttggccgaacggcagcaaaaattggcccagatgttgtcacgactccaaaaaatctcagaagaatataacgtggctgtttttgtgaccaatcaaatgactgccgatccaggagcaactatgacctttcaggcagatcccaaaaaacccattgggggacacattctggctcatgcttcaacaacaagaataagcttgcgaaagg

SEQ ID NO: 25628 - DNA, 465 bp, Homo sapiens
  misc_feature (1)...(465): n = A,T,C or G
tggtggccaaaaaaaaatttgattgcactgcggaattcggcacgagcagatatagatgcctgggaattgcgtaaagggataaacacacttgttacctatgatatggttccagagcccaaaatcattgatgctgctttgcgggcatgcagacggttaaatgattttgctagtacagttcgtatcctagaggttgttaaggacaaagcaggacctcataaggaaatctacccctatgtcatccaggaacttagaccaactttaaatgaactgggaatctccactccggaggaactgggccttgacaaagtgtaaaccgcatggatgggcttccccaaggatttattgacattgctacttgagtgtgaacagttacctggaaatactgatgataacatattaccttatttgaacaagttttcctttattgagtaccaagccatgtaatggtaacttggactttaatan

SEQ ID NO: 25629 - DNA, 472 bp, Homo sapiens
  misc_feature (1)...(472): n = A,T,C or G
attagacnccttcgcccgcctgcaggaattcggcacgagcagccatgagtatgctcaggcttcagaagaggctcgcctctagtgtcctccgctgtggcaagaagaaggtctggttagaccccaatgagaccaatgaaatcgccaatgccaactcccgtcagcagatccggaagctcatcaaagatgggctgatcatccgcaagcctgtgacggtccattcccgggctcgatgccggaaaaacaccttggcccgccggaagggcaggcacatgggcataggtaagcggaagggtacagccaatgcccgaatgccagagaaggtcacatggatgaggagaatgaggattttgcgccggctgctcagaagataccgtgaatctaagaagatcgatcgccacatgtatcacagcctgtacctgaaggtgaaggggaatgtgttcaaaaacaagcggattctcatggaacacatcca

SEQ ID NO: 25630 - DNA, 455 bp, Homo sapiens
  misc_feature (1)...(455): n = A,T,C or G
atggcccccgttgaggacttctgcacgagaaaaaacgaaaaattgaagaatgaaaaggccttgcgtctcaaccttgttggtgaaaaactgcaatggtttcaaaatcatcttgatcccccacaaacgagagattcaaagaaagatgcttgtgaactaattgaaaggtacttaaatcgattcagcagtgagctggagcagattgagttacataacagtatcagggacaggcaggggaggcggcactgttcccgggagaccgtcatcaagcagacgatggagcgggagcgacagcagtttgagggatatggccttgagattccagacattctaaatgcaagtaatctgaacacatttagggaatgggactttgatctgaagaaattaccaaacattaaaatgagaaaaatttgcgctaatgatgcaattcccaagacgtgcaagaggaanactactan

SEQ ID NO: 25631 - DNA, 368 bp, Homo sapiens
cacgccccccccattgaccgcctgcaggaattatggacgagcagtactagacccaagttctagcataacaaggcagaacatctccaccatccggacgcacaatcttcccaactgtcagctgatttcccgaagccactactcccccatctacctgtcggttgtcatgcttttggctgccctgagctggcagaacctgaccactctctcccaggtaacagaagactatgttcagactggagaacactgatcccaaatttgttcatatctgaagtccaccataaagtggatttactttttttctttaaaaaaaaaaaaaaaaaaatggggggggggcccggtccccaattcccctttttggggggggaagg

SEQ ID NO: 25632 - DNA, 479 bp, Homo sapiens
  misc_feature (1)...(479): n = A,T,C or G
gagaaaaaattggaccgcctgcttgaattcggctcgagctgagacgagcagggaactcagaacactgagtccctatttgatgttaaaatatgaccgttaaacttctgggtaagataatgaatggcactatggtttatactgtttctgttttatgggctcttccagagacgtgaactggaaaaggctctgcagtgtctgggattcgctcagtgctgctggggagggcaggtgtgaggggaatggccctggagggtgatggggctggggcatccgatgcagctttatagttctgtaattaccacttttaaactttttattacgaaatatgtcatggaccctggaattacggtgaggtatgcatgataatggcccccaagatgcccgtgttgtgacccccagaccttgtgagcgcctcacatggngagattgtcctaggtcatcttgcaggcccagggcagccccatgggcccttagagctt

SEQ ID NO: 25633 - DNA, 333 bp, Homo sapiens
  misc_feature (1)...(333): n = A,T,C or G
atctggaccanccttgtccagtatgttttctgtttgagctttttcattcttttgttaagccaacatgttgagaatttggccctgctgggatccatgtagtgggcactacctgctctttggccaaggccttcttaaatgattcagtctctcattatctgtcctctagccccacaccctgatttataccgtggccatggaagaacttgaggtcttgaccttccaaatctgtgaattacagctgttatttttttctcttgcagggcgctttgctttaggtctgggctatgtgcagaacctattcaggctgtgatagttagataaggcagtatttct

SEQ ID NO: 25634 - DNA, 459 bp, Homo sapiens
  misc_feature (1)...(459): n = A,T,C or G
nttgaccgcctgtggattccgcacgagttttcctgaggcattttatttgtaaatatatgtattacatccctagaaaaagaatcccaggattttccctcctgtgtgttttcgtcttgcttcttcatggtccatgatgccagctgaggttgtcagtacaatgaaaccaaactggcgggatggaagcagattattctgccatttttccaggtctttgagttgcacgtcaaatctggggctgatcaccccacacttgtttagcctgcctgtgaggttcacaacaattttcccagctctgtggtcatcaatgatttcaaattcgccaatgtaaccatgcttcatcatcacagtgagaaaccggacgatgactttggagcacggcctaataagcaacctgcgtttgcctctcttttcggcattgttgatactcttgagagcatctgccaggacattcatgcgcac

SEQ ID NO: 25635 - DNA, 253 bp, Homo sapiens
  misc_feature (1)...(253): n = A,T,C or G
tggtggagaaaaaaaaaantttgactcgactgcggattcggaccaggtgaaccccatccagggcttagcctccaagtgggactacgaaaagaacgagtggaagaagtgagagatgctggcctgcgcctgcacctgcgcctggctctgtcaccgccatgcaactccatgcctatttactggaaacctgttatgccaaacagttgtaccactgctaataaatgaccagtttacctgaaaaaaaaaaaaaaaaaaa

SEQ ID NO: 25636 - DNA, 304 bp, Homo sapiens
  misc_feature (1)...(304): n = A,T,C or G
atganatttaanatgggtgcagatcccggaatgcctgaaccaactgttttgagcctactttggggataaaggattatttggtcttctggatttggaggcaatctgcggacagcatggaagatgtgtgctatggctaggataacagatgggacatcattcaacaactaattggatggacaaggctcttaacagacgcatatgtagcacagtggaacttgtactaacttactgtagaatgtgtcataatacatgtttctttcagtgttatgaagccttacaacgcacagtacttaagaagcttggg

SEQ ID NO: 25637 - DNA, 448 bp, Homo sapiens
atttgcttcactgcaggaattcggcacgaggagcaatcttttctacagaaggttaaaagcatcttgactcctgaaggtgtttttattctcaaccttgtgtgccgagacttggggctaaaagactcagtgctggctgggctcaaggcagtgttccccctcctatatgtccggcgaattgagggtgaagtgaatgagatcctgttctgtcagctgcaccctgagcaaaaacttgccacaccagagctcctagaaacagcccaggctttggagcggaccctgaggaagcctgggaggggttgggatgacacgtatgtcttgtcagatatgctcaagacggtgaaaattgtgtgactgcttaggccaagcagccctcctgcctagactgaccttggactcccagcctgccagagaatgaagaaatacaacgcacagtacttttgaagcttcg

SEQ ID NO: 25638 - DNA, 487 bp, Homo sapiens
cttcgacccgccatttgcgccgcgctgcaggaattcggcacgaggttacttcaagggcagccagcaggcctggatggaggcctagaaagcccttgccttccttcctcccacttctttctccaggcctggttaactcttccgttgtcagcttctcccccttcagcctgtttctgcagcagccagggttctccccactacaccctctgcaggtggagagagagaagctgggcccagccgggccgtgcctgctggcacagacgccttaacgctgtgtgtatgactgtgtgactgtgtgggagcctggactgacagataggccaagggctactctctggcatctccaggtgttttgtagcaaacagccacttagtgctttgtcctggactccactcagcctcaggatggggaatagccaagaatggcagcctcagcgcagaggcaaggtcagaaagagacggcgcttcagagttcctttccagacacccct

SEQ ID NO: 25639 - DNA, 468 bp, Homo sapiens
  misc_feature (1)...(468): n = A,T,C or G
aggggtgccnagaaaaaaattgattcgccctgcgctgcaggaattcggcacgaggaaaaatctggattaaaaaattacctcttcagtgttttctcatgcaaaattttcttctagcatgtgataatgagtaaactaaaactattttcagcttttctcaattaacattttggtagtatacttcagagtgatgttatctaagtttaagtagtttaagtatgttaaatgtggatcttttacaccacatcacagtgaacacactggggagacgtgcttttttggaaaactcaaaggtgctagctccctgattcaaagaaatatttctcatgtttgttcattctagtttatattttcatttaaaatcctttaggttaagtttaagctttttaaaagttagttttgagaattgagacacaatactaatactgtaggaattggtgaggccttgacttaaaactttctttgtactgt

SEQ ID NO: 25640 - DNA, 477 bp, Homo sapiens
  misc_feature (1)...(477): n = A,T,C or G
nttgcacgccttaggaattgccccgcgctgcaggaattcggcacgagagcaggtcagacaacaggcaaccctgaggcagctggctccctctctctgccctgcagggcttgccgcagggcgtgaggctccccagccacagccccctcttacttgccttaaaactggagagaggaatctagtatttgcacttagcaaaatatttaaaaactgaaaaaaatgtgcatgatctgtcactttgtataaaaacaagaaacgattagttcattaaactttttctttaccttctggtagtaaaaatagataaaataattccgtttcaactactgtgtgtaaaaagcctgtatcatatgtaactgggacttttgtaaataaatgtttgtgcgctctgcaaaaaaaaaaaaaaaaaaaaaacctggggggggggccgggccccatttccccttatgggggggggataacaatcacttgcccggcgtg

SEQ ID NO: 25641 - DNA, 486 bp, Homo sapiens
ccgcgcccattgacatcgcccggctgcaggaattcggcacgagcttgctgcgtgtcccaagatttagaacctctaaccattctctactacattggcaaaacacccaagattgaacagctttctaatatgattgtaaagtcttgcaaatgcagctaaaattcttggaaaagtggcaagaccaaaatgacaatgatgatgataatgatgatgacgacgacaacgatgatgcttgtaacaagaaaacataagagagccttggttcatcagtgttaaaaaatttttgaaaaggcggtactagttcagacactttggaagtttgtgttctgtttgttaaaactggcatctgacacaaaaaaagttgaaggccttattctacatttcacctactttgtaagtgagagagacaagaagcaaattttttttaaagaagaaaataaacactgggagagtttattagtggtaattatgtgaacaacgacaacaaca

SEQ ID NO: 25642 - DNA, 478 bp, Homo sapiens
  misc_feature (1)...(478): n = A,T,C or G
ntttgctccgccctgcaggaattcttcgcgaggctatttcgacccagatccatcattatttccttattcaatccttccagcccatgcgactgaaagcggacacgatgacgagaataaggaaataatgatggaactgggtcgaatttcttctagaaatcttggtcgtgatgacagagttattggtgatcatggaaaagaagcaagatttcctttcctggatgaaaatgttgtctcctttctaaattctctgccgatttgggaaaaagcaaacttgactttaccccgaggaattggtgaaaaattacttttacgccttgcagctgtggaacttggtcttacagcctctgctcttctgcccaaacgggccatgcagtttggatcaagaattgcaaaaatggaaaaaattaatgaaaaggcatctgataaatgtggacggctccaaatcatgtccttagaaaatctttctattgaaaaggag

SEQ ID NO: 25643 - DNA, 482 bp, Homo sapiens
  misc_feature (1)...(482): n = A,T,C or G
gcgccccattcacgtctgcangacttcggcacgaggagcatctgagctcgctgcccacgcagatggattacaagggccagaagctagctgaacagatgtttcagggaattattcttttttctgcaatagttggatttatctacgggtacgtggctgaacagttcgggtggactgtctatatagttatggccggatttgctttttcatgtttgctgacacttcctccatggcccatctatcgccggcatcctctcaagtggttacctgttcaagaatcaagcacagacgacaagaaaccaggggaaagaaaaattaagaggcatgctaaaaataattgaggttttcatgattcagcacctgcttttgtttctgtgagatgagctaaattgctttcataccccagataagagctaaaaccacctaatgctcttatggcacagctgtgtatagatntagntctctttatacttcatttctagccc

SEQ ID NO: 25644 - DNA, 464 bp, Homo sapiens
  misc_feature (1)...(464): n = A,T,C or G
gtgcgnannnnnnaattgacctcctgcggcgttctgcgagtatacttacgttccttggatgatctctagttgattttttaagttctgagttgatgctgttaaggtacccggggtagccattggttcttggatctgtgttagaatgagtgctttcccttcctactgatgtgattgtggattaggaattcgtgaccgagtgatttttggccagtggttgggtttaaaattctattaaaatttgtagtttgggctgggtgctgtggctcatacctataatcccagcactttgggaggccgaggggggcagatcacttgagctcaggagttcgagagcagcctggtcaacatgacgaaaccccgtctctactgagaatacaaaaattagccaggcatggtggcccatgcctgtagtacctgctattggtaaggctgaggtggaaggttcacttgagcctgggaggtgg

SEQ ID NO: 25645 - DNA, 487 bp, Homo sapiens
  misc_feature (1)...(487): n = A,T,C or G
ggagggtccnaggaaanaaacatgatcgcctcgatgtaccgactaggcagaccagacttcgctcgtactcgtgcgcctcgcttcgcttttcctccgcaaccatgtctgacaaacccgatatggctgagatcgagaaattcgataagtcgaaactgaagaagacagagacgcaagagaaaaatccactgccttccaaagaaacgattgaacaggagaagcaagcaggcgaatcgtaatgaggcgtgcgccgccaatatgcactgtacattccacaagcattgccttcttattttacttcttttagctgtttaactttgtaagatgcaaagaggttggatcaagtttaaatgactgtgctgcccctttcacatcaaagaactactgacaacgaaggccgcgcctgcctttcccatctgtctatctatctggctggcagggaaggaaagaacttgcatgttggtgaaggaagaagtggggtggaagaagt

SEQ ID NO: 25646 - DNA, 510 bp, Homo sapiens
  misc_feature (1)...(510): n = A,T,C or G
ggggaggggnnnattcccggctgcagatttgcccggctgcaggaattcggcacgagtacaaatattatttttctatcatattgacctaccatgtccacagtcttccttgaattaccttccagttttactgggctgcatctaccgtttatgtctagtttgactttttctgagttcaccaattgctgctaggaatgtgctggtcactcagcagcacacccacatcacaggggaagattttgaaatacctggacagtctgaacacactgctctgaatacactcaattctaagaagtaccagggaaccgcatcttcttgctgaaatcttgaatttttgtcagcttttttttttactgtggacagtaaagctggaaagatctaaataacccaacaggaaatgcggatgaaagtgccagagttggtttgtggtcatctggagtccatgtctccaagactgctggaccttcaaattctgcaacttgttagatcatctggatgatagcacaactgtta

SEQ ID NO: 25647 - DNA, 501 bp, Homo sapiens
  misc_feature (1)...(501): n = A,T,C or G
ggannagannngggnnaaaaaaaacttgaccgcctgctgaattgcacgagagggcttctctcgtctgaatttctagatttaagtcatgaagtgtaaaactgtttcacccagaagtgtaactaagcagaactaggagttttctctggcttcacctttttcagagccagcagtgctgttttctcaagcacagcgtttgctcttagactctgatctgcttgtgcctaagcattgcacaggtttccgaagacgggcagcttcagagaagaggattattcgggagattgctggtgtggcccatagactctttggcatagactctttcgcaggcagccactctgagtgtggccagttctataaccatccccaaactagctggagcctgatggataggaacgggtagtctgtcctcttccccataaaaatgttccaaaaagttatctccagagagagtcccttatgaagacagttgccaagctgtattctcattctttaaaccaatac

SEQ ID NO: 25648 - DNA, 504 bp, Homo sapiens
  misc_feature (1)...(504): n = A,T,C or G
aggggggggntttcacggctgcggattcgacaggatgcatactgcctgcgcctaccctgaagtggggtctgcacacccttcagagactatcaggagtcacagggccacatacaggccgatggagccctaccaagttgcgcttagaccaggaggcctgctagggttaggaggtccttaggcctctgagaagctctgaagaactctctggaagcccctgggcccagtacctagctggctctgtgagggtgctgactggcttcagcaagttagaactagccaaaccaggaccctgtccaatctttgacaattgggagctgccaagagtgaagggaagagacagcccaggatactggcacagaggtagtctcactgcttgaactaggctgagcaatctgaccctatgggtctaggacacagttcctgggaacatcacattcctctgcccttcctgcaggcaggaacaaacagggctgccttctggccttgtaagacccttattgctgg

SEQ ID NO: 25649 - DNA, 477 bp, Homo sapiens
  misc_feature (1)...(477): n = A,T,C or G
nattgannaactgagcgccttaggaattnggcacgaggagtttttgggtgttaatgattctgcctgcccacaggtcgggtcttggggtctggagcgtttgggaaggtggttgaaggaacagcctatggattaagccggtcccaacctgtcatgaaagttgcagtgaagatgctaaaacccacggccagatccagtgaaaaacaagctctcatgtctgaactgaagataatgactcacctggggccacatttgaacattgtaaacttgctgggagcctgcaccaagtcaggccccatttacatcatcacagagtattgcttctatggagatttggtcaactatttgcataagaatagggatagcttcctgagccaccacccagagaagccaaagaaagagctggatatctttggattgaaccctgctgatgaaagcacacggagctatgttattttatcttttgaaaacaatggtgan

SEQ ID NO: 25650 - DNA, 481 bp, Homo sapiens
  misc_feature (1)...(481): n = A,T,C or G
atagatcacantnantaanntttgacccgcgctgcaggaattcggcacgagagcctggcgcggaggctatgggcagccaggaggtgctgggccacgcggcccggctggcctcctccggtctcctcctgcagactaacgctgctttactcaaccaccctcttcctggccagagaggccttccgcagagcatgtctcagtgggggcacccagcgagactggagccagaccctcaacctgctgtggctaacagtccccctgggtgtgttttggtccttattcctgggctggatctggttgcagctgcttgaagtgcctgatcctaatgttgtccctcactatgcaactggagtggtgctgtttggtctctcggcagtggtggagcttctaggagagcccttttgggtcttggcacaagcacatatgtttgtgaagctcaaggtgattgcagagagcctgtcggtaattcttaagagcgttctga

SEQ ID NO: 25651 - DNA, 479 bp, Homo sapiens
  misc_feature (1)...(479): n = A,T,C or G
nttttganccgcgctgcaggaattcttgacgagcaatacttagcaatacttgttataaaagtattttgtagatctgattaaagtccatagttcattgactctaagtaagggaggatttccttagataatcttgatgggtcagattcaaacagttgcaagttcttaaaagcagagttgaggcttcctttggaggcagaaattctgcctgtgaactgcagcaccagctcttgcccaagagttccaaccaaccttcacagaaacctgccatggaaatttcagacctgcatagctagccccacaatcacgtaagctgattccttgcaataaattgcttcagatatatctccaactgcttctgatttctgattgaatccaaatagataaaatgggccaagaaatgtgccaagcttatgccatgaaatcactcagatgtacataatattatcctctgctgtgttctgcgtcccttcagaaactga

SEQ ID NO: 25652 - DNA, 510 bp, Homo sapiens
  misc_feature (1)...(510): n = A,T,C or G
gggggaggggnnattgacggctgcggatctgcccggctgcaggaattcggcacgaggaagactgctgccgctgtcaccgttgcgctgaaaccccatgggcccgttctgattgaaggtgaagcccaccagattatttttcaaagtcttaggtttcggtgtatctaacctgctcagtaaatatggacgcaattaaagatgctctaggaaatttggggactgtatttaatttttctttccttccatctgaggagcaaggaaatcctactgctgaatagctgttagtatctattttacaagatttactcattttcaggtacctaatgtagctgctagcatgcatgcacaacaatacaatttatatggtaaatggaaccaaataatggcttcactgaatgttatggctgcactgaagggaaatgtcacggtaaatagctgccaaattatggatcatngccgagtgtcacaactgcactaaagacaaatagcactagaggctattgccactgtgac

SEQ ID NO: 25653 - DNA, 479 bp, Homo sapiens
cgcgcccccatcgcccttctgacccgcgctgcaggaattcggcacgagtgttcccttcccctgtgttcaatgtttgtaaagattgttctgtgtaaatatgtctttataataaacagttaaaagctgacagttcgcccttactcttggaggtcatgttcaggaggggcattcctttcccctgggggtcatgggtgtccccatgcccacatattgcacgtgcagggaggtaagtgcctgcatcccaaatcggttctaggtcaactggcctcaaactgatttgccatgagctcacaaaatgaatccctatgcttaatgaccaggtcacataaaatccagcccacttacaggttttctggcatctgtttgggtgtcctaatttttttggcagtgtcatttgaagaatttttttaaagcagtttatttaagaacatactgattaaatgcaggatcgctactaaaaattgttttgtatccttggt

SEQ ID NO: 25654 - DNA, 488 bp, Homo sapiens
  misc_feature (1)...(488): n = A,T,C or G
tggggttcccnagaaaannaacatgatngcctggatgattcgactaggaagcgcacaacatgggaactattcacatgtccgaaatttgtactgaattaaaaaatttaagatctttagtccgagtatgtgaaattcaagcaactttgcgagagcaaaggatactatttttgagacaacaaattaaggaacttgaaaagctaaaaaatcagaattccttcatggtgtgaagatgtgaataattgcacatggttttgagaacaggaactgtaaatctgttgcccaatcttaacatttttgagctgcatttaagtagactttggaccgttaagctgggcaaaggaaatgacaaggggacggggtctgtgagagtcaattcaggggaaagatacaagattgatttgtaaaacccttgaaatgtagatttcttgtagatgtatccttcacgttgtaaatatgttttgtagagtgaagccatgggaagccatgtg

SEQ ID NO: 25655 - DNA, 492 bp, Homo sapiens
  misc_feature (1)...(492): n = A,T,C or G
tgcngnttnnnnnnnccttgancgtctgtagacttcggcacgagcagagaaaggccttatgaatgcagcaaatgtggaatcttcttcacttacgccgctgacctcactcaacaccagaaagttcacaatagaggaaaaccgtatgagtgctgtgaatgtggaaaattcttcagccagcactccagccttgttaaacatcgcagggttcacacgggtgaaagccctcacgtgtgtggtgactgtgggaaattcttcagccgaagctccaacctcattcagcataagagggttcacactggtgaaaagccatatgagtgcagcgactgtgggaagttcttcagccagcgttccaacctcattcatcataagagggttcatacgggcagaagtgcccatgagtgcagtgaatgtgggaaatctttcaactgcaactccagcctaattaaacattggagagttcacactggagaaagaccttacaagtgtaacgaa

SEQ ID NO: 25656 - DNA, 514 bp, Homo sapiens
  misc_feature (1)...(514): n = A,T,C or G
cgtgggaggggnnattcccgccttngaattgcccggctgcangaattcggcacgaggggaatcgtgtcttactcatctttgtatccccagtgtctagcagttcctgatacatagttttagctgaattttgggacatggccactgcttcaccaaggtctgatactagtaataaccacagtggaaggttgcagttacaggtaactgtttctagtgccaaacttaaaagaaaaaagaactggttcggaacagcaatatatacagaagtagttgtagatggagaaattacgaaaacagcaaaatccagtagttcttctaatccaaaatgggatgaacagctaactgtaaatgttacgccacagactacattggaatttcaagtttggagccatcgcactttaaaagcagatgctttattaggaaaagcaacgatagatttgaaacaagctctgttgatacacaatagaaaattggaaagagtgaaagaacaattaaaactttccttggaaaacaagaa

SEQ ID NO: 25657 - DNA, 450 bp, Homo sapiens
  misc_feature (1)...(450): n = A,T,C or G
natttgaccctcgctgcagcaattcggcacgaggatcccccaaataagagataaagaagaccctcaagagatgccccactctcccttgggctctatgccagagataagagataattctccagaaccaaatgacccagaagagccccaggaggtgtccagcacaccttcagacaagaaaggaaagaaaagaaaaagatgtatctggtcaactccaaaaaggagacataagaaaaaaagcctcccaagagggacagcctcatctagacacggaatccaaaagaagctcaaaagggtggatcaggttcctcaaaagaaagatgactcaacttgtaactccacggtagagacaagggcccaaaaggcgagaactgaatgtgcccgaaagtcgagatcagaggagatcattgatggcacttcagaaatgaatgaaggaaagaggtcccagaagaa

SEQ ID NO: 25658 - DNA, 515 bp, Homo sapiens
  misc_feature (1)...(515): n = A,T,C or G
ccccccccccccnnnaggggnnatttgacncgcgctgcaggaanatttgactccgcgctgcaggaattcngcacgagatttcaaacagagctgctgggtccgtgccatatcccaggaggaccagctggccccctgctggcaggctgaacaccctgcggagcgggtgagatcggctttcgctgcacccagcactgattccgaccagggcacccccttcagagctagggacgaacagccgtgtgctcccacctcagggccttgcctctgcggcctccacttggaaagttctcagttccctccaggcttctagaagcatctgggccagggctcatggctggataatttccctaggcttaacaacccaagcaagcttcgcatcctcgttttatttttggttaaacttatgaaaatgtattaagaaagagtgcagctcgagagagattcagagatggaacacaccagaccccagatcacaaagccaaccatgcccagcccctcccagcacccccagcccc

SEQ ID NO: 25659 - DNA, 523 bp, Homo sapiens
  misc_feature (1)...(523): n = A,T,C or G
gcgtggggnaaagcgacgcttngaannnncncaatcgaccgcctgcggtatggagagggaaatccaggctattaaagtcactaaatttctaagtatgtccatttcccatctcagcttcaagggaggtgtcagcagtattatctccactttcaatctccctccaagctctactctggaggagtctgtcccactctgtcaagtggaatccttccctttccaactctacctccctcactcagctcctttcccctgatcagagaaagggatcaagggggttgggaggggggaaagagaccagccttggtccctaagcctccagaaacgtcttcttaatccccaccttttcttactcccaaaaaagaatgaacacccctgactctggagtggtgtatactgccacatcagtgtttgagtcagtccccagaggagaggggaaccctcctccatcttttttgcaacatctcatttcttccttttgctggtgcttcccccctcacacacttggatntgttctatcctacat

SEQ ID NO: 25660 - DNA, 502 bp, Homo sapiens
  misc_feature (1)...(502): n = A,T,C or G
nggggggnnnntttcccgctgagattcgccgagccacccacagggagtctctccgcagagccttcttggtgttgccctaacttgccagtggcctttgctcagagcctcctcctgtgacatgtgaacaatgaagaggcctgcgcctcctgccttgccgcctgcaaagcaaagaaactgccttttattttttaaccttaaaaagtagccagatagtaacaagactggctggctgatgagcaaagcctttgctctcacgcagaggaaggcttggatgtacaatgaaactgcctggaactaaaagcagtgaagcaagggaggcaatcacactgaagcgggtcttcctccaggaacggggtcccacaggcgtgttgttttaaataacctgatgctgtgtgcatgatgctggtgcttgaccatgaaaggaaagtctcatccttaaaatgtgttgtacttcacaatcctggactggttgcttaagtaaacaatatccacattttgaaaa

SEQ ID NO: 25661 - DNA, 461 bp, Homo sapiens
  misc_feature (1)...(461): n = A,T,C or G
aatagaaaccccattgcaccgcctgcaggaattcggcacgaggaaacatctaggagcttactgaaatatgaaaaggcaaattttatacaaattatttttcctttttcctttctttcttgtccaagttcaggttaaaatcttagaaaattaaatgaaaggtcatttacagttccaaagaagaatattaaacatttttcacttaagttgagatttttgctttaaagagcttttaatgagtttttctgttatcataattttggtccgggtattcacttgagttgttgcttatactgttgtcaggtacagcagagagaacatggagcctgctgagatcttctctgttattcctgatcctaagtcatgtatatcgaaggctttgatttaaagtaatgcatgaggccagtgtancggggtcgaggcctgcccatgagtcangggagctcagtctccctggcctangn

SEQ ID NO: 25662 - DNA, 373 bp, Homo sapiens
  misc_feature (1)...(373): n = A,T,C or G
agtgatgnnnnnnaatgcgccggctgcaggaattcggcacgagtagaaactatacaagtggtttaacatgcattatcttactcaatccatacaaaagtcttatggaggtgttagcactctttctactgatgaagaactgaggtacttcataaaaccacttacccaaggtgtcttgagtctggtacaactggcattcaaatctaggtcagtctgcccccagagccactacccttacccctcactgaatctgcctttatattgttgagcccatgaccccaaactgctctttccaatttgaacttccagggattttattgtgaacttacatagcaacattaaaatgaagttgaattgttaaaaaaaaaaaaaaaaa

SEQ ID NO: 25663 - DNA, 476 bp, Homo sapiens
attgcccgcgctgaggatttcggcaccagccactcctgaagaacaaagatggctggaacagtttccacattgccagtcgagaaggcgaccctctgatcctccagtacctgctcactgtttgcccaggtgcctggaagacagagagcaaaattagaaggactcctctgcatactgcagcaatgcatggccatttggaggcagtcaaggtgcttcttaagaggtgccaatatgaaccagactacagagacaactgtggcgtcaccgccttgatggacgcaatccagtgtggtcacatcgacgtcgctaggctgctcctcgatgaacatggggcttgcctttcaacagaagacagcctgggtgcccaggctctgcacagggcagctgtcacagggcaggacgaagccatccgattcttggtctctgaacttggcgtcgatgtagatgtgagagccacatcaaaccacctcacagcactt

SEQ ID NO: 25664 - DNA, 467 bp, Homo sapiens
  misc_feature (1)...(467): n = A,T,C or G
nttagcttgcgctgcacgaattcggcacgagccgacgctactcgctgcagcatatgccagaagactggagaggtcctgcacgaggtcagcaatggcagcgtggtacaccggctctgcagcgattcttgcttctccaaattccgggccaacaagggactgaaaaccaactgttgtgaccagtgtggggcttacatctacaccaagaccgggagtcctggccctgagctcctcttccacgagggccaacaaaagcggttctgcaacacaacctgcttgggggcgtacaagaaggtggggccgagggagtagtgcattatagggctgtggaagggggtgtggttcttgggttataaataaaggtggctgatgggtcaagggctgggagaaataaaacaaataaagggggtttcaattgtatctgttatgttttatttttgaaactagctggcggatacacaggtctttgg

SEQ ID NO: 25665 - DNA, 487 bp, Homo sapiens
  misc_feature (1)...(487): n = A,T,C or G
gggagggcccaggaaanaaacctgaaagctccgctagagcccgtgggaagatgccagagattacaatttgactgaagaacagaaggcgatcaaggccaagtatccgccagtcaataggaagtacgagtgtgagtaggtggcttacttctctctttacatatttggatcatacagcagatgtccagtgagtatagcgggagttcattcctttgaaaccacgtcagtaggaagactgaatgtttcaatcttggttacacgcatggggagatactctggaggaagcatttgagcaatgtgcaatggccatgtttggttacatgacagatactgggacagtggagcccctccaaacagtagaagtagaaacccaaggagatgacttacagtctcttctgtttcactttttggatgaatggctttataagttcagtgctgatgaattcttcataccccgggtggggagaagaattttcattgtccaagcacn

SEQ ID NO: 25666 - DNA, 474 bp, Homo sapiens
  misc_feature (1)...(474): n = A,T,C or G
cccccccccccangcccccccattgccccccctgcattgaccngcgctgcaggaattcggcacgagagaagcaggaacaaatatggacgtggtagtatatcactcaattcttctcctagaggaagatacagtggaaagagtcagcattccactccttcaagaggaagataccctggaaagttctacagggtttctcagtcagcactcaatcctcaccagtcgcctgacttcaagagaagccccagggacctccaccaacccaacaccataccagggatgcctttgcaccctgagactgactcaagagccagtgaagaggacagcaaagtcagcgaagggggctggacaaaagtggaataccggaaaaagccccacaggccatctcccgccaaaaccaataaagagagagccagaggggaccaccgtggatggagaaacttttgatgaattgaactacatagcttttctaagcag

SEQ ID NO: 25667 - DNA, 492 bp, Homo sapiens
  misc_feature (1)...(492): n = A,T,C or G
gggtnttagnannttttgacggcttnggaanntttgaccgcctgcggattcggccgaggaaaaatggcagccgccgctccggactcacgtgtgagtgaggaagaaaacctgaaaaagaccccaaagaagaagatgaaaatggtaactggagccgtagcgtcggtgctggaagacgaggccacagacacttctgatagtgaaggaagctgtggatcggaaaaggaccacttttattctgatgatgacgcaatagaagctgacagtgagggtgatgctgagccctgtgacaaagaaaatgaaaatgatggagaatcaagtgttgggactaatatgggctgggcagatgctatggctaaagtcctcaacaagaaaactcctgaaagtaaacctactattctggtcaaaaaaaaaaacccaaaaaaaaaaaaaaaaaaaaccctggggggggggccggggccccaattcccctttttggggggggttttaaaattt

SEQ ID NO: 25668 - DNA, 524 bp, Homo sapiens
  misc_feature (1)...(524): n = A,T,C or G
gcgtggggnnaaagcgcgctgtggaannnnnnntttcgcccgcctgcangaattcggcacgaggtgctctttgtgaaattccaccatggcgtaccgtggccagggtcagaaagtgcagaaggttatggtgcagcccatcaacctcatcttcagatacttacaaaatagatcgcggattcaggtgtggctctatgagcaagtgaatatgcggatagaaggctgtatcattggttttgatgagtatatgaaccttgtattagatgatgcagaagagattcattctaaaacaaagtcaagaaaacaactgggtcggatcatgctaaaaggagataatattactctgctacaaagtgtctccaactagaaatgatcaatgaagtgagaaattgttgagaaggatacagtttgtttttagatgtcctttgtccaatgtgaacatttattcatattggtttgattaccctcatgttactacaagatggcaataaatactatgggattggttgtattaaaaaaaaaaaaaa

SEQ ID NO: 25669 - DNA, 501 bp, Homo sapiens
  misc_feature (1)...(501): n = A,T,C or G
ggggaggttgccaaggaaannaaaaactgaaagccntcgactgangcgcnntgagganacgccacgagccaaatggaaacattcccggaccatgatgctggtagtgtttaaatcggcaccaatcttaaagcgggccctcaaggtcaaacaggccatgctgcaactttatgtcctaaagctactaaagttacagaccaagtacctggggcgccaatggaggaaaagcaacatgaaaaccatgtcagccatttaccagaaagtgcgtcaccgcatgaacgatgactgggcttacgggaatgccagctaaagggaaaaaaggaaaaggccagggcaagtctcatgggaagaaacagaagaaaccagaagtggacattctcagccccgcggccatgctgaacctctactacatcgcccacaacgtcgctgactgcctgcatctgcgaggcttccattggccgggtgctcccaaaggaaagaaagggagaagcaagtgacagcatt

SEQ ID NO: 25670 - DNA, 492 bp, Homo sapiens
  misc_feature (1)...(492): n = A,T,C or G
tgggnntnnnnnaattgatcgtctgcagacttcggcacgagggaaaccagaccttgnggatcaccaggcaggattagtggccggaattgagagaacagagccccacagagctcgtcggggaccgtcccccagtcacaagagtgtctcaaggaagcagtcttctcccatatcccccaaagataactaccagagggtcagttctctgagcccttctcagtgtagaaaagacaagtgtcaaagcttccccactcaccctgagtttgccttctatgacaatacgtcgtttggcctcactgaggctgagcagaggatgctggacctcccaggatattttgggtcaaatgaagaggatgaaaccacaagtacacttagcgtggagaagctggtgatctagactgagaatcagcctgagctttacacagctggggtctgctactcgcgttttgtagacttttgtgtaactatttgtaccgtaggacagaatgtgaggag

SEQ ID NO: 25671 - DNA, 466 bp, Homo sapiens
  misc_feature (1)...(466): n = A,T,C or G
naagcccctctgcccacggctgcaggaattcggcacgagatcctcttcccgtggtgtggtcaatcagacatttacaagaagcatcagcaacagatggaaaaggcaagttctctcgtgctcattttgtgttgctcagcttgctctgaacccacgtgctgcggcactgcggaggagtggaggcagcctatggtgtcaagatgctgtcttcctgggaggagagctaggggaggcctggggcccacttcgtgagagcagccaggggtagtttggagaaggaggtgttgagtcagttgtataaggaggaggttgggngtgactgctgcttattaagatgattcatttcatttccactcgtggttgtgattttcaccttctcaaaactgagtcagcaagagaaaatcttgtcttagaagggccagataacacttcgctgtgagaacaggagggataatggattggagatggt

SEQ ID NO: 25672 - DNA, 475 bp, Homo sapiens
  misc_feature (1)...(475): n = A,T,C or G
nattgcancgcctgtggaattcctcgcgagccctgatgtgtgaggttcgcctctatgagcgactattccagcacaagaaccctgaagatcctactgaggtgcctggtggatttttaagtgacctgaacctggcatcactacacgtggtggatgcagcattagtggactgctctgtggccctggcaaaacccttcgacaagttccagtttgagcgtcttggatatttctccgtggatccagacagccatcagggaaagcttgtctttaaccgaactgtcacactgaaggaagacccaggaaaggtgtgagctggaagcactgaacctacctcatcctcctggaggtgtggctaccctcgccaccccaaattccatgtcaataaagaacagctaaattctcaaaaaaaaaaaaaaaaaactcgggggggggccgggcccccaattccccctatagggagccggataacaatccacgg

SEQ ID NO: 25673 - DNA, 499 bp, Homo sapiens
  misc_feature (1)...(499): n = A,T,C or G
gcgggnnntttgaagctattgatcgccctctcggaagtcgcacgaggagaaatgtatgggtctttctcacaggcctgctgatttgtaactgtgccatcgaatatagcaattatatccatcagacctttttcccctcattaagttcagtggaaccattctggttaaaacagcatgaactgaactcagtttacattcatattctatgggcaataccatttggtttttggaactgtttatctgctgttccctatcaagtattaatgtagggatgtcactcaggctgcgttgcactgggctgagttcaactgcgacgctctcactgacgcgtgcttacatgtgcttctcacttccggagcacaggcacgtggctgcggggacccagctctgaatggatgcccatgatgcaactggggcagcccttgctttttgcttgctctcccacagaaacctttgtccttgcaactttatcctttgtgccgattgggtcccagatacacan

SEQ ID NO: 25674 - DNA, 478 bp, Homo sapiens
  misc_feature (1)...(478): n = A,T,C or G
cgcgcgccccattgantttcgcccgcctgcaggaattcggcacgagattgcatccaaagcaaatgaccaccaaggtttttatcttctaaacagtataatagagcacatgcctcctgaatcagttgaccaatataggaaacaaatcttcattctgctattccagagacttcagaattccaaaacaaccaagtttatcaagagttttttagtctttattaatttgtattgcataaaatatggggcactagcactacaagaaatatttgatggtatacaaccaaaaatgtttggaatggttttggaaaaaattattattcctgaaattcagaaggtatctggaaatgtagagaaaaagatctgtgcggttggcataaccaaattactaacagaatgtcccccaatgatggacactgagtataccaaactgtggactccattattacagtctttgattggtctttttgagttacccgaagat

SEQ ID NO: 25675 - DNA, 485 bp, Homo sapiens
  misc_feature (1)...(485): n = A,T,C or G
tgggagtgcccaggaaanaaacatgaaagcctcgctgtagcccgtgagcagagaaatgagtccacctccggcaatgctggcccggtgatcatgtccattgaggagaagatggaggctgatgcccgttccatctatgttggcaatgtggactatggtgcaacagcagaagagctggaagctcactttcatggctgtggttcagtcaaccgtgttaccatactgtgtgacaaatttagtggccatcccaaagggtttgcgtatatagagttctcagacaaagagtcagtgaggacttccttggccttagatgagtccctatttagaggaaggcaaatcaaggtgatcccaaaacgaaccaacagaccaggcatcagcacaacagaccggggttttccacgagcccgctaccgcgcccggaccaccaactacaacagctcccgctctcgattctacagtggttttaacagcaggccccggggtcgcgt

SEQ ID NO: 25676 - DNA, 368 bp, Homo sapiens
  misc_feature (1)...(368): n = A,T,C or G
atcgggganccatttgctatgagggattgctatgatgcgatagctcctgctatgttcaatctgacaactattggaacgacgctcggccccaggacccacgggaccaaaattgcatctgatggtctcaaggggcgtgtgtttgaagtgagtcttgctgatttgcagaatgatgaagttgcatttagaaaattcaagctgattactgaagatgttcagggttaaaactgcctgactaacttccatggcatggatcttacccgtgacaaaatgtgttccatggtcaaaaaatggcagacaatgattgaagctcacgttgatgtcaagactaccgatggttacttgcttccgctggtctgtgttgggtttan

SEQ ID NO: 25677 - DNA, 509 bp, Homo sapiens
  misc_feature (1)...(509): n = A,T,C or G
ngggggggggnnnnagnnnaattcccggctgcagaattcggacgagtggccttggtccacccagacttggacagggagacagaagaaattctggcagatgtgctcaaggtggaagtcttcagacagacagtggccgaccaggtgctagtaggaagctactgtgtcttcagcaatcagggagggctggtgcatcccaagacttcaattgaagaccaggatgagctgtcctctcttcttcaagtcccccttgtggcggggactgtgaaccgaggcagtgaggtgattgctgctgggatggtggtgaatgactggtgtgccttctgtggcctggacacaaccagcacagagctgtcagtggtggagagtgtcttcaagctgaatgaagcccagcctagcaccattgccaccagcatgcgggattccctcattgacagcctcacctgagtcaccttccaagttgttccatgggctcctggctctggactgtggccaaccttctccacattccc

SEQ ID NO: 25678 - DNA, 474 bp, Homo sapiens
  misc_feature (1)...(474): n = A,T,C or G
ggagcgatcgacgctgctgaattcggcacgaggcaccctgngccgcatgcactattactgatgggccccggctcccgctgcaaggcgctcggggtaccggacctgcacatgagctcagagctaccccacaccttcggactgcctcggcccccacagctcccaggtgctactgggcgtggaccgccaccccctgagaggctcccttccccagtcctgccagaagaccccgggggcggggagggggcagcatgcagggtccccactccctctctggggtcgatgaagaggtgaagtgaccaaatgaaagaaagctgcattctcagtgaaaannaaaaaaatataaaaaaacataaaaaaaatataaaaaaaaaaannnttctggggggggggggccggcccccattttcctttttgggggggtataaaaaaattctgggggccggtttacaaaagggggcgtgggaaaaaagtntc

SEQ ID NO: 25679 - DNA, 446 bp, Homo sapiens
  misc_feature (1)...(446): n = A,T,C or G
nattgacatcgatcccgctgcaggaattcggcacgagcaggaatcctggagaagatgttgagaggtttaagcaacaaggtgggaacatcattgtggccactccaggccgcttggaggacatgttccggaggaaggccgaaggcttggatctggccagctgtgtgcgatccctggatgtcctggtgttggatgaggcagacagacttctggacatggggtttgaggcaagcatcaacaccattctggagtttttgccaaagcagaggagaacaggccttttctctgccactcagacgcaggaagtggagaacctggtgagagcgggcctccggaaccctgtccgggtctcagtgaaggagaagggcgtggcagccagcagtgcccagaagaccccctcccgcctggaaaactactacatggtatgcaaggcagatgagaaatttaat

SEQ ID NO: 25680 - DNA, 435 bp, Homo sapiens
gtaggtgtagactttccactgcagcgactgagcctaggggactttgccatgtgacaaagccggaagtcctgtataccagctgtatgccctttgcaaccactcaggcagcgtccactatggccactacacagccctgtgccggtgccagactggttggcatgtctacaatgactctcgtgtctcccctgtcagtgaaaaccaggtggcatccagcgagggctacgtgctgttctaccaactgatgcaggagccaccccggtgcctgtgacacctctaagctctggcacctgtgaagccctttaaacacccttaagccccaggctccccgtttacctcagagacgtctatttttgtgtctttttaatcggggaggggggagggggtggttgtagctccattattttttttattaaaaaataccctttcaccctggag

SEQ ID NO: 25681 - DNA, 500 bp, Homo sapiens
  misc_feature (1)...(500): n = A,T,C or G
ggccaggcccgcaattgcncccctttgcccgcctgcacgtggaaatagacagggagaggctggtacttgggttgtggtaatagtcaggcttgccacaagagggcactcatagatttgtttttatattcattcttgagaaaaaagcaactggttactgaacgtaactcatgacttatgtttcaaattttgcatagctgattttaagtcattttgatagctttgcaagaaaaatttttcctttgaaacaagggagtagggctgtttcattttctttccttctaatcctcatgccaagaggtgagaaacacttaaggtcatttaaggtgctagggaaagggttttcccatggagctttctgtgaggcgcagtaaaatagagccagcagcaaagtagaggaaaaagccagactgcgtcacacaagatttctcatccttttcaggagagagtcactgtgtagatttgaatcttttttctttgagtctgctttgaactttagcagg

SEQ ID NO: 25682 - DNA, 474 bp, Homo sapiens
  misc_feature (1)...(474): n = A,T,C or G
aggcggtttttttactgacttgcagtggcntcggacatcggcacgagggagctgtgattgacagtagctgtaggttaccagacggcaacattagaaagtgattgtaaataacatgcaacctaagtgtaatatatttgttcagttataagatgattgtttcacagaagccttaccactctctgcttcatctaagaaaaccaataccaaaaacgccactttaatgctcagccctgcgttgtgtgttttcagatgagttactgttaacaggtaggtttgtgtaggccttgctgggcactctgtacaattagttgcttattacgtatgattactcgcagcgatctattgttccatataaccaaaaagcatggtttattcattgaaacacggttgacctgaactcgtgccttaagaattaatgcccccttatggaacctgcctgaattgcacctgcgggtggaggctccggctgtgaag

SEQ ID NO: 25683 - DNA, 485 bp, Homo sapiens
  misc_feature (1)...(485): n = A,T,C or G
gggtgggacccnttcgcccgcctgttgaattcgcctcgaggcgatttgtgggccataccaaggatgtgctgagtgtggccttctcctctgacaaccggcagattgtctctggatctcgagataaaaccatcaagctatggaataccctgggtgtgtgcaaatacactgtccaggatgagagccactcagagtgggtgtcttgtgtccgcttctcgcccaacagcagcatccctatcatcgtctcctgtggctgggacaagctggtcaaggtatggaacctggctaactgcaagctgaagaccaaccacattggccacacaggctatctgaacacggtgactgtctctccagatggatccctctgtgcttctggaggcaaggatggccaggccatgttatgggatctcaacgaaggcaaacacctttacacgctagatggtggggacatcatcaacgcgctatgcttcagccctaaccgctactgg

SEQ ID NO: 25684 - DNA, 471 bp, Homo sapiens
  misc_feature (1)...(471): n = A,T,C or G
ngagtgttcccgctgtatgaattcggcacgaggcgcggtgaggttgtctagtccacgctcggagccatgccgtccaagggtccgctgcagtcggtgcaggtcttcggacgcaagaagacagcgacagctgtggcgcactgcaaacgcggcaatggtctcatcaaggtgaacgggcggcccctggagatgattgagccgcgcacgctacagtacaagctgctggagccagttctgcttctcggcaaggagcgatttgctggtgtagacatccgtgtccgtgtaaagggtggtggtcacgtggcccacatttatgctatccgtcagtccatctccaaagccctggtggcctattaccagaaatatgtggatgaggcttccaagaaggagatcaaagacatcctcatccagtatgaccggaccctgctggtagctgaccctcgtcgctgcgagtccaaaaagttggaggccctg

SEQ ID NO: 25685 - DNA, 515 bp, Homo sapiens
  misc_feature (1)...(515): n = A,T,C or G
nggccggggnnnnnagnnacctgctcggctgtggatttcgaccgccttcggaattcggcacgagctcagcatcaattataaaagacctatccctctttgttctgttgttatgataaatagccaacttgataaagctgaaggaaggaaattttttgtttcctgtaatgttcagagtgttgatgagaagaccctatactcagaggcgacaagcttatttataaagctgaatcctgctaaaagtctgacataaagagctgctggtgaactccatctcattctcgcccctccagaagaagcagttgtcccccaaatactctgctccctcactgctgaatccctgtagggagaagcctgccaacagtgaccttccgaaacagccttctgaatacaaagaggattcagtttccatcttctcaactttttaacacagaaacacttcctgcgagcatatcgacaactctcgggccaggcgctgtggctcacacctataatcccagcactttatgaggccgagg

SEQ ID NO: 25686 - DNA, 484 bp, Homo sapiens
  misc_feature (1)...(484): n = A,T,C or G
nattgatcgccctcngngaannnattgacccggcctgcangaattcgccacgaggttttttatgagttacagactatgtgctttcagaatgaggcaaccgatttaaggatgtaagcataatttaaggatattgaaaatgatataggaataaattttgtttagtcattcatggatttattcattttcagatgactatgtgtgtgaatatttaagaattctaaaaccgcatgggattacttataactatataggagcctaacacgataatggaatcagaatatactttgctgaagggaggaggcttttaactgaaagtcttctctctacgtttttatgtctctaacaggaatccactgaagacctacatttcccggaaggttaacagcccccttctcagttttcctggtaaagtgtttttatattggtagaataccttctgtcacactctatatttttcttatctcaagtagaaaaaaattttgcg

SEQ ID NO: 25687 - DNA, 515 bp, Homo sapiens
  misc_feature (1)...(515): n = A,T,C or G
aggcnggggnnnnnagnnaattcacggctgtagaaattgcccgcctgtagctacaccctccactcaggggacacgcagcccaacactcctgcacctgtcccacctgctgaagatgggataaaaatagaggaaaatagcctcaaagaagaagagagcatagaaggagaaaaggaggttaaatctacagcccctgagactgccattgagtgtacacaggcccctgcccctgcctcagaggatgaaaaggtcgttgttgaaccccctgagggagaggagaaagtggaaaaggcagaggtgaaggagagaacagaggaacctatggagacagagcccaaaggtgctgctgatgtanagaaggtggaggaaaagtcagcaatagatctgacccctattgtggtagaagacaaannaaaaaataataatttaaaaaaaccaaacttttaaaattanctttggggggggagggcccccccccccttttgaaaaaaaagaattttgggggggccccgcccccc

SEQ ID NO: 25688 - DNA, 493 bp, Homo sapiens
  misc_feature (1)...(493): n = A,T,C or G
tgcgactnnnnnaattgacgatcgancgcctgcggttcacagaagccacccaagagggcttcgagccagctctcctggttttccagccattggtttaccgtcatgatatccctgtatctgctgctgctgctcatagtgagtgtcatcaactcctctgctttccaacacttttggaatcgtgcgaaaagataatctttctgggcctggtgtgggggctacctcaactatgtgccttatggtaacttgttctgtacctcctatgcctcatgtccagccaggttgagcctaggggccagttgggggaccacaggacaattttcatatggcctaaatgtatccattgcctttgatgatgttcccagccatactccagtcaacggggactactagtccctcactcttaggttttaggggagtccttccatctgctccttcttaaactgtcctagggagttggcttttcagccagggccaaaggaaaaagccctgctgn

SEQ ID NO: 25689 - DNA, 472 bp, Homo sapiens
  misc_feature (1)...(472): n = A,T,C or G
aatggatcgcctcggaanngctcgagagactttctgagattgccataatggtcagagaatcatctcaggtctgtctaattctctatataaggcggtatagcagatgtaacaagtatactcttaactacagtgttaaaaatgaatggaaggactcagagtagttgcttggaggatggtttggaggggagcaaagtaaatacagggagaccagttaggaggccctttttcaggtgagagcttatatcttttgaattagggttatggttgtagagaagatagatgtagaaggaaatgaaagaatttttagggatatgtcaaaaataactcctctgtagctttcacaattggggttttgttgctggtgaaggggagtggctggttaactgcacgacacactatagttgccatctatacttcttatattagacatggcttttttcttttctacgggttgttccccatagacccttcg

SEQ ID NO: 25690 - DNA, 480 bp, Homo sapiens
  misc_feature (1)...(480): n = A,T,C or G
naaggtgattgacngncnnattcgcccgcgctgcaggaattcggcacgagactttgggctgtccttcagccgggtgggagctgatttccggggtcagttggctcctgttttccagcgggtggccatcagcactttccagaaagcaattcaggaaacagtggagaaattccaggaagaaatgaactcctacatgctcatctcggctccagccatcctgggcaccagtaacatgcctgctgctgtgccagccacccagccggggacgctgcagccacccatggtgctcctagatttcccacccctcgcctgctttctcaacaatattctggttgccttcaatgatctgcgcctctgctgccctgtggccctggcgcangatgtgactggggccttggaagatgcccttgccaaggtaactaaaataatcctggccttccatcgcgctgaagaagctgncttcagcagcggggagcaagagct

SEQ ID NO: 25691 - DNA, 521 bp, Homo sapiens
agatggtggggccttgacggctgtatgtttttgtgctgcccagacatgcgccgccactttcttgccatcgcctttggcctgtaacaagaatgcgtgatcgtaacctttcactttgcgctgatcgtcgtcggcaagaaactcactggcgatgattttggcgctgcggaaatcaaaagacgttccggcgacagatttcaggccgtcgtgcggaatgccgccttcatcaaccggcagatattcgtccgccagaatctgcaacttgtgattgcgcacgtcagactgctcgccgtcaagattgaaatagacgtgattagtcatattcaccgggcaaggtttatcaactgtggcgcgataagtaatggagatacggttatcgtcggtcagacgatattgcaccgtcgcgccgagattacccgggaagccctgatcaccatcatctgaactcagggcaaacagcacctgacgatcgttctggttcacaatctgccagcgacgtttgtcgaacccttccggcccgccgg

SEQ ID NO: 25692 - DNA, 507 bp, Homo sapiens
  misc_feature (1)...(507): n = A,T,C or G
ggcnggggnnnnnagnnaattcacggctgcaggaatcggcacgacgtcccgagcanaatctcgacgtaatttagatttccaggatgtcttagacaaattggcagatatgggaattgcgatccgtgttgcctcacccaaactggttatggaagaggctcctgagtcctataagaatgtgacagatgtggtaaatacctgccatgatgctggaatcagcaagaaagccattaaactgagaccaattgctgtgatcaaaggatagaaccttggacagcagggctgcctgacaccaccaaccctctctgaagtggaagtggactgacatgctcttctgacatcagactcaaggcgggacaagttgcaaagtgtgcagctgtaactgctcacgccaaaatggctgatggggaggctgctgctttcangggcccgtgcttgtaaaataaccttccaggaagaggcacattgcccacctttggaaagggaggaatatgccttctcctttggtgt

SEQ ID NO: 25693 - DNA, 478 bp, Homo sapiens
  misc_feature (1)...(478): n = A,T,C or G
aggtggnnnnaaagctcgtctgcaggacttcggcacgagaggcctcctgagccggctggaggaggacaggctgctgctgctaccgaaggaggatgtctgtcgctgggccttggctgtaggcagctgggcttactgccgggccctgcatacacagcgcctccagtgggagtgacagttggatacagccaggcagggtttctgccctgccgaacactttccctcccacctgcctgctcctggcgccttctccctaggggtagactcttctgcctactgaagtgggtttgctgcacattgactggtcaggggcagagtctgggtgctgtcctttggccacgtgtggggacttgtctagaccacaatggaaagggacagggtcccagacacgtttgggggtcctgattctgggctggacacggttgtggatccagagaagaggcctagtctccaataaatcttaggaattttgaaaaaaaaa

SEQ ID NO: 25694 - DNA, 471 bp, Homo sapiens
cgcccccccccccgcccccccctttgccccgcgctgcatgaattcggcacgagcatggatgatgtggagtccagtgaagaggaagaagaggaggatgagaagttggaaagagtgccatcacctgatcaccgccggagaagctaccgagacttggacaagccccgtcgctctcccacactgcgctacaggaggagtaggagccggtctcccagaaggcggagtcgatctcccaaaaggagaagcccctcccctcgccgagaaaggcatcggagcaagagtccaagacgtcaccgcagcaggtcccgagatcggcggcacagatcccgttccaagtccccaggtcatcaccgtagtcacagacacaggagccactcaaagtctcccgaaaggtctaagaagagccacaagaagagccggagagggaatgagtaatggactcagtttggttttagtccacatggcctcctgtgg

SEQ ID NO: 25695 - DNA, 481 bp, Homo sapiens
  misc_feature (1)...(481): n = A,T,C or G
cgatttgccccgcctgcangaattcggtacgagagatagtgtgtatggactagaactgcaccgcgataagagagttttagcgctagagatccttcctgagagagtgccaactcctcgtatcgattcacgactggcagattccctgattggcaaggcagtggagcatgtgtttgaaggtgaacatggtaccaaggatgaatggaagggtatggtcctggcgcgagctcctgtgatggatacttggttttacatcacctacgagaaagatcctgttctctatatgtacacgctgcttgatgactacaaagatggtgacttacgcattattccagattccaactactatttccctacagcagaacaggagcctggagaggtggtcgacagtctcgtgggcaagcaggtggagcatgccaaagatgacgggtccaagagaactggcatttttatacatcaagtggtggcgaagccatctgtttac

SEQ ID NO: 25696 - DNA, 492 bp, Homo sapiens
  misc_feature (1)...(492): n = A,T,C or G
gcgggccttggatccntcggctgcagcaagcgagatgtcgaagccgccacccaaaccagtcaaaccagggcaagttaaagtcttcagagccctgtatacgtttgaacccagaactccagatgaattatactttgaggaaggtgatattatctacattactgacatgagcgataccaattggtggaaaggcacctccaaaggcaggactggactaattccaagcaactatgtggctgagcaggcagaatccattgacaatccattgcatgaagcagcaaaaagaggcaacttgagctggttgagagagtgtttggacaacagagtgggtgttaatggcttagacaaagctggaagcactgccttatactgggcttgccacgggggccacaaagatatagtggaaatgctatttactcaaccaaatattgaactgaaccagcagaacaagttgggagatacagctntgcatgctgctgcctggaagggttatgn

SEQ ID NO: 25697 - DNA, 510 bp, Homo sapiens
  misc_feature (1)...(510): n = A,T,C or G
cgggcngggncnnnncgccctttgctcggctgtgganatcggcacgacgaagcatgaaaattaatggaagggttgcagcatccacattctcttcagatagtaagaaagtatacgcctcttcgggggatggagaagtttatgtttgggatgtgaactcaaggaagtgccttaacagatttgttgatgaaggcagtttatatggattaagcattgccacatctaggaatggacagtatgttgcttgtggttctaattgtggagtggtaaatatatacaatcaagattcttgtctccaagaaacaaacccaaagccaataaaagctataatgaacttggttacaggtgttacttctctgaccttcaatcctactacagaaatcttggcaattgcttcagaaaaaatgaaagaagcagtcagattggttcatcttccttcctgtacagtattttcaaacttcccagtcattaaaaataagaatatttctcatgttcataccatggattnttctc

SEQ ID NO: 25698 - DNA, 508 bp, Homo sapiens
  misc_feature (1)...(508): n = A,T,C or G
nggaggctcngnnnnaattgancaattgactcgcctgcaggaattcggcacgaggaggaaggcagcctctttctcggacactatcgaacgcccgtaggagacgccacgggcggctcttagactgaaacatcgtgtgaaccccgggagggaccttacctgccctgctgggggtgctctttggacactggattatgaggaatggataaatggatgagctagggctctgggggtctgcctgcacactctggggagccaggggccccagcaccctccaggacaggagatctgggatgcctggctgctggagtacatgtgttcacaagggttactcctcagaacccccaggtctcactcatgtccccaactcaaggctagaaaacagcaagatggagaaataatgttctgctgcgtccccaccgtgacctgcctggcctcccctgtctcagggagcaggtcacaggtcaccatggggaattctagcccccactgggngggtgttacaacaccc

SEQ ID NO: 25699 - DNA, 476 bp, Homo sapiens
  misc_feature (1)...(476): n = A,T,C or G
gtggggcnnnnnnnaaattganatcgatcncgcgctgcaggaattcggcacgagccgaagactgcgatgacttctgcactgacccaggggctggagcgaatcccagaccagctcggctacctggtactgagtgaaggtgcagtgctggcgtcatctggggacctggagaatgatgagcaggcagccagtgccatctctgagctggtcagcacagcctgcggtttccggctgcaccgcggcatgaatgtgcccttcaagcgcctgtctgtggtctttggagaacacacactgctggtgacggtgtcaggacagagggtgtttgtggtgaagaggcacaaccgaggtcgggagcccattgatgtctgagcctgccggagggcgagggtcgaagaaacggattgggtcctgggcctctgtgatgaggcaggcacaccctgcggtcttggctcgctgctagaactaggggcttctgctcc

SEQ ID NO: 25700 - DNA, 508 bp, Homo sapiens
ccttcgaccgccctattgcccggctgcaggatctgaagacagtcttcttaaataacactgcctccctcagaaacaagtgcacctgctgagggtgtgagaaatcaaactctcacatccacagagaaagcagaaggagtggtcaagttacagaatcttaccctcccaaccaacgctagcatcaagttcaatcctggagcagaatcagtggtcctttccaattctacactgaaatttcttcagagctttgccagaaagtcaaatgaacaagcgacttctctaaacacagttggaggcactggaggcattggaggcgttggaggcactggaggcgtgggaaatcgagccccacgggaaacatacctcagccggggtgacagcagttccagccaaagaactgactaccaaaaatcaaatttcgaaacaactagaggaaagaattggtgtgcttatgtacataccaggttatctcccacagtgatattggacaaccaggtcacttatgtcccaa

SEQ ID NO: 25701 - DNA, 515 bp, Homo sapiens
  misc_feature (1)...(515): n = A,T,C or G
agggcnggggnnnnnnagnnatttgctcggctgtgggtatcgcgcgcctgaggaattcggcacgagtggaattgaaccaagtttgtataaaggagacatctggtatacccctattaaggaagagtggtactaccagatagaaattctgaaattggaaattggaggccaaagccttaatctggactgcagagagtataacgcagacaaggccatcgtggacagtggcaccacgctgctgcgcctgccccagaaggtgtttgatgcggtggtggaagctgtggcccgcgcatctctgattccagaattctctgatggtttctggactgggtcccagctggcgtgctggacgaattcggaaacaccttggtcttacttccctaaaatctccatctacctgagagacgagaactccagcaggtcattccgtatcacaatcctgcctcagctttacattcagcccatgatgggggccggcctgaattatgaatgttaccgattcggcatttccccatccc

SEQ ID NO: 25702 - DNA, 484 bp, Homo sapiens
  misc_feature (1)...(484): n = A,T,C or G
ctttgccccgccttgangaattcggcacgagattcaccggaagcacgtgccccggtctagtcccatttgaaacagttctgctttactgagaccctaagccggtctccttgctgaccctagcgctgctgcctaggtgccatttcctttcctcctcagtcaaatacaggctgcacattttgtcacttaatgccagtacaatctgtgttactcctaaggacttttgggattttgatgagacctgcgagggagaagacactgagaagccagtgatctgcaagcatttgctcttgtttccacatcacctctgggatatttcagctgttgtttccaaatggcaaatcatcaactaaaagcacttgtttcaagttttgttctgcactcccacgactgaagttgtagattgagctgaataaccatgggaagtgaccaagcaaagacactcgattggagcagttgaatatttgtaccctcagtggagcccttc

SEQ ID NO: 25703 - DNA, 435 bp, Homo sapiens
catccaccggctgcatgaattcggcacgagatgtgactctgctgggagaggactgtgggaggcttacacctggtttccctggactttgtccatgcgcttttttcctttgctgattttgcttcctagcctttcgctgtagtaaaacatagccatgagtatgactacaggctgagtctgtgaatctcctagtacatcatcagactaggaggtggtggtgttggcaccccccagcacagggcacaagggagacttgcagggtgtttgtcatgttccctttctcaatctgggtgtggtttacagatttgttcagtttgtgaaaattcactgagctctatgaacaattataatatgtacatttttttctgtaagtgtattaaatttcaataaaaagaattcacactataggggtacaaaataaaaaaaaaaaaaaaaaaa

SEQ ID NO: 25704 - DNA, 510 bp, Homo sapiens
  misc_feature (1)...(510): n = A,T,C or G
gggcnggggnnnnnnagnnntttgctcggctgcgggtctcgcggaggcggaggcttgngtgcgttcaagattcaacttcacccgtaacccaccgccatggccgaggaaggcattgctgctggaggtgtaatggacgttaatactgctttacaagaggttctgaagactgccctcatccacgatggcctagcacgtggaattcgcgaagctgccaaagccttagacaagcgccaagcccatctttgtgtgcttgcatccaactgtgatgagcctatgtatgtcaagttggtggaggccctttgtgctgaacaccaaatcaacctaattaaggttgatgacaacaagaaactaggagaatgggtaggcctttgtaaaattgacagagaggggaaaccccgtaaagtggttggttgcagttgtgtagtagttaaggactatggcaaggagtctcaggccaaggatgtcattgaagagtatttcaaatgcaagaaatgaagaaataaatctttg

SEQ ID NO: 25705 - DNA, 514 bp, Homo sapiens
  misc_feature (1)...(514): n = A,T,C or G
ggggccaggggnnnnagnnatttgactggctgcgngattcgctcgcctgcggaattcggcacgaggctccgcgttccctgcacaaatgcccggcgaagccacagaaaccgtccctgctacagagcaggagttgccgcagccccaggctgagacagggtctggaacagaatctgacagtgatgaatcagtaccagagcttgaagaacaggattccacccaggcaaccacacaacaagcccagctggcggcagcagctgaaattgatgaagaaccagtcagtaaagcaaaacagagtcggagtgaaaagaaggcacggaaggctatgtccaaactgggtcttcggcaggttacaggagttactagagtcactatccggaaatctaagaatatcctctttgtcatcacaaaaccagatgtctacaagagccctgcttcagatacttacatagtttttggggaagccaagatcgaagatttatcccagcaagcacaactagcagctgctgagaaattt

SEQ ID NO: 25706 - DNA, 485 bp, Homo sapiens
  misc_feature (1)...(485): n = A,T,C or G
gcggngnnnattgaattgatcgcatgcaggattaatagccactaaccttgcctggtacagtatgggggttgtaaattggcatggaaatttaaagcaggttcttgttggtgcacagcacaaattagttatatatggggatggtagttttttcatcttcagttgtctctgatgcagcttatacgaaataattgttgttctgttaactgaataccactctgtaattgcaaaaaaaaaaaaaagttgcaccggttttgttgactttttaaaggcttttaataaaatccatttttttttataagaatgggggccctttcaatgggccggaaatttttttttttgggggaaaccaagcttttggcttttgccctttttgaaccacatgaattataacggggtttaccctttcttatagtgggctaaaaaaaggcttttgtttcccccccctgcatatcataaggggggtaaagtaaagtggaaatactttt

SEQ ID NO: 25707 - DNA, 495 bp, Homo sapiens
  misc_feature (1)...(495): n = A,T,C or G
agaggggattgacttcgatgncatgtangaattcggcacgagacaccaagctgcagatccaggcttttctgggaaagtgaggccaccatggctctggagaagtctcttgtccggctccttctgcttgtcctgatactgctggtgctgggctgggtccagccttccctgggcaaggaatcccgggccaagaaattccagcggcagcatatggactcagacagttcccccagcagcagctccacctactgtaaccaaatgatgaggcgccggaatatgacacaggggcggtgcaaaccagtgaacacctttgtgcacgagcccctggtagatgtccagaatgtctgtttccaggaaaaggtcacctgcaagaacgggcagggcaactgctacaagagcaactccagcatgcacatcacagactgccgcctgacaaacggctccaggtaccccaactgtgcataccggaccagcccgaaggagagacacatcattgtg

SEQ ID NO: 25708 - DNA, 483 bp, Homo sapiens
  misc_feature (1)...(483): n = A,T,C or G
gcggcccnattgacatgatgcagcattcgcacgagtctctctctctctctctctctctctctctctctctctctctctctctctctctctctcgcgcttaattttgcgcgacatgagggagaatggctacagcatagcgctgatgtgggcttgtttctcacgccatctaaagtgtacagcgagagagacccctcatccctgataaaaaccacccctgagtccaggtttaggctgtgaacaccacggacctcttttacacctattccccctttgtgtaaaaaactgcatattttgacacattaagtcttaaaaacacgctcaaaaagggagtggagagtctctctttaaaaaaaatcattctcacgctgtacatagcggtgtgtgcctgcaatctcaaccctttagaggctgacgcaagaagattgtttgagcccaagagtttaagaacagcctgggcaatctagggaaacctgtgaatatatt

SEQ ID NO: 25709 - DNA, 471 bp, Homo sapiens
  misc_feature (1)...(471): n = A,T,C or G
atttgccctcgccccccggctgcaggaattcggcacgagactgtacactcacccataattcaaacaattacaccatggtataaagtgggcatttaatatgtaaagattcaaagtttgtctttattactatatgtaaattagacattaatccactaaactggtcttcttcaagagagctaagtatacactatctggtgaaacttggattctttcctataaaagtgggaccaagcaatgatgatcttctgtggtgcttaaggaaacttactagagctccactaacagtctcataaggaggcagccatcataaccattgaatagcatgcaagggtaagaatgagtttttaactgctttgtaagaaaatggaaaaggtcaataaagatatatttctttagaaaatggggatctgccatatttgtggtggtttttattttcatatccagcctacaggtgggtgttattatatagtn

SEQ ID NO: 25710 - DNA, 468 bp, Homo sapiens
  misc_feature (1)...(468): n = A,T,C or G
ntttgcccccgctgcaggaattcggcacgagaaagaacgtactcaggaaaagtggggatttccaatgtgccactatttaaaggaagagagatggtgctgtggtcgtaatgccagaatgtcagcatgtttggcattggagcgggttgcagctggccaagggctgcctactgaatcactcttctatcgtgctgttcttcaggatattattaaagattgttatggcatcaccaaatgtgatcggcatgttggtaaaatttattccaaatgttcttcttttctggattatgtcagacggtctctaaagaagcttggattagatgagtccaagctgccagaaaaaattataatgaactactacgagaagtataagcctcgaatgaatgagctggaagcttttaatatgttgaaagttgtactggctccctgtatagagactttgattcttctggatcgacttntgtacctgaa

SEQ ID NO: 25711 - DNA, 490 bp, Homo sapiens
  misc_feature (1)...(490): n = A,T,C or G
ggcggcnnnnattgacctcgatcgccntgcggaattcgccacgagcaaggccgacatggtggagacgcagcagctgatgcgcgtctacggcgcgctcatgtgggcgctgggcaaggtggcgggcacgcccgaggtgctgcgcgtctacatcggctccttgtggtcccagcccctcctcgtgcccgacaaccggcgcctcttcgagctggaggagcaggacctcttccgcgacatccaaggcctgccccggcacgcagccttgcgcaagctcaacgacctggtgaagagggcccggctggggcgagatcacgcttacataatcagctacctgaagaaggagatgccctctgtgtttggaaaggagaacaagaagaagccgctgatcctcaaactgcccgtcatctttgcgaagattcagatggaacatcacatctcccctggggactttcctgattgccacagaatgcacgtgggaagctgcccaagaggg

SEQ ID NO: 25712 - DNA, 484 bp, Homo sapiens
  misc_feature (1)...(484): n = A,T,C or G
ggaggggattgaacttgacaggcagtagcaanncagcacgagctgaaacctaaatgtgccaggagagcaacagagaagagctgggtgaggttgggcgctgtggttcacgcctgtagtcccagcactttgggaggcggaggcaggtggatcacttgaggccaggagttcgagaccagcctggccagcatggtgagacccccatctctactaaaaatacaaaaatgagccgagtgtggtggcacatgcctgtagtcccagctactcaggaggctgaggcaccagaatagcttgaacttgggaggtggaggttgcagtaagctgagatcgtgccactgcgctccagcctgggtgacggattgagactctgtctcaaaataataataataataaacagaagagctgggtgggattggggaaagctgcattccacccccacactctgccaacgagggcagtaacttatctccagacagttgttgcctgg

SEQ ID NO: 25713 - DNA, 459 bp, Homo sapiens
  misc_feature (1)...(459): n = A,T,C or G
natttgacccgcgctgcagtaattcggcacgagatcgtcatggcaaccttgatgaagctgtggaggagtgtgtgaggaccaggcgaaggaaggtgcaggagctccagtctctaggctttgggcctgaggaggggtctctccaggcattgttccagcacggaggtgatgtgtcacgggccctgactgagctacagcgccaacgcctagagcccttccgccagcgcctctgggacagtggccctgagcccaccccttcctgggatgggccagacaagcagagcctggtcaggcggcttttggcagtctacgcactccccagctggggccgggcagagctggcactgtcactgctgcaggagacacccaggaactatgagttgggggatgtggtagaagctgtgaggcacagccaggaccgggccttcctgcgccgcttgcttgcccaggagtgtgccgtgt

SEQ ID NO: 25714 - DNA, 479 bp, Homo sapiens
  misc_feature (1)...(479): n = A,T,C or G
nattgaccgcctgangaacnctgcaagagncggnncttagtctttgttagcggctcaggtccgcagtggaggccacatcaactcggcgccttttgaaccgctcgagcctaccagattccagagtcattaaaaagtatcacatggcagagattgggaaaaggcaattcaagacagttcttagatgctgcaaaggctctccaggtatggccactgatagaaaagaggacatgttggcatggtcatgcaagaggaggactccacacagacccaaaagaagggttaaaagatgttgatactcggaaaatcataaaagcaatgctttcttatgtgtggcccaaagacaggccagatctacgagctagagttgccatttcgctgggatttttgggtggtgcaaaggccatgaatattgtggttcccttcatgtttaaatatgctgtagacagcctcaaccagatgtcgggaaacatgctgaaccn

SEQ ID NO: 25715 - DNA, 478 bp, Homo sapiens
  misc_feature (1)...(478): n = A,T,C or G
gaagggannnttgcccgcctgctgattccgccgagctttgatcttcaaaggaagagccttttaaaaacatttgccaacctcaagaataaatactgaaagtcttgaaagtatggacatttcagctattccagattgctgtctgtgatttctcacatttttatttgctgagaaacattcagaaaattattccaaaaatgaaggtacattttctgttctctcctaggttacagaggggtggcctggggtgcttcatgagaaatgtcttcctggatctgcggaggtcaggtttgcctctgcttttgttccctgcctttccgccacatcacacggcctcactgggcttcctaccagtttctcagaattacacgcacgaccatccaaacattggctccatgccagggctgtgactgcagcctgtgtatgaccatggggagttcagagtcatcatacaaggcagccaagatctgccatatacact

SEQ ID NO: 25716 - DNA, 478 bp, Homo sapiens
  misc_feature (1)...(478): n = A,T,C or G
ggcgcccaatagnttcgaccgcctgcggtgcccacagatttgcggaagaacctgaccgtggacgagggcaccatgaaggtagaggtgctgcctgccctgaccgacaactacatgtacctggtcattgatgatgagaccaaggaggctgccattgtggatccggtgcagccccagaaggtcgtggacgcggcgagaaagcacggggtgaaactgaccacagtgctcaccacccaccaccactgggaccatgctggcgggaatgagaaactggtcaagctggagtcgggactgaaggtgtacgggggtgacgaccgtatcggggccctgactcacaagatcactcacctgtccacactgcaggtggggtctctgaacgtcaagtgcctggcgaccccgtgccacacttcaggacacatttgttacttcgtgagcaagccctgaggcttcgagccccctgccgtgttcacaggtgacacct

SEQ ID NO: 25717 - DNA, 470 bp, Homo sapiens
  misc_feature (1)...(470): n = A,T,C or G
gggggaggggcncccattgcccgcctgcataattcgcactagatcaaatctcagcttaaaactcaagaggatgaggaagaaatttctactagcccaggtgtttctgagtttgtcagtgatgccttcgatgcctgtaacctaaatcaggaagatctaaggaaagaaatggagcaactagtgcttgacaaaaagcaagaggagacagccgtactggaagaggattctgcagattgggaaaaagaactgcagcaggaacttcaagaatatgaagtggtgacagaatctgaaaaacgagatgaaaactgggataaggaaatagagaaaatgcttcaagaggaaaattagctgttcctgaaatagaagaataatccttaacagtctgcaaactgacattaaattctagatgttgacaattactgaaaaaaaaaaaaaaaaaaaaactcgagggggggccgcggccccatttcgcc

SEQ ID NO: 25718 - DNA, 479 bp, Homo sapiens
  misc_feature (1)...(479): n = A,T,C or G
agaaaaaattgatcgccctnggaattttgaccgcctgcagaattccgcacgagccgggccttcctgcgccgcttgcttgcccacgagtgtgccgtgtgtggctgggccctgccccacaaccggatgcaggccctgacttcctgtgagtgcaccatctgtcctgactgcttccgccagcacttcaccatcgccttgaaggagaagcacatcacagacatggtgtgccctgcctgtggccgccccgacctcaccgatgacacacagttgctcagctacttctctacccttgacatccagcttcgcgagagcctagagccagatgcctatgcgttgttccataaaaagctgaccgagggtgtgctgatgcgggaccccaagttcttgtggtgtgcccagtgctcctttggcttcatatatgagcgtgagcagctggaggcaacttgtccccagtgtcaccagaccttctgtgtgcgctgcaa

SEQ ID NO: 25719 - DNA, 475 bp, Homo sapiens
attgaccgccttaggaattatttgaaggacctacagcatatcgaacatattatcagacaagatgaggaggtataaaagttactattgctcataatgacttacaggctaaaattagttttaaaatactatattaaattctgaatgcaatttttttttgttcccttgagaccaaaatttaagttaactgttgctggcagtctaagtgtaaatgttaacagcaggagaagttaagaattgagcagttctgttgcatgatttcccaaatgaaatactgccttggctagagtttgaaaaactaattgagcctgtgcctggctagaaaacaagcgtttatttgaatgtgaatagtgtttcaaaggtatgtagttacagaattcctaccaaacagcttaaattcttcaagaaagaattcctgcagcagttattcccttacctgaaggcttcaatcatttggatcaacaactgctactctcgg

SEQ ID NO: 25720 - DNA, 448 bp, Homo sapiens
  misc_feature (1)...(448): n = A,T,C or G
ctagaccngccctggacactcgctgcacgaattcggcacgagccagccttggctgccccggcactgtggaagccctcgcagctcgtgacgggcgcgctctttcctttcagagatgttcgacaagcagcaggcgaacaccatcttctggagcccccaaggacagttcgtggtgttggcgggcctgaggaggtaggtgtctgcgctctgagcctgtccgccctgtgagtagcgctctgctgtggcagagacccctcaggcgcctgcacccggcttcttggtagagagagtattgtgcgctgaaagggttgccccggtgtcagtggataggacttcattgaacctctgcagacccacggtactccaggactcaggccaagcccgcacagagtgaaataagcgctcccagatgctttcgtgaagtgaccaggcagacccgtctgcgggttgt

SEQ ID NO: 25721 - DNA, 476 bp, Homo sapiens
  misc_feature (1)...(476): n = A,T,C or G
ggatgtccaggagccccctgacgccgtagataccgtcgagaagccctacctgtttcttggggactatgtggacaggggaaagcagtcattggagacgatctgcctcttactggcctacaaaataaaatatcctgagaatttttttcttctcagagggaaccatgaatgtgccagcatcaacagaatttatggattttatgatgaatgtaaaagaagatacaacattaaactatggaaaactttcacagactgttttaactgtttaccgatagcagccatcgtggatgagaagatattctgctgtcatggaggtttatcaccagatcttcaatctatggagcagattcggcgaattatgcgaccaactgatgtaccagatcaaggtcttctttgtgatcttttgtggtctgaccccgataaagatgtcttaagctggggtgaaaatgacagaggagtgtccttcacatttggtgcan

SEQ ID NO: 25722 - DNA, 498 bp, Homo sapiens
  misc_feature (1)...(498): n = A,T,C or G
catcgcccnccntgcaggaatttgaccccgctgcaggaattcggcacgaggataaatagaatacacagaatagtgatgaaattcaatttaaaaaatcacgttagcctccaaaccatttaattcaaatgaacccatcaactggatgccaactctggcgaatgtaggacctctgagtggctgtataattgttaattcaaatgaaattcatttaaacagttgacaaactgtcattcaacaattagctccaggaaataacagttatttcatcataaaacagtcccttcaaacacacaattgttctgctgaagagttgtcatcaacaatccaatgctcacctattcagttgctctgtggtcagtgtggctgcataacagtggattccatgaaaggagtcattttagtgatgagctgccagtccattcccaggccaggctgtcgctggccatccattcagtcgattcagtcataggcgaatctgttctgcccgaggcttgtggc

SEQ ID NO: 25723 - DNA, 503 bp, Homo sapiens
  misc_feature (1)...(503): n = A,T,C or G
gggcagttgccagggaaanaaaacactganagcctccgactgancgtcctcccgaannnccacgagnatggggataaaaagcctaggaagcgaacttatgaacagataaaggtggttgaaaatgaattctgttcctctctgggatctccaagtgaaccaccacagactctagatctcgttagagcattacaagatctggaaaatgcagcctcaggtgatgcagcagttcatcagaggatagcttctttacctgttgaagtccaagaagtatctctattagataaaataacagataaagaatctggagaaaggctttccaaaatggtagaggatgcgtgtatgttgctggcagattacaatggcagattggcggcagaaatagatgatagaaagcaactcactcgaatgttagcagattttcttcgttgtcaaaaggaagcccttgcagagaaagagcataaattggaagagtacaagcgcaagctagccagagtatccctggt

SEQ ID NO: 25724 - DNA, 477 bp, Homo sapiens
  misc_feature (1)...(477): n = A,T,C or G
ntttgacccgcgctgcatgaattcggcacgaggggctttggcatggccatcgcagcgtcaaaggtgcaggaggcgcccattgatgagcattggatcatcgagtgcaatgacggcgtcttccagcggctccgggactgggccccacggcagacacacaaggtcatccccttgaaaggcctgtgggaggatgtggcacccaccctgcctgacggtcactttgatgggatcctgtacgacacgtacccactctcggaggagacctggcacacacaccagttcaacttcatcaagaaccacgcctttcgcctgctgaagccggggggcgtcctcacctactgcaacctcacctcctggggggagctgatgaagtccaagtactcagacatcaccatcatgtttgaggagacgcangtgcccgcgctgctggaggccggcttccggagggagaacatccgtatggaggtgatggcgctggtc

SEQ ID NO: 25725 - DNA, 457 bp, Homo sapiens
  misc_feature (1)...(457): n = A,T,C or G
atttgacccgcgctgcaggaattcggcacgaggccgcggctaccccgccgtcccccccgactcccgccaccccgctctctcaggctcttcaggatccaagtccgtaggccctttaaggggtctagttgccgtttgcgaggccctgggactttggtcccagacagcggggatccggatggcttccgtgcggatccgagaggccaaggagggagactgtggagatatcctgaggctgattcgggtgaagactgcaggccggagctagccgaattcgaaaaactctcggatcaggtgaagatcagtgaagaagccctgagagcagatggctttggagacaatcctttctatcactgtttggtagcagagattcttccagcgcccgggaagctactggggccctgcgtggtgggctatgggatatactatttcatctacagtacatggaagggacgcaccn

SEQ ID NO: 25726 - DNA, 441 bp, Homo sapiens
  misc_feature (1)...(441): n = A,T,C or G
tttgcccgcctgaggtggcaggctcgcaagtgtctgttgttggaagaagccgggccctgactggcgcgacggattctcccagccgctcagcagagcgtctaatatgctttttgtctaatgatgttagataaaaagcaaatttggagcagttttcttattcgagttcaaaatggttcataaagcagcgaagacaactcaaaacatcagtaacacatttggcccaggaactgctaacaaacatacagtgcagtggtggcttaagaagttttgcaaggaagagagccttgaagatgaggaacgtgatatgggccatgggaagttgacaacgaccaattgagagcaatcattgaactacatgaaaaattacagaagaactcagcgttgactattctacggtcattagggtcgttcagcattcgaagcaaattggaaaggtgaaan

SEQ ID NO: 25727 - DNA, 364 bp, Homo sapiens
  misc_feature (1)...(364): n = A,T,C or G
agggtttcccccaggattnnnnnnnnttttgaaaacccatcgagcgccntcacgaattcggcacgagcacagagtatggaagtagctccgcagaggcgtgggctcgattcctcagggccacgttaccacagacctgtttgtttcttatgctgttgttcgtggagtctcatgggattgtctggtttcccttacagggccccctcccccgggaatgcgcccaccaaggccctagactcatcttggccctcctcagctccctgcctgtttcccgtaaggctgtacatagtccttttatctccttgtggcctatgaaactggtttataataaactcttaagagaacattaaaaaaaaaaaaaaaaaaa

SEQ ID NO: 25728 - DNA, 511 bp, Homo sapiens
  misc_feature (1)...(511): n = A,T,C or G
aggaagtcccccnnaggttagnnnnnttcactgatnggcctgattgatncgccctgaggctgaaacgacagcagtggtactgcctggtaaaagaattggttctgtgacccgggaagctttggttggccttgatttcttctctggaggcttggaaacgcttcctctcttcttctgttcttcacgccccatgcccctgctagcgtattactgttctgtgacttccctgtgacctctgcagaactcctcatcctgcgtttggtctccaggtgtcccctttctgccgtgttcctaacattttgattcctgtcttgaaaaaagcacctgctgcaccgtaagcccagggatgtggcagctgcagtgggcttggctttgtgaggaactgagtgtgtccacgttgggggaacatcatacttgatacacacgtttatttgcacaaagaaaatgctatttttggagccagaattntcatgtctgatttatggtgattntcttaagaaccagaactgctggn

SEQ ID NO: 25729 - DNA, 457 bp, Homo sapiens
atagaccgcctgtgtgattcggcacgagcagaagttggaaacatgcggctgtcggtcgctgcagcgatctcccatggccgcgtatttcgccgtatgggcctcggtcccgagtcccgcatccatctgttgcggaacttgctcacagggctggtgcggcacgaacgcatcgaggcaccatgggcgcgtgtggacgaaatgaggggctacgcggagaagctcatcgactatgggaagctgggagacactaacgaacgagccatgcgcatggctgacttctggctcacagagaaggatttgatcccaaagctgtttcaagtactggcccctcggtacaaagatcaaactgggggctacacaagaatgctgcagatcccaaatcggagtttggatcgggccaagatggcagtgatcgagtataaagggaattgcctcccacccctgcctctgcctcgcagaa

SEQ ID NO: 25730 - DNA, 499 bp, Homo sapiens
  misc_feature (1)...(499): n = A,T,C or G
cttggcccgctttgccccgcgctgcaggaattcggcacgagccgccagtcgcggtctccggcgccagctacgccgctgccgctgtcactatggcccattacaaagccgccgactcgaagcgtgagcagttccggaggtacttggagaagtcgggggtgctggacacgctgaccaaggtgttggtagccttatatgaagaaccagagaaacctaacagtgctttggattttttaaagcatcacttaggagctgctactccagaaaatccagaaatagagctgcttcgcctagaactggccgaaatgaaagagaagtatgaagctattgtagaagaaaataaaaaactgaaagcaaagcttgctcagtatgaaccacctcaggaggagaagcgtgctgaataggattcttctcagtttgaaagacaatgaanaatggttttgtatgacttgaatagtttggatagtatataatcttttctgaaaaaaaaaaaaaaaaaaaa

SEQ ID NO: 25731 - DNA, 511 bp, Homo sapiens
  misc_feature (1)...(511): n = A,T,C or G
aggaagggcccnnnagggggcncccctactgatngccntntatgatccgcctgcaggaattcggcacgaggagcgtgcctaccaaaagcagccgaccatctttcaaaacaagaagagggtcctgctgggagaaactggcaaggagaagctcccgcggtactacaagaacatcggtctgggcttcaagacacccaaggaggctattgagggcacctacattgacaagaaatgccccttcactggtaatgtgtccattcgagggcggatcctctctggcgtggtgaccaagatgaagatgcagaggaccattgtcatccgccgagactatctgcactacatccgcaagtacaaccgcttcgagaagcgccacaagaacatgtctgtacacctgtccccctgcttcagggacgtccagatcggtgacatcgtcacagtgggcgagtgccggcctctgagcaagacagtagcgcttaacgtgctcaaggtcaccaaggctgccggcaccaagaag

SEQ ID NO: 25732 - DNA, 498 bp, Homo sapiens
  misc_feature (1)...(498): n = A,T,C or G
aggctgtgccaaganaaaaaccactganaccntcccctgagttcgtcgganaaacncagannntcactgtaatggctgctacagagatggaccatcttcatcatcaccagtggtttcttctcattataaaatgtttaaactttctgagaatttaaaaagccaccactgttcccagtcagcatatacaagctcttaatattctgtttattaaataattcaatgtactattttatattggatgatattgattcttaacattggcttttcagtcatcaacagtcaacataaaaatttcaattttcagtaatttagtggaaaatatcttatttcttttttcaattttaaaggcttcctgcttttttacccttgtatattatcagtgaaaaggatcaacagttaatttgagccaagtaataaaagaaattctgcatttgtcacgaagacaatttatggtagacagataaatacacagattacagtgtaaagtctccatttaan

SEQ ID NO: 25733 - DNA, 516 bp, Homo sapiens
  misc_feature (1)...(516): n = A,T,C or G
tggagaagaattaaaaatataaaaaataaaggggagaaaagggaaatttgacnnccttgacccgcctgcaggaattcggcacgagtttctctggccctgtccatgtgactttggcccttggttttctttccagattggaggtttccaagaggccccccaccgtggaagtaaccaagggcgcttccttgtgggcagctgcaggccccatgcctctcctccctctctggcagggccccatcctgggcagaggggcctggggctgggcccagagtccagccgtccagctgctcctttcccagtttgatttcaataaatctgtccactccccttttgtgggggtgaacgttttaacagcccaagaaaaaaaaacaaaaaagaaaaaaaggaaaaaaagataaaaccgggggggtgtggccccactaaataaaaaacggctgtctgcttgtgaaggctttaaggaaaacctcgtcccttgactactgaaaacaaaaaaggggggagctgtttaattagctt

SEQ ID NO: 25734 - DNA, 497 bp, Homo sapiens
  misc_feature (1)...(497): n = A,T,C or G
tggnagttccnaggaaanaaccatgatngcctggatgattggcnctagcaagaagcggaagtatgagttggggcgcccagctgccaacaccaagattggcccccgccgcatccacacagtccgtgtgcggggaggtaacaagaaataccgtgccctgaggttggacgtggggaatttctcctggggctcagagtgttgtactcgtaaaacaaggatcatcgatgttgtctacaatgcatctaataacgagctggttcgtaccaagaccctggtgaagaattgcatcgtgctcatcgacagcacaccgtaccgacagtggtacgagtcccactatgcgctgcccctgggccgcaagaagggagccaagctgactcctgaggaagaagagattttaaacaaaaaacgatctaaaaaaattcagaagaaatatgatgaaaggaaaaagaatgccaaaatcagcagtctcctggaggagcagttccagcagggcaagcttc

SEQ ID NO: 25735 - DNA, 489 bp, Homo sapiens
  misc_feature (1)...(489): n = A,T,C or G
cgaggtgaccnccattgatcgccttaggtatgtcccccgaganaaatcacaatggcattttattcagctaccagatggcttaaaatgagtaaaccccaacaacatcaagcacatttgtctgtgatattgaccctttttatccaatcattactattttagaagtagtggtgaactgtgtaaaataatggtatcttcagcagtgttccggaatcttagttgagggacaaacattccttccagtgagagattcaagaattgatgtgaattgaatatatttttcaaggtattataaattgtgttgtgttttcagtataagaaaatgttgacaggaaacaattttatagcatttataaaaaaccaacacttgtgcaatgctaaattggcgaagcttctgcacctgaattagagcacaataaatatgctgtttataaaccaaatcactgctattccttctctgaaatcatctctcctctttttaaacctttactn

SEQ ID NO: 25736 - DNA, 500 bp, Homo sapiens
  misc_feature (1)...(500): n = A,T,C or G
cctcgacccgcttttgcnccgcgctgcaggaattcggcacgagagccgatcggngcctacttttaacattccacaattagtaacgtctgattcgtttgtttccacagtgggtacgctgcgaagactaggcttatgttacccagaggttagtcctctactaggccacgtactttaaataatttatcacgctagtggaaatgcggggtggaagaaaaccccaccagcctttggattgtaacagcacagtaactttccctggtttttaaaaatattgccaaaatactgcgactccatgtggccaacgtatagtgactgatcactttgaaatgcatgcccttgacccaccaactcgcatggcctctcgctataagagagcaagccggctgtgttccatgttcaattcaataagtgcaattcaataagcttttgacttgttctgcccaagcaaatcctgcctttatatcgaccttgcaagcagaacagagaatgctgtttggaag

SEQ ID NO: 25737 - DNA, 469 bp, Homo sapiens
  misc_feature (1)...(469): n = A,T,C or G
nttgcccgcctgcggatttccgcacgagaggaatcttacagtgatggaaatgctctaaagttggattgtagagatggctgcacaactcagtaaatgtactaaaaatcttttaactttaagttaaaacagatacattctatagtatgtaaattatatttcaacaaagctgttttaataaaaaaaggaaaaatgtgtttactatatcggcttaaaaacatgcctcatttctaggaaataaaagatagaggtgagagatgatttactttgagaaaagacattgcgtcacctatgaaattttattaggcacagagtcatattttaaggtagatagttctgtactgctgaaatagtaattttaatgtctttatgttgccacatgttaagaccataatgtagttataaatggaaatgcttacacctgaagtgagtattttcaaattaaaatttaattaagtgatgttcttcgacg

SEQ ID NO: 25738 - DNA, 479 bp, Homo sapiens
  misc_feature (1)...(479): n = A,T,C or G
agtggcgttttaactganttactgacgctntccgaattcggcacgagcctactccgagaggccccgggtccctctgccacaacttctgtcgctctgccgcctgcaccgtgacccgcactattcacgggagccctagagaggacaccgggacacccagaagccgggaaatggattcagtggcctttgaggatgtggctgtcagcttcacccaggaggagtgggctttgctggatccttcccagaagaatctctacagggatgtgatgcaggaaaccttcaagaacctgacctctgtaggaaaaacatggaaagttcagaacattgaagatgagtacaaaaatcccaggagaaatctaagagatggagtctccctgtttcccaggctggtcattgactgctggatcatgtgattcttctgtctccatctccccaagttctgggattacagacatgagccaccacaattggctactactttt

SEQ ID NO: 25739 - DNA, 481 bp, Homo sapiens
aactgtcgccttcggcgaattctggacagatttaatttgcctcgtcgaagtactgactttacaagcagggactattatattaatataagaaaagctttggttactgggtattttatgcaggtggcacatttagaacgaacagggcattacttaactgtgaaagataaccaggtggttcagttgcatccctctactgttcttgaccacaaacctgaatgggtgctttataatgagtttgttctaacaacaaagaattacatccggacatgtacagatatcaagccagaatggttggtgaaaattgcccctcaatattatgacatgagcaatttcccacagtgtgaagcaaagagacagttggaccgcatcattgccaaacttcaatccaaggaatattcacagtactgaattcagtgcttagaactgaagttattgagaggacagctttaaaagatgaatgaactcaaaagttcgagttgtg

SEQ ID NO: 25740 - DNA, 476 bp, Homo sapiens
  misc_feature (1)...(476): n = A,T,C or G
agacggtggnnnttatgacgccctnggaanatctgancgcctgcangaattcggcacgagttgcgggctgtgctgagttccagagagctgccggaattccaggtttgactctccagcacagagcagagctacacagaggtgacccacgttagtccactgagagttctgagtccaaagggtgtacgttgcataaggctagagaccgcttttcctcctttccccccaggctctttgttttcctccacccacccttccatatcctctggagcaggagacaatgtgggtgcccagaagtgccctgcgctttcaggcagtgtctctgttttcccaaggtgaaacttagatatcatggactgttgtccagcctcaatgcttcattttccccttgcatatcaactgccctaatctgactttttttaagtgcaaataaactgctataagacattttggttagtaaaaaaaaaaaaaaaaaaaaa

SEQ ID NO: 25741 - DNA, 492 bp, Homo sapiens
  misc_feature (1)...(492): n = A,T,C or G
nttgcccgcttgaggaactcggcacgagagttaggcatggtgatgaatgcatcagcaaggaatagaaagttcttatcgtgaaacccttcaacctcaactatgccttcatagacacacacgttcatgcacatgtaggcacatgtaccatctcacatcttcactttcccgagatgccatatacaattacctacattaataactgtagcactataccttttgagcccgagagagggaattagtgactctaagtgaaggtcactgacacagagaagcagtatgtgtctggggcttccaggacctgcaggcccactagcgtgcacttaccagaatggcatacacaggacctgatcatgaggaagaccaggtttccagtgtaaactactcttgttcccaccacctctggagcactcagggagccccatacagtacttacaatgtctttaatggacttgattctggttaattntttggtttatattaagcacactgtat

SEQ ID NO: 25742 - DNA, 479 bp, Homo sapiens
  misc_feature (1)...(479): n = A,T,C or G
cggcgcccntttgacatctatcgccttcggcactagcctcgatgaaccctgcagcgcggacgactttttgacgcgtggctcaagaaacacccacagctaattcctgcctttcgcttcctcaacaacctttctgggcccaggcaggggcctcgagccagggaaggatcctttgatgaccacaggggacagcagggagggcacagcgtggacgtccacggtcacttgcgcacgagccagtgctgctgctggtgttagacaacaacttttatcaaagtggtttaatgtacagcagcaacaaagctgctttgtggagcagggctcccaataggcagtgtgcccagagtagcagctcggaagcagtactgcaatcacatttatacccactttcaactatatgcaaatttaggggtggattatgccaaaatttctagaaaaaggtcgtactttcangtcgtgggattgttgctatgagaaagagn

SEQ ID NO: 25743 - DNA, 475 bp, Homo sapiens
agcggttttaaatgacggactggagaacctcacgaggagagagagagagagagagagagagagagagagagagagagagagagagagagagagagagagagagagagagagagagagagacactcgcgccgaattgcgcgcgagcttgagtgtgaacactctgggtggagcccagcgagagcttgtgaacatgaatatatggaccatacacgagctggtgagagatagcaccccacacagagatatggacgctacacacacacgagagcgctcgggaggcgagtgtgctggagggagacacaaagtctctgagagtgacacatttgtgatctctccacacacagaggccaacacatctctttgtgaagacttgtgtataaaagaacacgaagaagaggtttgagacacacacgtgtgggaagcgcacacactctggcacacagagacatggcatctatcttctgtgtgaggggtg

SEQ ID NO: 25744 - DNA, 491 bp, Homo sapiens
  misc_feature (1)...(491): n = A,T,C or G
aattgaccgcccttagngaanatttgcaccgcgtgtcggaatacgcgccgagctcagttcttttcatggccagactctgccagtccctgggagagctgtgcccccatctgaagcagtgcatcctgggaaaatcagagagctcacagaaaccagcaagggagtttagggctctgagaaaacagggaaaggtgaaaactcaggaaatcattcctacacaggccaagtggcaagaggttaaagaagtactcctccagcagagcgtgatgggctaccaggtctggagcagtgcagttgtgaaagttttgattcatggattcacccagtcattacttctagatgatgctggctcagttctggccacagccaccagctgggatgagctagaaattcaggaggaggcagagtctggcagcagtgtcacatccaagatccgactccctgcacagccgtcctggtatgtacagtccttcctgtttagtttatgccaggag

SEQ ID NO: 25745 - DNA, 482 bp, Homo sapiens
  misc_feature (1)...(482): n = A,T,C or G
cggctgggnnaattgacgtctgtggacttcggcacgagccgcggcggngaaaatggcggacgggaaggcgggagacgagaagcctgaaaagtcgcagcgagctggagccgccggaggacctgaagaagaagcacaaaaacctgtgaaaactaagactgtttcttccagtaatggaggggaaagttccagtcgcagcgctgagaagcgatcagctgaagaagaagctgccgacctcccaacaaagcctacaaagatctccaagtttggatttgccataggtagtcagacgacaaagaaagcatcagccatatccatcaaacttggatcaagtaagcctaaagaaactgttccaactcttgctccaaaaactctttcagtagcagcagcttttaatgaagatgaagatagtgaaccagaggaaatgcctccagaagcaaagatgaggatgaagaatattggaagggatacaccacatcagctgg

SEQ ID NO: 25746 - DNA, 467 bp, Homo sapiens
  misc_feature (1)...(467): n = A,T,C or G
ttcgcattgccccgcctgcaggaattcggcacgagcaagctctgaagtgaggctgaccagaggcattccagaaacttgtagaagccagttaagttagagcacagtgagtgaggtaatgaatagtgaagacaagatcagatacagacatgggacagatgacacacagactgtgtgatagttattcaataaacagtggaattctccttatcatacttttatattaactaatcataacactatacctaatgtatggtttaataataatttatcaataaaatgttgaacttgtagaaataaaaactatttagttatataacaatttacacttaactaggtgcttgctttcttattttgtttggtttgaccctcataaaccttctctgagataaatgctatattatgttaagaggccaagatatgtgattttaaggtgtacttaagactaaacactgatagatggagtaatn

SEQ ID NO: 25747 - DNA, 508 bp, Homo sapiens
  misc_feature (1)...(508): n = A,T,C or G
gggagtncccnnnaggtagnnnnnnattagatcgccntaatagattcgcctcgaggaattccgcacgagcctggctgtatctttcattttacccaagtcactttacccaagtaagtaattaggggaaagcctgagtcttgtaccacctgttcatttggggaactgtgggaaacggagccaacggacctaagtgccctttgacagtgagtttcataccatttcagtagtgtatttctttcttaatctgaataaaccagaatgatactctcagcacagaagaataaagggagcgagtcattaacgttttctttttaaacctttatgatgacttccttatgaattactgaacgaacactggaatgggactcaggtatcctgaggacatctctcaactctggccttagttccccctctgtaaaattagggtgccaactaaatgatctacaaggtcccttccagcgccgccattctgtaattacatcatgtgtaactgtattaaacatacaca

SEQ ID NO: 25748 - DNA, 470 bp, Homo sapiens
  misc_feature (1)...(470): n = A,T,C or G
nttaganccgctctgcaggcattcggcacgagggggtggggagtggtcatcactggaaccgtgatgcctgtgtttcacttggcagctttcgcactgagctcacagagagatggccttatgcgcagaatccagagagcacccctgggaatagagtgcaccctgactctgggtcagggactgagcagggaccagaaccaacttcttttctttcccacacatcatcttgtctgctaataatagagttcatcaccagtgagatttccagaataaagcccacccagctttttcccctaattatatcctctccctgggaattgcagagttgttcaaggcctgcatctggcttgtaagagcatttccaggaaaaccagattgagtaccacctctcacttgatagaacaaaaggaaagttgcacactttgaaggctcagcttctccagtagaaagtaacctgtggggctatagaaagg

SEQ ID NO: 25749 - DNA, 477 bp, Homo sapiens
  misc_feature (1)...(477): n = A,T,C or G
ggcggcgnttttncccaaagtangcgngagcaatgcagcncagactttgntcgtactcgtgcgcctcgcttcgcttttcctccgcaaccatgtctgacaaacccgatatggctgagatcgagaaattcgataagtcgaaactgaagaagacagagacgcaagagaaaaatccactgccttccaaagaaacgattgaacaggagaagcaagcaggcgaatcgtaatgaggcgtgcgccgccaatatgcactgtacattccacaagcattgccttcttattttacttcttttagctgtttaactttgtaagatgcaaagaggttggatcaagtttaaatgactgtgctgcccctttcacatcaaagaactactgacaacgaaggccgcgcctgcctttcccatctgtctatctatctggctggcagggaaggaaagaacttgcatgttggtgaaggaagaagtggggtggaagaagtgg

SEQ ID NO: 25750 - DNA, 467 bp, Homo sapiens
ttccgctttccccccgctgcaggaattcggcacgaggcccccatccagccccctccaggccagtgtgcacagtgcaccgaggggtcatccgcacagagcgaggtgcaagctcgatgtgtaacctggctgcggcacccgacatccccggtctcggggtgttgatttatttctgaataactttttgggtatagaaaccaattttttttaatatatgacatgtatatgtacacactcatgtgaaatatgtatactttggggggatctatttatgttccagtgggagtcactctcttctgtcgggaatcttatctgctgctttgtgtctttggtcagattcctgacaatttagtttcctgttgtaaaggtgcttttcctggggtgaactaaacctattgattttttttttttaagatttttttttccttttgatttaatatactgagaaagaaatgggagacttttgaatg

SEQ ID NO: 25751 - DNA, 496 bp, Homo sapiens
  misc_feature (1)...(496): n = A,T,C or G
agggtggnccgnnnnnnnnnnnaattgatngccnattgaangccctgcgagcaacataaggagacgcagtccttatttattcttcaccctcgcagggaacaaaggcctctccctcaattctgctctttcaatacttgaggataggcgcccctaaccctccttcctgcagggaggcctcagcatcagtgtctgtggacgtagtctctgaagagtgcttcagctgatggggaaggagaaactcaagacagagatcctcctagggatggcgtcactttcctgccaactttctcgttgcctctccttgaaagcagaagaagtgccagccctcagcttccgtcagatcttgggctcctagggccttgtacaagtccatggccctctggttccagtccaggacggccaggcggaattgggagcagcccttatccaaggccacctcagccacctttttgattattttggaaccaatcccttgaccccgatattccggcatcac

SEQ ID NO: 25752 - DNA, 521 bp, Homo sapiens
  misc_feature (1)...(521): n = A,T,C or G
gagcgntnnnnnnnagaattcaccggctgcaggaattcggtacgaggtcctatactttctgatatagacttgaaattcttaccagaaaattactttggagttttgaagcctttattaatactacttttaaagaagcagttgttttattgtcaatgttttttttcccccaagcatattttcttgtatttctgtttccatatatatatatatatataatttccaattcaggatattgccctgccatccatgaaaactgttctggcaccaaaagtaatgacaaatgttaagtgtaataatagaaaagtagagcaaagagccattcagcttcagtctttacataccatgaataaaacattaaaacatcatatggagaagtttacatggtgattgttcacctgcagtactgtggagttttaacattatgtcctcttttcagtgaaacagagtaaaaatattcatctaccattactggtatttgctgattttgttttattttttgatgagaatattctatccttatg

SEQ ID NO: 25753 - DNA, 531 bp, Homo sapiens
  misc_feature (1)...(531): n = A,T,C or G
ngtgggntnnnnnnnagggattccncggctgcangaatncnataccagcgcctgcaggaattcggcacgagaaaacatgcaatttaagtggaagcgaagaaatttaaagaggattttattttgcttgggtcaatccttgttaaaagggaggtggatgtgttttccttgtgttggatggcatgagattatgtgaatgttttgatttattaaaatgaactgcaaggtttttcacaggaacgacagacatgtatgactgcatgtaattataaactcctgacctcctggtggggttggagcatctgtttcaaatgtgggacttacaagcacttctcacatgagaaattatgggcgggtgggaagggatgggacacagcttctggcaccatggatttaagaccatgttggatccacaagttggcctgaaaccctgaagctgatgcttcacagctgggctgtaagtcagacttgaacccagctgatatgcaaggtcatggcgtgcccaaggtggtgacagctgaacaaagtgtataa

SEQ ID NO: 25754 - DNA, 469 bp, Homo sapiens
  misc_feature (1)...(469): n = A,T,C or G
nttgcaccgcctgcggatttcggcacgaggggctttcgaggaggaagaagacgtcgctctggtttgtggggtctctgctgctggtgtccgtcctcatagtcaccgtcgggctggctgccaccaccaggacggagaatgtgaccgttgggggctactacccagggatcattctcggctttggatctttcttaggaattattggcatcaacttggtggagaatagaaggcaaatgctggtggcagcgatcgtgtttatcagttttggcctggtggccgccttctgctgcgccatcgtggacggcgtatttgcagcacagcacattgaaccgaggcccctcaccacgggaagatgccagttttactccagtggggtggggtacttgtacgatgtctaccagacagaggtgagcaggagcactgagattcacgtgggttttgctcagctaaccccgccgaccccacgcggttn

SEQ ID NO: 25755 - DNA, 490 bp, Homo sapiens
  misc_feature (1)...(490): n = A,T,C or G
tgggcccnnnnaattgacggttgaggaccttgcacgagtccaagtcccggaagatcgcgatcctgggctaccggtctgtggggaaatcctcattgacgattcaatttgttgaaggccaatttgtggactcctacgatccaaccatagaaaacacttttacaaagttgatcacagtaaatggacaagaatatcatcttcaacttgtagacacagccgggcaagatgaatattctatctttcctcagacatactccatagatattaatggctatattcttgtgtattctgttacatcaatcaaaagttttgaagtgattaaagttatccatggcaaattgttggatatggtggggaaagtacaaatacctattatgttggttgggaataagaaagacctgcatatggaaagggtgatcagttatgaagaagggaaagctttggcagaatcttggaatgcagcttttttggaatcttctgctaaagaaaatca

SEQ ID NO: 25756 - DNA, 497 bp, Homo sapiens
  misc_feature (1)...(497): n = A,T,C or G
agggtcccnngnnnattgcncggatcggaggcctgtaagaatactgcacgagaatgcattgaatgtgtacagcgcccgtctttgcaatttatcatcgatgcgtttaagggacaggtatttgccttatccacacatccttatggctgccgagtgattcagagaatcctggagcactgtctccctgaccagacactccctattttagaggagcttcaccagcacacagagcagcttgtacaggatcaatatggaaattatgtaatccaacatgtactggagcacggtcgtcctgaggataaaagcaaaattgtagcagaaatccgaggcaatgtacttgtattgagtcagcacaaatttgcaagcaatgttgtggagaagtgtgttactcacgcctcacgtacggagcgcgctgtgctcatcgatgagtgtgcaccatgaacgacggtccccacagtgccttatacaccatgatgaaggaccagtatgccaacttacgg

SEQ ID NO: 25757 - DNA, 480 bp, Homo sapiens
  misc_feature (1)...(480): n = A,T,C or G
cgcgccnntnnnccttgangaattgaccggctgtacgaattcggcacgagctccggatctcgtttttactgctctttgtccttagcctctgtggccctgtgacctgtaggtatttggagatccacagctaggacgccaggaccccctggaagcttagaaatgggatcgttgacatttcgggatgtgaccatagaattcgctctggaggagtggcaatgcctggacatggctcagcagaatttatataggaatgttatgttagagaactacagaaacctggtcttcctgggtatcgctgtctctaagctagacttgataacttgtctgaagcaagggaaagagccttggaatatgaagagacatgagatggtaactaaacccccaggtatgtgagagtgaatacaagaaacaacacaaataagaggtccagaggtccaggagaaagccagttctcaaaatgtgacctgagaagctgtgctc

SEQ ID NO: 25758 - DNA, 468 bp, Homo sapiens
ctcttgcctagcctcgcctgcagcggctatactattaatattaattattagtcctgaaagaaagataacatatgtgatttttgtggttaggagagttgctgtcatgatagttttttcttcagcctcctcgtgacttttcttttggggcttcagattttatgattacatcttgtccccctagaacatcccccttcctcccatactgcttttaaacagatgcccaagaaggcaagcaggaatgcctcttgtgggggagggcagggagaaataactagttcaaaccaactatctatctatgctttgcaaagactaacgcgtattataggaagagggctagaaacctaactgattcttctcacttttctcattttaaaacagcccagtattcctttgtatcctcaagggtccttgagaatacttctgttattgagaccctgtgggctacttgtactgtacctcctctcaagg

SEQ ID NO: 25759 - DNA, 452 bp, Homo sapiens
attggacactcgcccccgcgctgcaggaattcggcacgagaaaaacccccttccaggagaggatgggcaggcatttaaaaagtaccatttttgtggttgtttggagcagggatgtacaaaataattttaatgtattaactcatactgcctgtcttttataggggaaaaaaataaccttttttattttaaagttataaggtttttaccttttagttgcttggatgacagggaattagcctaccccattttggtctggaacagaagactttcaaatttaatatggtccaagtgtcttcctactcaaggtaaacattatctccaaaattacatttatgattctaatatttggcattgtgtctgtatctaatttaaacagatgttaatggacgtctggccgaaactattatacttttataagatgagctgaatcctcttactttaaaaactggtct

SEQ ID NO: 25760 - DNA, 482 bp, Homo sapiens
  misc_feature (1)...(482): n = A,T,C or G
nggatgggnnaattcccggctgcagcgccgccgcgccgccatcatggacaccagccgtgtgcagcctatcaagctggccagggtcaccaaggtcctgggcaggaccggttctcagggacagtgcacgcaggtgcgcgtggaattcatggacgacacgagccgatccatcatccgcagtgtaaaaggccccgtgcgcgagggcgacgtgctcacccttttggagtcagagcgagaagcccggaggttgcgctgagcttggctgctcgctgggtcttggatgtcgggttcgaccacttggccgatgggaatggtctgtcacaatctgctccttttttttgtccggcacacgtaactgagaggctcctttagataaagcgtttgggtttcgcgttgnntatgattttagttctaacattgagtttttggggggggggccgggtgcccatttctcctttgggggaggtatgtaacattaattggcg

SEQ ID NO: 25761 - DNA, 496 bp, Homo sapiens
  misc_feature (1)...(496): n = A,T,C or G
gancgtnnaccnnnaaaaccttganncatcgatcggctgtacgaattcggcacgagaccactcagagctggaaccaagatctagatagtccgtagatagcacttaggacaagaatgtgcattgatggggtggtgatgaggtgccaggcactgggtagagcacctggtccacgtggattgtctcagggaagccttgaaaaccacggaggtggatgccaggaaagggcccatgtggcagaaggcaaagtacaggccaagaattgggggtgggggagatggcttccccactatgggatgacgaggcgagagggaagcccttgctgcctgccattcccagaccccagccctttgtgctcaccctggttccactggtctcaaaagtcacctgcctacaaatgtacaaaaggcgaaggttctgatggctgccttgctccttgctcccccaccccctgtgaggacttctctaggaagtccttcctgactacctgtgcccagag

SEQ ID NO: 25762 - DNA, 460 bp, Homo sapiens
catcgaccatcgtgccgcgctgcaggaattcggcacgagctaatttgaggccctgagtgggccttgaatgctaaaaagaagcagggtacgcagggctacatgtagataccacaccaaggctggaggctggtctgtcataagacagaaagaaagacgctgggcccaattttgacttggccaggggacaccttggtgtgtttgttatctttatctgtgggtaggctagctgacccatctccttgagtcattccctttgggaaaccccactgccagtattgatctcctttttgccttgtactgaatgacacattacctccacactctcccggactaggtggtcaacagggccacagggttgctttctgtctttggtggggcaggggagttgacagggatgagggtccaaggaataagcatgaatgacaagaaaacaagggaaagagttaacctgtcacatagg

SEQ ID NO: 25763 - DNA, 455 bp, Homo sapiens
agaggggacctgacttgctctgacgaattcggcacgaggacagacagcaccttctccggatttctggtgtactccgactggcacagctccccagtctttgcttaatgcccactgcaaagtgagctcatgctctcactcctagaaggagggtgtgaggctgacaaccaggtcatccaggagggctggcccccctggaatattgtgaatgactaaggaggtggggtagagcactctccgtcctgctgctggcaaggaatgggaacagtggctgtctgcgatcaggtctggcagcatggggcaggggctggatttctgcccaagaccagaggagtgtgctgtgctggcaagtgtaagtcccccacttgctctggtccaggagcccacggaggggtgctctcttcctggacctctgcttctctggatgctccccaccccctactgctcctggggccggc

SEQ ID NO: 25764 - DNA, 471 bp, Homo sapiens
ctcgtagcctcgcgctgcacgaattcggcacgagaaaaggagagaggacttcctgctggagatgttctagagccagtacaaaagcctcatgaaggtcctggagaaatggggaaaccagtcgtcattcctaaagaggatcaagaaaagatgaaagagatgtttaaaatcaatcagttcaatttaatggcaagtgagatgattgcactcaacagatctttaccagatgttaggttagaagggtgtaaaacaaaggtgtatccagataatcttcctacaacaagtgtggtgattgttttccacaatgaggcttggagcacacttctgcgaactgtccatagtgtcattaatcgctcaccaagacacatgatagaagaaattgttctagtagatgatgccagtgaaagagactttttgaaaaggcctttagagagttatgtgaaaaaactaaaagtaccagttcatgtaattcga

SEQ ID NO: 25765 - DNA, 521 bp, Homo sapiens
  misc_feature (1)...(521): n = A,T,C or G
ngtgcgttnnnnnnngaattctcggctgaggaattcgtacgagcccagaggctgttgcagaacctcctcagccaacggcagttcccttagagctagccaaggagatagaaatggcatcagaagagaggccaccagcacaagcattggaaataatgatgggactgaagactactgacatggcaccatctaaagaaacagagatggccctcgccaaggacatggcactagctacaaaaaccgaggtggcattggctaaagatatggaatcacccaccaaattagatgtgacactggccaaggacatgcagccatccatggaatcagatatggccctagtcaaggacatggaactacccacagaaaaagaagtggccctggttaaggatgtcagatggcccacagaaacagatgtatcttcagccaagaatgtggtactgcccacagaaacagaggtagccccagccaaggatgtgacactgttgaaagaaacagagagggcatctcctataanaatggactta

SEQ ID NO: 25766 - DNA, 527 bp, Homo sapiens
  misc_feature (1)...(527): n = A,T,C or G
gtgggnnnnnnnnagaattgacggctgtggaannnattccancgcctgcaggaattcggcacgagggcaccattcgtggggacttctgcattcaggttggcaggaacatcattcatggcagtgattcagtaaaaagcgctgaaaaagaaatcagcctatggtttaagcctgaagaactggttgactacaagtcttgtgctcatgactgggtctatgaataagaggtggacacaacagcagtctccttcagcacggcgtggtgtgtccctggacacagctcttcattccattgacttataggcaacaggattgatcattcttttatagagcatatttgccaataaagcttttggaagccggacctaaaaaaccaactaatcaagaagccctggggggggggccgggcccccattgccccctataggggggggaataacattctgggggccgggttttaaaaacgcggggacgtggaggagncnctgtngnnngantcagagagggcatctcctatnaaaacgcgggta

SEQ ID NO: 25767 - DNA, 506 bp, Homo sapiens
  misc_feature (1)...(506): n = A,T,C or G
tgggnccnnnnnnatttcatcggctgcacgaattcggcacgagggacaggtgagagatgaagctcagaagacatctttgcagagatgtggagaagacaggaggaagtccttcctaaaataaacctgacctcctgtgggttcccaaacactaacttgtttccctgggaatttggagctttgaccaggacctggtaacagatgtggatggacttgaaccaccaactcagcttagaaggaagccaagacttaaagtttcctagatcccagctttttggaaattttagcattcaggtgccaggaatgcagatgggacagccagtgccagaaacaggcccagctatactcctcgatggatactctgggccagcatattcagacacttattcctcagctggtgactccgtgtatacttacttcagtgctgttgctggacaggatggggaagtggatgctgaagaacttcaaagatgtttgacacagtctggaattaatggaacttactctcn

SEQ ID NO: 25768 - DNA, 477 bp, Homo sapiens
  misc_feature (1)...(477): n = A,T,C or G
cgcggggnttttaattcgacggccgtaggaactctgcacgagcaagccttcactgtcctggcatgagaactggctgccaggctcagtgtaccccattaaatgtgaatgaatctgagcttggtttcctttattgcttcctctgcaatatgattgctgaaacacattttaaaaattcagaagtttgtcactcctgttaatgggaggatcattcacacatgtgtagtacaaggcggactttgtgtttgtttttggtgttaatttttagcattgtgtgtgttgcttccccaccctgaggagaggacaccatggcttactactcaggacaagtatgccccgctcacggtgtgatttcaggtggcttccaaacttatacgcagtttaaagatggtggggacagactttgcctctacctagtgaaccccacttaaagaataaggagcatttgaatctcttggaaaagggcatgaagataaagcc

SEQ ID NO: 25769 - DNA, 477 bp, Homo sapiens
  misc_feature (1)...(477): n = A,T,C or G
aggggnagnnnnnnnatttgatcgcaccggctgcaggaattcggcacgagcctttccgtggcctggctccgctgtgtggatggggagatcggggccagaggcagaaccctggtgaggaagctccagtcctgctctctacccagcccatcttgcctccatggtgcctctggaggcctctgggcctcctctaacaggggctggtgggcaccaagagccaatggagtagacccctggctggtaagggccaagtcccaccggttgcttctgggaaggggtttctaacactagtctgtgtgctgcggttcctggggtgccctccactgccctctgttcagtaacagggccttgctaatcgggttgtcactcaacaaaagtgctttggatttaaggtactatcctggctttgcccaacctcagcaacctgtaagactgataatgaaataaatcatgttaatcctaaaaaaaaaaaaaaaaaaa

SEQ ID NO: 25770 - DNA, 496 bp, Homo sapiens
  misc_feature (1)...(496): n = A,T,C or G
gcgggccnnnnnatttgacgtttgagcgactgcaagaattcggcacgagtttttttattttattttactttatttaattgtatttttattatactttaagttctagggtacatgtgcacaacgtgcaggtttgttacatatgtagacatgtgccatgttggtgtgctgcacccattaactcatcatttacattaggtatatctcctaatgctatccctcccccactccccattcttatgttgggaacttcctttactcacacaggttttatttctctgctgttgcctggcaacggagatgtggcaagagatgtcagaggttaaggagcagactaaagtcattatggaaagcaagctcttatcagcattttccatctaactttgtaatctttgaaataaaatagttttcattgtatcaaatgtctgtaatttttttcttatcaaatgacaagtatttagagacatttttttctttctgaatataagtccactacacn

SEQ ID NO: 25771 - DNA, 483 bp, Homo sapiens
  misc_feature (1)...(483): n = A,T,C or G
agcgggcgttttnaactgaaagcatcgaccggctgcaggaattcggcacgaggggatgcgggccctcccgccgcagcgacctccagagcctgggctactgcatgctgaagtggctctacgggtttctgccatggacaaattgccttcccaacactgaggacatcatgaagcaaaaacagaagtttgttgataagccggggcccttcgtgggaccctgcggtcactggatcaggccctcagagaccctgcagaagtacctgaaggtggtgatggccctcacgtatgaggagaagccgccctacgccatgctgaggaacaacctagaagctttgctgcaggatctgcgtgtgtctccatatgaccccattggcctcccgatggtgccctaggtggaatccagaactttccatttgcagtgtgcaacagaaaaaaaaaaatgaagtaatgtgactcaaggcctgctgtttaatcacagataagctt

SEQ ID NO: 25772 - DNA, 458 bp, Homo sapiens
ggcggccaaaaaaaattgactgcctccgctgcagctctccccagcccctgagcccagccccttcccaagtggtgccggacaaaaaaactacatggccctttcgtgtcttgggggtggaaagggagggatgaattggggtgatagaaccctggtgaattcagagtaatctttctttagaaaactggtgttttctaaagaaacaggataggagtttagagaaggcaccaaagctttcactttggtttggcaccagtttctaaccatctgttttttctaccctagctatcttttattggtaaaatataaatgtataattatgtttgtagagctttaccaaggagtttccctccttttttgtttgttgattagcaaatttttgattctccattttccagaagtaagagactccagcatggccttctgtttgccccgcagtaaagtaacttccatataaaatg

SEQ ID NO: 25773 - DNA, 426 bp, Homo sapiens
  misc_feature (1)...(426): n = A,T,C or G
ggtnaagggngccngcnntttcgacgtactgcagggctgtaagantacttcgcgatattgctaaatactgtgcagagctctttcagagcaatataaatgagtgcctgggaggaggaggttttgtgccagagccttgccccctcactcactcttgggggtcctgatgaactcttggaccctgtggaagataagagttagagacctcggcctcctggtcagtggagcccttggcctcatgcctggtgggctaagcgggcccagctggggtttgaggtaggggaggccttggcttggccccagcagctccagggccctgagttcctgccagaggctggagagcaggcagctgctgcttttcctggtccttggtaggggagggtcctcaggcttgcgtgccaaagcctgaaggattctgcttctgccagc

SEQ ID NO: 25774 - DNA, 506 bp, Homo sapiens
  misc_feature (1)...(506): n = A,T,C or G
ccctccccgncgggnnngnnnntttagacggctagatcgaccttcggaatgagccacgaggtgctttagctccttctcgcctgatccttctgtctctcccaaccccggacacccggcttcgactggttatatcttcggcgttcttttcctctcttcttctttcgcggttcagcatgcaggaaaaagacgcctcctcacaaggtttcctgccacacttccaacatttcgccacgcaggcgatccatgtgggccaggatccagagcaatggacctccagggctgtagtgccccccatctcactgtccaccacgttcaagcaaggggcgcctggccagcactcgggttttgaatatagccgttctggaaatcccactaggaattgccttgaaaaagcagtggcagcactggatggggctaagtactgtttggcctttgcttcaggtttagcagccactgtaactattacccatcttttaaaagcaggagaccaaattatttgtatggat

SEQ ID NO: 25775 - DNA, 500 bp, Homo sapiens
  misc_feature (1)...(500): n = A,T,C or G
ggcgttnnnnnaattgatcgcttgaggaactttgcacgagatcttaactattttggtaggtcctgggtttctcttggtagtttttgatacaaaggggaatggtgtgaggaaaaagtgggcatacatttcacctttccactgataaggcacgtggaattgggatagtcagtggatgggccaatagctggtggctgtgagaagaataaggatttccatactggtgtgtcatatttacagataggttgtgacctaaaaagttttttaaaaaacagcagttagggcctgggcgtggtggctcgcgcctgtagtcccagcactttgggaggccgaggcgggcggatcacaaggtcgggagatcgagaccatcctggctaacaacggtgagaccctgtctctactataagtacaaaaaattaacccggcgtggtggcgggtgcctgtggtcccagctacttcggaggctgaggcaggagaaatgcgtgaactccggaggtggagct

SEQ ID NO: 25776 - DNA, 521 bp, Homo sapiens
  misc_feature (1)...(521): n = A,T,C or G
agatgggaggggnntttcgccggccgtangatctgcaccggctgcaggaattcggcacgagtggagatgccactttgaagaacccaatcctctggaatgtggctgatgtggtcatcaagttccctgaggaagaagctccctcgactgtcttgtcccagaaccttttcactccaaaacaggaaattcagcacctgttccgcgagcctgagaagaggccccccaccgtggtgtccaatacattcactgccctgatcctctcgccgttgcttctgctcttcgctctgtggatccggattggtgccaatgtctccaacttcacttttgctcctagcacgattatatttcacctgggacatgctgctatgctgggactcatgtatgtctactggactcagctcaacatgttccagaccntgaagtacctggccatcttgggcagtgtgcgtttctggctggcaatcggatgctggcccagcaggcagtcaagagaacagcacattagttccagaagaaagatggaa

SEQ ID NO: 25777 - DNA, 447 bp, Homo sapiens
  misc_feature (1)...(447): n = A,T,C or G
attgctttcactgcggttgaacttcgaggaatgtttaaatgggtgagaagaacattaattgccctcgttcaggtcacttttggaagaaccatcaacaaacaaatccgggacacagtcagctggattttcagtgagcaaatgttggtttactacatcaatattttccgggatgctttttggccaaatgggaagttggcaccaccgaccacaatcagaagcaaagagcaaagtcaggaaacaaaacagagagcacagcaaaagctgcttgaaaacattccagatatgcttcagagccttgttggacagcaaaatgcccgccacggtataataaaaatattcaatgcactgcaagaaacaagagccaacaagcatctgttatatgcgctgatggaactgctgctaattgaactgtgtcctgagctgagagttcatttagatcaacttaan

SEQ ID NO: 25778 - DNA, 515 bp, Homo sapiens
  misc_feature (1)...(515): n = A,T,C or G
agaggatggggntttcccggctgcangattcggcacgagaggagaacctgaaggctgcgcaggaggagtatgtcaagcgagccctggccaacagccttgcctgtcaaggaaagtacactccgagcggtcaggctggggctgctgccagcgagtccctcttcgtctctaaccacgcctattaagcggaggtgttcccaggctgcccccaacactccaggccctgccccctcccactcttgaagaggaggccgcctcctcggggctccaggctggcttgcccgcgctctttcttccctcgtgacagtggtgtgtggtgtcgtctgtgaatgctaagtccatcaccctttccggcacactgccaaataaacagctatttaaggggaaaaaaaagaaaaaaagcagagctgaaaatgaatgagaataataaaagaangtgtcggggggggggggggcccgccccccctgcccgcaaagggggggcaaaaatacacatcggggcggggttgaataaaggc

SEQ ID NO: 25779 - DNA, 516 bp, Homo sapiens
  misc_feature (1)...(516): n = A,T,C or G
ggggatggggntttcacggctgcggatctgcccggctgcaggaattcggcacgaggaaatcctgacacccagtggatcaccaaaccagtccacaagcacagggagatgcgtgggctgacatctgcaggccgaaagagccgtggccttggaaagggccacaagttccaccacactattggtggctctcgccgggcagcttggagaaggcgcaatactctccagctccaccgttaccgctaatataagtaaagtttgtaaaattcatacttaataaacaatttaggacagtcatgtctgcttacaggtgttatttgtctgttaaaactagtctgcagatgtttcttgaatgctttgtcaaattaagaaagttaaagtgcaataatgtttgaagacaataagtggggggtatcttggttctaataagaataaactttttgtctttgctttatcttattagggagttgaatgcagtgtataaaacatactgtgtggtataacaggcttaataaattcttt

SEQ ID NO: 25780 - DNA, 472 bp, Homo sapiens
  misc_feature (1)...(472): n = A,T,C or G
cgcgcccccatgagattgacngcctcgcaaancgccacgagnacaaaactagagaaaattgggaagggctcctttggagaggtgttcaaaggcattgtcaattttactcagaaagtggttgccataaagatcattgatctggaagaagctgaagatgagatagaggacattcaacaagaaatcacagtgctgagtcagtgtgacagtccatatgtaaccaaatattatggatcctatctgaaggatacaaaattatggataataatggaatatcttggtggaggctctcgactagatctattagaacctgggcccattagatgaaaccccgatcgctactatattaagagaaatactgtgaggactcgaatattctcctttcggagaagagaatccacagagacattaaagcggccaacgtcctgctgtctgagcatggcgaggtgaagcatgcggactttggcgtggctgg

SEQ ID NO: 25781 - DNA, 422 bp, Homo sapiens
  misc_feature (1)...(422): n = A,T,C or G
gggggggnnnnnaattccctcggctgcaggaattcggcacgagcccatttcttctggggtctgtggtccatcctccaggcatccatgtccaccatagaatttggttacttggactatgcccagtctcggttccagttctacttccagcagaaggggcagctgaccagtgtccactcctcatcctgactccaccctcccactccttggatttctcctggagcctccagggcaggaccttggagggaggaacaacgagcagaaggccctggcgactgggctgagcccccaagtgaaactgaggttcaggagaccggcctgttcctgagtttgagtaggtccccatggctggcaggccagagccccgtgctgtgtatgtaacacaataaacaagcttcttcttccaaaaaaaaaaaaaaaaaaac

SEQ ID NO: 25782 - DNA, 472 bp, Homo sapiens
  misc_feature (1)...(472): n = A,T,C or G
cggcgacaannnnaattgaccgtcggtgcagcaattcggcacgagcgaaacaattgtttaaatgcataaagttgaggactttgaatctgggacagaactgcatcacctcactcccagagaaaggtggtcagctctcccagctcactcagctggagctgaaggggaactgcttggaccgcctgccagcccagctgggccagtgtcggatgctcaagaaaagcgggcttgttgtggaagatcacctttttgataccctgccactcgaagtcaaagaggcattgaatcaagacataaatattccctttgcaaatgggatttaaactaagagaatatatgcacagtgatgtgcaggaacaacttcctagattgcaagtgctcacgtacaagttattacaagataatgcattttaggagtagatacatcttttaaaataaaacatagaggatgcatagaaggctgatagaagacata

SEQ ID NO: 25783 - DNA, 461 bp, Homo sapiens
  misc_feature (1)...(461): n = A,T,C or G
gtccgaanaaanaaaaaactgactgcgctgcggtattcggcacgagctgcctggagtgctgtgctgtgtttaatcaggggatacaggcccctgggtttcttttttctttcttcctttcttccttggccaagagaagggcttacaggcatggacatgcaggttggcaaacgggcttgactttggctgatttaaaaagtgagaaagaaagtaaaaaaggttaatttttccttcctctgtaagatatcccagctttaaaaagaaaaaaaaagaattaccaagagaaggggacttctcttccagtttctgtaaggtcttacattgcctgactaaaatgtttcatttacctctaaatttccatatccttctggctgtagataaataatgtagctttgtttatgcatttggaattagtggatttttttgtcattaaaattgttaccactggtaacatgtgacaagca

SEQ ID NO: 25784 - DNA, 502 bp, Homo sapiens
  misc_feature (1)...(502): n = A,T,C or G
agagtggcnnnttttgtctgctgtggaattcggcacgagcatcctgagggtaatgcagagctctcagaagatatatgtaaagaatatgaagtaatgtattcttcatcttgtgaaaccacaagaaatactacaggcattgaagaatcaactgatgggatgattttaggaccagaagatctgagttaccaaatatatgatgtttccggagaaagcaattcagcagtttctacagaagacctaaaagaatgtctgaagaaacaattagaattctgtttttcacgagaaaatttgtcaaaggatctttacttgatatctcaaatggatagtgatcagttcatcccaatttggacagttgccaacatggaagaaataaaaaagttgactacagaccctgatctaattcttgaagtgttaagatcttctcccatggtacaagttgatgagaagggtgagaaagtgagaccaagtcatangcgttgattggaattcttagagagattcn

SEQ ID NO: 25785 - DNA, 503 bp, Homo sapiens
  misc_feature (1)...(503): n = A,T,C or G
aggggcnnnntttgcatgcgctcggctgcacgaattcggcacgagaaagggcacagttcggcattaaggtagaaggcaaagccctagaggatcaactggtttggtggaagtgaggtcaccagaagccctgtccagccagagctgggtgctgggaatgccagggccaccaggctcccacttcctgcccctgccaagctggcattggcaaggggagggggaagggatctgagcacccggagcaaggaggttgatgccagggagttggggccgatgatctccagtcccaggcagaaatccagtgtgaactttgtgctgagtccatcgatcgatttgacattcttttttttttttttttgggacttgggcccccacacaaaaacccccccccccccaccccccaaaagtggaagcctggtaaagctcctcctttggccctttgggatatcccgcggggcgccaaagggcctggaaggcaaccggggaggcctgcaatacacacgtgc

SEQ ID NO: 25786 - DNA, 447 bp, Homo sapiens
acggacttgtctccgctgcaggaattcggcacgagtctccctctactcacaatactaaagggaaaaaatggattcaaagctaggatttcagggcccagcagtgttcctccatcagcatgttagacaactacacagtatgttgttagttttgaaagacattcactcaaggaaaacaccatctcaactttgcccgctcaccatgtcccttgcccccatgtagcccatttcccaggttatgctcttttctttctcagggtcctctttggtgggcagccactccccgagatgttgccatcagttttctgcagtccaaagagggtatggttaggtacgggtcttcctgcctcattcctcttcctctttgtgtaggtttcagccacaaaactgtcattcactctaggggacccctactaaagggtaacttcaggtgtgcagccctgagctcca

SEQ ID NO: 25787 - DNA, 461 bp, Homo sapiens
  misc_feature (1)...(461): n = A,T,C or G
aggcgtccaaaaaaanattgaactgactccgtctgacgaattcggcacgaggcggactggagtaccttgcgtgcagttatgtcggcgtcggtagtgtctgtcatttcgcggttcttagaagagtacttgagctccactccgcagcgtctgaagttgctggacgcgtacctgctgtatatactgctgaccggggcgctgcagttcggttactgtctcctcgtggggaccttacccttcaactcttttctctcgggcttcatctcttgtgtggggagtttcatcctagcggtttgcctgagaatacagatcaacccacagaacaaagcggatttccaaggcatctccccagagcgagcctttgctgattttctctttgccagcaccatcctgcaccttgttgtcatgaactttgttggctgactcattctcatttacttaattgaggagtaggagactaaaag

SEQ ID NO: 25788 - DNA, 447 bp, Homo sapiens
  misc_feature (1)...(447): n = A,T,C or G
ntttgacatcgatccgcgctgcacgaattcggcacgagttttagtagagacggggtttcaccatgttagacaggatggtctccatctcctgagtttgtgatctgcccgccttggcctcccaaggtgctgggattacaggtgtgagtcaccgcgcctggccttttttttttttttttttacgggatttttttttccccggattttgggcctcacctcctaaaggggcctcagttgggaacccaaggggggtgaatttatttttgccaggcctgcagtttcacatttgtaacgggagggaacaaataaccaccgggtttttctagaccagttcccaggtttttaagggtggccctttactatttcagggggtttgtttgagggcccagggtgtgcccaaactttgttgggccccaaagagacaaaatccgagggacggggttctcctcn

SEQ ID NO: 25789 - DNA, 445 bp, Homo sapiens
  misc_feature (1)...(445): n = A,T,C or G
nattgacctcgatgagcattttcgccatcatggatcagtttggagatatattagaaggtgaagtggaccattctttctttgacagtgactttgaagaaggaaagaaatgtgaaactaactcagtttttgacaagcaaaatgatgacccaaaggaaagaatagataaagatacaaaaaatgtaaattcgaacactggaatgcaaacaacagaaaattatcttactgagaagggaaatgaaagaaacgtgaaatttcccccagaacaccccgtagagaatgatgttacacaaactgtaagttctttctcattgccagcctcttcaagatcaaaaaaattgtgtgatgttacaacaggacttaaaatacacgtgtccattccaaatagaattcccaaaattgtaaaagaaggtgaagatgattactacacagatggagaggaaagcag

SEQ ID NO: 25790 - DNA, 481 bp, Homo sapiens
ggcaagccccccattgaccgcccattgaccgcctgcaggaatcggcacgagcagagcttgtgggatgctaatagttagtgaagtatacatgatttaatttctaataatctttatgttttctttaaggatggcggtgtattgctctttttcagctttatttttaagagtacagtcaggaaaccaacaaggggcctaagagtggctgcccctgcttgggacattacagcaagtgaaacaaagttaatgtgacaagctttgctttgttatcattggtcttcactagaggataccttttacatgtacttctctcttggatcaaatatgtctttaactgtacatctcagtggctggaggccatgccttttaagcatgtgtaaaatttttaaagaaatgaacatacacatagttattttagtaatatttcctgaaagaaaaaccaaattctgctataagtcttgatcttcaatgaacttttaaataa

SEQ ID NO: 25791 - DNA, 486 bp, Homo sapiens
  misc_feature (1)...(486): n = A,T,C or G
natggccngcctgaggaanncatcgaaaggcgactctgaaccctgatcagngccacccttctcggaaaaggagagcagccatccctgtccccaagctttcttgtaagaacctctgccaccgtcaccagctattcattaacttccgggacctgggttggcacaagtggatcattgcccccaaggggttcatggcaaattactgccatggagagtgtcccttctcactgaccatctctctcaacagctccaattatgctttcatgcaagccctgatgcatgccgttgacccagagatcccccaggctgtgtgtatccccaccaagctgtctcccatttccatgctctacnnagacaataatgacaatgtcattctacgacattatgaagacatggtagtcgatgaatgtgggtgtgggtaggatgtcacaaatgggaatagaaggagtgttcttagggtaaaacttttaataaaacttacctatctgc

SEQ ID NO: 25792 - DNA, 485 bp, Homo sapiens
  misc_feature (1)...(485): n = A,T,C or G
gggtggtcnnnntttcgcncgcctgctggaattcggcacgagcggtaattaaaaggactgatcgggaaaaggccctgtgccctactcgggagaatttcaacagccaacaaaagaacctttcagtgagctgtgctgctgcttctgtggccagttcacgctcttctgtattgaaagactcggaatatggttgtttgaagattccaccaagatgtatgtttgatcatccagatgcagataaaacactgaatcaccttatatcggggtttgaaaattttgaaaagaaaatcaactacagattcaagaataaggcttaccttctccaggcttttacacatgcctcctaccactacaatactatcactgattgttaccagcgcttagaattcctgggagatgcgattttggactacctcataaccaagcacctttatgaagacccgcggcagcacttccccggggtcctgacagacctgcggtctgccctg

SEQ ID NO: 25793 - DNA, 516 bp, Homo sapiens
  misc_feature (1)...(516): n = A,T,C or G
ggtaaantacannagcnnnannnnncnaggggccncccccaattcgaccgccccnattgcaccgcctgcaggaattcggcacgaggtctgatgaggctccctcccaacctgatccaaaagccagtctcaggagtttacccctgggatgggggatgcatctgcacctgactttggggccacgtgccctgtggcaccccagctcactgggagtctcaggagggataaccggatttctgctctttcccctgtcactcccacatcacacagaaaaatggcattcctctctgtctctccctggcatggagagggcagactgtgcacatttcactagggtccaaatacagaagggcccagggcccaggggcttgcagcttcgtgaggggtctctggcccagtttccaatgaataaagttctcttgacagctcaaaaaaaaaaaaaggggggcccgggcccccatttccccttaaaggggctcgttaaaaaatacattgcccggggttaaacaacaacggaat

SEQ ID NO: 25794 - DNA, 496 bp, Homo sapiens
  misc_feature (1)...(496): n = A,T,C or G
gcagttcncagggttcccccaactgaatgcattcagannancgtncgagaanggcaacgaggactcgaacgggatttgctgaattaatgactattgaatttaaaactaattatgagttgacaaataaataaaaggtagtgtttatgtctgagcttattgtgtttgagctaacaccaggttactcagtaaccatgacctgctcctccatttccatttattctcaacattaaatagttttatcttgttgttgccagaaatgcacttgtgccaggtattgtccctgctgtatgaaaagcttcttggcaatgaattctgtaatagtgccctacattatggttttctggtggaattgttttaacagtgacaacccaggatttccaatatatttttgttttattgttattaccaaaaattccactatgattgatgttcagtgattttctatagcaacttttttggtaactctttgggtttctgatttgttttagctaaaatt

SEQ ID NO: 25795 - DNA, 463 bp, Homo sapiens
  misc_feature (1)...(463): n = A,T,C or G
agaaatttgcaccgcgctgcaggaattcgtctccacgctctgctgcgtaagcagcaagctcagcattgtaaaggagcccaattagctgataaggtactggaacaaacaatgtacgaagttcccacgattctgctcaaaagcataacaacataaagccttgagtctgtgtctggcatagcatccatatctaactcttatgaaggatttagagcccggcacctggctccgttgctttttttgtaaccatttgtcttttaaattgtttatttctctgtaaccatttggtttttgattcttgcatgtttttacttctgtagaattattgcatttgagctccgctccccttccgaaccaaggtataaaagtaaatcaagccccttcctcggggccgagagaattttggaaagtcaagccttctcttggctgccggcttatataaaggactcttaattcgtctcgaaan

SEQ ID NO: 25796 - DNA, 493 bp, Homo sapiens
  misc_feature (1)...(493): n = A,T,C or G
ggagtgccaggtgcccccaactgattccnatagatnnncgtacgaganntacngaaacgacagagcagagactatgatgtggaatggggctatgcttttgatgtgcatctcaatgctttttatccactcctggtcattttgcattttatccagctttttttcatcaaccatgttatcctgacagacacatttattggatatttagttggaaataccttatggttggttgcagttggctattatatctatgtaactttcctgggatacagtgcattgccatttttgaaaaatacagtaattcttctgtatccatttgcacctctgattctgctctacgggctttccctggcactgggatggaacttcacccatactctctgttctttctataagtacagagtgaaataaaaagtgagaagaagattcaatcgtaactgtgtcaacagtattgtgaagtgatcatttcttgtaaaacttgtaaataaactatcan

SEQ ID NO: 25797 - DNA, 501 bp, Homo sapiens
  misc_feature (1)...(501): n = A,T,C or G
agcagttgccagcnatgccacncctgggtgngccctagcnagctagcggaaanncgcacgagccgacaagaagttgcagctgattaaggactatcgggagaaagtggagtccgagctgagatccatctgcaccacggtgctggaattgttggataaatatttaatagccaatgcaactaatccagagagtaaggtcttctatctgaaaatgaagggtgattacttccggtaccttgctgaagttgcgtgtggtgatgatcgaaaacaaacgatagataattcccaaggagcttaccaagaggcatttgatataagcaagaaagagatgcaacccacacacccaatccgcctggggcttgctcttaacttttctgtattttactatgagattcttaataacccagagcttgcctgcacgctggctaaaacggcttttgatgaggccattgctgaacttgatacactgaatgaagactcatacaaagacagcaccctcatcat

SEQ ID NO: 25798 - DNA, 511 bp, Homo sapiens
  misc_feature (1)...(511): n = A,T,C or G
cccccccccccccccgcccccccatcgccccgcatgtgacccgcgctgcaggattcggcacgagcaatggttaggtttcctcacctgagctcaggttcaggctgtcagaggtgagttttactttaccagtacctcaatttcctcccacgttaattttgggagaaagtccatctctttgatgaaatatccatcagctaatttaacttctatttgtctggggaagagcctttaaggtaaatattgcttctgtatcgcgctgactgcccacccgcctgtcccggatatggtgagtctcacagctgtgctgctgaaattcattctgaactttggaaccaaataaactagaaaaagttagcaagtggcatttcacatgataaaatctagaatttactattttatagtcagtaggtcaataaagctctcgtccacatcttataanggaggtgggggaggcgggtcatgatcaaccatagccttttcaagttacaaatcagtaacggcagtccaaggg

SEQ ID NO: 25799 - DNA, 448 bp, Homo sapiens
  misc_feature (1)...(448): n = A,T,C or G
nttttgcnccgcgctgcaggattcggcacgaggtgagtacaaatgagtgcacatgtcaggactcaggtctaactccttgtctcctgagcctaaagattgcaacatacacaagaacacactcctattcctaccccacacactcagggacaagcccaactaaagcttacaaggagaccagggtggctctgtccaggggagaagccagttatggaacagtgcattgagagccatggtaggagaggcccacagttctctggagcatgcagcaggggcaccccacctggccttgaggatcagggggagtcaaaggataaagcatggggctgatgacgtctgagggagtgtgatcctccatgtatggcctctgcctgctgtctcacatgtcccttctggtggtcacttgggctctaggagtatacgtcacctcagaccatctggcagaaatact

SEQ ID NO: 25800 - DNA, 488 bp, Homo sapiens
  misc_feature (1)...(488): n = A,T,C or G
atttgacccgccctgnatttgctccgcgctgcaggaattcggcacgagttcaagacctggcagcatagcaagaccccattgctataaaaaataaaagattagctgggcatggtgacatgtgcttgtagtcctagttacttgggaggctgaggagggaagatcgcttgagcccaaggattcaagattatagtgggctgcgatcacgccactgcactccagcctagatggcagagcaagaccctgtctctaaaaaagaaaacaaaacaaaaacaaataaaaaacattaaattcagcacatggagaaacagggctagagttacagaatagaaattcatccatggaggggcagggacaggaatagatgaaaatgccaggaatcctggggaggcagaagaggccaaggacagagctttgaggtggtcacgtgttcctgcccagcctctggtcctgctctcctctcgttgatgtctagaanaacattcttaccn

SEQ ID NO: 25801 - DNA, 478 bp, Homo sapiens
  misc_feature (1)...(478): n = A,T,C or G
tttgccgccttattgaccccgctgcaggaattcggcacgagggaaaatggagctatggtgtaaaagcaacaggtggatcaacccagttgttactctcttaacatctgcatttgagagatcagcgaatacttctctcaacaaaaatggaagggcagatgctagaatcccccctagacggaggaaaaccattttattcagtgaattacacatcctcttgttcttaaaaaagcaagtgtctttggtgttggaggacaaaatcccctaccattttcacgttgtgctactaagagatctcaaatattagtctttgtccggacccttccatagtacaccttagcgctgagactgagccagcttgggggtcaggtaggtagaccctgttaaggacagagcctagtggaaatccaagagaaatgatcctatccaaagctgattcacaaacacacgctcacctgacagncgagggacacgagcatca

SEQ ID NO: 25802 - DNA, 491 bp, Homo sapiens
  misc_feature (1)...(491): n = A,T,C or G
agagttcccaggtgcccccaatgagtgcagtangataccgtcgagannnctaagncaagaacttattttattttattttaaaataaacattgaagatcccccatttcccaccaccctacaaaacttttgaatgtggaatgttcaacagcctatccattttggtaggttacaaaaccagcaaaaactccagttgtctaatgatgaatgtttgagaatagttttgtttttaaatagctgagcacctactggaagaattcctgggctaaatgctgaaaataaaatttaatttctgcacagaaaataccattaacttagtagcctttgcttaaaggtgggattaattctccatgaagtcagaatgagacaataagcagcattaacttcataggcacacagaactagtgctcaaactgctagcacaaattccaacagagtacataaggctaagtcactactcaagtgtccatttccatcaaatttagagactctcn

SEQ ID NO: 25803 - DNA, 498 bp, Homo sapiens
  misc_feature (1)...(498): n = A,T,C or G
cgcccccccnnnnagnaattgacgcctcggaannncattgacccgcagtgcagaattccgcacgagccagggtccaccagattctagaaggtagcaatgaagtgatgaggatactgatctctagaagcctgcttcaggagtagaacccacacttgttctggcctggtgttcagtgcgactgcagtcagtgttgagtggtgccatgtgggccgctctattccaaaggaatcatggattagacccaagggctgagctcctctagggcaggacctgcaccctgtgtgttggcaccagcatcgggtcttggactggggcagaatccccagtggaaccggaagagctggactgatgagaaacatcagaagaacacatactaccttgttttcctaatgccagaagggtgaccagtgaagattcaccgtcaaaccatgaaagtcctttcttggatccactttatcttgattagtctgcattntactagttcactggatccctcct

SEQ ID NO: 25804 - DNA, 491 bp, Homo sapiens
  misc_feature (1)...(491): n = A,T,C or G
aggatgtcccagcnntgncccccaatgatcgccngatagatttcccctcgaggaaagcncgcnnagaaaatagatggcgacaaggacgggtttgtcactgtggatgagctcaaagactggattatatttgcacaaaagcgctggatttacgaggatgtagagcgacagtggaaggggcatgacctcaatgaggacggcctcgtttcctgggaggagtataaaaatgccacctacggctacgttttagatgatccagatcctgatgatggatttaactataaacagatgatggttagagatgagcggaggtttaaaatggcagacaaggatggagacctcattgccaccaaggaggagttcacagctttcctgcaccctgaggagtatgactacatgaaagatatagtagtacaggaaacaatggaagatatagataagaatgctgatggtttcattgatctagaagagtatattggtgacatgtacagcca

SEQ ID NO: 25805 - DNA, 399 bp, Homo sapiens
  misc_feature (1)...(399): n = A,T,C or G
ntttgccccccctgtcccccgcgctgcaggaattcggcacgagggtgaggagggcagtccaagaggggccgctgacttctttcacaagtactatctgttcccctgtcctgtgaatggaagcaaagtgctggattgtccttggaggaaacttaagatgaatacatgcgtgtacctcactttacataagaaatgtattcctgaaaagctgcatttaaatcaagtcccaaattcattgacttaggggagttcagtatttaatgaaaccctatggagaatttatccctttacaatgtgaatagtcatctcctaatttgtttcttctgtctttatgtttttctataacctggattttttaaatcatattaaaattacagatgtgaaaataaaaaaaaaaaaaaa

SEQ ID NO: 25806 - DNA, 501 bp, Homo sapiens
  misc_feature (1)...(501): n = A,T,C or G
ctgggccnaattgaccctagaccgcctgcggaattcggcacgagcacagactgggtaacgtgatgaacaaaaatttatttggctcacagttctggaacctgggaaatccaaaggcatgatgctagcatctggtgagggcctttgtgctttgtcatcccatgccagaaggcagaagggtaagagagggcaagagtgagcaagagatggaagttgcaacctcaagctcttttataatgagcattaatccattcatgagggcttcaccctcatgacctaaacatctccattaggctccaccttccaatgcaacagttagcataagttttcaacacatgctttttgtagcattcaaaccatagcaggaagcaactttgcttaaaattgtatacctggtaagtggaaaaagagggatttgaatataggcaaatgacttcagaggatttactcttaatttctggtgtactggcttctaatcttggccttcatcatttcagaatacca

SEQ ID NO: 25807 - DNA, 408 bp, Homo sapiens
  misc_feature (1)...(408): n = A,T,C or G
tgaattcggcacgagctgaaggacctggaggcgcacatcgactcgggcaacaagaaccgggacgaagccatcatacagctgcggaagctgcaggcccagatgaaggactgcatgcgcgagctggatgacacccgcgcctctcgtgaggagatcctggcccaggccaaagagaacgagaagaagctgatgagcatggaggccgagatgatccagttgcatgaggaactggcagccgcggagcgtgccaagcgccaagcccagcaagagcgggatgagctggctgacgagatcgtcaacagcagcggcaaaggagccctggcgttagaggagaagcggcgtctggaggcccgcatcgcccagctggaggaggagctggaggaggagcanggcaacacggagctgatcggg

SEQ ID NO: 25808 - DNA, 414 bp, Homo sapiens
  misc_feature (1)...(414): n = A,T,C or G
gcacgaggaggagtgcaggccttctcgggtcttagcaggctaacagaggaatgtgcttctgtaggcagaatccatgtggccttggtttcccccatctctaggctgtaaagtatagatatgcctttcccaaacgtttctgctttcatgattctaccaaatccaaaatctcttcattaaaaagttattggccgtgcgcggtggctgacgcctgtaatcccagcactttgggaagctgaggcgggcggattacttgaggtcaggagttcaagaccagcctggccaacatggtgaagccccatctctactaaaagtacaaaaaattagccaggcgtgttggggcacgcctgtaatcttagctactcgggaggctgagtcaggaaaatcgcttgaacccaggaggcgtangttgcagtg

SEQ ID NO: 25809 - DNA, 499 bp, Homo sapiens
  misc_feature (1)...(499): n = A,T,C or G
gcagttccnagnattgccaccctaggtgngccttaggtagctagcggaanncgcacgagnggaatgcttcttacactaacactgtctcattgtaaaatataaaaccccttactctaactacatttttattcctctggtagtgtggtatccaggcgacatatcacttctgctatgtaattctaagaattctcatttctagagtacctgagccaaacaaatacacaacggaagctgcagctgtatcatcactagcaatttgctcatcattatttactacctttgaacctaaggtttcctgcctatgcttttgaaagcaaaaatcagtctcctttgcatgaaaaagagccttagatttttaaacatgttagttaccagaatgctaaaataccagttgattacccaaattattttggaaatctatccataatggaagtctacaacaaacacataaaacagattacactaagagctgagaaattcaaaggaactgaagattctg

SEQ ID NO: 25810 - DNA, 492 bp, Homo sapiens
  misc_feature (1)...(492): n = A,T,C or G
gcagttcccagctgcccccaactgaggccttcagatancgtacgagcccagcgtctgtgtttatgagttctcatcattttgctcccacttaaaagaacatacagtatttggttttctgttcctgtcttaatttgctgaggataatggcctctagctccatctgtgttcctgcaaaagacatgatctcgctgttttttatggttgcacatcttttgttctaacatttggtccttaaacctggttcctgacacagagctcctaaatcccttggaattttctgggtgatagaagcgtcctttgttctcatgaggagactcttggtgggctccttatttggggactggtcaccaaaaagacctatggttggaagcgttgtgctgtcagccccattccccatcctctggcgtggggagtagagctggagctcaatcatgcctatgtgataaagcctccagaaaactccttanaagacaggacttggagagcttccgg

SEQ ID NO: 25811 - DNA, 483 bp, Homo sapiens
  misc_feature (1)...(483): n = A,T,C or G
ttttgaccccctgaggannnttttgcacccgctgcaggaattcggcacgaggtcctgtgctggggctgacaggctccaaacaggcatgcgaggtgcctttggaaagccccagggcactgtggccagggttcacattggccaagttatcatgtccatccgcaccaagctgcagaacaaggagcatgtgattgaggccctgcgcagggccaagttcaagtttcctggccgccagaagatccacatctcaaagaagtggggcttcaccaagttcaatgctgatgaatttgaagacatggtggctgaaaagcggctcatcccagatggctgtggggtcaagtacatccccaatcgtggccctctggacaagtggcgggccctgcactcatgagggcttccaatgtgctgcccccctcttaatactcaccaataaattctacttcctgtccgnnnnanannnngngnnnnnaaaaaaaaaagaaaagc

SEQ ID NO: 25812 - DNA, 490 bp, Homo sapiens
  misc_feature (1)...(490): n = A,T,C or G
tggggggtttttaagggtttaaggggganaaaggttgannccctttgaccgcctgcnggaacggcacgagccttccggggctttgcagaacatggtaaacagcagcaggggagagaagaggaaaaaggtttttgtggcattcggaagacccgggaaacagagcggctccggcggcagctgctggaggtgttttggggtcaggatcacaaagtggacttcatcctgcagcgggagccatactgccgggacatcaaccaactgtctgaggccctgctcagtcttaacttttgagcctcacctgcttgagtggctgccgccctgtcagctccagccgcctccagctcagccctttctgtgagagtccctctgctgctcactctgatccagaggcaccctgagttggtgctttggatcagggaagccactttgggacaggtccataaagtgaactgatcttaccgagtcaggacctcagccagctctcaagagg

SEQ ID NO: 25813 - DNA, 482 bp, Homo sapiens
  misc_feature (1)...(482): n = A,T,C or G
nttagacccgcgctgcttgacaccgcgctccaggaattcggcacgaggggctttggcatggccatggtagcgtcaaaggtgcaggaggcgcccattgatgagcattggatcatcgagtgcaatgacggcgtcttccagcgggtccgggactgggccccacggcagacacacaaggtcatccccttgaaaggcctgtgggaggatgtggcacccaccctgcctgacggtcactttgatgggatcctgtacgacacgtacccactctcggaggagacctggcacacacaccagttcaacttcatcaagaaccacgcctttcgcctgctgaagccggggggcgtgctcacctactgcaacctcacctcctggggggagctgatgaagtccaagtactcagacatcaccatcatgcttgaggagacacangtgcccgcgctgctggacgccggctttctganggagaacatncgtatggaggtgat

SEQ ID NO: 25814 - DNA, 408 bp, Homo sapiens
ggaattcggcacgagacccagctggtgctctacggtgacgtggaggagctgaagaggagtgtgggcgagctccccagcaccgtggaatcactccagaaggtgcaggagcaggtgcacacgctgctcagtcaggaccaagcccaggccgcccgtctgcctcctcaggacttcctggacagactttcttctctagacaacctgaaagcctcagtcagccaagtggaggcggacttgaaaatgctcaggactgctgtggacagtttggttgcatactcggtcaaaatagaaaccaacgagaacaatctggaatcagccaagggtttactagatgacctgaggaatgatctggataggttgtttgtgaaagtggagaagattcacgaaaaggtctaaatgaattgcgtgtgc

SEQ ID NO: 25815 - DNA, 354 bp, Homo sapiens
atttgccccgcgctgcatgaattcggcacgagaggagatgctgaagtgcattgagctggatgagcggctgaaagccatggaccaggagaaactaccatcttggccagtgacaagtgttcggagggcagcagagaggaccaagcctgtgtcacctggagactaagaaattaagttttgttttgacatcttcagtcctgtgtgctttcagaaaaccattttctctgcaaagaaaggaaacagatttgcaaactttaaagtctgtcgtggatttatttatcctcagattattgttactgcattaaatctacctttttgttttaagttgcttgaacattaaaaaaaaaaaaaaaaaaa

SEQ ID NO: 25816 - DNA, 471 bp, Homo sapiens
  misc_feature (1)...(471): n = A,T,C or G
nattgaaagcccattgacncgtcgtgcaggaattcggcacgagttcttcagagggaaactcagatgtccaaactaattttaacaaacgcattaagaggtttatttgggtacatggcccgcagtggcttttgccccagaaaggggaaaggaacacgcgggtagatgatttctagcaggcaggaagtcctgtgcggtgtcaccatgagcacctccagctgtactagtgccattggaataataaatttgataaggtggtggaaaaaaaaaaaaaaaaataaaaaaaaaaaaaaaaaaaaaaaaaaatttttgggggggggggcggggccccattttccctttaaagggggggaataaaaattccgggggcgggtttttaaaagggggggggggggagacntttnngnnttgtttttgtnttttttttgatccgaccggtttatgattttttanaaagtaaagttcttaaatgag

SEQ ID NO: 25817 - DNA, 447 bp, Homo sapiens
  misc_feature (1)...(447): n = A,T,C or G
nttttgcaccgcgctgcaggaattcggcacgagaaagtttgacctatggtccttgcccaagatcctggtggtccacctcaaacgtttctcctacaacagatactggagggataagctcgacacagtcgtagaattcccaatcagagggctgaacatgtccgagtttgtctgtaacctgtcagcaaggccttatgtgtacgacctcattgccgtgtccaatcattatggagccatgggggttggccactacactgcatatgcgaagaacaaactgaatggtaaatggtattactttgatgatagcaacgtgtccctggcctctgaggatcagatagtgactaaagcagcttatgtgctattttaccaacgtcgagatgatgaattttataagacaccttcactttacagatctggttcctctgatggagggacacgaccaagcagctc

SEQ ID NO: 25818 - DNA, 492 bp, Homo sapiens
  misc_feature (1)...(492): n = A,T,C or G
gccgccctttgtcggctgcggtattcggcacgagccatctctcgcctctgcgaggacaagtacaaggacctaagaagatccgcgaggaagcgctcagccagtgcagacaacctgactctgccccggtggtccccagccatcatctcttaactacggaggcccgccggaggccacaccatcccttagtttctcctttagtttgagaaaagacagacttggggtgggtttgtttttgttttttctttccttttctttttttacgcatagctccgtcaagctgcctggatgagcgcccatgcagcaaggcttggaggaagcgtcagtgccctggagatcccagctcgctctccccactgtcagcaacagcacttccttcgtggaggaagtggactcgaatcctggaggaggaaataaagggaaagggaagtcgtggagaggcagggaaaatgggtaagcagcccggccctctggagtccccatggnggcggtagc

SEQ ID NO: 25819 - DNA, 469 bp, Homo sapiens
  misc_feature (1)...(469): n = A,T,C or G
aaattgaccgcgaataggaanccctccgagaagacatccaggtcacccttttcacaagggcttctgaagaccttaagactcatatggttgtggctaatacaatggaagactttcagaagatactagattctggaaagattgttcagattccattctgtggggaaattgactgtgaggactggatcaaaaagaccactgccagggatcaagatcttgaacctggtgctccatccatgggagctaaaagcctttgcatccccttcaaaccactctgtgaactgcagcctggagccaaatgtgtctgtggcaagaaccctgccaagtactacaccttatttggtcgcagctactgagggatgaacgaaagccccctcttcaactcctctcactttttaaagcattgatattagtatcttctcagatacagaccgttttatgattttttaaaaagtaaaagttctaaaatgan

SEQ ID NO: 25820 - DNA, 406 bp, Homo sapiens
  misc_feature (1)...(406): n = A,T,C or G
ctagcccccccttagacccgccgtgcaggaattccgcacgagaggtggtctaagtgctgactggctacgtagttcgggcaaatcctccaaaagggaaagggaggatttgcttanaaggatggcgctcccagtgactactttttgacttctgtttgtcttacgcttctctcagggaaaaacatgcagtcctctagtgtttcatgtacattctgtggggggtgaacaccttggttctggttaaacagctgtacttttgatagctgtgccaggaagggttaggaccaactacaaattaatgttggttgtcaaatgtagtgtgtttccctaactttctgtttttcctgagaaaaaaaaataaatcttttattcaaaaaaaaaaaaaaaaaactcgagggggggccgggcc

SEQ ID NO: 25821 - DNA, 506 bp, Homo sapiens
  misc_feature (1)...(506): n = A,T,C or G
tcggaatgggaaattatangggntattnaaggggggaaaaagggcttgaaanacaatttgccccgcctgcaggaattcggcacgagccgaggtgaagctgctttccttttcatcagggcagcgaaccgttttcctcccagctgaggtgaaggccatagggacggagcatgatcacgtcctccctctgcaggaattggctatgagagggctgtatcatacctaccacagcttgctgaaagatttgaactttctgtctccaatctcattacccagaagtctcctagagctgctgcactgccctctggggcactgtcatcggtgtagtgagcctatgtttaccatcgtctaccccaagctctttcccttgagagagacgccaatggcagggctgcaccagtggaagacaactgttagttttgtggcttactgctgctccacccagtgtctgcagacttttgacctgctgagttgataaacactcaagaacctcaggagcgctgccagct

SEQ ID NO: 25822 - DNA, 492 bp, Homo sapiens
  misc_feature (1)...(492): n = A,T,C or G
nattgcccgcctgcangaattcggcacgagcaccattgtctcatccaagtccagtgcattagctgcagctcgtagagccgaacgggagggagaaaagaagcacagacaaaacaatgaagcacagagacttttattggctggagtggagattccagaacctgttttcttctgtaccatagaacccccatcactgtctaagcagccagatttggaacatgcgttgaaatgtcttcagcgtgaagatcccagtttgaaagtgaggctagatcctgactctggacaaactgttctgtgtggtatgggggagttacatatagagattattcatgatcgaatcaagagggaatatggactggagacctatctcgggcctctccaggtggcatatcgagagaccatcctaaactcagttcgtgccacagataccttagatagaactttaggagacaaaaggcatcttgtgactgtataagtggaagcaacgtctattga

SEQ ID NO: 25823 - DNA, 511 bp, Homo sapiens
  misc_feature (1)...(511): n = A,T,C or G
gggggtggccnccnaattgacccgctttgacccgcctgcaggaattcggcacgagagaaaaaatcccactgcagccaaaacatttcaggattttgaatccagttatcatcaaagagactgcctttgacatccttcagtactcagagcctcagtcaaggttctggggccgagataagaacgtccccacaatcggtgtcattgccgttgtcttagccacacatctgtgcgatgaagtcagtttggcgggttttggatatgacctcaatcaacccagaacacctttgcactacttcgacagtcaatgcatggctgctatgaactttcagaccatgcataatgtgacaacggaaaccaagttcctcttaaagctggtcaaagagggagtggtgaaagatctcagtggaggcattgatcgtgaattttgaacacagaaaacctcagttgaaaatgcaactctaactctgagagctgtttttgacagccttcttgatgtatttctccatcctgcaga

SEQ ID NO: 25824 - DNA, 471 bp, Homo sapiens
  misc_feature (1)...(471): n = A,T,C or G
gattgaaagcccattgaccgtcgtgcggananccgcacgagcattgcggctccctccgggtctgctgctgacaaagttgtgattgaggcctgcgacgaactgggaatcatcctcgctcatacaaaccttcggctcttccaccactgattttaccacacactgttttttggcttgcttatgagtaggtgaacagtcacgcctgaaactttgaggataactttttaaaaaaataaaacagtatctcttaatcactggaaaaaaaaaaaaaaaaaactggagggggggcccggaacccatttcgccctatggggagccgtattacatttcactggcgcgtgtttaaaaacatcgtgtatggaaacaaaaccttacgtagaaaaaaaaaaaaaaataaaaaaggtctgggggggcccctctacccaattgcccttagtgagagggggattccaaacccgtgcccagggtttaaag

SEQ ID NO: 25825 - DNA, 487 bp, Homo sapiens
  misc_feature (1)...(487): n = A,T,C or G
ggggttgccggngttttnnaaatgatcgcattagaaatccctccgagcgcacacgagaacatgcctctcgcacaggatctccttcatccctctccagaagaggagaagaggaaacacatgaagaaacgcctggtgcagagccccaattcctacttcatggatgtgaaatgcccaggatgctataaaatcaccacggtctttagccatgcacaaacggtagctttgtgtgttggctgctccactgtcctctgccagcctacaggaggaaaagcaaggcttacagaaggatgttccttcaggaggaagcagcactaaaagcactctgagtcaagatgagtgggaaaccatctcaataaacacattttggatccaaaaaaatgttgatgatgcttaaaaaaaagaaatcctttggggggggggccggtaccaaatggccccttatgggaggtgacatacaaagctgcgggccctgatataaaagagggga

SEQ ID NO: 25826 - DNA, 479 bp, Homo sapiens
  misc_feature (1)...(479): n = A,T,C or G
aggcgggcgggcgcattgacggctcactgaggagtctntgaaacaaacncananncatnatttctaaaaataaaattagacttttccaatccttaacatctgcatttaataatatcttctaaccaaaatacagatgctaaaacagcaagttacattatatcttgtacagcatacagtatgttcactgtttacacttactttaattctagttggtcatgtactcaatgcatacttaaacatcactcaataaaattttcacaattaacaaaaaaatgtgacaaggctgtcttaaaacggctctgctataaattgtatagaatatacagaattacaaagtcaagtatttttctcgtgccgaattcggcacgaggagacatagggtataactgttgtcgcggcggaggaagtgaggacggcgccaagggccttccgggccagtgttggatccctgtagtttgtgaagatggtgttgctaacan

SEQ ID NO: 25827 - DNA, 247 bp, Homo sapiens
ctcgccgcccctcccatcgacagcttgcagaattcggcacgaggagagagagagagagagagagagagagagagagagagagagagagagagagcagagggcctgttcgctctctcacgctcctgggatggaaccctgcgtctctggtatctcacaacgcgcaccaccacgaggcgatgtgtgggccataccaaggatgcgctgagtgtggtcttcttctctcacaaccgacagagtgtctctgtat

SEQ ID NO: 25828 - DNA, 481 bp, Homo sapiens
  misc_feature (1)...(481): n = A,T,C or G
acgccccccatcgcccgtcctgcagagaattcggcacgaggcgcggagggccggagacgctgcagacccgcgacccggagcagctcggaggcggtgaataatagctcttcaagtctgcaataaaaaatggcctccaacaaaactacattgcataaaaaaaaaaaaaaaaaaaaaaaaaaaaaaaaaaaaaaaaaaaaaaaaaaaaaaaaaaaaaaaaaaaaaaaaaaaaaaaaaactttggggggggggggggggaaaaaatttctttaaaaaggggggaaaaaaaaaattggggggggggtttaaaaaaagggggagaaaaaaaaaaaaacntccnncccacttacaggttttctggcctctgtttgggtgccctaattatttttggattgtcctttgaaaaatttttttaaagcactttatttaagaacatactgattaaatgcaggatcgctactaaaaaatgttttggatccttggg

SEQ ID NO: 25829 - DNA, 501 bp, Homo sapiens
  misc_feature (1)...(501): n = A,T,C or G
catggccccccttttgccccgcgctgcaggaattcggcacgagctttttaacactgagcagccagttaaaacctaaacctgtgggtgaagaaaacatctgtttggatttgaagagctaaagagtctgcagcaggattggagactgacttgtgactgcgggctgggggggcattcccagtaggaatgtgaagccagaggtttcggattcgtgacatccaccccctgggcaagtgagagcatctgcaaaatgcaaagagaactacctcatatgcaggatgagccaatggcagtctcaagaaatgtactcgggcgacaccttacctgtggaaagcaaatcttttcaaaataagccactgggactcggtaggtggagccccagctgctcttctagggacctatggggccttcgtggcatctctgtgctgtgtgctcgggaaggagggttgatgtatggtgactcttttctgatcagcacctttggccgtgantcccaagggtcca

SEQ ID NO: 25830 - DNA, 480 bp, Homo sapiens
  misc_feature (1)...(480): n = A,T,C or G
natggtcgccctcggaannnctcgaccgccttgcaggaattcccacgagctactccagagcaaataagcatggacctcaagaatgaattgatgtaccagttggaacaggatcatgatttgcaagcaatcttgcaggagagagagttactgcctgtgaagaaatttgaaagtgagattctggaagcaatcagccaaaattcagttgtcattattagaggggctactggatgtgggaaaaccacacaggttccccagttcattctagatgactttatccagaatgaccgagcagcagagtgtaacatcgtagtaactcagcccagaagaatcagtgcggtttctgtggcagagcgagttgcatttgaaagaggagaagagcctggaaaaagctgtggctacagcgttcgatttgagtctatacttcctcgtcctcatgccagtataatgttttgtactgtaggtgtgctcctgagaaaattn

SEQ ID NO: 25831 - DNA, 484 bp, Homo sapiens
  misc_feature (1)...(484): n = A,T,C or G
cggagttccgggngnnnnnacctgaccgccatagaatccgtccgagggaacggcttgctcttctttctagaatgtccatgcacttgggttttaatcagcagttccctattattctgattttaagctgttcctgtgatgaacttagagacagcatcggtgtctgctgctgtgtccccaggtcttgtgtgggtggcacagatctgggcagttagatagtgctctgtgcctaaggtgaagccacactagggtgaagcctcacttccctgtttgagcaatgcagtgcctgctgcccgtgtgcatgaaggtacagccattcagataagtggaactattgagttacataaagaaaatagatttgcatttgtcaggcagacgtttatacaacaccacggtgcttttatacattgtgcttattttaataaaactgaaattctaaaaaaaaaaaaaaaaaataaaaaaaaaaacctcggggggggccccggcn

SEQ ID NO: 25832 - DNA, 484 bp, Homo sapiens
atagaaaacttgcccgcctgcaggaattcggcacgaggtgactataggtgtgggttttgctacctggaattagaaaatataccttctgggatcttcaatatcattcctagtacctttttgcctaaacaagaaggaccttttttcttggactttaatagtattatccccatcaagatcacacaacttcagtgatggagaaatctcaagttactggcttttatacttaccaaacatcagttcttcaaataaggacgcaaatcttcaggacagtaagcagaacaatcagaatggaattaaatctctaaaaacgtgttacagtggaatctggtgcttgtcagggtgtttggtaagaactgtatatagtcagaattacctaaatcacctagaggtaccgtttacatggttttgtgtatatagagttggcttgcattttaagggccattttgtataaaaagtgcatatgattaaaattagactcagtcat

SEQ ID NO: 25833 - DNA, 478 bp, Homo sapiens
  misc_feature (1)...(478): n = A,T,C or G
attgatngcctcgngannncttgatcccccttgcggaattccccacgagatttaagtgaaaagtgagatcagtaatgagctgtgttgttaacaatattatctggtaataataccatgcaatatagcgttgtataccaacttagtgcattttatactgtattaaatatggagatacttctaatgcctctctaaaattaaattttacataaaagttagttttattcacctttaggctttccaagtgaattgtgactaattttttcaatcttacatagatctttcacccattagcattacttacgtagataattctttatgcctagttattatacatattaatttttaaggtatacatttaaattacacaattgttcattgtggtttgtatcccagaatgtgttgtgttttttaaaagatgcataatagctgaatgtatgcatgactttgaaagaagttaaaatggtgattttttttcacc

SEQ ID NO: 25834 - DNA, 500 bp, Homo sapiens
  misc_feature (1)...(500): n = A,T,C or G
agcagttcncnagcttcncccccccaggggaggcattgagnatcatcggcaaaancggaaanngttaactgagatgaaatgtgagaattacatagattatgttattttttagttggtttccaaatgcagagtttaaagactttctaacatggctagtattacttccaaaaagtataacaagcagcagtcacacatgacctaagagggctttttattgttttattttattatgcattccataacagttttaaaatgggattttgagaatggacttaactttcctggaatccaatgctcctggagatttatgactttcccagccatcaaccagctatctagagaagatttttgtttttcttttgcaacagtttcttcagtcaactcattcactttcaaataggagcagcactttgaaatcctttttcttcactgtggattaaaaacatccaagaagccatctctgtcaagcagaattgtcatctgtggtaataagtgaccat

SEQ ID NO: 25835 - DNA, 455 bp, Homo sapiens
  misc_feature (1)...(455): n = A,T,C or G
agcggggnaatgaactgcatngctctgaggaanncggcacgaggaaagaagcagtctgatgtcatgcgctttcttctgagggtccgctgctggcagtaccgccagctctctgctctccacagggctccccgccccacccggcctgataaagcgcgccgactgggctacaaggccaagcaaggttacgttatatataggattcgtgttcgccgtggtggccgaaaacgcccagttcctaagggtgcaacttacggcaagcctgtccatcatggtgttaaccagctaaagtttgctcgaagccttcagtccgttgcagaggagcgagctggacgccactgtggggctctgagagtcctgaattcttactgggttggtgaagattccacatacaaattttttgaggttatcctcattgatccattccataaagctatcagaagagatcctgacacccn

SEQ ID NO: 25836 - DNA, 491 bp, Homo sapiens
  misc_feature (1)...(491): n = A,T,C or G
gcgggattgatttcgctcgcatgcangaattcggcacgaggtcctctaacacattcagactacaagtccagacccaggagagcaaggcccagaaagaggtcaaaatggggtttatattttcaaaatctatgaatgaaagcatgaaaaatcaaaaggagttcatgcttatgaatgctcgacttcagctggaaaggcagctcatcatgcagagtgaaatgagggaaagacaaatggccatgcagattgcgtggtctcgggaattcctcaaatattttggaactttttttggccttgcagccatctctttaacagctggagcgattaaaaaaaagaagccagccttcctggtcccgattgttccattaagctttatcctcacctaccagtatgacttgggctatggaacccttttagaaagaatgaaaggtgaagctgaggacatactggaaacagaaaagagtaaattgcagctgccaagaggaatgatcacn

SEQ ID NO: 25837 - DNA, 457 bp, Homo sapiens
  misc_feature (1)...(457): n = A,T,C or G
agatgtncacattgaacttcactgncggtattcggcacgagcaggggccgcccccctcgttccccacccactccgggtgttactgatcctcgatgtcaaggaacccgcgcgtcatcgccctccacatcggtctcaacccgaaactaggagcttcgaacctccaagtaccggatcgccccaagcttgagcctaggcctctcggctcttctgagaaacaagattcaggcgtccgcccctgactcctgcccatcccccacagaagtcagatggaccgctctccagtccctctttacctttgatcaaattcggaagtctcggcccactaaggatcgctcctggttcctcggaaccctgagtccaaacgtcctagctcaccaatagactaccctccctcccagggagcgtttcctgcctggggggaggaacatacaggattcgtttgttcaataaacgtttt

SEQ ID NO: 25838 - DNA, 384 bp, Homo sapiens
agcggggatttgaattgactgctctgcggaattcggacgaggccccctctgctcctcctactgctgctgcccgtgggcctcctgctgctggccgctgcctggtgcctgcactggcagaggacgcggcggaggacaccccgccctggggagcaggggaggatactgaggcacacagaggggagtcaccagccagaggatgcatagcctggacacagaggaagttggctagaggccggtcccttccttgggcccctctcattccctccccagaatggaggcaacgccagaatccagcaccggccccatttacccaactctgtacaaagcccttgtccccatgaaattgtatataaatcatccttttctaaaaaaaaaaaaaaaaaa

SEQ ID NO: 25839 - DNA, 474 bp, Homo sapiens
  misc_feature (1)...(474): n = A,T,C or G
catcgaccgccctgngatagatncgcatgtagcagagncgccggcaacaccccgggcattggggctttccagctctcacagaaccttcagcatccccagctgccggtcttggcatcttcgaagtaaggagagttttagatgcttctggatgttcaatgctagcacctttacagactggagcagctcgattttcttcgtatttactttcaagagcaagaaaagtgctgggctcccacttattttctccctgtggtgttccggagttctgctccatatccaccagaaagctggcggcccacggctttggcgcatccatggcggcaatggtgtccttccctccccagaggtatcactactttttagtgctggactttgaggccacgtgcgacaagccacagattcatcctcaggaaatcatcgagttccccatcctanagctaaatggccggaccatggagattgagtctacctttn

SEQ ID NO: 25840 - DNA, 468 bp, Homo sapiens
  misc_feature (1)...(468): n = A,T,C or G
attgagncgtttaggtatacggcacgaggnttcctctgaggcagaaaactcttttttggagatatcttccatcaagcagtactcgtgcccatatacaatctcttagtggctaggagaaataaataaaagggccataatggtttgttctctttcagacataatttagtaggggacaagaagtctgttcttcagtgagtacactagagatttactctggtgactgccttttgagttatgggtgaagtaaggtatggctttaccataaccttgattcattcacccttgattcatttctcgcccccgtcactgattatttccttgagcatatatctctgcctaacactttagtaggtgctatagaggatacatgaaaagtatgagatctggttccatccagtaagacattttaatagagaagatcaaaatgttacctggcagttggggaataatctgacttcgttggcagct

SEQ ID NO: 25841 - DNA, 477 bp, Homo sapiens
  misc_feature (1)...(477): n = A,T,C or G
catcggaacgccntnggattgcaccggctgcaggcggcacgagacgctttgaccaggagactggatactactatgcccggcgccaaggttttaccagtgtgcccagccagggcggtagctctctgggcatggcccagcgccataactctgtacggagctatacactgtgtgagtttgcccaggaacaggaggtgaaccatcgagagattctgcgtgagcacctgaaggaagagaaactccatgccaagaaaatgaagctgaccaagaatgggacagaggagtcggtggaggctgatggcctgacgctggatgatgtggcagatgaagatattgatgtggaaaaggtggaggaggatgattacttcttcctgcagtctctgcccaccaaacggagacgggccctgctgagggcttctgggtgccaccggattgatgctgaagagaagcaagaacttcgagccatccgcctgtcacggg

SEQ ID NO: 25842 - DNA, 487 bp, Homo sapiens
  misc_feature (1)...(487): n = A,T,C or G
aggggnnnnnnnnaggaggggnnctagannccctaatcgaccgcgctgcaggaattcggcacgagagcaagggcgcggtctggtactcgtgcgtcttttatcgcctcagtttccctccgccgactagcgcgcggggcccggttctccatcgcgcgcacggcagcctagcgcaatgaggcgggcagcactgcggctttgtgccttgggcaaagggcagcttactcctggaagaggactgactcaaggaccccagaaccccaagaaacagggaatcttccacattcatgaagcatgttcatctatacatgtgaatcatgttcgagataagttgcgggagatagtaggagcatccacaaactggagagaccatgtgaaggcaatggaagaaaggaaattacttcatagtttcttggctaaatcacaggatggactgcctcctatgagaatgaaggacagttatattgaagttctcttgcctttgggcagt

SEQ ID NO: 25843 - DNA, 500 bp, Homo sapiens
  misc_feature (1)...(500): n = A,T,C or G
cccccccccccccccccccatcgccccgccctnngnntttagacccgcctgcaggaattccgcacgagggaaaggcagcagcggcggcagctggaggatgaagaaggagcatgtgcttcactgccagttctccgcgtggtacccgttcttccgaggcgttaccatcaagagtgtcattcttccacttcctcagaatgtgaaggattatttactcgatgatggaactctggtggtttcaggaagggatgatccaccaacacattctcagccagacagtgatgatgaagcagaagaaatacagtggtctgatgatgagaacacagccacgcttacggcaccagaatttcctgagtttgccactaaagtccaggaagctatcaattccctcgggggcagtgtctttcctaagcttaattggagtgccccaagggatgcgtattggatagcaatgaatagttctctgaaatgtaaaaccctcagcgacatctttctgcttttca

SEQ ID NO: 25844 - DNA, 472 bp, Homo sapiens
  misc_feature (1)...(472): n = A,T,C or G
ggagggtttttnaatagaatgcatggcataggacatcggcacgagaaatcagactcaggcggagagaattgaccgagtcggaggaggggtaaacagccctgcccctcgctcccactgtcccgccagagaacgcgccgcggaaaccccgagggcgggtcaagggccaggtacccgagtgggagtggactctcgtgccggggtggtaggggctaccctagcggtccagggccagagcctgcacgcggcgcccccacccccaccgctgggctgatcttgggtgtgtcagatcttgcccaagcctcactttcctccacggtggaggtgagaatgaggacgagcctggagctgcgtgaaccccggcgcccagcaagctctcaggaatcgccggcctgtangtggacgcagagcctgaaagtgaggggcctgggtcgtgcatacggaaataaatatgggactcttaataaagcgagtt

SEQ ID NO: 25845 - DNA, 451 bp, Homo sapiens
  misc_feature (1)...(451): n = A,T,C or G
gctgtaacatgaattcactgacgatttcggcacgaggaggaggagaaagctgaccgcttaggcccgggtagtggtcgtcgtggttttccttgtagttcgtggtctgagaccaggcctcaagtggaaacggcgtcaccatgatcgcacggcggaacccagaacccttacggtttctgccggatgaggcccggagcctgcccccgcccaagctgaccgacccgcggctcctctacatcggcttcttgggctactgctccggcctgattgataacctgatccggcggaggccgatcgcgacggctggtttgcatcgccagcttctatatattacggcctttttttttgctggatattatcttggaaaacgtgaagactacctgtatgctgtgagggaccgtgaaatgtttggatatatgaaattacatccagaggattttcctgaagaagatan

SEQ ID NO: 25846 - DNA, 466 bp, Homo sapiens
  misc_feature (1)...(466): n = A,T,C or G
agcccccccaatagatgagcanctcggactgagcggcgctcgaaccagccgcacaacacggagagagacaggatgcccacggtgactgccgctccgtccgttcacacacagcggtgctcttctccccttagccacccactgcccaacccaacggcggagacacagaaaccaggtccccttgcagacggctctcccatcttcctgcaagtcatctgctcacacacagttggcagcacatagcgtttccttctttcagaaacattcctcttctggggcttcagaaagctggcaaggccactagcagagcttttgttaatgccccagctgcttggcgagctaacagctgacctttcgggaagcccacagacgctggaggaatcttgagtttctccaaactgccgctccaccagtgcctttggacagccgtgcctgttcgccgctctccctaagtctgattctcatcgag

SEQ ID NO: 25847 - DNA, 545 bp, Homo sapiens
  misc_feature (1)...(545): n = A,T,C or G
ngggagcactattcaggcgtgcaattcctggtccatgggtttcagaacgaagtcttcccggagcccatgttcacgtggacgcgggttgggagccgcctcctggacggcagcgctgagttcgacgggaaggagctggtgctggagcgggttcccgccgagctcaatggctccatgtatcgctgcaccgcccagaacccactgggctccaccgacacgcacacccggctcatcgtgtttgaaaacccaaatatcccaagaggaacggaggactctaatggttccattggccccactggtgcccggctcaccttggtgctcgccctgacagtgattctggagctgacgtgaaggcacccgccccggccactccatcaggcactgacatctccgcgaccggntttcatttcttttctaaactatttccagncttgttcttagtctctttccatctgtgtcttggcttcttcnagtcggttaattaaaacaaacagaacaattttcccttaaaaaannnnnnnnnnnnnnnnaaaaaaaaaaaaaggggg

SEQ ID NO: 25848 - DNA, 455 bp, Homo sapiens
  misc_feature (1)...(455): n = A,T,C or G
ntcgagatcatagaccagcgcggnggaattcggcggngcctcaccttcctgctgccttttcttttctttggacacttctggcagctttttaacgcgctgacgttgttcaacctggcccaggaccctcagtgcaaggagtggcaggtgcttatgtgcggctttcccttcctcctccttttcctcggcaatttcttcaccaccctgagggttgtgcaccacaagtttcacagtcagcggcacgggagcaagaaggattgaggctgggccttcccctgccggcccagaggggcttctgtcctgtgtgttgtgggaggggatgggaggcgcccctcgagtgtgcgtgtatcaaggggtctcttctattctcccttgggttttatgggcgctgtgggccctgaaagaagacctgngcccagtgccctcaataaagagaggcccagaaaaaaaaaaaaaaa

SEQ ID NO: 25849 - DNA, 539 bp, Homo sapiens
ggaagactgtgaggcgtgcaattctgtccggctgcctaaggtctgggaagctcgggcaccctccctctccggggctcctgctcccacccctccggcccctccaccgtcgcgctcctccaggctgggcctgtggccgcggtgctttttaattttcccccagctcagaatcttgctgctcggcccccaggagagcaacaactcaacgggaacgatgtggaaggtgtcagctctgctcttcgttttgggaagcgcgtcgctctgggtcctggcagaaggagccagcacaggccagccagaagatgacactgagactacaggtttggaaggcggcgttgccatgccaggtgccgaagatgatgtggtgactccaggaaccagcgaagaccgctataagtctggcttgacaactctggtggcaacaagtgtcaacagtgtaacaggcattcgcaatgaggatctgccaacttcagaaaagacagtccacgcgcaagaacaagtccaagcgccacagccctcaacgtggccaccagtcactccaa

SEQ ID NO: 25850 - DNA, 495 bp, Homo sapiens
  misc_feature (1)...(495): n = A,T,C or G
tgcgccccnnnnnaattgagnatcganaccctaggccgngtggnggaattcacactgcgcagaggggcccggggaaagccggcctcacgggcgggagggagaggcttgagcgaggggctagagccgcgaggactgaccagcaccagaggatacaagaggaggagagagacctcactggttcgggcgacatttcacccccccagcaccccagtcggcacagaccaaaaagaagaatgtacttcatctggttgggctggattccctctgataagccttcccagttgactgaaagatgaggctaggctctagcaagttgaagtcaaaccagctccttcaagaagctttgagcagaatgaagtggggaggacccagcttccagcccaggaagcccactgtacctggagccatctgggataagactttgacccatgactcccatatccacagcctgtccatcctagcccatcccagattatcctgtatcatttgagctgg

SEQ ID NO: 25851 - DNA, 460 bp, Homo sapiens
agaaaattagatgacactagtccagtcgatggcattccacaggccgggcatggtggctcacacctgtaatcccagcactttgggaggctgaggcggatggatcacgaggtcaggcagtcgagaccatcctggccaacatggggaaaccccgtctctactaaaaatacaaaagttagccgggtgtggtggcacgcgcctgtaatcccagctactcaggaggctgaggcaggagaactgcttgaacctgggaggcggaggttgcagtgagccgagattgcaccactgcactccagcctgggcgacagagcaggactctctctcaaaaaaacacaaaaaaacaaaaacaaaaaaccatacacacacacacacacacacaaatcagcatcataagggaatgtagccttccaacagagatgatgctgttcgtatgttaatctcagagacagtatttcaagagagg

SEQ ID NO: 25852 - DNA, 457 bp, Homo sapiens
  misc_feature (1)...(457): n = A,T,C or G
attgatgacattagnaanctcgtatgtccttantcagtgcggtggaattcgaggtgaggaaaatctgaggtacccaggggaacccccagctaactggtctctcagtggagtcccccagggcccgccagctatcacagggactcagaaacacccatttcctaatgacatggtgagtttcttgatttcttttttttgtttgttttgttttggttttcaacttggctgaccccgggtctatgatctattcacatcgaacccctgactggtctgcctggtgccagggtgagcgtgaccgtgagtgttgctttcgacagctggctcagcacacgctgtgtgaagggatctgagcttgttcatctccagtcgtgacttcatttcccttccttctgtcctcctcctgttcttgccttggacctgcaggtgtgcagaccgctctctctgccttccttgcatgtgg

SEQ ID NO: 25853 - DNA, 473 bp, Homo sapiens
  misc_feature (1)...(473): n = A,T,C or G
agtgggtgnnaatggagacctagncagnctgtgagacattgaggagtgcgagagcatgcactaggatgatatcagaaagcatacagagatggagaatgaatttgccctcatcaagaaggatatggatgaagcttacaagaacaaggtagagctggagtctcacctggaagggcttactgaagagatcagcttcctcacgcaactgtatgaagaggagatccgggagctgcacgtcccagatctcggacacatctgtggtgctgtccattgacaacagtcgctccctggacatgaacagcatcatcgctgaggtcaaggcaccgtacgaggagatcgccaaccacaaccaggctgaggctgagagcatgagatcaaatatgaggagctgcagacgctggcttggaagcatgggatgacccgtggtgcacaaagactgagatctccaagatgaacaggaacatcagtcggctccc

SEQ ID NO: 25854 - DNA, 470 bp, Homo sapiens
  misc_feature (1)...(470): n = A,T,C or G
tggatgtccaggggttngnnnnncctcgagactctagaagcctgcnagctacggagctncggggaacatnnccagcaagagggagagggtgaagattctctacaaaaagattgaagatctgatcaagtacctggatcctgagtacatcgaccgcattgccatacctgatgcctctaagctgcaattcatcctagcagaggagcagtttatcctttcccaggttgcactcctggagcaggtgaatgccttggtgcccatgctggacagtgctcacatcaaagccgttcctgagcatgctgcccgcctgcagcgcttggcccagatccacattcagcagcaggaccagtgtgtggaaatcactgaggagtccaaggctctcctggaggaatacaacaagactacaatgcttctctccaagcaattcgtgcagtgggatgagctactttgccagctagaggccgccacgcaag

SEQ ID NO: 25855 - DNA, 477 bp, Homo sapiens
  misc_feature (1)...(477): n = A,T,C or G
gatggtagggaaatgagaccactagtccagactgaggacattacngagtgcggcggaagtttaatccagatacccccaggctgaagcaggagaatcctcggagcctggcaggcagaggctgcacagagccaagatcgcaccactgcagtgcagcctgggcgacagagcaagactccatctcaaagaaataaaacttacttaaaaataattatgattaaaattttaaaaaaatagagagaagggacactctgagatgctcattgcaggaaccctcaaggggcaagttgtaatgcccgaaggctgcagatggggtgccacagtgttggaatggtgaggtggagggaatatcttccttgggaaagagggagactggcggtgttccaaagccctgatggagtgagaagaggacacctggtggggaaggactgtgtgtgtgtagggggtgttgagtgccaggtgcaagttgcctggcctgag

SEQ ID NO: 25856 - DNA, 543 bp, Homo sapiens
  misc_feature (1)...(543): n = A,T,C or G
agggaggagtctgttcgcggtgcaattcctgcttgcanagaggttgtgccccaaggtccgcctccaggccacgtgggtgctgcgggccaagctttcccttcctttgagagaggtttccgctgtaggagcagagcttccgggctgcgctcttcgttgcccagtttccgctcagtggtcgcgtctccgccccccacccaccagtcccgctgcattctcggccgggctctaggcgccatggctccccgcgggaggaagcgtaaggctgaggccgcggtggtcgccgtagccgagaagcgagagaagctggcgaacggcggggagggaatggaggaggcgaccgttgttatcgagcattgcactagctgacgcgtctatgggcgcaacgccgcggccctgagccaggcgctgcgcctggaggccccanagcttccagtanaggtgaacccgacgaagccccgaggggcagcttcnagtgacgctgctgncccggacgcagcagtgcgagctctgactggattagaagggcccacgcaactcaattcc

SEQ ID NO: 25857 - DNA, 474 bp, Homo sapiens
  misc_feature (1)...(474): n = A,T,C or G
gggcgccnnnntttgtagtacgtcatagtcagtggggtggaattcttgagactccatctcaaaaaaaacaaaccaaaaacaaatgaatggttaacttctaaaccagccaaggaggggaaaaggagaacaaaaatgaatgccaaactagagaaatttagtgaacaaagtaacaaagctagaatgccaggccagcagccgagagcagagattttgagatgcttatgttctgagaaaatgacattggtaacagtttggaactgcagaggaaaggtcttgggggctgtaaataatgctgtccttttgtattagttatgaactcggcattagaacatggttggaagtgtgaatagaggttggtcagtgcagtcagtagcccatcaaaggcaggatgcctgattcacttagttgtcaacatttctatttaggaaatgacaagtgaggcgaaagtcataacaataaattgaagcacgcggn

SEQ ID NO: 25858 - DNA, 474 bp, Homo sapiens
  misc_feature (1)...(474): n = A,T,C or G
gcgagcncnnnntttgatttcactacttagtgtggtggaattctgtgtggtgaaaattatccggcgaacagacaagactgaaattaaggaagccttcttagcggtgtccttggctcttgctttgaatggagtctgcacaaacactattaaattaatagtgggaagatggagtgatgaactcggaaatgcattgcacaggtgaccccgatctggtgtccgagggccgcaaaagcttccccagcatccattcctcctttgccttttcgggccttggcttcacgacgttctacttggcgggcaagctgcactgcttcaccgagagtgggcggggaaagagctggcggctctgtgctgccatcctgcccttgtactgcgccatgatgattgccctgtcccgcatgtgcgactacaagcatcactggcaagattcctttgtgggtggagtcatcggcctcatttttgcatacatttgct

SEQ ID NO: 25859 - DNA, 489 bp, Homo sapiens
  misc_feature (1)...(489): n = A,T,C or G
ggccgcaatcgaaaccctnnnatttgagagcatagtccangtggtggaattcgagcagcggcggcggcgcggagagacgcagcggaggttttcctggtttcggaccccagcggccggatggtgaaatcctccctgcagcggatcctcaatagccactgcttcgccagagagaaggaaggggataaacccagcgccaccatccacgccagccgcaccatgccgctcctaagcctgcacagccgcggcggcagcagcagggagagttccagggtctccctccactgctgtagtaacccgggtccggggcctcggtggtgctcctgatgcccctcacccacccctgaagatcccaggtgggcgagggaatagtcagagggatcacaatctttcagctaacttattctactccgatgatcggctgaatgtaacagaggaactaacgtccaacgacaagacgaggattctcaacgtccagtccaggctcacaga

SEQ ID NO: 25860 - DNA, 474 bp, Homo sapiens
  misc_feature (1)...(474): n = A,T,C or G
tggagcannnnttttgtagacgtccatagtgcgngcggtggaattcgtcaacaggaagtcagacatctacgtgtgcatgatctcctatgcacacaacgtggcggcccagggcaagtacatagctattgccagcactactgtggagaccacggaccctgaaaaggaggtggagccggctctggagctgttggagcccattgaccagaagtttgtggctatcagtgacttgtatgagcccattgatgatggctgtgagagccaggtgttctgttcctgctcctacgatgccaccacacactttgagacaacctgcaacgacatcaaagacatctacaaacgcatggctggcacggcctttgactttgagaacatgaagcgcaaacagaacgacgtctttggagaagctgagcagtgattgtggccgcccccagcccctgctgccccagcctgtgtctgttctcctcgagggctcca

SEQ ID NO: 25861 - DNA, 476 bp, Homo sapiens
  misc_feature (1)...(476): n = A,T,C or G
gcgagcacnnnnnttcgatagcactacttagtgtggnggaattccagcgctccgcctcctccttctgctgggcgctgtcctgaatccccacgaggccctggctcagcctcttcccaccacaggcacaccagggtcagaaggggggacggtgaagaactatgagacagctgtccaattttgctggaatcattataaggatcaaatggatcctatcgaaaaggattggtgcgactgggccatgattagcaggccttatagcaccctgcgagattgcctggagcactttgcagagttgtttgacctgggcttccccaatcccttggcagagaggatcatctttgagactcaccagatccactttgccaactgctccctggtgcagcccaccttctctgaccccccagaggatgtactcctggccatgatcatagcccccatctgcctcatccccttcctcatcactcttgtagtatggg

SEQ ID NO: 25862 - DNA, 458 bp, Homo sapiens
  misc_feature (1)...(458): n = A,T,C or G
caatgagaccatagnttgagcggcgtaattcgncgccatatagctaagccattctccatggagaagttactctaccagattgcacaagcagaagcaaaaaaagaaaacggtcccactctcagtaccatctcagccctcctggatgagctcagggatacagagctacggcagcgcaggcagctgttcgaggctggcctccactcctccgcacgctatggcagccacgatggcagcagcacggtggcggacgggaagaaaaagcctcgaaagtggctgcagttggagacgtcagagaggaggtgtcagatctgccagcacctgtgctacctgtccatggtggtacaagagaacgaaaacgtcgtgttctgtctggagtgtgctctgcgccacgtggagaaacagaagtcctgccgagggctgaagttgatgtaccgctacgatgaggaacagattatcag

SEQ ID NO: 25863 - DNA, 543 bp, Homo sapiens
  misc_feature (1)...(543): n = A,T,C or G
agcagagactgcgctgtccagggggcgaatcgtcgcctcctggcgaagctgacgggccgcaggaagcagatgtccacgctggactcggaggaggcaggcgagcagttctcgaagagggccggagcctggaacggctcctcgtcgtatggcgcgggcagcgcgaagatctcgccgccgtactcgaactcttcgtaggccgcgggcacgaagccgcgggcatcgggcaggagctcggccggggcgcgcagggagcgctccacgttgcccagcggctccgccggagaggactcgaagtccatctccgggatggcctgcaggggcccggccagcgccttcacgtcctgctcggccgcgcagaactgcgtcggtgccagaaggctctcgggccgctcgtgcttcctgccctccagctcccagtcactgggcttcccgggctgcatgctctccatcaagctttgctgctggtggcttttcttcactggaggcatcanatgtctttaggggggaaacagagtacaaagagctgtgctacgggcggtagtn

SEQ ID NO: 25864 - DNA, 476 bp, Homo sapiens
  misc_feature (1)...(476): n = A,T,C or G
agagaaaaaannttttgtcgacctcactagtccgtgcggtggaattcccgctgcacagtgtgccgctgcctgcccaggaggactactacagtcacctgaagaaggaaagcgacaagccactgtagaacctgcgatcaagagagcaccatggctcctacattggaccttggagcacccccaccctccccccaccgtgcccttggcctgccacccagagccaagagggtgctgctcagttgcagggcctccgcagctggacagagagtgggggagggagggacagacagaaggccaaggcccgatgtggtgtgcaaaggtggggaggtggcgaggatggggacagaaagcgcacagaatcttggaccaggtctctcttccttgtcccccctgcttttctcctcccccatgcccaacccctgtggccgacgcccctcccctgccccgttggtgtgattatttcatctgttagatgtggc

SEQ ID NO: 25865 - DNA, 475 bp, Homo sapiens
  misc_feature (1)...(475): n = A,T,C or G
gcggtaannnnnnttcgatagcactccttcgtgaggnggaattcctgggggagcatcctctcttttgagaaccgggaacctgtgggctcaggctgcgtggcccaggtgtacaaagcatacgccaacactgccttcctggagactgacagcgtccagagacttggcagggcctcctgtctgccgcccttctcacatactggggcagtcggtgggctgagagagctctttggataccttggaaatggccggaaacctccagaaaatctcgcagaccagtcgtttctagaaaggctgctcctccctaaagctgacctggttggatcaaatgcaggggtgtctcgggctcaggtccctggccaccaacctgaggccaccaacctcatctccgtggcagtgaaagtgttgcaccctggcctgctcgctcaggtgcatatggacctgctgctgatgaagattggcagccgagtcctgggag

SEQ ID NO: 25866 - DNA, 478 bp, Homo sapiens
  misc_feature (1)...(478): n = A,T,C or G
tgcgccaaaanntttggtcgacgtcatctagtccagtgcggtggaattcctcagcctgaccaacatgatgaaaccctgtctccactaaaaatacaaaattaagcgtggtggcccgtgcctgtagtctcagctgctcgggaggctgaggcaggagaatctcttgagcccgggaggcggaggttgccctgagccaagattgtgctattgcactccaccctgggaaatagagcaagactccgtctcaaaaaaaaaaaaaaggggcatctgtgcccggcctggggggttcacccctgaacccccacctttttgaaaggctggggggggttgggacccccctagggcagggagttggaaaccaccccacccaacggggagaacccccttctttcctaaaaaaaccaaaaaatttacctggccgccctgggggcccctgctacccccagttcttggggaggctgaggcagaaaaatggaccctg

SEQ ID NO: 25867 - DNA, 457 bp, Homo sapiens
  misc_feature (1)...(457): n = A,T,C or G
ctttgacaccctagnatgagcgccgtaattcgcttcggagatgcttgccaaaggccccgccaggccggcggtcttcaccgcgctccctgcctatgaggactgggtcagcagtttggactggcaggtctacttcgccgaggaaccagagcccgaggctgagcctggaagctgcctggccaacataagtatgtggccccggggcctcctgccaaaccctgcctctccaggacccttctctctccagtgagaacgtgccgttctaacccactccagctgccttgggtagggtggagcaacaggcagacccatttgattcagattctggttctttgtcatcgtgtgacttggagcaggctgctcaaccgctttgagcctcagtattctcatctgtcatggcggccaagacagaccctgttccttcgaggaatggggagggagggagggaccaaagccgtgg

SEQ ID NO: 25868 - DNA, 482 bp, Homo sapiens
  misc_feature (1)...(482): n = A,T,C or G
ccgcccccatagtagtccatagtcnagngnggnggaattcgngtggatgatccagagggaggagttgagaaagtcagggtagggtcagagtaattgaatactcagaaacatcaaattgagccttaaaagattgggtaaaatttctaaattttaaccgatacatactatagctaggacttttaaacttcctcattataacacaaattttgggataagaaaacgtgtgtaaaaggccatttgggctggatgcagtggctcactttgggaagccaagctggtaggattgcttgaggccaggagttagagattagcctgggcaacatagcaagacctcatacaaaaaagttttggtctttttttttggagacggagtctcactctgttgcccaggctggagtgcagnggtgtgatctccgctcactgcaagctccacctcccaggttcacgccattctcctgtctcagcctcccgagtagctgggn

SEQ ID NO: 25869 - DNA, 464 bp, Homo sapiens
  misc_feature (1)...(464): n = A,T,C or G
gccctccccctgatgacctcggctgatcaccataggacagngcggaggaattcccaacagaaccacacgcagactcaccataccacgcagcagactttcctgaacccggtgctgcctcctggctacagagacaccagcctgccatactatacaggggtcccgggcctccccagcaccttccagtatgggcctgctgtgttccctgaggctcctacctcttccaagcagcatggagtgaatgtcagtgagaatgcatcggccacccctttccaacagccgagtggatatgggtctcatggatacaacactggggtttcagtcacctccagtaacacgggcgtgccagatatctcgggttctgtgtactccaaaacccatcagtcctttgagaaacaagggtttcattccggtactcctgctgcttccttcaacttgccttcaaccctaggaagtgggggccccan

SEQ ID NO: 25870 - DNA, 476 bp, Homo sapiens
  misc_feature (1)...(476): n = A,T,C or G
agcgggannnnncctgatggacatcactagtgcagggcggtggaataccgcacattccaccccagcccagtcctcgtcctccacgccagccccaagcatgtgagtaacccaacttctccctttctcctccccagactctgcgggtccttttctgtcccctttctctctctctctctctctctctctctctctctctatctctctctctctccatggagaaaaatatatccacgcgcctgcttttacagcggggttgcccactctctaaaacccccctgtgtgggcgagaagaaaacggtgcctttctcacactctcacaagaaggacagactgtctgtggatagctaagccccactctcacacaatctcatctacacaccgtgagcgccctgagaggcccgtgtgctcacactgaaaagaaagtggatacatcagaatccccttggaccccggtacacgccactgcggtgaaccga

SEQ ID NO: 25871 - DNA, 475 bp, Homo sapiens
  misc_feature (1)...(475): n = A,T,C or G
tgcgtgccnnnntttgatggccactcnttagtgtcggggaattcctactttttctttatattttattttattgtatttttgagacagtctcattgtcgcccaggctggagcgcagtggcgcgatcttggctcgctgcaacctctgtctccggggttcaagcgattctcgggccttagcctcccgagtagctgagactacaggcgtgcaccaccatgcctggctaatttttgcatttttggtggagacagggtttcaccatgttggccaggctggcctgaactcctgaccttaagtgatccactcgcctaggccttccaaagtgctgggattacaggcgtgagccacctcacccagcctggagtgtctcatcttccaccactaaatgaaacgatggaccctgaacagaaaaaggaacagtggtggaagaactagcaaagcccacagccttgagtttggccgtaagtatcaaggttn

SEQ ID NO: 25872 - DNA, 442 bp, Homo sapiens
  misc_feature (1)...(442): n = A,T,C or G
aatgatgaccctctagacancnggnggaattcagaggagagcagattgggggggctcatgttctgagagaaaggaataataacatttgtctagtacattccagtttacaaagtgcctgatatacatgatctcctttaatcttcacccaatcctgtaaagtaggtgttagatccccattttgcaagtaaataagtggaggcttatagcagttaaccgctggcaggtaggtagctggttccatagcacatcattttcctgcggcatcacggcatggtgccgaagaagacagctgtggatgtcgttgactcagatgtgcccccgttggagtgggagaacccagggatgggggtcagcaagccaggaactccgcagggtttgtttttaaaactctgctggacagaagtggaggaggaaagaatctaaccatatgacttttataaan

SEQ ID NO: 25873 - DNA, 468 bp, Homo sapiens
  misc_feature (1)...(468): n = A,T,C or G
gccgccccnnnnnattgagaccttanacaggcgggaatgatacccctgtgagcaacgtcccagggcagcctgtaggcctgatagaaagaaacttcacaaacctgcctatcacggaatgttttccccttttgtcggggcctatccagaccccaggggaggtgcatccttgagagccgctatgtgaagtcccacatagtggcagccgcacgtgagggttagtctgtttcattattcccttgcttgctgctctcagtgcctcccagaagttccctgttagcaggggaagaggccttatccttcgccacaaaacctggctcgcctctgggttatgggtggggaatcagtaagtcctactgctgttcaggccctgaccccagttcccaggaaagcacaaggctagtgccaccagaggtccaggccctttgctggaggctccatcaactccactaccagtgggctaccagcagg

SEQ ID NO: 25874 - DNA, 443 bp, Homo sapiens
  misc_feature (1)...(443): n = A,T,C or G
nattgatgacccttagnccagngnggnggaattcaaaaataatgcctgtttacagtagaaaatgtggaaggtaaaattgacccactatgtcaccatctagaaatgaccaccattaacatttactgtatatcctgcaactgttgtttactctgcctttttctttttaaattaagatcatattgttggcatctcattttccacctatcaaattaacaaagctttttttttaaagcttatactccatgctggtgacagggtatacagttcagtcaatgttggtgcaattgaattggatggaaaggggcttgattcatcctgtcctggggtgttgggcaagggctgaccccagtagtcagcatggtggtgggtaatagagatttcagatctccaaggtcaaagtgacagagtcaccaggggagcttttcaaaaggaaagaccaccca

SEQ ID NO: 25875 - DNA, 474 bp, Homo sapiens
  misc_feature (1)...(474): n = A,T,C or G
gagggcnnnnnnnnnattgagatcactgtccgngcggnggaattgaaatctttgaatttggcttgacacaaaatacagaatggatgaagcatgcagatgtttggcgtgtgccccgaagcaccctctactctgtcctctgcacccaccctttgcgcctctgcgtcagccacagctgccccgggagcgagttctcctgaggccctggctgtgctgactctagggcagcgtgagggtggttgtcagctgtgaaggtgccacttacacactaagtcctccttccttgtggagggaagggctcaagtagcaaatattggagcccccgcttggtgctgggagctgtgacaggcagctcctgaagaagcagtttaattggaaccagtgaccatctaaaactgtttgtactctaaaccagattttacagaaatattggaatcatacctttatacttgattttttctttttagatagttaggg

SEQ ID NO: 25876 - DNA, 463 bp, Homo sapiens
  misc_feature (1)...(463): n = A,T,C or G
ntttgangnaccttagaccagcgtggtggaattcccggctcaccagtgccacctgcgggggagggacggggcaggcaggagtctgggaggcgggtccgctcctcttgtctgcggcatctgtgctctccgagagaaaaccaaggtgtgtcaaatgacgtcaagtctctatttaaaaataattttgtgttttctaaatggaaaaagtgatagctttggtgattttgtaaaagtcataaatgcttattgtaaaaaatacaggaaaccacccctcaccctgtccacttgggtgatcattccagacccctccccaaacatgcatatgtacctgtccgtcagtgtgtggatgtatgtttacagttctacataaatgggatcattttatacatggtgctctggaacccacatttttcatgcagtcatttgcagtgaattatttattgtgataataaatagcattagaatc

SEQ ID NO: 25877 - DNA, 545 bp, Homo sapiens
  misc_feature (1)...(545): n = A,T,C or G
nttcgaacatagtccagcgggggaattcgcaaggccttttctctggcatggaattgttaattttctgacacgtctagatgtgaaatttctgaaaatgttgaagcagagaaacattcacacacaaaaagcaacatagtcatgtgggtccagatggcctcagtcctagatgttggcaccctttgctgtgtctcctcagagtatcctgttccgcctcctgccacctggacctccctcagtggatgtcttccctcccccgaccccagcctgtcagtccgagcacagtgcaggtttggctctgacttgggcttttggctgcagcgggggtggatttcagagcctctcatggcagcatctaagtgaccagagctgggatgagagaggggaaggggcaatgtgagtggcgctatgggacgggccatgcctggctctgagccagccccgccctctgccccctggccctgggctctgtgctanggatggtgaagaatgggggcgtgccagcctggcangagttggaagcaacacgcaggggtccccgacccttt

SEQ ID NO: 25878 - DNA, 482 bp, Homo sapiens
  misc_feature (1)...(482): n = A,T,C or G
catcgacccccctnttagaagaccctaggccagngcggnggaattccagctgcccaatccgcgacacccacgtcaaagcacagcatcaagttcgtttggacatccggcaaggcctcttaccaaatgaggcgccagataacttaataagctcaaaagaaaaaaacatttaaaaagaaagaaaaaaaaaaaaaaaaaaaaaaccccggcttttctttttttttttaccaaaaggggttaactgacccggaggggggccggtaggggggggaaacccccccggaaaaaaaaaaaaaaaaaaattattaaaaaaaaaaaggaaaaaaatttggaaggaaaaaaaaaaatttttggaaacaacttggtttaaatttccaaaagtgggaaattgttttgaaaattttctttaaggggcctggggtccggggggcccccgggggaaaggggggccaatccaaatttgcttgagggggccctcccccggg

SEQ ID NO: 25879 - DNA, 479 bp, Homo sapiens
  misc_feature (1)...(479): n = A,T,C or G
tgtgggccannnnnnnnattttgtagaccatagtcagtgtggtggaattgactccatggtgctgcccatgaacatccgccggctctgagaaacgagctgcactgtcagtgagaaaccgtgggcactgagaaacgagcggactgcaactgataactgcccacccagtgccactacgacaaagtgctgctggcactactcccaccctccgtcctcaaatcagtcccctcccgcctaagaagacctttatttttcctagcgaagtcatactgagggccccatcaaccgatcccttgcgatgcgcatgggaaaaggaggcagtatagggaccgagaatcgggcggattgggctggccctggtaacaaaagccatccgggtcgccaaccgtcttccactgcaagaaacaaaccttccagtggctgggctccgcccttctccttggtcagagccctccaggctcctaagggcgaagccgacaccn

SEQ ID NO: 25880 - DNA, 455 bp, Homo sapiens
attcgtagaccctagccatgtggggattgatgacgtgatccccccatttcctgccccatgagaatgggcagggggaggacttggcactggctgtgggagaggttatggctccaccaggcctctgggcactggaaaaaggaggggtgtcaccaggacaacccctactgggcatcaggttctgaaaaggaagagtgaggaactagaggctcagggacagccagtagagtgctcacagggtggtggggtttgttggaaattcctggcagggacaaggaggcaggcccagcctgacagtcagaaatccccagcgggccatcactgggaggtcatgcactgcagccggtgtttgaagaagagcagccggtgtttggccatctggctctcgtccagtgatcctgggtaacggtaccgggcgtaagtctctgctccggcatcccttgatgtcaaggcagctt

SEQ ID NO: 25881 - DNA, 445 bp, Homo sapiens
  misc_feature (1)...(445): n = A,T,C or G
ntttgaaactgangatcatccgacagnctggnggaattcggagaaaccccgtctctactaaaaatacaaaattagctgggcgtggtgtctcattcctgtaatcccagctacttgggaggctgaggcaggagaatcgcttgaacccaggaggcggaggttgtggtgagcgaagatcgtgccattgcactccagcctgggcaacaagagcaaaactctgtctcaaaaaaaaaaaaaggatttaattcccattaaataattgggccaatacaaatgttacccaggcgggggggcacatgcccatggtcgaatttactttggaggcaaaggcgggaggatcttttgaccccataattttggggcaccagggacctttgattgggccactgtactccagtcggggggacaaagggaaaccccttttttaaataaataggccaacccttag

SEQ ID NO: 25882 - DNA, 575 bp, Homo sapiens
  misc_feature (1)...(575): n = A,T,C or G
cgcgatggtccctatcaggtgggcaactnctcacagaacaaagcatgcgttcgggatggaggaagaacttcagcgagagggaagcatcgagactcttattaacagctcaggctccaccagcggcagcataccaagaaactttgatggctaccgatctccgctgcccaccaatgagagccagcccctcagcctcttcccgactggcttcccgtaggtaccagcaacctgcttctgactggccagccccctcccctgctggaggaggggagaagccccgctctggtcctacccttcagtctctgctcttccttcatcaaccaccttccccaagcttagtgacagcagccgcccatcctacctggatggagaagagacccttctccaagcacctcagcgcacttgccctctgccacacctgtcggaggaggctgtggccaggagagactgtagaagctcggtccctgtgtatgtttgcatatgacatcctgcattggatccgctnttgtatttnttaaccatacccacggnggngcgggtggngggagcctggaacagtgaccagatctgggggcctn

SEQ ID NO: 25883 - DNA, 443 bp, Homo sapiens
  misc_feature (1)...(443): n = A,T,C or G
aattgatgacttttagaccagngnggnggaattcggctgagcattacaagatcccacccctggtgaagcactactcccagcgctgggcccaggaggacctgctggaggagcaaaaggatggggcccgggcagcggctgtggctgacaagaagaaaggcctcatggggccactgaccgaactggacactaaagatgtggatgccctgctgaagaagtctgaggcccagcatgaacagccggaagatggatgcccctttggtgccctgacgcagcgcctcctgcaggccctggtggaggaaaatattatttcccctatggaggattctcctattcctgacatgtctgggaaagaatcaggggctgacggggcaagcacctcccctcgcaatcagaacaagcccttcagtgtgccgcatactaagtccctggagagccgcatcaag

SEQ ID NO: 25884 - DNA, 475 bp, Homo sapiens
  misc_feature (1)...(475): n = A,T,C or G
gcggcccccnnnnnnaattgtagtcattagtccgtgcggtggattgacatgctgaaaccccgtctctactaaaaatacaaaaattagctgggcgtggtggcgggcgcctgtaatcccagctactcaggaggctgaggcaggagaatcgcttgaaccagggaggcggaggttgcagtgagccgagatcgtgtcactgcactccagcctgggcgacagtaagactccatctcaaaaaaattttaaaagaagaatctagttgtatccggcccgagtgctactgtcttcgtgacatgttttcacaggtctgagaaagaaccccagtttaagtttatctacttcaaccacatgaatctcgccgagaagagcacagttcacatgaggaaaacgcccagcgtgtcgctcacttccgtgcacccggatttaatgaagattctcggtgacatcaacagtgactttaccaggtgattccagcccn

SEQ ID NO: 25885 - DNA, 587 bp, Homo sapiens
  misc_feature (1)...(587): n = A,T,C or G
cgcgatcgatcactgtcagagtggaggaactctccgctgccccggaccctcccgcgggcgcgcaccaggctcaactcaggctcaggactgcaggtagacatcttcactgcccaggaatcactgagcgtgcagacagcacagcctcctctgaaggccggccataccagagtcctgcctcggcatgggcctcaccattgaggcagctccactgtctgtgctggtctgagggtgctgcctgtcatgggggcagccatctcccagggggccctcatcgccatcgtctgcaacggtctcgtgggcttcttgctgctgctgctctgggtcatcctctgctgggcctgccattctcgctctgccgacgttgactctctctctgaatccagtcccaactccagccctggcccctgtcctgagaaggccccaccaccccagaagcccagccatgaaggcagctacctgctgcagccctgaaggccccttgcctagcctagagcccaggacctaagtccacctcacctagagcctgggaataggatcccagagttcagccagcctggnngtcagaactcaagagtcccgctgctgga

SEQ ID NO: 25886 - DNA, 581 bp, Homo sapiens
  misc_feature (1)...(581): n = A,T,C or G
gagagcatggaccccnntccnntnatgatgatctatccgagaggagcaattcctgctacttgggaggagccacttcacctttgtattagtgatgaaaaaatataatttgggctgggcgcagtggctcacgcctgtaatcccagcactttgggagtccgaggcatgcggatgacttgaggtcaggagttcgagaccaccctggccaatatggtgaaaccccatctctactaaaaatacaacaaagttagccgggcgtggtggcaggcgtctgtaatcccagctgcttgggaggctgaggcaggagaatcacttgaaccctggaggtggcggttgcagtgagcacagatcatgccactgcactccagcctgggcaacaaaacgagacttcgtctcataaaaaaaaaaaaaacataaaattggatcctttgggcggggttctcccaatttttttgggggggcccagtgccactggtttcagtttggtttgtgaccccccctgccagaagccgcatataggttgtttttcactttgtttcaaggctgggaacaaaaagaaccctcttgttgagggggggaagaaa

SEQ ID NO: 25887 - DNA, 457 bp, Homo sapiens
  misc_feature (1)...(457): n = A,T,C or G
attggagttcgctagcacangccgnggcantcggnactcgtgcgccgaaaggaccaatttctgcaccccatcgacctgcacctgctcttcaacctcattagttcctcctcgtcctttcgcgagggcgaggcctggacgcccgtgtgcctgcccaaattcaacgcagccggcttcttccacgcacacatctcttacctagagcctgacactgacctctgcctgctgcttgtctccactgaccgtgaggacttctttgcagtctctgactgccgccgccgcttccaggagcgccttcgcaagcgcggagcccacctggccctgcgagaggcactgcgcacaccctactacagcgttgcccaagtgggcatccctgacctgcgtcacttcctctataagtcaaagagctcgggactcttcaccagccctgagattgaggccccatacaccagtgaagagg

SEQ ID NO: 25888 - DNA, 459 bp, Homo sapiens
  misc_feature (1)...(459): n = A,T,C or G
catcgacatcgatacactaggccagngccgnggaantctttaatgacatgttacccctttcagatctagaaaatcaggcaaaaagtgatgtcccaactctactctaaaaacctgctcctactatgttagtcagtgtttctttaaggaagaagaggactatgtccccaaaagctaactctgttttatagccctggtggatccctgaaaaccctatttattctatactgggctttggaatatgaaaaatggacctgtgtggccgggcgtggtggatcacacctgtaatcccagcactttgggaggtcaaggtgggcggatcacttgaggtcaggagttcgagaccagcctggccaacatggtgaaactccatctctactaaaaatacaaaaattagccaggcatggtggcacacacctgtaatcccagctacatgggaggctgaggcaggagaattgcttg

SEQ ID NO: 25889 - DNA, 458 bp, Homo sapiens
  misc_feature (1)...(458): n = A,T,C or G
attttgagtccatagcgatgngcggnggcanttgctgnggacaaccacaaagtttcaagcgacaggctcgcgcccggctggagaggaggactcgggcggcccggagcggcccggggacgtggtgaacgtggtgttcgtagaccgctcaggccagcggatcccagtgagtggcagagtcggggacaatgttcttcacctggcccagcgccacggggtggacctggaaggggcctgtgaagcctccctggcctgctccacctgccatgtgtatgtgagtgaagaccacctggatctcctgcctcctcccgaggagagggaagacgacatgctagacatggcccccctcctccaggagaactcgcggctgggctgccagattgtgctgacaccggagctggaaggagcggaattcaccctgcccaagatcaccaggaacttctacgtggatggccatgtcn

SEQ ID NO: 25890 - DNA, 477 bp, Homo sapiens
  misc_feature (1)...(477): n = A,T,C or G
ccgcccccccnnnaatcgaaacatagaaaggcgnngttttgagtctttagtcagtgtggtggaattcgcaaagcatttaataactactatgaacttactcatcagaggttttgtgctagataaaagcaatgtaagtgtaatgatacacattacatttatctgtggaaagatgtcaccaaataaaagccttagagtacacaaggtgtaatgatagtgatacattacatttgtacatggaaagacttcaaaaatataagccttagagtacacaagagtttttatactgaagaaaaacattacaaatataaagattgttgcaatacttttacttatgttacagattttgttgtacataggagaatttatactgaaaggtaaccctctaacagttgctcaaattttattccattttagagaatttacattggaaagaaaccctacaactgtaatgaatatgaaaaaaattgtttaaaaagt

SEQ ID NO: 25891 - DNA, 455 bp, Homo sapiens
  misc_feature (1)...(455): n = A,T,C or G
aatgatnacatacgaaggcggggaatgatgatcctggacgcaacctgncaaangaagctgcccgcccaagtctctggggacttcctggaggacactgcctcactgtctcgggttggctcccaacctggaggtcccagatggggactgttctgacaagctggcatcaccaggggtgaaggccctggctgcagctgtacaccacctgtgcccccaggctcaaggtctctggcaggtgcacaccancccaactctgcagggcttctgttcctgccaccacccaccaagccaggaccccactccttcctcgaggctgagctgatccttttacaggggcagggcccaggagaccattcccagaatccatggggcagcagccagggctccggctgctggaggaagcagctatccacaaagcttcctgccccacagctgaggctgacgcccccggagaggcg

SEQ ID NO: 25892 - DNA, 459 bp, Homo sapiens
  misc_feature (1)...(459): n = A,T,C or G
atgcgcgtccnncaactaaaggcttgaggatctgnggaaaccnncagaaggactctttttgtcttagcctgttttcttgggctcctagtgcacttgtacatgctgtaaaatggtcatttgttctggccaccgatctgtatctgttgaatgcctctttgtgccaggcatgtgggtgtcttaggtattggtgtacagctgtaatcacactaaagatatccctgcccttgaggagcttcattgtagggagagaaacaccccaaaacatacaaatggataagtaagatgatatcaggtactggcaagtattgtagagaggctgaaagagagcattgtgaaggaaaaccacagggagaaggtgagctgggaaattagtctgaggaggtgacatcggagctgagaactgaacaaagaagaggggcagcctggaaagagctggtagcagaacattccttgcagaag

SEQ ID NO: 25893 - DNA, 575 bp, Homo sapiens
  misc_feature (1)...(575): n = A,T,C or G
agagcatcgatccctatcgaatttgagaaccnttccaagcnngcctcactgttttgaaattgaacttaaggggtgttgtaaataagccaaacaaacttggaccttgcagagtataagctatgtgagcaaattttctgtggtgatgcataagctgcttacagcattttatatagggtgtctgtagttaccgtcaaagcctggagggccctttctgtcttgtcccatgggttcggcttttccctaaccattctttgaaactttctttaaagcctgtcttctatagtagtgcttctgaaacatgactgtgcaaaggagtcacatgggtgatgttaaaatgcaagttctgatttcattggatctgggatggggcccgaggtgccatttattattttattttttttaagacagagttttgctcttgtcaccccggctggagtgcagtggcacgatctaagctcactgcaacctctgcctcccaggttcaagcaattctgcctcaccctcccgagtagatgggattgcaggcacctgccgccatgcctggctaatttttgatttttgtagagatggagttc

SEQ ID NO: 25894 - DNA, 586 bp, Homo sapiens
  misc_feature (1)...(586): n = A,T,C or G
aggtcatagaaaaccncccccacccaggttgngacanngcagaggnccaacnncggnggggactgggacatgatagatattcccttgatggggacaacctccactgtcccagggctcctggagccagtgcctctgtggggcttgcctgtcatctgtgcttggcctccttccctcccgctccctgcttcctggctgcctctctctgttgtcctcccagcagcacctccgggccatcttcacgggaatccccagcttcaatgctgaccggcttttttttttctttctttttaaagggacaaactcttgctctgtcgcccaggctggagngcanngnnncaangtnagctaactgccgcctctgcctcctctagcaattctcctgcctcagcctcccaagaggctgggataacaggccccacgccaccatgcctggctaatcttttatattttagaggagatggggtttcaccatgtcgcccagccttggctcaaactcctgaactcaaggcatccacccattcttggtttcccaatggcgtgggatgacaagggggaaccactggttccacccccattttttcttacc

SEQ ID NO: 25895 - DNA, 445 bp, Homo sapiens
  misc_feature (1)...(445): n = A,T,C or G
gggaaaattgaaaccctccgaanatgagggctatcgaagaacacatgtgccttgcatgaagtgtgggttgcgccaacaattcccctggttcctttcaacctgtttagttcaactcaagcctccctgtgtcccagaccctcctgctgccaccaccacccaggtcctccctagtcctccagcgtcaacactatcccttgggagttgtagctgctgtcactgactcccggctatacatggcctgtcgaccacgttatagccctcaggcctgttgaacttgctctctaagagaggttgggaccaggctaggttccgggtgacgcccaggagaggtggtggccttcacacatgcacatggagttgaggaccagggagctgcagggaaagcaacagctataggtgccttgctcttctgtcggaggctgctgggggcaagagcagctgcaca

SEQ ID NO: 25896 - DNA, 459 bp, Homo sapiens
  misc_feature (1)...(459): n = A,T,C or G
gggcgggannnnnnnattgagcctgacgattattacgacagncnggnggaattccttctttcttgccaggtgagtgacttgcgcaatcaggtctacctggatgatggtctggaccccttcccaggcgagggccgtgtggtgggcaggcagcggatgcacaaggccttggacagggtggaggagcacccaggctccaggatgactgctgagaaatttctgaacaggctccccaagtttgtgatccggcaaggcgaggtgattgacatccggggccccatcagggacaccttgcagaactgctgcccattgcctgcccggatccaggagattgtggtggagacgcccaccttggccgctgagcgagagaggagccaggagtcacccaacacaccggcacccccgctctccatgctgcgcatcaagtctgagaatggggaacaggccttcctactgatgatg

SEQ ID NO: 25897 - DNA, 449 bp, Homo sapiens
  misc_feature (1)...(449): n = A,T,C or G
ggggccggnnnnnaaaaggggacttaagcanagtanagncnggnggaattcgaagcccagtcccagccagaaccgccgttcttctgacactggctccaaggcaccccccaccttcaaggtctcacttatggaccagtcagtaagagaaggccaagatgtcatcatgagcatccgcgtgcagggggagcccaagcctgtggtctcctggctgagaaaccgccagcccgtgcgcccagaccagcggcgctttgcggaggaggctgagggtgggctgtgccggctgcggatcctggctgcagagcgtggcgatgctggtttctacacttgcaaagcggtcaatgagtatggtgctcggcagtgcgaggcccgcttggaggtccgaggcgagtgagctcagggggccacctgcgctccccccgctacccttcgagccgcgcccctgtctcaag

SEQ ID NO: 25898 - DNA, 478 bp, Homo sapiens
  misc_feature (1)...(478): n = A,T,C or G
natcgagaactcgaggccgtgncgaggaactcctctgggggntctggctgctctggactgtcctcatcctctttagctgctgttgcgccttccgccaccgacgagctaaactcaggctgcaacaacagcagcggcagcgtgaaatcaacttgttggcctatcatggggcatgccatggggctggtcctttccctaccggttcactgcttgaccttcgtgagtgacttgatgccctgggtcagctaccagtggccctccccaaaccagaaccccaaatcgtctcacattcccttttccacacatttcacatttcagagtatttttccctaatataaaaactagcaccctatacctggttgtcttcaaccaatcatgccaattttctcccctgcaggcttactcagcaccttcaagcccccaccctacgaggatgtggttcaccgcccaggcacaccaccccccccttatactgtgcccc

SEQ ID NO: 25899 - DNA, 467 bp, Homo sapiens
  misc_feature (1)...(467): n = A,T,C or G
agggaaaaannnnctcgtagaccactagtctagtgtggcggaattcaagaaggagaaagagtttgaggagacaatggatgcactccaggctgacatcgaccagctggaggcagagaaggcagaactaaagcagcgtctgaacagccagtccaaacgcacgattgagggactccggggccctcctccttcaggcattgctactctggtctctggcattgctggtggagccatccctgggcaggctccagggtctgtgccaggcccagggctggtgaaggactcaccactgctgcttcagcagatctctgccatgaggctgcacatctcccagctccagcatgagaacagcatcctcaagggagcccagatgaaggcatccttggcatccctgccccctctgcatgttgcaaagctatcccatgagggccctggcagtgagttaccagctggagcgctgtatcgtaagg

SEQ ID NO: 25900 - DNA, 458 bp, Homo sapiens
  misc_feature (1)...(458): n = A,T,C or G
agcagtgccannnnttttgaacctgacgatcatcagacagngcggnggaattcggctattggcccggcgcgggggaaaagggggaaggtcgggctcggggtggcattaccccagagggcaggggtgactgccggggtgctcttggggcaaggtgggcgtcaaggcccccagcaaggttgggataaagtttctctccgaggcacagactgccgcctgcgggctcagcatttacctctcccttcctccttcctaacgcaacttcagcggagggctgagggctctactgcgcattacctggaaaacttatttcactccacggccctaagaggtgggccttattattagccacggccagggttagggtgaggccactcctccagggcagaatttcagggggtgcccacccccccgccctaaatcattcagcaatcaacataaattatagttcaacgcaatan

SEQ ID NO: 25901 - DNA, 587 bp, Homo sapiens
  misc_feature (1)...(587): n = A,T,C or G
gagagcatcgacncccctngnnnatagaancactatcgagagnggngcaattcgcctatttcanaatgaaaatatcagatatctaggcaaaagttgtaaataatcaaaattataaaattaaaagcaaagtagcaagatagaaataatcaaaagttatagcaacttagggacaagagtacttacttttttgggagtccctaaaacttggcaaattttaaagatttcatcgacctcacttgtccctgggaaaagtggccttaacatatagagttcagccatgatacttccaacagcccacacatcaatgggagaactataaactgaagatctcagtaaaacttcaggggcacgatacctatgaaaatagagaacaaaagaggtaattttgattgcaatttcaaaggtggatgggcagtagcattctacgctgtgtggtcatgcatttccatcaaggaacaggtattcagaccctgttccatctgtgtgtcaggcatttgtacaatgttctggngataataggacacaacacatgttccctgatcacagacaatgagtggggctggagacanatgtctatgaaatgtcat

SEQ ID NO: 25902 - DNA, 584 bp, Homo sapiens
  misc_feature (1)...(584): n = A,T,C or G
agtgctttcgatctctgtncagagtggagcaaccccagcagganagcactggactgaggaggaggttaaagctttgctaagtgtctgggcagaaaaaaatatactataacaactttatggaacactaagaaataaaggaatatttatttacattgctaaaaggctgcaatcattaggagtatacagagactggaaacagtgctgggctaagtacaaaaatctcaaatatgaatatagaacagttaaatatgcccataactctggagacagctctaaaactatgaagttcttccatgatttggatgtaatcctgcagtatgaacctgccacacaatttacagaggaagatgcaaatggcaggtacctggaaacgctcagcccaagtacagccccagagaccactgaagaatttttattggtgtgtgatacacggaagaagggaagaaaacgaaagtgccttttccactgttgggatcaacctcatgcaagtggtaaaatgtcaattgcatcagtagataaagaagatgtctcangaaatactttacttctggnttctcatgtcagaccaatggaactagaantat

SEQ ID NO: 25903 - DNA, 441 bp, Homo sapiens
  misc_feature (1)...(441): n = A,T,C or G
taactggtactacgacatngcganggacttnnngctaccaacctgggaaaaatggagaatgcttgctttgggggctggaaggattttgtgtttaaaacatttgctcttctgcagggcctttcagaggctctatcaagagcccgaggcaaaagaaaagatgtgcacccctctgtacactgagcaaatgtcctcccatattttgaaccaggtgggaaaagttaatgaaagccctacagtcaagaaatgtgactgcgaagcccccgctgccccagtgtttgcacaccactggcaactctcagaaacaatcagtcccattgcacgggaacacggcgttttgaaacaaacagcagcctgtttttatttaaagacgggatcccttgcttatcgtagatttttttcataatttgatgctggaaaatattgcacacaaatactactcga

SEQ ID NO: 25904 - DNA, 555 bp, Homo sapiens
  misc_feature (1)...(555): n = A,T,C or G
naataaatcacantcagngagggcatagatcgtcggtcatcgggatcgagtgttccagtatctctgattatgcggagaagatcgtcaaagccaacaagttagaccacgtggtgaccatcatcaatgggaaggtggaggaggtggagctcccagtggagaaggtggacatcatcatcagcgagtggatgggctactgcctcttctacgagtccatgctcaacaccgtgctctatgcccgggacaagtggctggcgcccgatggcctcatcttcccagaccgggccacgctgtatgtgacggccatcgaggaccggcagtacaaagactacaaaatgcactggtgggagaacgtgtatggcttcgacatgtcttgcatcaaagatgtggccattaaagagcccctagtggatgtcgtggaccccaaacagctggtcaccaacgcctgtctcataaaggaggtggacatctataccgtcaaggtggaagacctgaccttcaccttcccgttctgccctgcagtgaagcggaatgactacgtgcacgccctggtggcct

SEQ ID NO: 25905 - DNA, 455 bp, Homo sapiens
  misc_feature (1)...(455): n = A,T,C or G
aggcggtnnnnaaatgagacctagaaacgctgggaattccaatggcgtcatgcacgtcgatgagtgtgtggagttccaccggctgtggagcgccatgcagttcgtgtactgcatccctgtgggaaccaacgagttcacagctgagcagtgtttcggcgatggcttgaactgggctggttgctccatcattgtcctgctgggccagcagcgtcgctttgacctgttcgacttctgttaccacctgctaaaagtgcagaggcaggacgggaaggatgaaatcattaagaatgtgcccctgaagaagatggccgaccggatcaggaagtatcagatcttgaacaatgaggtttttgccatcctgaacaaatacatgaagtccgtggagacagacagttccactgtggagcatgtgcgctgcttccagccacccatccaccagtccttggccaccactt

SEQ ID NO: 25906 - DNA, 452 bp, Homo sapiens
  misc_feature (1)...(452): n = A,T,C or G
ggagaatgagaccatcgaaaaactgagacccattggacagncnggnggaattcctgggccagcatgcccaccccttcttcttcaccatacctcagaatcttccatgctccgtcacactgcagccaggcccagaggatacaggaaaggcctgcggcgtagactttgagattcgagccttctgtgctaaatcactagaagagaaaagccacaaaaggaactctgtgcggctggtgatccgaaaggtgcagttcgccccggagaaacccggcccccagccttcagccgaaaccacacgccacttcctcatgtctgaccggtccctgcacctcgaggcttccctggacaaggagctgtactaccatggggagcccctcaatgtaaatgtccacgtcaccaacaactccaccaagaccgtcaagaagatcaaagtctctgtgagacagtacgccgac

SEQ ID NO: 25907 - DNA, 438 bp, Homo sapiens
  misc_feature (1)...(438): n = A,T,C or G
aatgaagctaccganatcgaggctattgcaactgcagngcccactccccactctctccatgctttataccacactgcagtgtccactcgcccactctctccatgctttataccacactgcagagcccactccccactctctccatgctttataccacactgcagagcccactcccctattctctccctgctttataccacactgcagtccccactccccactctccccatgctttataccacactgtggtgcccgctcccccattctctccctgctttatcaccacactcagtgcccactcgtcctgtgtgtgccacacacttacctttcagctctcagtcctcgtcctggggtgccctgcccttgctcaggggcctagtggctctgctctacctttagaaggctctaagccgagtgacttccccatgctcccactgg

SEQ ID NO: 25908 - DNA, 460 bp, Homo sapiens
  misc_feature (1)...(460): n = A,T,C or G
gtgcgctnccnccaatgaganccatgaggatctgnggaaanncgccnnctaaangnngcccaagctgatctcaaactcgtggctcaactgattctcccgcttcaaccttgagtagctgggacgacagatacatgctactgcgcccagctaggttaaggttctgtatactctgtctttctaaagcaattccctggaaattttctcaacgttggttataactgaatgcttgggaagggaggggcagcccttcaacaggaaaaggggactgcccaaatcttaaatgcacagtcgagattctcttggagctagcaatggttctcaggttagtgagcatttagcttgcctgctgcagaatttgacccagatgggggtgtttttcaggtctctcacaaatgagacaagcgaaacaattgtctccttttattctctttggtgcattggtgctggggaaacatgaact

SEQ ID NO: 25909 - DNA, 457 bp, Homo sapiens
  misc_feature (1)...(457): n = A,T,C or G
cattgacgaccattatagagngcggtggaattcgctgggtctgcctggagaccagtgggcccagggggaagggggaagctgagaagttcgtgtgacaccctcagccaagggacagtgccatccttggggacaggaggaaaagcagcctgtctctgctaagggcaaatcctccggttttggaagcgcccctcccacctttgtagtgcagttcctaggtgtggtggggaatgtgccgtgctctcagcagacagaactgctggtgtgaaaggcagggattgtcagcccacctgaggctgggaggaagcaggaccaggcctaggatctccccagcagatgcaaacaagtgtcctcccctgaattgtgtgaaccaaagcgtcaggggcttggggcacagccccagtcagctcaacccagtcctgcttcagagccaagactaggccagggtggngaccccccn

SEQ ID NO: 25910 - DNA, 556 bp, Homo sapiens
  misc_feature (1)...(556): n = A,T,C or G
cggccaccaaattgagcactgcattgangggcaatccgcanaggcagaggagctggngagaagacagcgaaatggcgcctccggcccccggcccggcctccggcggtttcggagaggtttacgagctgttcgacgtaaagaacgccttctacatcggcagctaccagcagtgcataaacgaggcgcagcgggtgaagctatcaagcccagagagagacgtggagagggacgtcttcctgtatagagcgtacctggcgcagggacagcatcgtggccgagctggaccgagagatgagcaggagcgtggacgtgaccaacaccaccttcctgctcatggccgcctccatctatctccacgaccagaacccggatgccgccctgcgtgcgctgcaccagggggacagcctggagtgcacagccatgacagtgcagatcctgctgaagctggaccgcctggacctcgcccggaaggagctgaagagaatgcaggacctggacgaggatgccaccctcacccagctcgccactgcctgggtcagcctggccacgggtggtg

SEQ ID NO: 25911 - DNA, 463 bp, Homo sapiens
  misc_feature (1)...(463): n = A,T,C or G
gcgctcannnaaaactgagnccctacgtacatgcgaaggaacnccgggaaggacggacggagagtggatcctccaggtggtgggaaaagcttaacagcctgttgccttttaccctgcgatgggagagggggcagcccccatagaagcacgggcttatgggacccgggttccttcagtgctcacccacgaagaagggctcccaaacggccccactcgacggctcaccggaggatggtcctgcgcagtgggtgtttgttgaacagataagagacaacaaaacagactaagaagaggcctgttctatgaaccggggaaagtgaaggaatcacaaagagcggctcgccttatggcaatcctggggaaaagatggagaggcatggatttttcttggatgtgtgcctcatcctggggctcatccctctgagcatcaaatattcattgcaaaagaggggaaaaactctgg

SEQ ID NO: 25912 - DNA, 461 bp, Homo sapiens
  misc_feature (1)...(461): n = A,T,C or G
nactagatgaccnctcgaacaccgtggnggaattcctggaatcttttgcctctcccagccacctcctcccagccccccaagagagctgggcacatgtcccaagcctgtcagtggccctccctggtgcactgtccccgaaacccctgcttgggaagggaagctgtcgggtgggctaggactgacccttgtggtgtttttttgggtggtggctggaaacagcccctctcccacgtggcagaggctcagcctggctcccttccctggagcggcagggcgtgacggccacagggtctgcccgctgcacgttctgccaaggtggtggtggcgggcgggtaggggtgtgggggccagcttcctcctgtctctttcctttcaccctagcctgactggaagcagaaaatgaccaaatcagtattttttttaatgaaatattattgctggaggcgtcccaagcaagcctg

SEQ ID NO: 25913 - DNA, 562 bp, Homo sapiens
  misc_feature (1)...(562): n = A,T,C or G
catcgacnatcgaatcactagtccagcgaggngcaannccctttgtcgncattgatgccatgctggacatgatgcatacagaacggaaggtggacgtgtatggttttgtgttccggatccgggcacagcgctgccagatggtgcaaaccgatatgcagtatgtcttcatataccaagcccttctggagcattatctctatggagatacagaactggaagtgacctctctagaaacccacctgcagaaaatttacaacaaaatcccagggaccagcaacaatggattagaggaggagtttaagaagttaacatcaatcaaaatccagaatgacaagatgcggactggaaaccttccagccaacatgaagaagaaccgtgttttacagatcattccatatgaattcaacagagtgatcattccagttaagcggggcgaagagaatacagactatgtgaacgcatcctttattgatggctaccggcagaaagactcctatatcgccagccagggccctcttctccacacaattgaggacttctggcgaatgatnctggagtggaa

SEQ ID NO: 25914 - DNA, 461 bp, Homo sapiens
  misc_feature (1)...(461): n = A,T,C or G
ncctagaatgaccttagatacaccgcggnggaattcctgaagaanaggggacagccagagcgggggccagctgtcccagtgggggtcatgtagccgatatttatcttgcaaacatcaacaagtaagctctgcttttcattttctgctcccctgaatgacttgcaacacccagcctcaccctctggcctaacccccatctccattcctgtgctgcacgtagggctcccagctcccccagcctaacagtttgcatgtggtcattgctgctgcaaggcggacagggctgaggatgctgctacaagcctcggggcaggtccaggtctccagctagctgccctcgtgctgaggaagggtgctttactgtgtgttcccgcagtgtctgtccacccagacctttgtggcagtcttacagctaatactttgaccaaagctttggtcactctatgcaacctggntgtgtc

SEQ ID NO: 25915 - DNA, 457 bp, Homo sapiens
  misc_feature (1)...(457): n = A,T,C or G
natagatgaccatctgnccattgaggngcaattcctaggactggaaacttgaaggttttctgatcccaagtggaaataggaagctggggatgtcccatgtccacatcacaatggctgccccatcccctgcttccgagtcagctgattggaaaccactagggggcagaatcttctccttccctgatgcccgggtgtttgtggagccggcggtctgcaatgggtcagcctaactgctgatatggtattaatatttctttcttgttttacagccaagaaagggaagggaaaggactagacgccaagcctggatgccaaggagcccctggtgtcacatggggcctggcccacgccctccctcttccaggcccgagatgtgacccaccagtgccttctgtctgctcgttagctttaatcaatcatgccctgccttgtccctctcactccccagccccacccn

SEQ ID NO: 25916 - DNA, 454 bp, Homo sapiens
  misc_feature (1)...(454): n = A,T,C or G
aggagttcccggagttccncccaactagtannctagnanatcctagcacagngcggnggaattccaggaatacagggtcatcctcattcctaagtaagtcaaacagcaagacatggtttgcgcgggtctttgccggaagccggtcctgctggccaggtgttttacgtcagcagggaaatgtggcacacgccctcgaggcattttaacactgcgcttcaggaaatctcaagttccatcttgtgttagtaacgtacccacattttgctggagttagtttattaaagatgcctacggtgaactctctggcgcaggttaaatgcagttttgaaaacctggaaacatcaaatggaggcgggaaataggctggggccgagctgaggggctgaacacagcagtgaccgtgggtcagcaggtcgcctgcccagcaggccccccaagagagggctcgggcgcc

SEQ ID NO: 25917 - DNA, 334 bp, Homo sapiens
  misc_feature (1)...(334): n = A,T,C or G
aactgatggcacctgatgacctttanacagngnggnggaattcttgggttttttaatgccagttctcagtacataagtgcattttgatagaggttcctgctatcacttgtaaccatatatatatacatatatattctatctacaaagtgtttatttgcgagatgtttcaacggtgagttcgggccccgcccgccttgtgaccatctgtccccggtcctcgtccccgccccgcgccctggtcccgagtggcgtggggacgggccatcactgtatgtattaaaatgactgtatcaaataaatgtttattgattttttaaaaaaaaaaaaaaaaaaa

SEQ ID NO: 25918 - DNA, 478 bp, Homo sapiens
  misc_feature (1)...(478): n = A,T,C or G
ggggctnnaaggaggcccccncttgannncactgagatcatcgtacagngcggnggaattcagcctcgggcgctgcctgtagtcatgctgacagctgtacagtagccgccaagactgctgacagctggagacggttctggtttcaactacggtatattgatatcggaagtattctagacagatcctcggttgggttttctagctacatgtttgtattgcacagatccccacctgccatcctatagtgttgtcttcctgtgtgttccggggcttctgggcagctgggcctgcccggggaagtccttgcaggtgggaggccatacagagacccactgtgtgccactgagcgtcccactgctgctgggcaactggaggactgcagggggcgccaggtgactctctccttttatatcacagcagctcctgtgctgaccttcaagttacgttttggaactgtaatactaaaggaagaaataaa

SEQ ID NO: 25919 - DNA, 442 bp, Homo sapiens
  misc_feature (1)...(442): n = A,T,C or G
actgatnacccctgatgacatctagaaagngnggnggaattcgctcagctggcaagggaagagcacctcaagtgagcatgtgtacaatttcagggctcacattgtgcacgcagcccctcccacatgctggcaggccacggcgcgcgtgacagcccaccccaagggaagaatcacaggagaagagacgcagaccccggaaccatgccaatgtataaaaacccaagtcaaaagtcaaactgtgcacttgaatcttccaagtcgcccacttgaccctcttccaagtgtactttacttccttttgttcctactctaaaactgtttaatcaactttcacttgtgctctaaaacttgcctcagcccctcactctgccttatgcccctcagacgagttatttcctttgaggagggaggaattgagttacttcaggcccggatggatcca

SEQ ID NO: 25920 - DNA, 549 bp, Homo sapiens
  misc_feature (1)...(549): n = A,T,C or G
gttgtctgtacacacgtagtctatatatctttcgccagtctggtgcaactttcgattcttgtctctctttcctcccnacacagagaaccannnnnnnnnnnatgtttgtcgtacattagaccgngcgaaggaagncggcacaccagaggaaacaagaatgtctggacagnccgcgcctatccatagctaaatgtaggacttctccagggaactgcaactccgaagaagcaatgcgagggaaggtggcggtcactattttttccccgtctgcacctctaggtccaatattggaaataggggctgacgtttaaataacacagcgtcctcatactaaatctgggggggaactggtaactcgaaaaccaaatactcggtcttccgaaagaactaactcaacctacccttctacaagagggtccgaaaaccactggtacgcccattgggtagccccgcccttggggggggcaaagggcgtgaaagcggaagtgacgacacccggcgcttcattaaatagccgtagacggaacttcgcctttctctcggccttag

SEQ ID NO: 25921 - DNA, 448 bp, Homo sapiens
  misc_feature (1)...(448): n = A,T,C or G
attgatggcattcgtccgngcggnggaattcctcggttgttgtaggaggttgggtgttttcaaatggtaaagatgttttgagcaaataaatttgcttgatacagaaaccaggccgactaacaaggtttccagcaggtggccttgcctcaccccaagcacacgaggtcagcctggcaggtgtgccctcctcgagctggcttcaggggtcagtgtctccccaggccctcgccctgccctcccacttcgtgctcctgggtaaggcgtgagcgtgtctgtctcttcccttcccgtgagggtgtggagttgttctctggcttgtgcagctgtggtttgcggccagttcctcttacagacgtttgggatctggctctacttccccgtttgcttactgtctgatttcagaaggcctcgcctgcccaagtttaacctagccacgtggttctctcan

SEQ ID NO: 25922 - DNA, 540 bp, Homo sapiens
  misc_feature (1)...(540): n = A,T,C or G
nggagcccttgcaggcggtggaattccttccacgccatgttccagcccttccttgagatgatacacgaggctcagcaggccatggacatccacttccacagcccggccttccagcacccgccaacagaattcatacgagaaggcgacgatgaccggactgtgtgccgggagatccgccacaactccacgggctgcctgcggatgaaggaccagtgtgacaagtgccgggagatcttgtctgtggactgttccaccaacaacccctcccaggctaagctgcggcgggagctcgacgaatccctccaggtcgctgagaggttgaccaggaaatacaacgagctgctaaagtcctaccagtggaagatgctcaacacctcctccttgctggagcagctgaacgagcagtttaactgggtgtcccggctggcaaacctcacgcaaggcgaagaccagtactatctgcgggtcaccacggtggcttcccacacttctgactcggacgtttctttcgtgtcactgaggtgtcaggagctctttgat

SEQ ID NO: 25923 - DNA, 432 bp, Homo sapiens
  misc_feature (1)...(432): n = A,T,C or G
actgatgacaatgagaccctngggaaanccgagnctgaactattttaaatgagtcaggaaaaatcacattcatatatatagcaaatggtcaaatattagcagctgttgaatctgggtggaagaatatgcaaagttttttgactgttggttttgggtttttggaaattatttttggtcagattaattaggtataatttacaaagtaaaatgtacccatttaattgtaaagttttatgaattttgacaaacacatgcaattgtataactaccatcataatcaacacatagaacagtttatcatccctagaattctcccttgcccctttgtagtcatcccctcacccgaccccctaccccttgtaccactgatctatgcaacatttctatagttttgcctttcccagaatgtcatacaaatggaagcacatagta

SEQ ID NO: 25924 - DNA, 543 bp, Homo sapiens
  misc_feature (1)...(543): n = A,T,C or G
aggatcgcatgagactatcnagagnnggtttatgggaaacagaccggcccgccatgttcttctccgcggcgctccgggcccgggcggctggtttcaccgcccactggggaagacatgtaaggaatttgcataagacagctatgcaaaatggagctggaggagctttatttgtgcacagagatactcctgagaataaccctgatactccatttgatttcacaccagaaaactataagaggatagaggcaattgtaaaaaactatccagaaggccataaagcagcagctgttcttccagtcctggatttagcccaaaggcagaatgggtggttgcccatctctgctatgaacaaggttgcagaagttttacaagtacctccaatgagagtatatgaagtagcaactttttatacaatgtataatcgaaagccagttggaaagtatcacattcaggtctgcactactacaccctgcatgcttcgaaactctgacagcatactggaggccattcagaaaaagcttggaatanagggtggggagactn

SEQ ID NO: 25925 - DNA, 460 bp, Homo sapiens
  misc_feature (1)...(460): n = A,T,C or G
agggccggggggcccgccctgatnntcattgangcccctcgcaccgncnggnggaattcggngggttggggtggaggaaccaggagagggctggagggagggagatggtctcagccccacagagtttggagtcctcagtgtgctgagcaaacgtggagacaccatttccctcctctagacctcatcttggagagagagatgttggatggggccatctattccagctttattcacacaaatcatgtctgttggcctggaaattggaaaaccagttaaaccaaaaacatgatattaagaaaacaggcaggctcaccatagtaaaaatgctgaaagccaaagacaaaattgggagaacaaaagaaaagcgtcttgtcacatacagaaggtccctgataaagttagtagctgccctcatcagaaaccaggcccaggcagtggggacacatccagagtgctgaan

SEQ ID NO: 25926 - DNA, 547 bp, Homo sapiens
  misc_feature (1)...(547): n = A,T,C or G
ngggatgcactgtgagagcgagcgaattcggtttantcgttcagtagctgctgactcancagcctctgttccccgggaagtcagaaatcgatcagatctacaaggtgtttaaggatctggggacccctagtgagaaaatctggcccggctacagcgagctcccagcagtcaagaagatgaccttcagcgagcacccctacaacaacctccgcaagcgcttcggggctctgctctcagaccagggcttcgacctcatgaacaagttcctgacctacttccccgggaggaggatcagcgctgaggacggcctcaagcatgagtatttccgcgagacccccctccccatcgacccctccatgttccccacgtggcccgccaagagcgagcagcagcgtgtgaagcggtgcaccagcccgaggccccctgagggaggcctgggctacagccagctgggtgacgacgacctgaaggagacgggcttccaccttaccaccacgaaccaaggggcctctgccgcgggccccggcttcagcctcaagttctgaag

SEQ ID NO: 25927 - DNA, 549 bp, Homo sapiens
  misc_feature (1)...(549): n = A,T,C or G
agcggttnnaaatgatcactctccgagnngcgcaannctatnnggccacaaaataatgcaagtacctagtgcctaataataaaggtagtccataaatattccctacacgaatggttcttatcatgcctctggaatccctcctggcttcatcactgggctgaacccaccggaccctagtttggcttatttcttgccaaggccagtgctcctgattctttcttcactggtcttgatgctttccttctctccttgacctcaaggcctatcaagcagctggaagcctctccctcaggccccatcccagcaccaggcccctgcctccacctcccacttctcccttcccgtctctcttccccctctttccagccttacctctangtggctccccatgccccctggcagggcaaaacacactcagctntntcccacttcagcacctctgcacagacttccttcagccagagtggcagagacagagaagcatgtccaggatttgaccagactgcctggtccagttctgactgggcctgtacttaggcctagtttagg

SEQ ID NO: 25928 - DNA, 567 bp, Homo sapiens
  misc_feature (1)...(567): n = A,T,C or G
ccttcgacattcgaatcactagtccgcgnggngcgaattccccaggcagcacgcagaggccgggtctgcaccgagccctgacactgacaggctgtgtgacgacgactgacaactaaccctctctggttttactttctatcacctcttaggcagagcagtgggcgcagatgccatggcgggaagcaggcctttctgaattcttagcagcgatctccaggggcactctaaccttgcaagaaagaggctgccagtcttgcatcagatgcagaaaccagggcgcagagtaggtgagtaatctgcttagagccacacagctgtgagtagcagatccaagtgcaacctgcctgtcccaggagcttgcgggctagctagacctttgctgcctagaagaccctcttgtgagtcccctccctgggctcagcaacccgggagggcatgacttctggctgggtcttagggctggagccttggtgtcctcttgtcttctttccttgtgtgacttggntttccagtctgtgaaatggcgggggtgcatncaactccaagcctgtctctgccctgtgtccg

SEQ ID NO: 25929 - DNA, 450 bp, Homo sapiens
  misc_feature (1)...(450): n = A,T,C or G
nctgtagactgaggacncttcnggcagactggngaaatcccccacgggcaggagaggggcctctgggtgagagctgggggcgcctctgcaggttactggcagccttgccacactgtcctcattcccagatggaaagacctgagtgcctctcgccttcctccgggaatgaattcctcatgaaaatgaccaggccacttcttccgagggccaggccgccccctccccgagacctgtcctgccgttcgcgggtgtgcggcctgtaggggactgaaagctgggcttgctgggcacctctggaatctgaccctgtgggccaaagaagcaccactgtagtttctgcagacccccatgcggttcattgtgcattgtttggtttctaggatgtatgtgttgctagttttttttaatgaaaccctggattaatgtaaatagctttttggggaacggatt

SEQ ID NO: 25930 - DNA, 481 bp, Homo sapiens
  misc_feature (1)...(481): n = A,T,C or G
agcccnaaggggcaggcagggccngcnnnaattgaaaactgagaaccttcgacagngcggnggaattctgcacctgtcttcaggctgccaggggaggaggagaagccagcaggcaccacttttctgctccctttctccagaggcagaacacatgttttcagagaagctgctgctaaggaccttctagactgctcacagggccttaacttcatgttgccttcttttctatccctttgggccctgggagaaggaagccatttgcagtgctggtgtgtcctgctccctccccacattccccatgctcaaggcccagccttctgtagatgcgcaagtggatgttgatggtagtacaaaaagcaggggcccagccccagctgttggctacatgagtatttagaggaagtaaggtagcaggcagtccagccctgatgtggagacacatgggattttggaaatcagcttctggaggaatgcatgtcac

SEQ ID NO: 25931 - DNA, 527 bp, Homo sapiens
aggaggcttgatcactatccaggtgggaattcccagacagggctggatgctggcctgcaggagctcatctatctgcagaggcttgaggtgctgggctgcaccctgtctgccgacagcaccctgctggccatcagccgccacctccgagatgtgcgcaagatccggctgaccgtgaggggcctctctgcccctggcctggctgtgctggagggaatgccggccctggagagtctgtgcctgcagggtcccctcgtcaccccagaaatgccctcccccactgaaatcctctcctcctgcctcactatgcccaagctcagagtccttgagctgcaggggctggggtgggagggtcaagaggcggagaagatcctgtgtaaggggctgccccactgtatggtcatcgtcagggcttgccccaaagagtctatggactggtggatgtaactactccacctgcccttgggaccatgccagtttcatcattgacccagacctctgagcacacttgagaagcagatatcgacttg

SEQ ID NO: 25932 - DNA, 481 bp, Homo sapiens
  misc_feature (1)...(481): n = A,T,C or G
nactcgatgaccctagnccagngcggnggaattcggcttgaaagttgtggggtttgatcccgagaacagtggagatcactggaggggtgtggcatgatgcagttttcagtctcagacatgtacctgcttggttggaggaggcctggaggggtcaaagttagaaccagagcctcctgtgaggaggctcccacagttgtctgagacagtggtggcctggaccttgggcagtgacagagaagggagagaagtgggcatatttgtagtatctgagggaaatatacatctaagacaattgggaacatggggtagaggcagggtgggcgtaggaaatctgggcatcatctgtgcacaatagatgagggaggggagagtgattaagacaggacagaagcctgacatccagggcggggtgggaggtcagggagaggactctgggctccatcccaggagctgagagaaagggtggaaggtgagccccccn

SEQ ID NO: 25933 - DNA, 454 bp, Homo sapiens
  misc_feature (1)...(454): n = A,T,C or G
catagagaccctaggatgagcgccgtaattccangagctcattaacttgatttaaaaagattgtcccagcttggccttctgttattagttattggtatttgctaactgttcattcattcatctgtcaaatactaaatggttactctgtacagattaatgacctatatactgcaaggactacaagtatgaccctttccttaaagttcttacagtccacaggctaattttcttgtgttctcttgttcatctattattttttattccccttgactttgcggcctggtaatatgtcgacctgtcatattaatactttgcattccttatttctataagcctaccagatgtgatccttattagataaataactccatttgtaaatttcaatgtgagatcaactcttttgaactctacaagttatttttgctttgcttttgcctctgtctagagatcttac

SEQ ID NO: 25934 - DNA, 479 bp, Homo sapiens
  misc_feature (1)...(479): n = A,T,C or G
natcgagaccctcgagaccgtcgnggaangcgnggaattacgagctgccgggtaccacggctttctttgtctttatcgagagatgaaggtgacgcttttgtttcttctaccataactgaagaaatttcgctgcaagtctcttgactggctgtttctccgacttagcctttttgtcaaacctgagtctttttacctcatgcccctcagcttccacagcatcttcatctggatgtttatttctcaaagggctcactgaggaaacttctgattcagatgtcgaagagtcactgtgagttttctcttcattttgctgcaaatttgcctctttgctgtctgtgctctcaggccacccatttgttgtcatgggggctgacagagaaacctttggtcgattacgtggcctgggtgtcccaggcccatttatattagacctctcagtatagcttggtgcatttccaggaaacatcacaccattcatg

SEQ ID NO: 25935 - DNA, 466 bp, Homo sapiens
  misc_feature (1)...(466): n = A,T,C or G
aatagagattcgatnnncgtgnggaggaattcctctggagccggaagccataggctgccccacgcttgctactgttcatgtagttgccaaaggccaggacaatctgggagaggcaggagaaaggctcagcagaatgccagagctgaggacaccgcttaagcatattgcacaaggaggagaagaggtggcaaggagcaggccccacacactcagcccctactgtactcctgcacaggcccctcagatccacagcacatgtacatgtgtgtacacacaggtctcacacatgtgcacggttaacaccatgggcacaccaaattttgtcctctgctagtccaacccacaacttgttgccagcatcccctcctagtctgtgtggtcactgcctgtccaccagccatttctactggttcccgggccctccactgagcaggtgaggttgctcacagagcaacgctaaagggga

SEQ ID NO: 25936 - DNA, 543 bp, Homo sapiens
  misc_feature (1)...(543): n = A,T,C or G
agggagacatggaggcgtgtaattcctggaatgcagnggcacgatcttggcccactgcaagctccgcctcccaagttcacgccattctcccgcctcgggagctgggacaacaggtgcccgccaccacgctcggctaattttttgtatttttagtacagacggagtttcaccgtgttggccaggatggtctcgatctcctgacctcgtgatgcacctgccttgacctcccaaagtgctgggattacaggcgtgagccactgcgcccggccaataatttttttagtttaagttcatttttgtccccgctgatgaaagttagagctgcttactacatgcagccctgggagtaggggcacagacttgtgcctcgctatccagcagctgtccagtgcctctgtccacacccacctgcctggtgtacttgccccctacagcagcagcccagatcctcccctggattaaaattgcaactggtgccctatacccaaacttgagaaaaaattctctatcacatacactcttctggcattagagaatctctgg

SEQ ID NO: 25937 - DNA, 470 bp, Homo sapiens
  misc_feature (1)...(470): n = A,T,C or G
natgggacctgagaacgctcggaggccngagattacgacctacgcaatccgggcctgagaacactagcctaagctctagcagtccccagttgtggggattccttctgccttctacctacccccgagcatctcttgttcgaggtgctgcagaacccagattttactatcagagtctctgccaggtccatgaatgtatgtgaattctttctgctgcactgctgagagcagtccctgggcctggactttgacaagcagatagtggctttaattgaatccagatatccatcttgtctgtctgtggaggtatttttcccagctccccctccctacccctgatcagctgcccgctgagtatctgacagccttaagctttgagcccagcatggtggccaagccttggcgtgttggattccagcttaaggacctggcatccatcttcagactccctgttccctaagccaggcagacct

SEQ ID NO: 25938 - DNA, 480 bp, Homo sapiens
  misc_feature (1)...(480): n = A,T,C or G
cgcccccccagnnnnntttcgagattcgtatnccgtgtggaggaattcgttacgctcagagcacgagggaaggaggtcaagcgacccaactcgtctgtttcacagatatggaacctcagattcagagacagggtttgacttgtccaaaatgatcaagatagttaagatagagcccaaactggaacccacggtttttgacttccagtccatcgcagtttcacctcgcggctgtcattgagaaataaaaccttttcccggtttttttgttttgtttttgaggagtctcgctctgtcgccaggctggagtgcagtggagcgatctctgttcactgcaacctccgcctcccggcatcaagcgattctcctgcctcagcctcccgcgcggctgggactacaggcgcgcgccaccacgcccagctaatttttgtagttttagtagagacggagtttcaccatgttggccgggatggtcttgatctc

SEQ ID NO: 25939 - DNA, 485 bp, Homo sapiens
  misc_feature (1)...(485): n = A,T,C or G
cgcccgccccagncnccnttagaaaatcgataacactatgcagagacgaggaattcgcaagactccgtctcaagaaaaaaaggaaagaaaaaagaaaactccaatgtcctctcctattgcagccctaggaagatgcaggattagaggccttcccccctttctaaaggctccccctggggtccaaggagggtctgtcggggttgctcaaaggcggccttatggagcaggggtatggtgtgtgaatggggttgctgcttaccaaaagtcttattctcaggcagaaaatagggtgcattgtcattcacgtcctcaatggtaatgaggaggcttcctaggagacaaggtcagctggctttggctctgggcaaaagcttgacccaaagagcctgggcctcaaccctgtgccccacagcctcaaccccatgccccgcagcctcaaccccgtgccccgcagcctcaaccctgtgccccgcagcctcaacccn

SEQ ID NO: 25940 - DNA, 460 bp, Homo sapiens
atttgaaaccctgatgacattaggacagagcggaggaattcaggtggtcaaacatgtataggattggtatcacttatctaccaaccatgagaaagcttggaaggaaaatggggggaaaacaggaaaggagagggaaaaggtacgtgcaaattgggctctaagggatgagagacgagctgaaggttgataatacagacaaaccatttcttccaccagccttgttccttcattcaggaaatggtcaaagaatcaaaaaaccatgtcgatcccagtgagtgtctgatgcattcatgccgagctgctgtgaatgttggttgctaacagtacagctgttcccttctccataaaattgccccatgtcagaggaagccactttaactcaatggtgcatcactcactcctcaggaaagcccacagctaatgccgaatacttatgtaggcattaaaaagccaacccact

SEQ ID NO: 25941 - DNA, 480 bp, Homo sapiens
  misc_feature (1)...(480): n = A,T,C or G
ntctgagaactgaggccgtgncgaggannaccgaaagggacagntacaaaccaggtcaccatcctcagaggctgagccctgtacccaccccagcacagccacctccgccagaccccgtggctctgggagagccagctttgctattcccattgtgacagcgatggcaggcctgacccacggggcagttagagcagcctcgaggagctcgcccctcccctcagcctgcccacctctccctgcatcctgaggccagtggcccccgggcctgcacagatacctcatcatccacccgctggccctccccgtccctgtcccccagcatcgggggcctgcaaatctagtgccgaatgactatgtccagattggggacgatgggtgttgctggttttcttggtcgttgtgaacgctgtgatgctgtgtgcccaagtgggcagtcaccacccaacccttccttgtgcgtctaccccagagtgctgtcgg

SEQ ID NO: 25942 - DNA, 487 bp, Homo sapiens
  misc_feature (1)...(487): n = A,T,C or G
cccccccgccccagcnnnnnttagagttttcgagtnccgtgtggaggaatcctagaacatcagctcctctccaggtctgcagctgcaagaacataaaagtagaacatcatctcctccctgggtctgcaactggaagatccactaactagaatatcagctcctgtccgggactccagctccatgaccctcagtcaagattatcagctcctccctgagtctccacctgaaagaccctcaatgcgaacaacatcagctcctccctgagtcttcagctgcacgaccctcaatctagaacatcagctcctccctgagtcttcagctgcaacaatctaaaactagaacatgagctcctccctgagtctccagctgaaagaccctcaacgtgaacatcagctcctccccgagtcctcaacagcgcgaccctcaaactacaacatcagctcctccccgagtcttcagctgcatgaccctcaatctagaacatcag

SEQ ID NO: 25943 - DNA, 502 bp, Homo sapiens
  misc_feature (1)...(502): n = A,T,C or G
gtagagcagagccnnnnnnaattgagaactgagtgtcntagcccagngncgnggaattcgctgacattgacatgaagacaatggagactgcagagaaactggctagatttgttgctcaggtgggaccagagatcgaacaattcagcatagaaaacagcaccgataaccctgacctgtggtttctacatgaccaaaatagttctgctttcaaattctatcgaaagaaagtgtttgaactatgtccatcaatttgtttcacgtcatctccgcacaaccttcacactggtggtggtgacaccacgggttctcaggagagccccgtggacctcatggaaggggaagcagagtttgaagacgagccccctccgcgggaggctgagctggagagcccagaggtgatgcctgaggaggaggacgaggacgatgaggatgggggagaggaggcccccgctcctggaggggcgggcaagtctgatggcagcacccctgccgacggccttcn

SEQ ID NO: 25944 - DNA, 459 bp, Homo sapiens
  misc_feature (1)...(459): n = A,T,C or G
nctggagaccatagaacaccgcggnggaattcgaggaggagccggacggcgtcccagagaagggcaagagctcgggccccagtgccaggaaaggcaaggggcagatcgagaagaggaagctgcgggagaagcggcgctccaccggcgtggtcaacatccctgccgcagagtgcttagatgagtacgaagatgatgaagcagggcagaaagagcggaaacgagaagatgcaattacacaacagaacactatgcagaatgaagctgtaaacttactagatccaggcagttcctatctgctacaggagccacctagaacagtttcaggcagatataaaagcacaaccagtgtctctgaagaagatgtctcaagtagatattctcgaacagatagaagtgggttccctagatataacagggatgcaaatgtttcaagtactctggtttcaagtagcacactgg

SEQ ID NO: 25945 - DNA, 418 bp, Homo sapiens
cggggggaaaaaaaagagagagggtaaaaaaagttcaatctgtttgctagggtgtagagaatatattacaggagcagagagaccggtaaggaggtggttctagttgttttttcgtccagcaaatatgtaccacattgggtgctcttggggatgcacgagtgataagaagagtctctgccctcctggcacccacactgtagtgtagaatacagtgctacggtggaccccttgtgggagaggagatggagagaagccagccgaaaggtgcgaggctcatggggagtgccaaggaatgagaatcaatgggactgatcaacacttcaacattattaagtgtatacagtgatctgaaagagatgaactgatgtggaaaccagactgctgtataaaagaaaatgatgactattccataatatgt

SEQ ID NO: 25946 - DNA, 461 bp, Homo sapiens
  misc_feature (1)...(461): n = A,T,C or G
gccgcccctgataccntcgncctgngaccntcgcanagngcggnggaantccccaggagctgcgaggacagacatgagccaccacgcccggtctgctccacttctattgcttcttgtgacaatgtaagagaaaggagatgacagagctttgcaacgggaggagggctatgtgttctggcgaccaattcactgtcttgtgtcgggacaggaagaagcccttcatacgggcagcaggctgggagccagggaggaggaaagatcacgatccactccctggtacatggcccttctgcaccccgcagtctccttccaggtgccacaacgagaaggcacacatccttggcacagcacttgaggcttttcaccactggctgcactcacccctccagactcactgccttgcaccaacccttttccgcccaccccactctatgctgtccacagcctccaccccagccacc

SEQ ID NO: 25947 - DNA, 589 bp, Homo sapiens
  misc_feature (1)...(589): n = A,T,C or G
ccgcatcgatcactgtcaagtggaagaactcctaggcccttggaagagcactagtcagaggcggnggtcttagaacccacagttctcctcctctggggaggtggtcgattgagtatataccttctggtgcctgtgggccccatcaaaagcccccggtgccatttgctacatgaggtcactgtactgagagtgacagagtaatatacaggagcagtttgggcagccagagagtctgggtgtaaactcagtttggatacagatacggaggtggaagagtgttctggcctcacggatgcctccagctgctagagccattgctggcctcttcttccagcggccatggagccctcccagcagtgctgtcgaagcaatcacactgcctcatcttgtgctcactctctccccttagacacatctgaccttcgggaaggagttcacagaagcggtggaagccaaacaggtggctcagcaggaagcagagagggccagatttgtggtggaanaggctgagcaacagaaaaaaggcggccatcatnctctgctganggcgactnccagggcagctgagctgatgccactcactggcacn

SEQ ID NO: 25948 - DNA, 459 bp, Homo sapiens
  misc_feature (1)...(459): n = A,T,C or G
nctggtagacatagaccacngcggnggaattccacagctggcacatccctcccaagcgttgatcttctccagaaactcaggttgaccccacagcatgaccaaatacagacacaaccacttgggaaaggtgcaatggtagccagcttttctccggcagctggtcagctagccacacctgagagcttcatagagcctccctctaagacagcagcagcaagagtggcggcctcagcctccctgagcaacatggtgcttgctccccttcaagtaatggcaggagggtgggggtgggcagagtgggtaactgtaactggatgggatgaaactacagagaccttggttttaactgtcatgacatgacaatttttagagttgtccctttaaagtatgtcagaggctcggagacaggtgaggtaagaagccctatcatgaacaaccaagtaatttatattttcctat

SEQ ID NO: 25949 - DNA, 486 bp, Homo sapiens
  misc_feature (1)...(486): n = A,T,C or G
ccccgcccgccccagccccnttagagnctcgataacntaggcagagagctggaattctataaactaaaagtctgaaaatagactgcagtaggtcagttactgaaaataaaacactgttgaaatgtggccaggcgctgtggctcacgcctgtaatcccagcactttgggaggctgaagtgagcggatctcttggggttaggagtttgagaccagactggccatcatggtgaaaccccgtctctactaaaaatacaaaaattagctgggcgtggtagtgcacgcctgtaattccagctacttgggaggctgaggcaggagaattgcttgaacccgggaggtggaggtggcagtgagccgagatcacgccactgcactccagcctgggcaacagaccaagactccatctcaaaaaaaaaaaaaaagggggcctaggaaaaaaggaaaaggggagtttgtgtataaagtaagtagggttaaaaaaatacc

SEQ ID NO: 25950 - DNA, 466 bp, Homo sapiens
  misc_feature (1)...(466): n = A,T,C or G
nttcgagattcgtatncagtgtggaggaattcgctgtgcgcggagccctctgctgggcggagggggagtgccagcccccaggagctaatccccggctgatggcgcagggcgcggggcttggccgtctagtgtgatgaaggaggcgacccccaaggtgggaaggcgcacgggttggggtttgagggtggatgattggtgacggagggtgtatcttcaggaggaggttcgagtgaagatcaaagacttgaatgaacacattgtttgctgcctatgcgccggctacttcgtggatgccaccaccatcacagagtgtcttcatacttgtgagtgccttggagactgcctagttcttccagtccctagtcttcaccaagctgactgccagcttctgtgcggcctgcctcacgcatccaggcaccccacccagcccatgaatccagtttccagagggcctgagaatctgctt

SEQ ID NO: 25951 - DNA, 458 bp, Homo sapiens
  misc_feature (1)...(458): n = A,T,C or G
ncttgagancctagaacaccgcggnggaattcatcgctcgctgtctgcccacagcgtgctggtgaatagccacttggagtgcaaggtggcccgtcttggccacagtcctcagggcccaagttgtttgcttcgctgggcagccccagaggtcattgcacatggaaagcatacaacatccagtgatgtctggagctttgggatactcatgtgggaagtgatgagttatggagaacggccttactgggacatgagtgagcaggaggtactaaatgcaatagagcaggagttccggctgcccccgcctccaggctgtcctcctggattacatctacttatgttggacacttggcagaaagaccgtgcccggcggcctcattttgaccagctggtggctgcatttgacaagatgatccgcaagccagataccctgcaggctggcggngacccatgggaaaggc

SEQ ID NO: 25952 - DNA, 457 bp, Homo sapiens
  misc_feature (1)...(457): n = A,T,C or G
catgaccccctggnatgacggcgatagcncagtacgggagagttcgccaaatggtaattttctgtttctgagattccatctgtacttattaattagaattctactgtaaggaagagcttctcatctctatttatttggatcagtatgaactcatggatatttgttttattctatggattataacccagtattatcatcacttattttgttgctcaaattgttccagatttgaccattggtagatctttaaagttgattcttgtgtcacttaaacattccctcatcacattttttgaatgttcatattttctggcatctcaagaagtttcatgcttattttgtattttctctgcccaatcctgaaatcagccatttctctaaggagccatgtttccttttaatggagaacggtgtttacaaaccaagatcttgaaggctggatgtgctcattgatact

SEQ ID NO: 25953 - DNA, 461 bp, Homo sapiens
  misc_feature (1)...(461): n = A,T,C or G
ccttcgactttcgatgaccttagtccangcggnggaattcggaaatgtggcattcggcaaagctggtcggagcctgcatggagacactgaggcccctgtcaactgtagctcctgtcctgggcccccgacggcatcaccctcgaggccggggcttcatctcctccagctccttttaagaacgaacttgatgaaaacacagactttacctacaagcccggcaggagctcatggtccacactcactcgctttggggctgacagccactttcccaggggagcctggggcctcccctcgactctcaccagggccttcgacccctccaggagcccccactctacctctagcttacccaggggctcctcagccacctcctgtgactccagagcgctcgttctcagcctctggggcccagatagtgtccaggtgggctcctctgcctggcaccctcctgacggaagctt

SEQ ID NO: 25954 - DNA, 581 bp, Homo sapiens
  misc_feature (1)...(581): n = A,T,C or G
cgacnntnnnnaggggtcnnnnagggnnnnnnngattgaanccccattcgatccactatccgtgtggtggaattctacaaaactcaacaaacaaacagaagatcgggctcggctccttcctccacccaatccttgtgggagaagtcgtcttaagcccagggaccctagcgagggtttgcttagattcctaactaaggcgtggagaatcgctggagcgccaggttgttgcccccacacgttcccgccgcggaacagcagcagacacccagcagagctctctcgagtgcgaactggagctgcgagtttgagcaaaagggcaactatgtcagttgacggaagccagaagcagagttcaaagcctggcgtggatttccgtctggagctgtctgttcttaaagtttgtaactccgtgttaagaaacagccccagcggaggctttgggatcggtgtgaaagtctagcactaccatctgacagcgagctgcaaaactttgggctgcatattaagcgaggaaagtggattgaagcgagagtcaaggcaattcattatgttacccggctcccatacgggagctgtanaan

SEQ ID NO: 25955 - DNA, 460 bp, Homo sapiens
  misc_feature (1)...(460): n = A,T,C or G
aattgcatctgatnagcatcggcacgngcggnggaanttcagcagagagcctggggaaggaaggatagacactgcctccctcctcttctcctgggggcatgggccagttaccccatccacaccgcctccccacctgccgccgtctcagctcgcctctcacctccagggacctgtgtcggcaggaccccgagtgtgagttctacttcagcctggacgccgacgctgtcctcaccaacctgcagaccctgcgtatcctcattgaggagaacaggtggcttaccccctctccccgcagccggagggcaccccaacaggccccgggaaccccactcctgccctgggcaccgggctccccaggcctgctcccgtctgcccagccctcacccccacctgtccacaggaaggtgatcgcccccatgctgtcccgccacggcaagctgtggtccaacttctggggcgg

SEQ ID NO: 25956 - DNA, 464 bp, Homo sapiens
  misc_feature (1)...(464): n = A,T,C or G
agaggannnnnnnnnnnngnnatcgtagaccactagtccagngttgtagaactccttgtgggagaaggtgctgcacttagctgcattcctaagaaactgattcttgcaagtttgtggaaacagatgattctttaacccacatgggccttgatctaagggtgccactttacttaaaagagggtgggatctggagctcctgttctaacaagccatgagaatgccaataaatgtttgtaataaagcttttatttaaacatccattttgttcgaccttgaagctttactaatatgctgaagaacaaacagccgacgccagtgaatattcgggcttcgatgcagcaacaacagcagctagccagtgccagaaacagaagactggcccagcagatggagaatagaccctctgtccaggcagcattaaaacttaagcagagcttaaagcagcgcctgggtaagagtaacat

SEQ ID NO: 25957 - DNA, 453 bp, Homo sapiens
  misc_feature (1)...(453): n = A,T,C or G
attgatgacatctagaccangccggttgattcgcgtcctgcctgcccagcctccatgccccccaccaaggacaaccttgtccccagctaccctgcaggctcccccagcgtggcggctgcctgtagccaggcagagtgcatgggcgggagccaggctatcacctcaccactgcctgccaacacgccatccccgtccttcagcaagctgccgccttccaaggccagcaagtcatccaaaggcaaggacggggtggaggtggaggccccttctcgaaagcggaagttatcccctggccctaccactcttaaacggacctgcatcctggagcccactggaaaagggaaaccctctggctgtaggggcctctcggccaaaactaaaacagccctgagcatggggcttaatgggacaatggggccaagagtgaagcgggcagggcccctggactgtcgn

SEQ ID NO: 25958 - DNA, 458 bp, Homo sapiens
  misc_feature (1)...(458): n = A,T,C or G
aattgaatccgtgagctatcgcacgngccgcggaantttgcagggctgggtcagacccctctgtccccaccagtgcccttgaggttatgggtgtttgtaggtctgtggcctccatttccatgacgatggtgttaaggactgcatgtttgtgtccccccccaaagtttatatgttgaaaccctgacccccaggagggtggtattaggaggtggggcctttgggaggtgactaggcttaggtgagatcgtgagggtggggctcgccgatgagatcgagtccttataagaaaaggaaggaactagagcgaggtcactttgtgctgtgtgagcatacaagaaaactgccatcttcaagctgggtgcagtggctcacgcctgtaatcccagcactggaaggccaaggcattaggattgcatgagtccaggagttcgagaccagcctaggcatgataagacctt

SEQ ID NO: 25959 - DNA, 447 bp, Homo sapiens
  misc_feature (1)...(447): n = A,T,C or G
nttgagacattgaccaggcggttgatgccctagggttatcgaagacttacatatctttaaatgtgtgagtacacaatggtcgatgatcctgcaattctcatttataaaaagatggcagtcgtatccaactcccgagacggcgaacccgcaccatttccatgcgcgctctgtgcacaaggctggcctcacgttggccagcgactccctcccggcgagtcagttctcaacttgcttcagcagaggtgcatatggtagggagtggcccaacctttgggatggccagagatcatcagacctgtgggtccatgtgccgtttgctgtcataagttcctgtcataactccctgtgcgcccattttgttggatgtgttcacactgtattttagttgccaatgactatatttcagtgtgtctgcatagagggctgtgctctgtatttcagcatgtn

SEQ ID NO: 25960 - DNA, 460 bp, Homo sapiens
  misc_feature (1)...(460): n = A,T,C or G
aattgatncctgaggcatccgcaanggccnntnncnnatagnnatgtcctctttaactatagatggtggtgatgaataatataaatggctctccttatgagccttgaaaatgactatggtttctctgcagtgtgagagcgacatgtgcagcacctgggcaggcgtgaggggtggacttactttgtggaacacatgggagcatgaaagcagcacctgttcatgaggaaacagaacgacgttgaagtttacaaaagagaagcagcatgtatccaacagttaaaatcctgaatgcttagaaggtaagctgtattatttctttaaaaaagcaaattaataactttgatatttatactatttattgtttgtttagcacagcacaagtatatactctaaataacaaaaattcatgatctgaaatatcaaataaacacatgaagtttgatatttaactattaaaatg

SEQ ID NO: 25961 - DNA, 458 bp, Homo sapiens
  misc_feature (1)...(458): n = A,T,C or G
catggatnactttacgactcgcacgngcgcggaantttaagaaacagctccactgtctttaatataaacttgaaggccttactcttgaataacatttaccaaagcagctggacagctttgaaggggaggtagtggaatgtgcaagatttagccggcgcttatgctggctggacttcacatacccatatatactctgtgttactcatttaagtgcgcttttgtatacagttgccaccatcaacattggcccttattactgaaatctgtcagcctcatttaaatttttgcaaatgtgatttgggagatgtaaatataaaagtgagcagctctgtgcagatacatttttgtgtgaggcacaagtgcatgactggtgtcacatgcagagggtgaaggctttaggagttacggaacatcacaagccttcttcacagtgactgtctgtctcatgtgactaccat

SEQ ID NO: 25962 - DNA, 448 bp, Homo sapiens
  misc_feature (1)...(448): n = A,T,C or G
ctcgatttggtgcatcgcangacnntnagatttatccccggccgcgcaggagggggtgccctattttctgggttttgacttttgtttcttcccccaactccgctacagccaagcggaggcttccgtgcaggaagagaagctgtcaggtgggtgattgtctgggaacccgacacgtcccgtcgtttgtttttggttttagtatcttccccatataccaagagcacaggtggaaaaggccggcaccacatggaatgagggcaagcgctgtgccgggaagttggatgggcagagcctgggagaaatgttttctgaatggcctggggctggcatttatctttcctttcagcaagcacctcaaatttgccatgctggctggtggaagagtttgtggtagcagaagagtgctctccatgctctaatttccggctgtgagtatctatttctctan

SEQ ID NO: 25963 - DNA, 569 bp, Homo sapiens
  misc_feature (1)...(569): n = A,T,C or G
gatgcgaatcgatactatcaggggggaatccttgcccccatatttgaacgaatgtgtgtcccttgagcccaaggagagcggcaggaggggtgggaccaggctgggaggacagagccagcagctgccatgccctcctgctccccccaccccagccctagccctttagcctttcaccctgtgctctggaaaggctaccaaatactggccaaggtcaggaggagcaaaaatgagccagcaccagcgccttggctttgtgttagcatttcctcctgaagtgttctgttggcaataaaatgcactttgactgtttgttgtcaaannaaaaaaaaaaaaaaaaaaaaaaaaaaaaaaaaaaaaaaaaaaannngggcccccccctttaattaaaggggcccttaaaaaccccggtaaacccccctggggttctttttaaagcccccccctttttgtggtcccccccccccgggtttttttttgggggggggggggcccccccccctgcctttttataaaaaaaaaggaaaaacccccccctttggggggagaggggtcttttttttttgtnnncn

SEQ ID NO: 25964 - DNA, 468 bp, Homo sapiens
  misc_feature (1)...(468): n = A,T,C or G
gagggtgcccaaatgagacctttgttagagcgctgtaattataaaaggagaaaatggaaaaaatgctagggatccccggctttcaaagagagaagaatctattgcaaagattgggaaaaaaaaatatcagaaaattaatttggacgaagcagaggagttttttgagcttatttccaaagctcagagcaacagagcagatgaccaacgtgggctgctaaggaaggaagacctggtgttgccagagttcctccgtttacctcctggttccacagaactcaccctccccactccagctgctgtggccaagggctttagcaagagaagcgccacaggcaacggccgggagagcgcctcccagcctggcgagcagtgggagccagtccaggagagcagcgacagcccgtccaccagcccgggctcagcctccagcccccctggacctcctgggacgaccccccctgggcagan

SEQ ID NO: 25965 - DNA, 460 bp, Homo sapiens
  misc_feature (1)...(460): n = A,T,C or G
attgatgccctngnnnnnncnngattgacgacctttataccgtgtggtggaattcgatttattccattgtgtggaagagcttccacagaaatgactctttggatttttcaggaaatgtttcaagccttcttattcagacaccctttcagcgtccagtgatggacgaagctgtgccctagagtcccaccttcccaaacagtgggcaacttgctttctccagcctcctgtccccttccgagcacccttcacccctcccatccccaggagtcgctgaataggtcccatgggagagaaatgacagcttgaagtgatgacccatcccaccccatcaaatgttggcattttactctggcctccaaaggcatggggggatgacccatggcaggaatacaggccttacagagaggttcactccaaccaaaccatgctgctcccccagtggcccaccatgaaaacctct

SEQ ID NO: 25966 - DNA, 468 bp, Homo sapiens
gaggggcccccattgacgacactagatagagcgccgtaattcagccaagactcgcggctacgagcacgtcgacatccagaacttctcctccagctggagtgatgggatggccttctgtgccctggtgcacaacttcttccctgaggccttcgactatgggcagcttagccctcagaaccgacgccagaacttcgaggtggccttctcatctgcggagacccatgcggactgcccgcagctcctggatacagaggacatggtgcggcttcgagagcctgactggaagtgcgtgtacacgtacatccaggaattctaccgctgtctggtccagaaggggctggtaaaaaccaaaaagtcctaacccctgctcggcgccccacggatgctggtggactgtgtgcccctggtggaggcggacgacatgatgatcatgggcaagaagcctgaccccaagtgtgtcttcaccta

SEQ ID NO: 25967 - DNA, 466 bp, Homo sapiens
  misc_feature (1)...(466): n = A,T,C or G
ggcgaaaaanttttgagacatctgatttgatgtcgttagaccaagcggnggaattcatcgaccccaagatgccccgtgtgcctggccaccacaacggtgttaccatcccggccccacccctggacgtgctgaggattgtggagcacatgcacaccaagtctgatgagaagctgttcctcgctctcctttttgataataagagaagttggcaggggctacctaagtccaaaatggttccccttggtattgacgaaactatagacaagttaaagatgatggaagggaggaattccagcatccggaaggccgtgcggatcgcttttgaccgcgccatgaaccacctgagccgcgtccacggggagccgaccagcgacctcagtgacattgactgacggcccggccgccagcgcgggtcttgtacatagcgttgataagctgtacatgtttgtatattgctcagaactta

SEQ ID NO: 25968 - DNA, 476 bp, Homo sapiens
  misc_feature (1)...(476): n = A,T,C or G
gagagggtncctttcgagcaccatctagttagagcactatctagtccagtgtcaattcagtttagttcgtagtgtcatttgaatctcctgtatacctttttctttttgtctacttgttgtattactgagaacagcatgttaaaatctccagctattattgtagattttctatttttccctttggttttactagtttttgttcatatattttggcattctgttatcaaatgtggatatgtttgcaattgttgtctcttcctattgtattgagcaggaactatcctttttgtcttataatactcattctattgaagaatattttgtgtgctattaatacagctactacaggccatgtgcagtgtggctcgtgcctgtaatcccagccctttgagaagccaaggcaggaggattgcttgaggccaggagtttgagaccagcctgggcaacacagtgagactcccatctctaanaaaaan

SEQ ID NO: 25969 - DNA, 453 bp, Homo sapiens
  misc_feature (1)...(453): n = A,T,C or G
nattgatgacatctgaccangcggtttagttcacgtcgaagagcagatcctgcagctgcaccgcacactgcagcagccgccctggcgccaccaccacaccgagcaggtgcacggccggttcctgccctacctgccctgcagccaggacttcttcacgctggcccctgggacgccgctttgggccatccggcccgtgcactacggcaaggaaatcgtgcgcttcaccgtctactgtcgctacgacaactatgctgacagcctcaggttctaccagctgattctccggaggagccccagccagaagaaagcggacttctgcatcttccctattttttccaacctggatgtggacatccagttctccctgaaaagactgccctgtgaccagtgcccggtgcccaccgactcctccgtgctggagttccgagtgagggacataggcgagctcgtgcc

SEQ ID NO: 25970 - DNA, 462 bp, Homo sapiens
  misc_feature (1)...(462): n = A,T,C or G
gagggccccatgagacactaatagagcgcgtgattccatatttcctccaggaacactacaccgctgccccgcccacctcctggtctgaccaaccccaaaccatcatctccctggagcagcacagcaccccgatcagtcagggggtgggggacacaggactcacggctcgcctcgggtgaggaggatctgcctaaaggaacaccattgttcatccacaaggggcttatgttaacacagatggtgaagacacaaagaggtcttcccaagagaggaaggcatggttttctgctttttcttctggtagaggaaaaggtacctcttgagtgagtgaaagtcgcagtcagtataaggcaaagggacccaagaactcccaagggacagatggagtaaaatgagtaaaaatggcagagtgagaacactgtgaggaaaatactgtcttgcacatcaggcataaaagtgcan

SEQ ID NO: 25971 - DNA, 452 bp, Homo sapiens
  misc_feature (1)...(452): n = A,T,C or G
nattgatgactattagtccagngtgttggaattccgcatgtgtgtgtatgcacaagtagttttgggttctcttttcttggtggtgtacagaagggtagtcaaagcccgactcatgatccctaactcgagtcttttaatgggattgtgtcctaactgcaaaacccgcctcaccaactttgttataaactccccgggtttatagggacagtcatctactgtcccttcctaacagcatggtgcagaaacactccataaatgagtcttgtgttgaatcagattgaattaagtgagaaaggaatggcggtgaaaaatgtggctttagtcatcacatgggcctacgggtttgtgaaagtaacattgagtctccttgtgttctgtgtgtactgcatgtatgtcatcttgcatctaaggatgtatattacccataaaggagcatgcagacacatgagtgg

SEQ ID NO: 25972 - DNA, 460 bp, Homo sapiens
  misc_feature (1)...(460): n = A,T,C or G
ggaattgaagactatnagnannnncnattgatgtcttttagaccgtgtggtggaattcggtaaagatggaaaagcggcagtctggtggagaccacgtaatccaatcactggatctaaatttactagcattcggagagctgaggctgttctgtttatttattaaattacttttacagccttaagttcgctctggagcccactctgtgtgcctctttttcttcaacttcagcaattgccggaccaaggtacacatcctatttttattacacacgtttgagcccacagatctctgcctggcccattggcttgtggcaagatcaagcagaccttcaggttatgacatcactgcttgaccaagccacccaatcacatcaatttttccaccaaaattggagaaacttatctaaacaatttcaactagcccagagactggctaaacaaattatcctacaatgcccag

SEQ ID NO: 25973 - DNA, 472 bp, Homo sapiens
  misc_feature (1)...(472): n = A,T,C or G
gagaggcgcccattgtagacanttgatagtagaccttagtccgngaggtggaattcccgcttctgagtcattctttgggctcaccctgctgcccggggtgggagggagggtgacgggcctcatatttcctgtgggccatcaacctatgccccctgtccctcacccccgtctggatcagtccatttcctgacctgggggcttttccttcccgatggggctggtctgggccacacagagacagatcttcctaggaaggctggggtggggagaacacaacctaggcggcccctctcttccacagcccctctcccaaccctgcgaggggggccgaggcctaccacatagaggactcccacactgcatgacccctcatcccaaacccatatccaccaggactctttcccttgggccctgcgtaccgtggctgtctcccagnatctgttccttctcatgcccctgcagggccccggcn

SEQ ID NO: 25974 - DNA, 498 bp, Homo sapiens
  misc_feature (1)...(498): n = A,T,C or G
gggccaggngnnnnnncctgagaccctcactgagaccactaggccangnggnggaattccttggacactggaccaaattgagtactagctaaagcagggatgaggtggaagcagctttccataagacacacccactagtgtgccatgtcagtttaccattgccatggcaacaccctggagttactgcccttttccgtggcaatgagctgacaacccagaaattactaccctttttctggaaatttcttcataaaccaccccttaatctatatgtaattaaaagtaagtatgaaggccaggggcagtggctcatggctgtaattccagcactttggaaggctgaggcgggtggattgcttgaggtcaagagtttgagaccagcctggccaacatggtgaaaccccgtctctactaaaaatacaaaaaattagccgggcgtggtggcgggcgcctgtaatcccagctactccggaggctgaggcaggagaatggcgggan

SEQ ID NO: 25975 - DNA, 567 bp, Homo sapiens
  misc_feature (1)...(567): n = A,T,C or G
ggaggcgtcgacaccatcagngtgggaattgatcagcatgagatggtgtaaggagaagtctttcaagaatgacggaataagagacctgttttaaaaaggaactgcagcaatctttgaaagacttccaaagaatgttagagcacagtacataatacacttgccctgctccctctaccccttaccccacaacgtgcaactgacactcccacccagtctctgctccacctttcagcccacgtcacgtgtagtgtccattttgtgaagccctgttgtgccacagagtgtagccaggtccccctgcagctagtcctagtgaacctcaccccgaggccctgcatgggccagcccctccatctgtacttggtccaactgcaactcatcatcggtgactggttatcacaccatcgctggcccctttgggccctgcatgtagtgtgggaggctcctgttagctcctcactgtggtaaatgccacacacctttaagtagataagcagacgatagttatctgttcttttgaactaatctcatttggnttgattntccctctactaaagctttctacct

SEQ ID NO: 25976 - DNA, 469 bp, Homo sapiens
  misc_feature (1)...(469): n = A,T,C or G
gatgggccncnattgtagaccctagatagagcgccggaattcaagagaagaaggcggagaagggcggngcaccctctgcatcctcggcgccccccgtgtcgctggcccccgtggtcaccacctgcgcctgaggatcgggcccccagatccccacttttcccctccagtgcctcccggctgctagcctgaaagcagcgggaaagccagccacggaggcgtaggggccgcgccctggcctctccatggacgtgcggccccttgcttccccttcgatgcccccggttcccaacctttcacgccggccagcggtcaggggccagggctggaggcgccttcccctcgcggtcccccacttagccaaggcgtgggggcggaaaggtggcgtctagcccgctttgttcagttcggatcggcttgatccaggggccgccgggccgcgccaaggacctgcaagggactgaaggcngan

SEQ ID NO: 25977 - DNA, 574 bp, Homo sapiens
  misc_feature (1)...(574): n = A,T,C or G
tgccctccccccccggccncccnaattgaaaccccttttcgaaccactatccgnngggngcaattcggacgctaggaacgagagcccagcccagagcatgtccgtggggaggagagcccagtacctcagaggacgtgtccagtttgaggggcggctgctcggccacgcaacggaggtgggccctgacctcctcctcatcgctctcgtcgtaagagtcatcgaggtcgtagtagtaccctgatggagaaatggttgtattcagccagacaaagagccttcatctgtccagtggacatgcccgcagggcctcatgtgtgcagagcacctatcaggccaggcctgctggcacctgaacaccctgaaggccagttcctttcaaccgaggtggaaaccaacattaacccagtcctgaggctttgcaggaccgcagacaccaggcttccctgggatccatggctcccagtagctgggtggtcccctgggctgacaagacctccctcctccccctggcagggaaccattcatcacacnaggcctggggctgtgtccacggcaacacaggggctgttgtgca

SEQ ID NO: 25978 - DNA, 572 bp, Homo sapiens
  misc_feature (1)...(572): n = A,T,C or G
gacgacgctgacacactcgaaagngcactgatctctatccgagnggngcaannccttctattcaaaatacaaggacagatgcttctctgttccaagagggttttcttgaggaagctactgaagcttatagacatgatggagacgagatcgcctcccctcttgtcaaagtgttaaaaaaatgttctgtcttactctgcgcctagcattggaaatgaaagtgacatttacgccacaacccacgtgtgcgcctcctctctttttgtttaaggacgatcaggtctatccaggaaacagctctggcatcccaaactgaaataattaggacgtatatagacctgacaaaaatggaaagggggtggggaatctgagggtctgtcttgcctaattgattccgctaaacggaatgcaggagatgtgaacggcaggacgctccgattcccacgctcgcgggcatgtgataaagcggtgccgggcagcctatgacagacagcccctggtgggggggtggggtatgaaaaaaacatcatgtgcacacaccatactcatctccatcgcttaggaaagaaatgctg

SEQ ID NO: 25979 - DNA, 562 bp, Homo sapiens
  misc_feature (1)...(562): n = A,T,C or G
ggaggcgctgacacactcagggggcattgataaccctgcctggcccggcagccgtaccgcagacgagcccgcgcccgcgccgctcaggaggctgagggaagaaaagaataatttaaatgttatttagtttctataaagaaaacgattaaaaacaagttacttcttcctctgaagtcttgaaacactccaagtcatccttgagggttgaaatccacttcttcaaaactcctgttaatattggaaatgagcattgactattaggcacctggatgaagactgggtccagattgtcagtctcctgtaacctgcagaagccctccagttgcactaggaacattcaattgaaggttttaaataaagacaaacaaaaggatgtgggatttacacctggctttntgtagccatgtgattctaccacctgcctttagttccctgcttcctctcctgctggacgccattgctattatttccctgcttcactgtctgccctgtgtgtgcccttatatctctcattcccatcctcacttctcttgcttcagtgaaaanagggaaaatctataat

SEQ ID NO: 25980 - DNA, 474 bp, Homo sapiens
  misc_feature (1)...(474): n = A,T,C or G
gtggggccggcaatagagnccntnngatagatgattattagtccangcggnggaattcggctggtccagaggagcctggggacagccctcccctgagacaccgcccccggggccctgcgccgacttgcctcttgggggaccagcctgacctcacctgcttaattgacaccaacttttcagcgcagcctcggtcctcacagcccactcagcccgagccccggcaccgggcggtctgtggccgctctcgggactccccaggctatgacttcagctgcctggtgcagcgggtgtaccacgaggaggggctggcggccgtctgcacaccagccctgcgcccaccctcgcctgggccggtgctgtaccaggcccctgaggacgagggtggctcccccgagaaaggctgcccttccctcgcctgggcccccagagccgagggttccatctggagcttggagctgcagggcaacctcatcn

SEQ ID NO: 25981 - DNA, 576 bp, Homo sapiens
  misc_feature (1)...(576): n = A,T,C or G
agaacggagctcgatcacantngnangnnncnctcgaacaccactccgagnggngcaattcaccgcgcccggctccatttgttttttttagacggngcctcggtaaagacttcaagtgtgcaccatggttttcggcacttttgatttctaaggctcagggttgaaaaccatgttgcagataaagctgtttcagtgggacatccactaatttcccactttgcttatctgaggcgaaaagcacctaacacctcagcaatttctttttttttttttttttttgggggggattttcctcccccagggtgggaccaaatttttttaaagggccggggagggggatcccccgggggtgggaaatggaaacccacccggcccaactggggaaaaccttgtctggacaaaaaaaccaaaattaacccgggcggggggggggctttttgtaaccccacttcctgggagggttgggggggaaaatttgtttaaccctggagggggggggttgaagggacccaaatatcgcccattaaattcaacccggggcgaaaaaggaaaattttgttaaaaaaaaaaaaaatn

SEQ ID NO: 25982 - DNA, 564 bp, Homo sapiens
  misc_feature (1)...(564): n = A,T,C or G
aaacaagttcgaaaccgntcgngnnggggtttgataccacgcacatcaagaagaacggccaatccgacagactttgtacctcggggacctgctggagacctgccatttccaggccttctggcaagccctggatgaaaacatggacctcttggaaggtataactggctttgaagactctgtccgaaagtttatctgccatgttgtgggtatcacttaccagcacattgaccgctggctgctggccgagatgctcggggatctgtcggacagccagctaaaggtgtggatgagcaaatacggctggagtgccgacgagtcggggcagatcttcatctgtagccaagaagagagcattaaacccaagaacattgtggagaagattgactntgacagtgtgtccagcatcatggcctcctcccagtaacttcaggtgtttaataaagatgtgttgactcngcnnnnnnnnnnnnnnnnnnnnnnnnnnnnnnnnnnnnnnnnnngcgcgctctttatattaggggcccgtaaaaacccgttaaacccctggtgggcttttttgtgccc

SEQ ID NO: 25983 - DNA, 569 bp, Homo sapiens
  misc_feature (1)...(569): n = A,T,C or G
ctgtcgcccccccgccncccnnaaatgagnaccattttgatgagcaatccgagaggngcaanncgncacttanaaagagacttacacttgctgcttgaatttatccaaagatattttatgtccatcatcttngattttttcatcttcagagcatagacccaggggttttagggctgtaaaataatgagaagaaatgaagtgagaattttacaaagtgagaagcattttctgctagaaaaaactgtggaatgaccacaaactattacctcaatttgtagaaggtactgaccttctttatactgcacaaatgatatggagcctctgcctgaggagtccatcatctcaaacatagccacaatgttagagctatccataaagaaaggaaacgccacgcctgttacttttgcaattctcagtcgctccaatagagatattaaatattcttttggtttttctgcaaaagaatagctccagctctttctgatacgaaattaaaatatgtcgcacatagaagtagtcatttaacaattattaaacagctatagcaaaggcactgtactaggcgcttn

SEQ ID NO: 25984 - DNA, 578 bp, Homo sapiens
  misc_feature (1)...(578): n = A,T,C or G
agacggcgtttgatccccctanngnggngcatcgatacacagtccgngngagggaattcgctcgcagaaggcgctgctgctggagctcaaggggctgcaggaagagccggtcgagggattccgcgtgacactggtggacgagggcgatctatacaactgggaggtggccatcttcgggccccccaacacctactacgagggcggctacttcaaggcgcgcctcaagttccccatcgactacccatactctccaccagcctttcggttcctgaccaagatgtggcaccctaacatctacgagacgggggacgtgtgtatctccatcctccacccgccggtggacgacccccagagcggggagctgccctcagagaggtggaaccccacgcagaacgtcaggaccattctcctgagtgtgatctccctcctgaacgagcccaacaccttctcgcccgcaaacgtggacgcctccgtgatgtacaggaagtggaaagagagcaaggggaaggatcgggagtacacagacatcatccggaagcaggtcctggngaccaaggtggacgcggagcgtgacggcn

SEQ ID NO: 25985 - DNA, 567 bp, Homo sapiens
  misc_feature (1)...(567): n = A,T,C or G
ggacgatgactcgacaccgtccgtgtggtgcaattctaagagtgagccctngtaggcttgcttgaaaagtgagtccttccagaatattctcagagctgccagaaacatcatctgagggtttgggcatcagctctgcctggctggtgttcaggccctcagtcactttggaagtgagaagaacccttcagccaaacctttgggatcccattttgaagtccagagctggagcaggcgggcagtgccctgggagaccccgctctggataagacacccaaccccaactccagcagctggactctgggcccacaaggggagggaccccagccagtattccctcagagccggcacgaccctgctgtggggcggcgggcccagtcgtgttcctgcagtgggcaccctaggcgtatgtgtatacacgcacagatatttattcctttcgcttttagtggntgttatttctgtagcagccaagtcctgcggctccctggggctgagatctccctttgggaactccgagaagccgcctgacagtcccagcccgcacccaaggagccccatcccgccacc

SEQ ID NO: 25986 - DNA, 572 bp, Homo sapiens
  misc_feature (1)...(572): n = A,T,C or G
ccacgagaacttgacacactcnaannnncaanattcgatctctatcccagggggcaatcgaaatgaatggacctgagtagctgaaggaagcccctccctacccaaagactggaggcttctcagcctctatttccctgtctgtacagctgagggctctgcctgtcccccactgctatcagtatggaaccccagctggggtcccctattgagtgccgactccccccaccgccagcagctgctcctccagccacacccctcctgctccccccacccctagcccttgaccctggctggcctgccccgctccacaggccaccagatgggctcctgagaccctccccaggctgcttacagctcattctgctgggggtagagatgaggggagggagtaagttaaaccttggactagcaagtagaagcctggggggatgcgtgtgcctcagtttcctcctccacaactgaatatagtggctgaaaactggggagatactngatggcgcgaatgtccgttntctctcccttcccacctnctgcaggaagcangacggngcangcagcacctggtangcacn

SEQ ID NO: 25987 - DNA, 453 bp, Homo sapiens
  misc_feature (1)...(453): n = A,T,C or G
gagccgggccccccatgatgaccactgatgacctggcgaaannccccancnctactaaaaatacaaaaaaattagctaggcggagtggcgggcatctaattccagctacttcatgaggctgcgacaggagaatcatttgaactcgggaggcagaggttgcagtgagccgagatcacaccattgcactccagcctgggcgatgagcgaaactgtctcaaaaaaaaaaaaagtgggggtctggttgggtgaccaaggtgggtctaaaactccgggcctaaggggaccctccattttggccctcccagggggttggaataacgggggggaccccccacccccggcgggggggggacctttttaaaaaacaaagttttaaaggtaaagggcggttttaaaatccccggaaaaaatccccctatcatggagtttttaattaaaaaacttggcattggg

SEQ ID NO: 25988 - DNA, 570 bp, Homo sapiens
  misc_feature (1)...(570): n = A,T,C or G
cgttgacacantcagggttcgaacactatccacgnggngcaattccgctgcagctgcagaatggtgggcggtggctggaagcgcaggcccggcgcgggggcggngccgcagatactgccagaaaggctgtggggtctacgcaggtggctttggatgacagccagggtaccaggaggcagcgcgtttcattcatgcagtgactattaagcttgctgtgtgtccgggggctgcggtttgctgcggggaccctgcccagtgtgaaaaaacagttgatgtgaagaaaagtaaattctgtgaagctgatgtctccagtgaccttcgaaaagaagtagaaaatcattatacgctctctttacctgaagatttctatcacttctggaagttctgtgaagaacttgattctgaaaaaccagctgggattctcctgatgaacttcctgtatatgttggtataaatgaagcanagaanaattgtataattgttccaaatggagataatgtatttgctgcagtcaactgacctcaagagaaattgcangaacatagttgaggctgcaagtgatgatgagaa

SEQ ID NO: 25989 - DNA, 494 bp, Homo sapiens
  misc_feature (1)...(494): n = A,T,C or G
tgcgncaggggnnnttttggaccctatcattgagggcattccccacagcccagcaaggggagagagaaagagaattcttttctatagaacgagtgggggcggggatgggtagggatttatccaatctaagccctaaccccacttagtgacctcagtgttttcttccattccttcttactgccctgtcctctgccttggaagaggctttgggaatagttcatagggaagggacaacatggaagaaacagcgatttaaattgtattgaacagggcatataaaatgcattctgtaccctgatctggcatatagcttcaaaactgcagtggcgagtgtccatctcttagttagctaccttaactgtccacccttactacctgtgggatcgttgcctggtttgtcttctctgtgtcctggagcaaagccagttcctaaaactaaaactccattctagtcttgggaagaaaagtttctactcagaactgnggaaggagtg

SEQ ID NO: 25990 - DNA, 561 bp, Homo sapiens
  misc_feature (1)...(561): n = A,T,C or G
cattcgctttcgatcactagtccagcgnggngcgaattcgaatggctgtggctntgctgcgctcgcctcttcccggcgctgcggtcagcgccaagtcaggagcccgcattcttccctcccctcctggcggcctaggttcccttaaagggacagtttcccggccgcctctggcctccgccgtctgaaccagcgctcggggcgcagaggtgggcgggagggattcagtttggctcctttctgacctctttcctcctccgcccccccaactgccgccgcccccctacccactcccgccacccttctttattgaatgtgaagtgtgcttcctctcccgcccccaagagggacctggctggaaaacagtccgcgcctcctggaaaaagaacggggtggggggcgcgtaatggtgaattcgcgttaaaagtgaggtcgagccccaaaacatccaggaagaggaaagcagacctgggtgcaggaattccttacctgcacgcgcgctccgcacagnncgcccgccaccgcaacttgcgaactgtcgcgggtagacagtctgcctttgtg

SEQ ID NO: 25991 - DNA, 545 bp, Homo sapiens
  misc_feature (1)...(545): n = A,T,C or G
aggatggactgaagacactccagagcggagcaattccttatagcaactaanatatgcatttgtattgtatcttacatcagactttctgagaaatgaacaaataaaaaatgttctttgaattagaactctaagactctgtaatattgaattctgcatcacctgtagaaaataaaaactcagcctccccagaaatggatgttttgtttccatataactacaacataaggtaccaaaagttaataactgcataatgccctgtgagaacattttgtgtcttacctccattctaaattctgttctccttctcttgggtcttcaggataccggatgtcagctccccagcactgtccagaggatatttccaaaatcatgatgaagtgttgggattataaacctgaaaatcgccctaagttcagcgaacttcagaaagagctcactatcatcaagagaaaactcacatagtgacaggatggcgccaaactcagccttcaagactctgtccttcagcagagtaacattattgntctcattaacaatgagnttan

SEQ ID NO: 25992 - DNA, 456 bp, Homo sapiens
  misc_feature (1)...(456): n = A,T,C or G
aggtcgagggnnccccaactagtantcctgagatcctcgaccangcggnggaattcgagaacttaagcaacttacatcaactacagatgctagagctgggatctaaccgcatccgggcaatcgaaaatatcgacaccttaaccaacctggagagtttgtttttggggaaaaacaaaattactaaacttcagaacctggatgcgctcaccaacctgacagtcctcagtatgcagagcaaccggctgaccaagatcgagggtctgcagaacctggtgaacctgcgggagctgtaccttagccacaatggcatcgaggtcatcgagggcctggagaacaatgtaagacacccactgtctgtctggggctgtgtgggcggtgggcaccaggcgggcaggcacctggccagccagcacacactggcctctcgggccggagtcaggaagatgccctgcctct

SEQ ID NO: 25993 - DNA, 452 bp, Homo sapiens
  misc_feature (1)...(452): n = A,T,C or G
aagcggggnncccctccacngtgcangatnaagctgggaaantcngcnggaggaggagcggctctccaacgagagggaggactccaaacgctggagcattatggaccatctggccaaggagctgacggctgagaagcggctggaggggcaggaggaggaggaggacaaccgggacagttccatgaagctctccttccgggcccgggcctacggcttcaggggccctgggccgcatctgcgacgaggctggaggccatcctcccgggaggacagccttgaggcgggcctgcccctccaggtccgaggctaccccgaggagaagaaagaggaggagggcagcgcaaaccgcacaccacaggaccaggagctggagagcctgtcggccattgaggcagagctggagaaagtgagccaccagctgcaggcactacggcggggctgacacaccggct

SEQ ID NO: 25994 - DNA, 458 bp, Homo sapiens
  misc_feature (1)...(458): n = A,T,C or G
agtgcgcgggnnccnnccccagggtaccatacgacnacctggcggaantcggagcaaaaagccccgattggagggtgagacaggaagttgcatggtcactgctgctcacatctttgtagctgcaagggaggcagggaaggctagtccccagctttgtggcccagtgcccagcccacagtgaaaggttctatcactaaaagcaaagggtgaaggtgtgccaggaaccatagttatttctcccatggggagcctctgtgctgtcatgaagttggggtgcccccagcccccaagcctgggcatttctcagctgcttgaggagggccctgatctgaccccgtattgtgttagtcttagactggctggtgcagccgaaacctcgatggcttggtggcaatggctggctcctggatggccctgaggaggtgttacaagcagaggcgtgcagcaccacggaggat

SEQ ID NO: 25995 - DNA, 450 bp, Homo sapiens
  misc_feature (1)...(450): n = A,T,C or G
aggtgggcaggagtgcccccaactgagagcatganaagcgtggcgaaanncctggccagaaagagaagagagtgcggcccgaggagaagcaacaagccaagcccgtgaaggtggagcggacccggaagcggtccgagggcttctcgatggacaggaaggtagagaagaagaaagagccctccgtggaggagaagctgcagaagctgcacagtgagatcaagtttgccctaaaggtcgacagcccggacgtgaagaggtgcctgaatgccctagaggagctgggaaccctgcaggtgacctctcagatcctccagaagaacacagacgtggtggccaccttgaagaagattcgccgttacaaagcgaacaaggacgtaatggagaaggcagcagaagtctatacccggctcaagtcgcgggtcctcggcccaaagatcgaggcggtgcaga

SEQ ID NO: 25996 - DNA, 453 bp, Homo sapiens
  misc_feature (1)...(453): n = A,T,C or G
gtgccgggnccncccctgaaaatcaatangcccctccaccancggnggaattcagctccagtattgctcacatgactgcggcatgaagctggcagccaaccgcatctacgagatcctcccccagcgcatgcagcaggggcagcagagcccttgcattgctgaagagcacggcaagaagctgctcgaacgcattcgccgagagcagcagagtgcccgcacccgccttcaagaaatggaacgccgattccatgagcttgaggccatcattctacgtgccaagcagcacgctgtgcgcgaggatgaggagagcaacgagggtgacagtgatgacacagacctgcagatcttctgagtttcctgtgggcaccccatcaacccacgtgttgccttgcgccacatggagcgctgctacgccaagtatgagagccagacgtcctttgggtgcatgtaccc

SEQ ID NO: 25997 - DNA, 460 bp, Homo sapiens
  misc_feature (1)...(460): n = A,T,C or G
agggccggncnncccccaactgatgatcatagatcacccgtggggaanncgcaggccactcanccagcactgccttctcccagcaggacctgctggttggggccattctctttggccacaatggcagcctcagctcccgcaacaccctggccttctcaatggatgtggggccttctcaatggatgtggggccagtgcacacagatgccatcctacaagtgaccattgccctagagggcccactagccccactgaagctggcctggcacaagaagatctacatcttccagggagaggcagctgagatcagaagagaccagctggagaccacggagttcatcatctcggagccactggccaatatgtactcgcgtgggaaccagaacacactgatggaggagtgggcagagtangcacagtggcacgacgagatgctgcgcatgcaccacgtgctgaaggag

SEQ ID NO: 25998 - DNA, 458 bp, Homo sapiens
  misc_feature (1)...(458): n = A,T,C or G
aggaacgggcnccnccactgatnncccttangatcctcgaccnncnggnggaattccccacatttaaaatcaaaagctatattatgaggagttggactgttctgtcaaaggcaaaacaaaaataatatagaaggcctaggttttgcatagtcttcttttttttaagagttggggtcttgccgtattgcccaggctggtctgaaactcctgggctcaactgatcctcccgcctcagcctcccaaagtgctgggattactggagtgagccatcgggcctggcccagattttgcatagtaaaacagtgaaacagatagagttgtatttaaggtcagtattctaggcctcccttcaactgcagtcataccatcatagaagatagttctatgtcatcctgttatctggacattataataaacaacaagccctctatacacaggttccaaaccccgttatctaa

SEQ ID NO: 25999 - DNA, 440 bp, Homo sapiens
  misc_feature (1)...(440): n = A,T,C or G
caccgaagcctnagtttaccctccggaanncccgaggncaacggctgaatggaggaaacgtcccccagcaacagccatgggtctgtgggatgctctccccagggcaagtagctcccgatcactgtcactgggggacttgaagagctgacactgagggaaagggggaaggacgatacctcggaggaagttgaatctcctgggtcggcagctcaagccagccgtgctcacaaaccccaagcacagtggctcatgatggcaacggtgtgcatagggcacaggctgcctgggggcacctctggctcacatgtcctgtcattcgagggccctgggcaagggaggggccctctctggatctgttttcctcatgacagaggcagagagacagggtgtgactgagacatttggctctgaaagctgctcagtcgtggcccttagccgtt

SEQ ID NO: 26000 - DNA, 570 bp, Homo sapiens
  misc_feature (1)...(570): n = A,T,C or G
nattcggaacttctagtccaccgtggnggaattcgcaggaccagcatgcaccaccgaaacgactcccagaggctggggaaagctggctgcccgccagagccgtcgttgcaaatggcaaatactaatttcctctccaccttatcccctgaacactgcagacctttggcgggggaatgcatgaacaagctcaaatgcggcgctgctgaagcagagataatgaatctccccgagcgcgtggggactttttccgctatcccggctttagggggcatctcattacctccaggggtcatcgtcatgacagcccttcactcccccgcagcagcctcagcagccgtcacagacagtgcgtttcaaattgccaatctggcagactgcccgcagaatcattcctcctcctcctcgtcctcctcagggggagctggcggagccaacccagccaagaagaagaggaaaaggtgtggggtctgcgtgccctgcaagaggctcatcaactgtggcgtctgcagcagttgcaggaaccgcanaacgggacaccagatctgcaaatttagaaaatgtgaagagctn

SEQ ID NO: 26001 - DNA, 440 bp, Homo sapiens
  misc_feature (1)...(440): n = A,T,C or G
ggtcggnnnnnncactaagaactgataccctgggaanccagggatagcttcctcctctttttctatagctcttggtttatgtgtacatctctgcatgtgcttattactaagctaatgagctttggcctggtctacggctttaatcttgattgcggaacagggtaataactgaaatgagctgacgctgaggcatccttcgtttatcttggtgcctgggtgcctcttctccatttctccttgctggaggagagaggctgaggtgtggcttctagtcccactcttgcctgaagttgctcttttatgtcccacttccacaggcaggcagggagtggactagtgtgttacagaagctgggtgggtgacattcacaaccccagtgtggctttggaaacatccacggagtcctggctaggtgggcagggagcagagtccaagtgctt

SEQ ID NO: 26002 - DNA, 460 bp, Homo sapiens
  misc_feature (1)...(460): n = A,T,C or G
agggccgggccncccccactgatnnnccatgangatcttgcaccancnggnggaattcctaattttttactaaagtttttatacagcctcaaattgttttattaaaaaaaagatttaaaatggtgatgcttacagcagtttgtacgagctcttaagtgttgattccatggaactgacggctttgcttgttttgattcttttccccctacttttcctaatggtttaaattctggaattacactggggttcttttgccttttttagcagaacatccgtccgtccatctgcatctctgtcccatgactcaggggcgcccactctgcttcgattctcctcctgtggaagaaaccattttgagcatgacttttcttgatgtctgaagcgttattttgggtactttttagggaggaatgcctttcgcaataatgtatccattccctgattgagggtgggtgggtgg

SEQ ID NO: 26003 - DNA, 457 bp, Homo sapiens
  misc_feature (1)...(457): n = A,T,C or G
ggaccgggnnnccccaatgagnatcattganagnctggcggaanncgnnncaccttanaaacgagtcttctgaagggcagaggccaaatgtattttaaaagcaattccataaaatgggaagtgatggatgattaacaatgcatggctggctttacattttgttcagaggaattgcttggccatcggggtaccttttggctggccacagaatgcctcctgttgcctctcctcagaaggctctgcatcaggtcgaggtggtcgttcaggccatgagactcctgaagacacagacagaacacggtaacaaggagagctcggcttgctcaaaggagagcgctgcgggggatagaatcttctggtctggctttggaattggactttctaagccactgctgcagtttcagaagtagctgactatgtagaaatagatactccggccccagtggtcatacatttn

SEQ ID NO: 26004 - DNA, 464 bp, Homo sapiens
  misc_feature (1)...(464): n = A,T,C or G
agagcgagggcccccactgggccacctcagtggccctccgaccancngcagcaattccatgataaccggcgccgagactgccccatcagcccagcgtttacgtttccttagcccctggccggccctcagggccacaccctggtggcccctgagggatagaaatgtgactctcaccctgccttgaccccttccccgtgtgcctttttctgacccaaatctcatggtttctggggccaaaattccctttcctgcctcccaatagctataaaaaattggcacagcctagcataatgaatggaaaagtttcgccaaatatgtgagtcacttttctttttcttgggtagatggaagacaatgaaatgagttgttcaccttaacccattacggtgttgttctaggtttggagatagagcagggagcaaaacagaaatatcttggctctcacagtacttccagtgtggaag

SEQ ID NO: 26005 - DNA, 456 bp, Homo sapiens
gagcgagggccccctaggccgactcagttgcctcggaacgcccgggagtaggtaggtaccagaggtcgaatgctggatacgctgctataatttcttcgcactttcgcgatcccctagctcgggctcaattttgtcttttagaaagagggcacctttctccgcgctcttccttccaacgcggtggatataaaggcacgaaagctcttcagaggacgcagaaagcacctggagctcctcaccccaattttcacccattgttagctggcacgagcacccagcagaggagtcagggatcacccctcgggtgcctggaacggttctttggacacctgagccggacctaggcacagcctgaagtcggggtctataattattccggtgctaaggggtaacttgttcacctacctccttggcaggaatattgagcccttcactcctgatgttccgactttaaca

SEQ ID NO: 26006 - DNA, 463 bp, Homo sapiens
  misc_feature (1)...(463): n = A,T,C or G
gagcgagngcccctcagggcctcgcagtngccctccgancgncnggaggaattcctcaacaccacggaattccatctgcggataaccgtctggtttttgagcacatttttcgtgtcttacatcaaatacccgaaagcttggctgcagggaatcaccttcaccagggacggccgctacatggcgctggcagaacggcgcgactgcaaagattacgtgagcatcttcgtctgcagtgattggcagctcctgcggcattttgatacggacacccaggatctcacagggattgagtgggccccaaacggctgtgtgctggcagtgtgggacacctgcttggagtacaagattctgctgtactcattggatggccggttgttgtccacgtacagcgcttacgagtggtccctgggcatcaagtctgtggcctggagccccagcagtcagttcctggcagttgggagcn

SEQ ID NO: 26007 - DNA, 553 bp, Homo sapiens
  misc_feature (1)...(553): n = A,T,C or G
nttcgaattcagtcacagtggnggaattcgaaggggttccttgttttgaaagctgcattaggtctatggtcaggcaccttttttccagcggagacaatgcatttttaggaggttgagttctgcggttaggaagggagatggtacccctcgccacctccccttgtgacctcccgccgagaatagaaggtaaaatatttttgagtattagtaattttcttttttcctttatcacagccggtggcttggggtcctttcggagtcttacagatatttggagtattaatttgaggacctcatcggcctggcacaggaatttttgagtgtaggatattttgcataaaatagtttatcctgggatgatcatcttggcttgagtagttgcagcctggattcctacctggatatgttccttacaacaaacaatggctgagaaacttatctttggagatgactgatgaaagcgtcccctgagcttttttgtacttgtattgnngggcagcccagggtactttaaccaaaaactcggtgggcttcatagattggagagttctcn

SEQ ID NO: 26008 - DNA, 487 bp, Homo sapiens
  misc_feature (1)...(487): n = A,T,C or G
cgggatcnnnnnaatgagnccttgagaccctagtccgngtggnggaattcatcttgggcaagtccctgccctccctggaacgaagggccagggggctggactttcccacacaacttgctgggcaaagcacgatctgcagctttgaagactcaacagaccctggaccatacggagagcaggtggcccaggcctcagggcggcagtcccggctttgaggctcacgcgagggcctggtatgcagggaccactgctcagctgggcctcggaccttggggatattggacgcaacctggcaaatgaagctgggcgcccaagtctctgggtactccctggaggacactgtctcactgtctcgggttggctcccagcctggaggtcccagatggggactgttctgacaagctggcatcaccaggggtgaaggccctggctgcagctgtacaccacctgtgcccccaggctcaaggtctctggcaggtgcacaccn

SEQ ID NO: 26009 - DNA, 467 bp, Homo sapiens
  misc_feature (1)...(467): n = A,T,C or G
gagcctnntatcgatgacatatccatgtggtggaattccatcagcagtccgccagcggaaccaagcggcgcgtgttcatcatcgagaccatgggcggctactgtggctacctggccaacatgggggggctcgcggccggagctgatgccgcatacattttcgaagagcccttcgacatcagggatctgcagtccaacgtggagcacctgacggagaaaatgaagaccaccatccagagaggccttgtgctcagaaatgagagctgcagtgaaaactacaccaccgacttcatttaccagctgtattcagaagagggcaaaggcgtgtttgactgcaggaagaacgtgctgggtcacatgcagcagggtggggcaccctctccatttgatagaaactttggaaccaaaatctctgccagagctatggagtggatcactgcaaaactcaaggaggcccggngcagagga

SEQ ID NO: 26010 - DNA, 427 bp, Homo sapiens
  misc_feature (1)...(427): n = A,T,C or G
gaagagagcaaaaagctgcagccggtgcttgcacaccgccttgcacatagcataggcttcgggctcactccttcctggtggaaaaggaagatgcctgtcctctccgtggaagaccctgggccctcaccgcaggcagcagtttgctgttttgaaaggttattgggtcccttcctcgggctgtgttcttgctggtgagcaaaagtgttgcctgcacaaataaaatgcagaacgtactctacgatagatcacagttttttattcttaatgtcacaagcaggagaaaaatctcacattcatactaaaaattccaactagactcaacaggaatgaagtctctatttgtaatggaaagtcccagcctcccgctgctcgccagtgcgtgtactgtacacatacacactcattcttactcanggttgccggaccg

SEQ ID NO: 26011 - DNA, 468 bp, Homo sapiens
  misc_feature (1)...(468): n = A,T,C or G
gtgtntnnaatcgatgacatacgccanngcgnggaattcgatcgccgcttcctccaggccgtcagcctgatgcatagcgaatttgcccagctgcccgcgctttatgaaatgactgtcagaaatgcctccacggctgtgtacgcctgttgcaaccccatccaggagacatatttccagcagctggcacctgcagcacggagctccggcttcccaaaccctcaggatggcgccttcagcctctccggcaaagcaaagcagaagctgctgaagcacggggtgaacttgctctgaactgcacccaggaggtgactgggaaggagaaaaccagcaaaggaagctctgccttttataattgaaaaggcccctctattttatttttcttgaaaacattcccttttttaggaaccaaatgatatttgagtttttgttattccttttgcagattgggatgtgttttgggggcagggg

SEQ ID NO: 26012 - DNA, 496 bp, Homo sapiens
  misc_feature (1)...(496): n = A,T,C or G
cccccgccccnnnnnnnnatcgaganatcgtagaactctagggagngngcnggaattcgtttctcttagaggcaggttgaagactctaatgtaaaattgtcttttaattagcatttgtttctcagctatttctagagttactgttgaaggtactttattttgactggtacagatctttgcatatgtaatgttagagttccagggaattctgtttaaactccccggtaaaacattctgtacaagatcaaggaaggagaaaatacagttaatttttggaatagagaaattgtcatctttagaaaatgcaaagaggaataatgataattttttgtgtagcagtgaatgaatagctttaagttgatgtcataactgaagacacatgagattttcacatggcagagtcatgcctctgtgttttgctacactccgtgggctgtcatctgataccagtgacaactgtgcaagggtggtacctcccgattctgcacccagtgtg

SEQ ID NO: 26013 - DNA, 548 bp, Homo sapiens
  misc_feature (1)...(548): n = A,T,C or G
catcgaaccccgctcgagagggcattctgtagagctctctggagctgtatcacctgggttctgtcccctggctctgtatcaggcactttattaaagctgggcctcagtggggtgtgtttgtctcctgctcttctggagcctggaaggaaagggcttcaggaggaggctgtgaggctggagggaccagatggaggaggccagcagctagccattgcacactggggtgatgggtgggggcggtgactgccccagacttggttttgtaatgatttgtacaggaataaacacacctacgctccggcttcgtgtcctgtgtcgcctgggtcgagcacagccttctggtccagcgctgcatgcggcctcaagaccacgtcttccggttgggggctcccagtaaagcgatcctcagcttcttcagcagccagtggccagtgagagcactgacacggctcccgggacctcggcaggatggaagagaagctgaagaaaaccaagatcatctttgtggtgggtgggcctggctcaaggaagggcacccagtgtgaaan

SEQ ID NO: 26014 - DNA, 468 bp, Homo sapiens
  misc_feature (1)...(468): n = A,T,C or G
ggggcccnaatcgatgacatacacagngtggnggaattctgctgctgcaggtccagcacgccagcaagcagatcgccgccgacaagcagtacaagggcatcgtggactgcattgtccgcatccccaaggagcagggcgtgctgtccttctggaggggcaaccttgccaacgtcattcgctacttccccactcaagccctcaacttcgccttcaaggataagtacaagcagatcttcctggggggcgtggacaagcacacgcagttctggaggtactttgcgggcaacctggcctccggcggtgcggccggcgcgacctccctctgcttcgtgtacccgctggatttcgccagaacccgcctggcagcggacgtgggaaagtcaggcacagagcgcgagttccgaggcctgggagactgcctggtgaagatcaccaagtccgacggcatccggggcctgtaccagggct

SEQ ID NO: 26015 - DNA, 564 bp, Homo sapiens
  misc_feature (1)...(564): n = A,T,C or G
ccatagatagacagctcgaannnnncnnnnactggaatcacagtccagagtggagcgaattcggcaatcttggttttgtgtccaaaggtgaaggggtaggaggaggtccctcanctggccctccccacacacatgacggcaggggcaccgtgaggcttttcttattaaaatgaaaaaattgaaaaaaaaggacaaagagtcggtggcgctcctctgcagggcgttctgtgcagagcgaggcccagggcgcagccctcagagggctgcaagcccaccctgcccagtgcccgccgccgtgcttcaccccagctccagcttctgtgttcccttccgcccatgtgcccagccctcccaggcgggcacagcccgggtgcggcggccgtggggggcggcgggtctgatgcatgcctctgccatggagtcgtctgtctgcttcggtgcctgcccctgcctcccacccacctcgtgtatagattttaacgcttctgttaacattagacctctgccacaggctgggatttctatacataagaacaaaagcaaacacctaagacagcaaacgct

SEQ ID NO: 26016 - DNA, 478 bp, Homo sapiens
ggcagcgcaattgagaccctagatagagcgccgtaagtctcctgagaccaagatcatttgaatggccttggtttctaaaggagggtgtgatatgggacaggcggccccccaacctggctgaacctctccagccctgtggacatcccagcctttccttgtcagagctgggcatgtggagcacatgaggacagaccgcaggctgcagagactccttcagacccagagggagctgatgtccaaggagctctggctgtacagtaggcgagggggcccagggaagtgggaaccatggggttggactggtctgcttcccttcccacacctctctacctcctgtctgcaaggataaatgtgccatgatgaaggaattaaccggggatgaggagggggggctgttgcctttctgtgagtatcctcaggagaatgaggatccagagagtccacgtggccctacttggcgtcctgctccctgtcttag

SEQ ID NO: 26017 - DNA, 564 bp, Homo sapiens
  misc_feature (1)...(564): n = A,T,C or G
cattcgaaagacacttcgngnnggggcanncnatcgatcaccactccgtgtggtgcaattctcgagaccaacctgcgcagcatgactagaccccgtgtctacaatttatacaaaaagttagccgggcgtggtggcgcgtgcctgtagtcccagctactggggagactgaggtgggaggattgcttgagcccggggggcagaggctgtattgagccgagatcacaccactgcactccatcctgggtgacagaacaagaccctgtctcaaaacaaacaaaaacatacagaaaattatatgggtgtggtggtgcctgcttgtaatcccagctactcaggaggctgaggtgagaggatcacctaagcctgggagatcaagcttgaggtgaccataattgcaccactgcactctagccagggtgatatgagtgagaccctgtttcaaaaacaataaaaagacaataacagtgaggcttagatgagttagtcagggcctggcatagggtaagtgcccactacatgctagctggcattatgcttgggtgggataaggagcccattacgtan

SEQ ID NO: 26018 - DNA, 470 bp, Homo sapiens
  misc_feature (1)...(470): n = A,T,C or G
gaggtcnntatcgatgtccatactcagtgtggtggaattcgcgcgcggcggcgcagtgaacagtctccttccacaaaaccatggcgtcgctcaaatgtagcaccgtcgtctgcgtgatctgcttggagaagcccaaataccgctgtccagcctgccgcgtgccctactgctcggtagtctgcttccggaagcacaaagaacagtgcaaccctgaaactcgtcctgttgagaaaaaaataagatcagctcttcctaccaaaaccgtaaagcctgtggaaaacaaagatgatgatgactctatagctgattttctcaatagtgatgaggaagaagacagagtttctttgcagaatttaaagaatttaggggaatctgcaacattaagaagcttattgctcaatccacacctcaggcagttgatggtcaacctcgatcagggagaagacaaagctaagctcatgagagcttat

SEQ ID NO: 26019 - DNA, 495 bp, Homo sapiens
  misc_feature (1)...(495): n = A,T,C or G
ggcgaccnnnnnnaatcgagaaactcgagacctctaggccgagtgcgtggaattcattagccaggtgtggtggcagactcctgtaatcccagctactcgggaggctaaggcaggagaatcacttgaacccgggaggcaaaggttgcagtgagccgagatctcgccactgcactgcagcctgggcaacagagcgagactccgtctcaaaaaaaaaaaaaaagggggaggctgccctttgttaaaaaggtttcaaaacaaactgtttttggaaggaggggggcctcattctctgtaaatggtggagtgaaaaatgacggcttgcttaaaaggcggcacttcctcgcccggggagaacaatccttcctttttgcccatgccccattctacgttgagggaggagggggtttttatttccttttaggcccacgcttatgggaaaagatccctggagggtatttttattccaatctgccagggctcaaagaggtggaaatt

SEQ ID NO: 26020 - DNA, 565 bp, Homo sapiens
  misc_feature (1)...(565): n = A,T,C or G
catcgaaacacanntcgngaggngcaanncnttcgaatcactactccgagtggtggaattcgaanagccatctttgcattgttcctcatccgcctccttgctcgccgcagccgcctccgccgcgcgcctcctccgccgccgcggactccggcagctttatcgccagagtccctgaactctcgctttctttttaatcccctgcatcggatcaccggcgtgccccaccatgtcagacgcagccgtagacaccagctccgaaatcaccaccaaggacttaaaggagaagaaggaagttgtggaagaggcagaaaatggaagagacgcccctgctaacgggaatgctaatgaggaaaatggggagcaggaggctgacaatgaggtagacgaagaagaggaagaaggtggggaggaagaggaggaggaagaagaaggtgatggtgaagaacaggatcggagatgatatgaggaagctgagtcaactacgggcaagcgggcagctgaagatgatgaggatgacgatgtcgataccaagaagcagaagaccgacgaggatgactacacacct

SEQ ID NO: 26021 - DNA, 470 bp, Homo sapiens
  misc_feature (1)...(470): n = A,T,C or G
gaggtnntaatcgatgaccatagtcagtgtggtggaattcatggaagatgggcagctttccgactcggattccgacatgacggtcgcacccagcgacaggccgctgcaattgccaaaagtgctaggtggcgacagtgctatgagggccttccagaacacggcaactgcatgtgcaccagtatcacattatcgagctgttgaaagtgtggattcaagtgaagaaagtttttctgattcagatgatgatagctgtctttggaaatgcaaacgacagaaatgttttaaccctcctcccaaaccagagccttttcagtttggccagagcagtcagaaaccacctgttgctggaggaaagaagattaacaacatatggggtgctgtgctgcaggaacagaatcaagatgcagtggccactgaacttggtatcttgggaatggagggcactattgacagaagcagacaatccgaga

SEQ ID NO: 26022 - DNA, 491 bp, Homo sapiens
  misc_feature (1)...(491): n = A,T,C or G
cgcgccccnnnnnaatcgagaccttgaggaactgtggnggaagtcaagctggactgggcccgcgagaggcttgagcagcaggtacctgtgaaccaagtgtttgggcaggatgagatgatcgacgtcatcggggtgaccaagggcaaaggctacaaaggggtcaccagtcgttggcacaccaagaagctgccccgcaagacccaccgaggcctgcgcaaggtggcctgtattggggcatggcatactgctcgcgtagccttctctgtggcacgcgctgggcagaaaggctaccatcaccgcactgagatcaacaagaagatttataagattggccagggctaccttatcaaggacggcaagctgatcaagaacaatgcctccactgactatgacctatctgacaagagcatcaaccctctgggtggctttgtccactatggtgaagtgaccaatgactttgtcatgctgaaaggctgtgtggtgggaaccaa

SEQ ID NO: 26023 - DNA, 490 bp, Homo sapiens
  misc_feature (1)...(490): n = A,T,C or G
gcggccnnnnnaaagagacctgagaccactagtcagngtggnggaattcggagactctgaaagagaatgtgtatttttgagcctacgaagcgcggtttaatttttaagacaaacacacactcctcttcgttccacccaacgaaggcgcacacacacgcacacacactcacatggtatacgcactggcccaaggggcagagaacatcagaaggaacctggcacataactcacctgcctctagagtggtaccgttcagcattcttagaggaaaaggagtggatcacgccgtaatggtggttgcactggcagagaaaagccgggagtcagaccggcggtacggcccggcttccccaagcacctcctcccatccggtggggcgcgtccaaaccgctcctcccgtggagacctcaggtagggacgcggcttggagcaaagccgggccttcctccggtaggctcccaagaagtccctgaaactcccgggcgtccgg

SEQ ID NO: 26024 - DNA, 551 bp, Homo sapiens
  misc_feature (1)...(551): n = A,T,C or G
ntttcgaaccacagtcagagagggaattcgtcgatgcacgctctcctaggggtgatggcagccctattctgccggggatggtgtgtaccagtgctgtgggtgagctgcccagctgtgaggtgagccccaggcccccacaccttacctaacaggcccctggcatcccctcacccaatagctcaagaacggaccttccaggcttggcctctggacccacctcccacctgaaactaagcctttttgccaattagcccccaaacagccagaggttccctagcctgctctaccgtcctgcacagctgcctataaaaagtcacccagtgtcacctgacccctgacagggcctgtctggggcaccactggtgcatgaggtgaggggcacatggttcctggccgggctgcacagcttcggagatgcttgccaaggccccgccaggcncgcggtcttcaccgcgctccctgcctatgaagactgggtcagcagtttggactggcaggtctacttcgccgaggaaccaaagcccgaggctgagcctaggagctgcctgcca

SEQ ID NO: 26025 - DNA, 540 bp, Homo sapiens
  misc_feature (1)...(540): n = A,T,C or G
ngctgattcacactccgangagggcatgattgccggtaagncttgagcggaggaggggatctgcccttctccactcctctcttggatccgcctcggtttcctgtccccccaccacccgcctgccccgcggaagaccgcccagtgagccagcccccaccttccaggcgccttcgccctggggatccaaccaacttgtatcgagtgggcggggcaacggctccccatttttcccgagccccgcccacagagctcttagccaatcctatgcagagagcatctcctggcaggggtctcttcccaaccagaccccacccaggcacattagcgaccaggcttgggcttccccagcgccccaccaccaccacgtgcaagtggagctctgggatgctatgttggggcggcaagcggagggccgagggccgggtaggctagcacgggaggtaagggtggtatgcgatggggcggggcgtgctacggcctaggagagcttaaatggggaacttgatggtgtgggaggcacccgaccttgccacatacagg

SEQ ID NO: 26026 - DNA, 469 bp, Homo sapiens
  misc_feature (1)...(469): n = A,T,C or G
atggcncnatttgatgaccatactcagtgtggtggaattcgcccatcaccacctctcccagctgttagagccgccctgggggccccagaaccagagctggctcccagcaagggtaggacgggccgcatgcgggcagaaagttgggactgagcagctgggagcaggcgaccgagctccttccccatcatttctccttggccaacgacgaggccagccagaatggcaataaggactccgaatacataataaaagcaaacagaacactccaacttagagcaataacggctgccgcagcagccagggaagaccttggtttggtttatgtgtcagtttcacttttccgatagaaatttcttacctcatttttttaagcagtaaggcttgaagtgatgaaacccacagatcctagcaaatgtgcccaaccagctttactaaagggggaggaagggagggcaaagggatgagaaga

SEQ ID NO: 26027 - DNA, 479 bp, Homo sapiens
ggcgctccaatcgaagaccctagttagaggctgtaattcggaacaaaaggcattctgggtacaaatgaaggctttggtttctgggcctttgttctttttctgccgtctcagcctcctcttccaccggaccactccacagcgtttagcaggctgcagaggactgttcaaggcctctctgctgagtctggcctctcagcttccaagcagctcgttccaggagggtggtgctgtattgggaggtttcaccaactgtgctgtgaagtggtggaggccccattgtgtgcccagtgcggtaaagtctttcctgcttttgattgtgcccagggattgccatggaaagcataactgtgtatcagacagttgcacacccaggaatccaagggaacctgaacagctactattcccagcagggggttccagccagcatcacattatttagtccctctggcctcacatacagtctcaagcacattcaggag

SEQ ID NO: 26028 - DNA, 427 bp, Homo sapiens
  misc_feature (1)...(427): n = A,T,C or G
gctgaagagggggagaacctggaagctgagattgtgtaccccatcacctgtggatactgcagagccaacctcatctggaggaagtttgtgtgtcccggcatcaatgtgaaatgtgttcaggtgagcacaggctgcattcagggcccaggagagaggcctcatggcgtctgtgactgctttgggggtgcagctgtgccaagtgcatcctgaggcagggtctccagggctggggagagtgaaggaggtgcggcaagaaccttcaagaagaggaattcgctgtggccacagtgcactgtggcagggaggctggggaggccctcccgctgtgtggaggaggctgcccctcctggacaaggagctttacccagcagatccagtgagagctgctccaaaaaggctgtctctttggtaanggatatgatgagtg

SEQ ID NO: 26029 - DNA, 491 bp, Homo sapiens
  misc_feature (1)...(491): n = A,T,C or G
ggcggccnngnnaaatgagacctctaggaactgtggnggaagtcgcagattccaaaggcacaggaagaagcttgcagtacaaagataaaaatctaaagtggttgctgtggaggacaggggtcagtggtggaagtgagaccgaaatagactctgaagtaatatctggactttgaaattgcagctgctcccaaccccagaacctttgctgtcttgggacggatcaccactgcaagaggggaagttgctactgtgatgaattctgccatgtggcaccagactgccacccagaccacagtgtcctctgcaaccctggtaactcacatacaggcccgattccaccgacagcaaagctggatgctatggctggcagaggcaaaccctttgcctgcacttcaggccaaagccgggatgtggcctagatggttcctaaggtccctgacaatcctgagatcttgcatcttgtctatttcaggacaaaggtgcctacatgc

SEQ ID NO: 26030 - DNA, 481 bp, Homo sapiens
  misc_feature (1)...(481): n = A,T,C or G
aggagtccctttgaaccctnttcgtagactttagtcagngcggtggaattcccccacgccatctccagtccagtctttatcagcctgggaggtgggcagggccccaggattatccccctttcacagatggtaaaatcgaggaaggagttgagcaggatcttggccagagccgtgtgtgttccagagctgtgtgtgtggcagagccgtaccttgaagttgggtttccacctcggcctttcacagacacccaggtgggcttgttgatctctcttggtgccacccacctgccctttggtgggggactttctgttcttctcgggaggctgtttgtgcacccctctccctcccgtgcgcttggttcctgtgcagatgcagcggcacccgtttcccagcttgccctgccccatgtctgggcttagctctgggctctcctggagcggccaccatttccatgcaaccagcctcggtccttcctccgcgt

SEQ ID NO: 26031 - DNA, 426 bp, Homo sapiens
aaatgacagattttcttataatgatagtatttaaatgtttataacatagtttaattttatatttattccagatagtatttaatttagtgctttttacccattttgagttgagttgtagtactttatatattctgactttaaatcctttgtcagacacacatattctttctcccaatccatgccttccctattcattctctgtccagagttttttgctaaagatagaattattaatgatacatcaagtagtggaagtgttttgaaaattctttgaagaatgtgagagctacaccttctaccatgaggcttccaaggtaaagatccttcaaataactgtaatggaaactacggagaatgaattatttacaaataagacaacattaatagctttgggattatctattttttgagacaaaatctcgctct

SEQ ID NO: 26032 - DNA, 471 bp, Homo sapiens
  misc_feature (1)...(471): n = A,T,C or G
aggggtnnanattgatgatcatacttagtgtggtggaattcctggaacccggaaccatggacagtgtccgctcaggggcctttggacatctcttcaggcctgacaatttcatctttggtcagagtggggccggcaacaactgggccaagggtcactacacggagggggcggagctggtggattcggtcctggatgtggtgcggaaggagtgtgaaaactgcgactgcctgcagggcttccagctgacccactcgctggggggcggcacgggctccggcatgggcacgttgctcatcagcaaggtgcgtgaggagtatcccgaccgcatcatgaacaccttcagcgtcgtgccctcacccaaggtgtcagacacggtggtggagccctacaacgccacgctgtccatccaccagctggtggagaacacggatgagacctactgcatcgacaacgaggcgctctacgacatct

SEQ ID NO: 26033 - DNA, 428 bp, Homo sapiens
  misc_feature (1)...(428): n = A,T,C or G
ccagcaccatggcggttggcaagaacaagcgccttacgaaaggcggcaaaaagggagccaagaagaaagtggttgatccattttctaagaaagattggtatgatgtgaaagcacctgctatgttcaatataagaaatattggaaagacgctcgtcaccaggacccaaggaaccaaaattgcatctgatggtctcaagggtcgtgtgtttgaagtgagtcttgctgatttgcagaatgatgaagttgcatttagaaaattcaagctgattactgaagatgttcagggtaaaaactgcctgactaacttccatggcatggatcttacccgtgacaaaatgtgttccatggtcaaaaaatggcagacaatgattgaagctcacgttgatgtcaagactaccgatggttacttgcttcgtctggtctgtgtn

SEQ ID NO: 26034 - DNA, 557 bp, Homo sapiens
  misc_feature (1)...(557): n = A,T,C or G
aactggaacacattccgnannnncgatgatacactgtccgagaggagcaannccagaagatgaccttgatggacaaaaaatattttttaaaaaaaagatatacttgtggaaggggggagaatcccttatctaactgctgaggagggacctgctttggggagtaggggaaggcccacggagtggggcagggggctgcttattcactctggggattcgccatggacacgtctcaactgcgcaagctgctgcccatgtttccctgccccacttcacccccttgggggctgctcaagggtaggtgggcgtgggtggtaagaggttttttttttttacccagggctctggaaggacaccaaactgttctgcttgttaccttccctccgttttctcctggcctttaacagncccctcctgcctgctcctgtccagccaggtctaccacccaccccaccccttttntccggttccctgcccctccaaattgcctggagatctattttggttcctttggagtttctttttctgctaagagagcttttctttgcaggtttctgtag

SEQ ID NO: 26035 - DNA, 483 bp, Homo sapiens
  misc_feature (1)...(483): n = A,T,C or G
aggccctcccaatagtagaccactagttgaaagngccgtaattcgggcctctggaggaagtgctacttcctgggcatcgaccgggacatcgacaccctcatcctgaaagttgtgctccttttggaaataccgtttggaagaaaagtggtgccgacctccgaagagagggaaggggctttgcctgtattgtgcggatgctggtgtcagacggaactgatgtggtcatcccagcctggcagggctgatgggcagcgaaggaggccccggaaccttccttcatacccctgaagtgcagggtgtgtgtggattagacttcagagaccaatcgttggctggtggaggctggtggaggctgcccgaggcagataggacacctgctttccaaccttcctgaggaccccatacccccaccctcctcgctgtccaggcactgaggagagaaaatgtcctcgccctttaaactagagctttccagatttgggg

SEQ ID NO: 26036 - DNA, 468 bp, Homo sapiens
  misc_feature (1)...(468): n = A,T,C or G
agtgtnnnaatcgatatcatacttagtgtggtggaattccacaggcctcatgaagcagttcccacatgggcgtgtggctggggcgtggccaccacagagcacatggctgtgtctaggcgcaagcactttagcagtatctgtttacatgcgcaaggatcaagccgactacctgtgctgtctactgggacagcagtctccgagctactccgtacctccctctgccaggtcgtggagttaggccccagtccctacttgtcactggttcccactgtgctcctaactgtgcagcacctgggagctctggcctggggctggaggccctggtaggagctgcagttggaggccgttctgtgcccagcagcggtgagcggctcccatgggccctgtgtctgcagggagccagggctgcggcacatgtgctgtgaaactggcacccaccctgcgtgctgctgccgccacttgcttcct

SEQ ID NO: 26037 - DNA, 481 bp, Homo sapiens
  misc_feature (1)...(481): n = A,T,C or G
ggaagtcngttgaaaccctnatagtagacatagtccangcggtggaattcggcattatgtataaagcaacgattattttatggaccaagttttcatgtaactgttgcagtgaaagtgcaatatctgacccccctgctcccagcaggaagttgcttggcccgacaatcacagcccctgtcaggggccctgtggccagtgcctcctcctctcttggccccaccttatcctgtcttgcctgctgcctgggagaccagccatccagagaagcacctggaagagtctcgggccctcctgcaataaaggccgggaggccctgtgggcagtgggctcagcctctccccaggggggcagctcccccacggctcctcactccccgcctgcctgcccagccgccagccatgccaaggacaacagcaatagtcccctggggctctcccagcggccctcagccatagatggcaaggtgggcagcctgcccccn

SEQ ID NO: 26038 - DNA, 467 bp, Homo sapiens
  misc_feature (1)...(467): n = A,T,C or G
ctttgacactntgatganggcataagaccccgcgacgcgcctggcgcggacctgcgtcatgcgggcctgggaccgcagcaagcccttgctcttctgctcggccatgaacaccgccatgtgggagcacccgagcacagcgcagcaggtagaccagctcaaggcctttggctatgtcgagatcccctgtgtggccaacaagctggcgtgcggagatgaaggtctcggggccatggctgaagaggggaccatcgaggacaaagtgaaagaagtcctcttccagcacagtggcttccagcagagttgacctgggatttctgtcatgggtgtccctctgtactcagaatgggttcaggccaagtcggtgaagatggatgttggcaaaataggaggataccctcatttgctgaatgggggacctgctctgagcctgcccaggggccaggcctgctccaggttaaactggacgg

SEQ ID NO: 26039 - DNA, 541 bp, Homo sapiens
  misc_feature (1)...(541): n = A,T,C or G
ntttgtaccgtcagggggtttgagacacttccatgaccaactttatgatggagccactgccctcttcctagctgcccaaggtggttacttggatgttattcgattactgctggcttcaggagcaaaagtcaaccagccaaggcaggacgggacagcgcccctgtggatcgcgtcccagatgggccacagcgaggtggtgcgggtgatgctgctgcgcggagccgaccgcgacgctgcgcggaacgatggcacaacagcattattgaaagcagccaacaaagggtataatgatgtcataaaagagttgcttaaattctcacccactcttggtattttgaagaatgggacatcagcgctccatgcagcagtgctcagtggaaacattaaaacagttgcgctgctcctagaagcaggggcagacccatccctgagaaacaaggccaatgaacttccggcagaactaaccanaaatgaacgtatattgcgtctcctgagaagtanagaaggcccagaaagagctaacttagctcatatttgacag

SEQ ID NO: 26040 - DNA, 560 bp, Homo sapiens
  misc_feature (1)...(560): n = A,T,C or G
nagtagatcccccntccnnnnnnncnctcgaaccacacctccgagtggtgcaattcggtcactctcctggaccccaatgaaaagtacctgctacgactgctagacaagacgactgtgagccacaacaccaagaggttccgctttgccctgcccaccgcccaccacactctggggctgcctgtgggcaaacatatctacctctccacccgaattgatggcagcctggtcatcaggccatacactcctgtcaccagtgatgaggatcaaggctatgtggatcttgtcatcaaggtctacctgaagggtgtgcaccccaaatttcctgagggagggaagatgtctcagtacctggatagcctgaaggttggggatgtggtggagtttcgggggccaagcgggttgctcacttacactggaaaagggcattttaacattcagcccaacaagaaatctccaccagaaccccgagtggcgaagaaactgggaatgattgccggcgggacaggaatcaccccaatgctacagctgatccgggccatcctgaaagtccctgaagatcn

SEQ ID NO: 26041 - DNA, 477 bp, Homo sapiens
  misc_feature (1)...(477): n = A,T,C or G
agcaccccaattgagaccctaatagaggccgtaagacgaagctcctgaagtttggctggntcccaatcatcctggccatggtcatcagcagtttctgaggactcatcttgagcaaaaccgtttctaaacagcagtacaaaggcatggcgatatttacccccgtcatatgtggtgttggtggcaatctggtggccattcagaccagccgaatctcaacctacctgcacatgtggagtgcacctggcgtcctgcccctccagatgaagaaattctggcccaacccgtgttctactttctgcacgtcagaaatcaattccatgtcagctcgagtcctgctcttgctggtggtcccaggccatctgattttcttctacatcatctacctggnggagggtcagtcagtcataaacagccagacctttgtggtgctctacctgctggcaggcctgatccaggagacaatcctgctgtacctgn

SEQ ID NO: 26042 - DNA, 480 bp, Homo sapiens
  misc_feature (1)...(480): n = A,T,C or G
cgcccccccttgaccccctnttagtagactttgtcagngcggtggaattcccagctcccttgcctgagagcagatactgttctgaaaactccctggaacaactcacactcgccgcagtcctttgaggtaaatatgattatcgtcacccccatcgtgtagatgaagaaaccgaagtacagaggggttaagtgacttgcccaaggtcacacagccagcaactggtagagctgggatttgaaccccggtagctgcctccaggacctaccgctctgttgctttctcatgtgctaagtggcccaaaagaagagttaaggtgggtggggcaggggagaaaggcaggcagggcctggagcccagcaggagtcactagctagacccggggctctgccagctgtgctggggcaggagcagccctacttccagatgagcccggggactgtccccccgtgcctgtccggaaaggtcggcctcgtgggaccc

SEQ ID NO: 26043 - DNA, 437 bp, Homo sapiens
  misc_feature (1)...(437): n = A,T,C or G
atgtaatacaaatttgatgacacttagacagncnggtggaattccgagtagctgggactatagactaccacccagctgaaattaactaaaaaactaacattcatatggtttaattttatgtttaagactcatttttgtcctgtgggaacccatttacaaaatcaaaagttgcaagcacacaatatttaaggaatatatttaattgtgtagcatgagctcaaattgggcaagtcttggggcaattgtgacccttatctagatttgctccaactccaaaaaaaattatattctcattctgtttgatttcatgtttctaagacaaaacagtgagttggcgatgttaaactaaacaaaacaaagtttgggagagccgtatctgggatcctgtgcttcagtgttatgctctgtggggtctatggtctatggggcactgtccg

SEQ ID NO: 26044 - DNA, 471 bp, Homo sapiens
  misc_feature (1)...(471): n = A,T,C or G
ntagaacatcgagatcactaggcagagcggtggaattcccagttaaagacactgaaatccaggcagttccaatgaggtcaggctgaacggtccccgtagcagagcagagcagcagaggccgcggccgggccaggggcagctgggcaccaggcccatccctgcccgggctgagagctcctgggctctgctctcccagggagacctcagagccctgcaagggagcatctcagacttcctgtggagaaggcatgtgagagatgctaagtaaccgataaagaaaatgaaaaatggagctgaaatttaccccagggtggtgacgtgctggtgagtgaatgactggctgttgtaccggaatccaactccaaaccaaaggcccctcgggagaaaccaggagacggcccctgtgagccctggctgctccccagcagctcacgcgtcaaaaaatgaatgaaaagaccaaaggaacggtca

SEQ ID NO: 26045 - DNA, 468 bp, Homo sapiens
  misc_feature (1)...(468): n = A,T,C or G
nttgagnctatagaccagttggnagagtgctgggacacctggaagggatggagaaactccttgcagttggccttgggaagctggggaggacttgatacttctaagtggccctgggagcaaccggaggtggggtgggccagtgcctgtaggcctgggcctgcctggctgaggatcccagctggactactgccttgctgtctacaaatgatggagcccttccagtctcagcttcctcacaagtaaaatgcggacggcaatgcctctttccagtgacgttgtgaggattcgatgggaagtttcatgaaagcacttancagggtttttgttgagtgctcagaaggtgatagtttggtgttgctaggggaacagaagcctgggctgagaacaggccgtggagagtcacaaatggtcttcagccgtcggaaggcactgttagatttactcttcacaaagaacattttgggacan

SEQ ID NO: 26046 - DNA, 441 bp, Homo sapiens
  misc_feature (1)...(441): n = A,T,C or G
atcgacgttcgatgactattagnccgngcggtggaattcgagtgagcctctttgcaagggttcgtttcctcgggcactcatctttactgaacatggcccagcttgtcattgtgaaggtgacattggttcagtgattgcttaaatggcatgtggaccgtgggaagcagtaggagcgtagtaagacagttggctgccattcaacatttcaaatagatggtttactcaaatcactcacttctggttgatggtaaagagagcagatggcttagaaaacatgatacaggaaaatttagtatgtaatccagtaaatatcctaagttatttattttcatgtgtgtgtgtgtgtttaaatcaagtaacccttttaattgaattttaaaatgacagcgaattttgacattctgagaaatggggattttgagatgtttctctccatatctc

SEQ ID NO: 26047 - DNA, 457 bp, Homo sapiens
  misc_feature (1)...(457): n = A,T,C or G
ttctgtagcctttcgaagccggngtatgttgtcatcggaacancncnnganctgggccttggcacctcactcctggcagtttgtctgtaattcactctggtcacccctctgtggagcagtgtgcctgcctcagtcatctctgttgatgatttaagcctagcagccttcagccaaatgtggcaactgtgtaagccaatacccagctagctcctggaccactcggatgcccatcaacatgtacgaggctggggttacttctcctgggatcccagaaatcctcagatttgcacgcaatgcaaatgggcattcgggggggcctgtgggtggtcccgattctgttcttgggagcgggagtgaaaagcaagcctgtcgtggggaaactggcaccttcactggtggccacgctgctggagctgggcgtgaagctgcctccggcccttggagaggaatgtgaggg

SEQ ID NO: 26048 - DNA, 441 bp, Homo sapiens
  misc_feature (1)...(441): n = A,T,C or G
attgacgtcgactaccctagtccgngaggtggaattcgctgcatccgcgccctgaatctgaaattggtcgtcctgccacgccgcctcaccgcggtataaggtcgtcccatcctgaatggcgggtgcgcagactcaattgcgactttgaggctgtcagccgccacccggcaaccttccagtgaacaggattctgggtttctcaaagctgtaattggagggccactccagaggtgttaaagctccagcacttcgagcctgcctcgtgggaaagtcttaggctgagtctgtaggtgtctgcagttaagaagccagcggtctgcatatgattgctcaggggtggtggctgggtccaacagcattcactacaggcctgccttgaataccacctagcgcagtgctccgcatatcacaggggctggaaacctaacaatttcacttcct

SEQ ID NO: 26049 - DNA, 465 bp, Homo sapiens
  misc_feature (1)...(465): n = A,T,C or G
gacgttaaaancctcgagaacattaggactgtgcggcgtaattcgcaaacgcgatccagaaacgttttataggagctatttatcaaaactgctataataatatctttgtccttttgagtttcagtctctgtttagggagtaatcgataaactactaattaatgttgcataattcacattataatgcacatataattattttgagatgaggcaaaccctatgcatttaatttacagctataattaagtaagctcatttgatactaattaagtaagtctaaaaggatcataggtttgtgtatttaattatcaaggtacaatcagcaactaattccttgaaaagctttcctatcttcagttcaacactgatctcagcccacactacaatttatcttcttgcatcttcaatagattaaaatgcattgtgaattgtggagaatctacttggtaagttagcttctttattg

SEQ ID NO: 26050 - DNA, 496 bp, Homo sapiens
  misc_feature (1)...(496): n = A,T,C or G
agggagtgcccnnnnnnaggcccgcccctgatgnaccntcggaactgatgaccatcaggacagngcggcggaattcgagtagttgtagtgagccccttatgctccttgcatcccatccttaacccttgcctgtaccatgtgaggctatcagaagcacaaggcccacgcctcacctatgtgtcgaccccatttcctaccacctttgtggacgaccccaagcaccccagagatatgaggcaccctttgctccacccacaggagggccccgtcagactctgccagcgcgtactgcccgcttccctcggagacctgctcagacaatggagagggatgggccaggatcttgctctcagtctcacctggagctactgggaagggaaagccatttgaagaataaagtcatccagagcctcgggctgaaaacaggccgtggaaaaacacaaaaaggtcttcaaccgtcggaaggcactgttagaataactcttcacaaagaact

SEQ ID NO: 26051 - DNA, 498 bp, Homo sapiens
  misc_feature (1)...(498): n = A,T,C or G
gtttcntnnnnaaggagaggccngnnnagccagnccctgaagccntcgnctagacacgtttagacagngcggcggaantcacccggcctctgtttcttgctgcccagcctctttcacctgcgcttgctctggcgcttgctgctgtggcaccaagtcttcttcgacgtcgccatcttcgtcatcggcggcatctgcagcgtgtccggcttcgtgcactccctcgagggcctcatcgaagcctaccgaaccaacgcggaggactagggcgcaagggcgagcccccgccgcgcttctgcgctctctcccttctcccctcaccccgcccccaccagcccagtgcgccctgccgccgcgcttgggaggccaagctttaaacatctctggttcctagtttctgattattcggggatgggggggatgggaggggacagggattcacgatccatcgcgtctgcgtttctgttgtcctttcttttccacaacaccctggttttgggg

SEQ ID NO: 26052 - DNA, 473 bp, Homo sapiens
  misc_feature (1)...(473): n = A,T,C or G
cattgagatttctagtnccgtgtggcggagtgccccggcccttgagagtacgcgacacggagaagccagagcctgagcggtcccctcctaatcgcaagcgtcctgctaacgagaaggcaactgatgactatcattatgagaagttcaagaaaatgaataggcggtactgagttgtgcacagtgggatgtaaatatcgccttcctctccctatatccctgccatgaaaaatggcttcctggccgggcgtggtggctcacgcctgtaatcccagcactttgggaggccgaggtgggcggatcacctgaggtcgggagtttgagaccagcctgaccaacatggagaaacccagtctctactgaaaatacagaaaagttagccaggcgtggtggcacatgcctgtaatcccagctgctcaggaggctgaggcaggagaattgcttgaacccaacgggcggatgttgtggtgagccta

SEQ ID NO: 26053 - DNA, 471 bp, Homo sapiens
  misc_feature (1)...(471): n = A,T,C or G
gagccggggggccccaatgaggccaactangatgnctatcggaccgccaggaggaattcaaagaaaaagaaaatcctaccaactccatacccgaggaacctttgaattgaattattttaggaattccatttctcctaccagatgttggtttgttttggaaactctgcatacttctcttttgttgctccttacttcattttggaaagagggtaatttatgccatgagaaactccagatgtttagagctgggaagtaggaatgtttgggcaagaaaaaagggaaaacataaataatcagaaatatgcttgttttagcatctaaaatgattattggatactgttcataatcatcatgggagctacaatttttaattgtttcaactcaattttagtataaatatgacctaatcatttgttcagctgaagaaacttttctgctggtgacactgcaattagcaaatacttcgggtta

SEQ ID NO: 26054 - DNA, 499 bp, Homo sapiens
  misc_feature (1)...(499): n = A,T,C or G
aggcgctggggnnnnnnaatcgaagacccctatcgagtgtcgtggaattcaacatgtcaggcccaagaagcagcatgagatccggaggctgggagagttggtgaagaagctgagtgatttcacaggctgcacccaggttgtagacgtgggctcaggccagggccatctctcccgcttcatggctcttggcctggggttgatggtgaagagcatcgaaggggatcagagactggtggagagagcccagcgcctggaccaggagcttctgcaggctctggagaaagaggagaagaggaacccgcaggtggtccaaaccagccctcgtcactccccacaccacgtggttagatatgtgcagcgggggctacagcgagtggggctagatccccagctgccactgaatctggctgcccttcaggcccacctggcccaggagaaccgtgtggtggccttcttcagcctggctctactgcttgccccactggtggagacgcttatt

SEQ ID NO: 26055 - DNA, 478 bp, Homo sapiens
agacggaacctcgagatcgtagtccgtgtggtggaattccagggtccaattgcccagtgctcagtcaaagcccaaggtggaagacaagtgcttccctgatgagctgatgagctggcctctctgcagactgctccataccctgtgctgtcctgcctcagatgcagagagagcacaaggctcccgctctcctcgtcctcggtgcgcctgtgttcttgctaccatcacagctgaatgcaatgaaaggcggtcctctgagaggagcagggtggagatgctaaagtggaggccccctcccattgctgatagatcctcatctggcatgcgctccaccctccccattctctgctcccacatatcgtagccccatcacagaagatgcgacatggaaaaaagcactgtgtccaccctagttcttaaatttgggcagggatttggggtgtatgttaagagtttttcaaatttgccagattgcatgcct

SEQ ID NO: 26056 - DNA, 459 bp, Homo sapiens
gggccgcaaggtagacccttagacattgtggtcgatttctgcatttcctattttttgtctacttttgggtgataaaaagtactagcccttatttatagatatgagaaacataatgttctaaccaacaacattatggtatttgtgtgacttttatttgaaaaaatgtgagcagtaatttgggttagcctaccttcattaattctatcacatagatttcagtttttagaagggtttctgtcatcatggaagaggtggtctgggactaggtacttctcgtcttgtgagctaaggcttgtgtcatgaaagacaagaggcctttcttaacagcccagtccttgtctgcagggggaggcctgagcatttcccagccccagtgtccacacctctcagaaaagagaaaaaagaatgtcagtttaggagaaaagcttcctttttacttgtgtgggtatgtgtggggct

SEQ ID NO: 26057 - DNA, 446 bp, Homo sapiens
  misc_feature (1)...(446): n = A,T,C or G
agagacgatttgtagacatngttgacgacccttagaccangtggtggaattcctgttgtgattatagtcttggtttacctgtggtgacaaccgggtgttggggacacatgtcaaatgcccctctgagatgggccctaaattccagtaactggggaaagaaccagctgctgtgtcctgagagcctggccctgtgctgtggtctctgctgcaagcccagatttctgggagtaactagtgttaggtctgctgacctttacctaagcagcccctgcctggtaagaaggtgcccattgttcagaggcaaagagaagcctgcggttggcatgaggatgcctgacaacaaaggctggagaagggccctgagttccagcctctccccaagggtccccgccccagtggctgcctctgtcttgacctgtgtaatgaattagtgtgctgtgtcactg

SEQ ID NO: 26058 - DNA, 440 bp, Homo sapiens
  misc_feature (1)...(440): n = A,T,C or G
ctctctctctctttctttctttttctttctctttttctttctttcaagcagtcctcccgcctcagtcccccaaaatagtgggattataggtgtgagccaccatgcacagccttacataaagccttttctaatgagatggatagtaattaacaaatgtgagtttttgatattatataaagattttttctgtgtttcgaagatccgtataactcagtgaatcagtatgttctggatgactaatatgtgatgttaagaaatcatgactgaggccgggcgcggtggctcacgcctgtaatcccagcactttgggaggccgaggcgggcggatcacgagatcaggagatcgagaccaccctggccaacatggtgaaaccccgtctctactaaaaatacaaaaattagctgggtgtgttggtgcgtgcctataatcccagctactn

SEQ ID NO: 26059 - DNA, 436 bp, Homo sapiens
  misc_feature (1)...(436): n = A,T,C or G
nttgaagacaactattgcagngcggtggaattcggacgggaaggggagtttgagaccagcctgggcaacctggccagacccggtctctattaaaaatacgcaaaacacacacaccacacaccccaccccacacagcccacacaccccacacggccagcagccctttctgtcaccgactccgttcccctggccagtgagctctccgtccccttttcctcccttttcgcacacgtgcctttcctgcctgctcccacctggtgcctgaggcgtctctgcgcctcagcactggctgttcggattgcactacggagggcagtgtaggtttgaaaaggaaagtttcattatatagaacactaccaaggcagggcgcggtggctcacgcctgcaatcccagcactttgggagaccgaggcgggtggatcacttgcggacagta

SEQ ID NO: 26060 - DNA, 452 bp, Homo sapiens
  misc_feature (1)...(452): n = A,T,C or G
naccgtgacatccgaaangcggntcataagtcgtctgacgccaacgcggntaccggggaaaccgcggccatggcggcaccgtggcaaatccccagccacatagtgcgcctcaagcccagctgctctacagactcgtcgttcacccggacgccggtgcccaccgtgtctctcgcgtcccgcgagctgcctgtctcgtcgtggcaggtcaccgagccgtcaagcaagaatctgtgggagcagatctgcaaggagtatgaagctgagcagcctccctttccagaaggatataaagtcaaacaggagcctgtgattacggttgcgccagtagaggaaatgctttttcatggcttcagtgcagagcactattttccggtttcccatttcaccatgatctcacgtacaccctgtcctcaagataaatcggaaacaatcaacccaaaaacatgttctcc

SEQ ID NO: 26061 - DNA, 435 bp, Homo sapiens
cgacagtgtccgagtggtcaaggctgatgagagagggaaaatggtccccgaggatctggagaggcagattggtatggccgaggctgagggtgctgtgccgttcctggtcagtgccacctctggcaccactgtgctaggggcctttgaccccctggaggcaattgctgatgtgtgccagcgtcatgggctatggctgcatgtggatgctgcctggggtgggagcgtcctgctgtcacagacacacaggcatctcctggatgggatccagagggctgactctgtggcctggaatccccacaagctcctcgcagcaggcctgcaatgctctgcacttcttctccaggatacctcgaacctgctcaagcgctgccatgggtcccaggccagctaccttttccagcaggacaagttctacgatgtggctctggacacggg

SEQ ID NO: 26062 - DNA, 435 bp, Homo sapiens
  misc_feature (1)...(435): n = A,T,C or G
nttgaagacccttattcgagngcggtggaattcgccccctacaggcctctgggcccagctcctggccaggctgctgccaaggtcaagccctcaagggcattaccccgcctcctcttcatcactgttatttttgtctttagctttaaaggaaagagttgttggtgccattgcaggtgccccctccaggcctgactggctccgccaggcactaacctgccataaccctttgtgctggcctgcggccaggcagaggaagagaggtcgactgtggggtcatttggtgccaaacatggaggtgggcaggctcacctgttcctgggactgtctgagatggcagggcacttgccctggtggctcccacctgaccccaggccttttataggcaggagccccactgcttccagcctctggtgccaacacagttgccacacccat

SEQ ID NO: 26063 - DNA, 435 bp, Homo sapiens
  misc_feature (1)...(435): n = A,T,C or G
nttgaagacaattatcgagngcggtggaattcgcagcagaagcgaggaaaagccacagccccgtgaagcgtccgcggaaagcacagagactgcgtgtggcctatgagggctcggacagtgagaaaggtgagggggctgagcccctcaaggtgccagtctgggagccccaggactggcagcaacagctggtcaacatccgtgccatgaggaacaaaaaggatgcacctgtggaccatctggggactgagcactgctatgactccagtgcccccccaaaggtacgcaggtaccaggtgctgctgtcactgatgctctccagccaaaccaaagaccaggtgacggcgggcgccatgcatcgactgcgggcgcggggcctgacggtggacagcatcctgcagacagatgatgccacgctgggcaagctcatctaccccg

SEQ ID NO: 26064 - DNA, 464 bp, Homo sapiens
  misc_feature (1)...(464): n = A,T,C or G
gaggcgggaggggccccacatgaggccctcgctaatgcccttccgaccagccggnggaattcagcgagcccaacccgcgacgacccacgcccctgagccccgtttccgacccctttcggccggtgtccccaccgccatccctgacccgtggcgctgaagaggattcagaaagaattgagtgatctacagcgcgatccacctgctcactgttcagctggacctgtgggagatgacttgttccactggcaagccactattatggggcctcctgatagcgcatatcaaggtggagtcttctttctcactgtacattttccgacagattatccttttaaaccaccaaagattgctttcacaacaaaaatttaccatccaaacataaacagtaatggaagtatttgtctcgatattctgaggtcacaatggtcaccagctctgactgtatcaaaagttttattgtccat

SEQ ID NO: 26065 - DNA, 446 bp, Homo sapiens
  misc_feature (1)...(446): n = A,T,C or G
ggagataattttgatgacctcactgagaccctctggaccancnggnggaattccttgttaatcagtgggagcttgacattggacatgatgtgtctgcactgtagaaattggcaaaccggctggacgaggtggtcatgtctgtaatcccagcactttgggaggctgaggtgggaaaatcacttgaggccaggagttcaagaccagcttgggcaacgtggcaagaccccgtggctacaagaaatttaaaaattagcctggtgtggtggtgcacacctgcagtcccactctagatcatgccactgtactccagcctgggcaacagagcgagatcctgtctcaaaaaaaaaaaaaattatttaattaaaaaaagtaaaggcccaaaactctataggtgggagaggaatctgcatctccaccataatggggggagttggtctccatcctgc

SEQ ID NO: 26066 - DNA, 443 bp, Homo sapiens
  misc_feature (1)...(443): n = A,T,C or G
agtaaataantttgatgaccattattgagtgcggtggaattcgcagacttgagcgagtgctagagcggacccgagtatgcttagctttttgacgacatgggcgcgttggtcgtcatggtcttcaacgcgctgggcgctgcctatggcacagtcaatagcggttccggcgttgcggtcatgtttgtcatgcgtacggagcagatcatgaagtccatcatcccaggggtcatggctggcatcatctccatctacggcctggtggtggcagtcctcatcgccaactccctgaatgacgacatcagcctctacaagagcttcctccagctgggcgccggcctgagcgtgggcctgagcggcctggcagccggctttgccatcggcatcgtgggggacgctggcgtgcggggcaccgcccagcagccccgactattcgtgggcatgat

SEQ ID NO: 26067 - DNA, 464 bp, Homo sapiens
  misc_feature (1)...(464): n = A,T,C or G
gccccccaatggagacataggaatgacggccgtatgctnnncctactatcatttaataactacacaattcaaattttcctattgtctcagtaaatctttcacatttggtttaacaggatccagcaaatcccatgcattttatttggttactgaggtcttttccaaaccagtaagaggcagttaattccctgtttaattcagtgaagcagagagcaatgtttttctgaggaagatatttaagtagtttaaaatcactgctttaaatatggagaaattcaagaagaaatcctcatatgaaaagtcaccaattgatagcgtgttgtaagaaatgtaattgtacctgatgcaaataaataaatccttagtaatctaggaggctgtgttagagtgtaatttgttctagaaggtccagtgaagcatcttaaattatagtgaaaaaccctatgactctaaatcaattcatt

SEQ ID NO: 26068 - DNA, 462 bp, Homo sapiens
  misc_feature (1)...(462): n = A,T,C or G
gaggcggacgngccccctaccgagnccatcgcagtggcnctcngcancangcaggcggaattccattggctgagctctttgggatcttcctgtacatgggggtttcgtccctgttttttatccagctgtcccatcgggtgttgctcatgctcatgccggcaaaacaccatcctgagcagccctatgagaccaaggtacggccggcaagcatgggggtagggcagtggggtgacgggaaggggatccagagggatctgggagcattgatggatgggatgaatatgaaggagaagctgtgacctgggagccaaattccccacgatgtgggtgggtgggagcaggccgggacgctgtgcactggggcccactggctgctcccctaagtgaagacgtggcggatgcatctgttcacctgcatccagctgggctgcatcgcactgctctgggtggtcaagtccacgg

SEQ ID NO: 26069 - DNA, 447 bp, Homo sapiens
  misc_feature (1)...(447): n = A,T,C or G
gaaaaataattttgtagacatngttgaggacgtttagacagcgcggtggaattcatggtctcagactcctgacctcaggtgatccacccgcctcggtctcccggagtgctgggattacgggtgtgaaccaccacacctggccaacaatatttgttttaattagccaggcgtggtagcatttgtcctagcaatttgggaggttgaggtgggagaatcacttcagcccactaggtcgaggctgtagtgagctataattgtaccactgcactccagcctcggggacagagtgagaccctgtctgcaaataaacaaataaaacatcaggctgggcttgagcatctattcctgctcaaaatttcgcaggcttctcagaagaaaatccaaaccccttacagtgacccagtttgcccttgaggcctccacccacacccccttccccccagtctt

SEQ ID NO: 26070 - DNA, 445 bp, Homo sapiens
agaaaaaaaaacttgatgaccattatagagtgcggtggaattcccccgcatccacttccctctggccacatatgcccctgtcatctctgctgagaaagcctaccatgaacagctttctgtagcagagatcaccaatgcttgctttgagccagccaaccagatggtgaaatgtgaccctcgccatggtaaatacatggcttgctgcctgttgtaccgtggtgacgtggttcccaaagatgtcaatgctgccattgccaccatcaaaaccaagcgcagcatccagtttgtggattggtgccccactggcttcaaggttggcatcaactaccagcctcccactgtggtgcctggtggagacctggccaaggtacagagagctgtgtgcatgctgagcaacaccacagccattgctgaggcctgggctcgcctggaccacaagtttgaa

SEQ ID NO: 26071 - DNA, 441 bp, Homo sapiens
  misc_feature (1)...(441): n = A,T,C or G
nattgatgactatctgaccagtgtggagcacttccagaaagggtagggtcagtaatcatttctgatatttgctggagtgctggctccacgccctggggagtgagcttggtgcggtaggtgctggcctcaaacagccacgaggtggtagctctgagccctccttcttgccctgagctttccggggaggagcctggagtgtaattacctgtcatctgggccaccagctccactggcctgcccgttgccgggcctggactgtcctaggtgaccccatctctgctgcttctgggcctgatggagaggagaacactagacatgccaactcgggagcattctgcctgcctgggaacggggtggacgagggagtgtctgtaaggactcagtgttgactgtaggcgcccctggggtgggtttagcaggctgcagcaggcagaggagagg

SEQ ID NO: 26072 - DNA, 433 bp, Homo sapiens
  misc_feature (1)...(433): n = A,T,C or G
nttgtagaccttattgagtgcggtggaatacccccacacactggtgcccagagccggcttctcatgacatgaaattgcatggtcgagggagtctgtggggaaggaagcccaggtcctggctgcaacctgcacggatgctggattccccctcaccccacctctgcatggccaccccctcccagccctgtggggaaactgttccctggaaccactccactccctgcatccccacacttcacagcatcttccatccccctcccaccttctaggcgaatagtccccagagctgtgttcctccaaggggtccgaggaatcactcactcctggaggctggcaaggagacagtctgaggccagggacacatgaagggatgtccccaccccagcactatcagggcctccccaggcttccagagttgaaagccaggagaaan

SEQ ID NO: 26073 - DNA, 439 bp, Homo sapiens
  misc_feature (1)...(439): n = A,T,C or G
nttgatgtcatctgaccgngtggaggactttctatggagactaacatgggaatcatcgctggagtggcgtttggaatcgcattctcccagttaattggcatgctgctggcctgctgtctgtcccggttcatcacggccaatcagtatgagatggtgtaaggagaagtctttcaagaatgacggaataagagacctgttttaaaaaggaactgcagcaatctttgaaagacttccaaagaatgttagagcacagtacataatacacttgccctgctccctctaccccttaccccacaacgtgcaactgacactcccacccagtctctgctccacctttcagcccacgtcacgtgtagtgtccattttgtgaagccctgttgtgccacagagtgtagccaggtccccctgcagctagtcctagtgaacctcaccccgaggc

SEQ ID NO: 26074 - DNA, 466 bp, Homo sapiens
  misc_feature (1)...(466): n = A,T,C or G
agcgagaaaanntttgatgacactagnctgggcggccgtattcaggatataaaaatatgtattcaacaaacatattcaccaaaagggctatagccctcataactaaccatccaccagagaagcctctgtttctctaccttgctctccagtctgtgcatgagccccttcaggtccctgaggaatacttgaagccatatgactttatccaagacaagaacaggcatcactatgcaggaatggtgtcccttatggatgaagcagtaggaaatgtcactgcagctttaaaaagcagtgggctctggaacaacacggtgttcatcttttctacagataacggagggcagactttggcagggggtaataactggccccttcgaggaagaaaatggagcctgtgggaaggaggcgtccgaggggtgggctttgtggcaagccccttgctgaagcagaagggcgtgaagaaccg

SEQ ID NO: 26075 - DNA, 458 bp, Homo sapiens
  misc_feature (1)...(458): n = A,T,C or G
gaggcgggggnnccnccaatgatgacctacgattatgagcgttcggaancgcaagccggcagaaatggaacgatttttaccgcggtgcgacgtgtcggctttttacttggcggttgttcaggagccagttctgcagagctgggtggggaagggctgggggcgagaggagaggctgccccgaggaacgtggtggcctcagggcagtggactctgcagcgccggaggcagcaatgaatgtggatcacgaggttaacctcttagtggaggaaattcatcgtttgggttcaaaaaatgctgatggaaagttaagcgtgaaatttggggtcctcttccgtgatgataaatgtgccaacctctttgaagcattggtaggaactcttaaagctgcaaaacgaaggaagattgtaacatatccaggagagctgcttctgcaaggtgttcatgatgatgttgacatt

SEQ ID NO: 26076 - DNA, 456 bp, Homo sapiens
  misc_feature (1)...(456): n = A,T,C or G
gagcaggagngncccatgaggcctccgtagnggccctncgcancagcgcggnggaattccagtttcgtttcggtggggtaagggaagggtgcctggcactttccagactggttggagggattgcctcattaactcctcgttaactttgccctgagtgatgctgtgggtgcgagaaacaccggtggccctcctgcttccactgacctgaaggttcattaaaggctggaggcggggcgtgactcatccagggctgggattaaacaatctgttcagatggaaaggtctcatgatcagaactgagcctttaaatagtgcagggcctctggtttctgggggagaggaggcagggacactcacggaggatcctttgggtaccagcgggggtgtccgtggttgggctgttcttgtcaccggaggagagttcaggggccaaagcctcattccagcccctgactg

SEQ ID NO: 26077 - DNA, 444 bp, Homo sapiens
  misc_feature (1)...(444): n = A,T,C or G
ggggattgacgacccttagtccagngtggaggacttcctttgcctttctatgttgcccaggctggagtgcattggctactcacaggcatgatcatggtgtattatagcctcgaactcctggcctccagcgatcttcctgtctcagctcccaagtggctcccaagtgtgcaactgagactacaggtgcaaaacacagtgccctggcttctctgtaaattttagaatcagtttgtagacagtgtctgggaggaaaaaccttttatctaccctcaggtttagtctttggggacctgtgaattaaacagacgaaagatatattaacaagagaaggccaggcgtggtggcttacacccataatcccaacactctgggaggctgaggcgggaggatcgcttgagtccgggaggtcgaggctgccgtgggctancatcatgccactgcact

SEQ ID NO: 26078 - DNA, 501 bp, Homo sapiens
  misc_feature (1)...(501): n = A,T,C or G
tggggaaaanacctgatattcgtgtgcagtgtgcgggaattcgtgcctgggtaccagcatccaagtgaagctatgaatgcccacacaccccagttcttcatttataatattgattcatccaaccgagagcagcggctagaggacaaaggagacaccccactggagctgggtgacgactgtagcctggctctcgtctggcggaacaatgagcgcttgcaggagtttgtgttggtagcctccaaggagctggaatgtgctgaggatccaggctctgccggtgaggctgcccgggccggccacttcaccctggaccagtgcctcaacctcttcacacggcctgaggtgctggcacccgaggaggcctggtactgcccacagtgcaaacagcaccgtgaggcctccaagcagctgttgctatggcgcctgccaaatgttctcatcgtgcagctcaagcgcttctcctttcgtagatntatctggcgtgacaagatcaatgacttg

SEQ ID NO: 26079 - DNA, 438 bp, Homo sapiens
gggattgagacattaacagcttgaggactttccccgtagaccgtcatctgatttggtcttttgatttgggtgtactcttccagcatgtgtcttaaagcttacataagtggtatttgcctcttttccactaagcaatttttaaaaaaattcatcccaactttcatcacatcatcttatgtggaagtgccgtagtccataccagttccctgatttaggacacagaggttgtttctgattttcagctaacaggaattatgccgtcaaactccttgtaagagtcttttccaacatgcacgtgcatctcaagagtgggggtgacttgtagaagcggagggaagagctcagtggttttgccttcgactcctgactccctgcgtgcccctcattgccctgacccaactggacctgaccctgtgtccccctcccacagtccacgct

SEQ ID NO: 26080 - DNA, 447 bp, Homo sapiens
  misc_feature (1)...(447): n = A,T,C or G
gggattgagnccnttgnnnnncactgatgtctctctatccagctggtggaattcgctggtctcgagctcctgacctcaggtgatccgcccacctcggcctcccaaagtgctgggattacaggcagaagccaccgtgcccagccagtaaagtactttagaatagtgcctggcacgtagtaaatgctactaagttttagctaatgttattattacctaataaggttaggagtttcatcatgtataacctgtaaagtgcctgaatgtatagtaataggcaattactggtagctactattattagtagtattataattatttcactcgtcttgctccaaaaagagattggagtctacttgtaaaatagaacagcattttaaaaaatcagtcagaaaattgattgcaaggctttctgagttctggatagaatttcttgtggcagtttaagtg

SEQ ID NO: 26081 - DNA, 451 bp, Homo sapiens
  misc_feature (1)...(451): n = A,T,C or G
cactgagactttagttagagcggcggaattcgngaggaggagcagtggaagttccagccactggtgccagccggcgtcagtagcagccagatgaagaagcggccaacatctgcagtgggctacaagaggcctatcagccagtatgctcgggttgccatggcaatggggtcccaccccaggtacagggctgaaaacataatgtttctggagttggatgtgtcccctccagctgtctttgagatggaattctctcacgaccaagaacaagaccctcgtgcgctacacatggagaggctcatgcgattggacagctttctggaaagaccttccacgtctaaagtccgaaagtccagatcctggtgccagagtcctcagcggcctccaccttccaccacacatgcctccctggcctctgcttctctgcgccctgcaacagtggcggaccatgagn

SEQ ID NO: 26082 - DNA, 458 bp, Homo sapiens
  misc_feature (1)...(458): n = A,T,C or G
gatgccccnnnccccaatgaagnatcaagngtatctgggaaanncgcncnangnaaggcaagatgggtgcatacaagtacatccaggagctatggagaaagaagcagtctgatgtcatgcgctttcttctgagggtccgctgctggcagtaccgccagctctctgctctccacagggctccccgccccacccggcctgataaagcgcgccgactgggctacaaggccaagcaaggttacgttatatataggattcgtgttcgccgtggtggccgaaaacgcccagttcctaagggtgcaacttacggcaagcctgtccatcatggtgttaaccagctaaagtttgctcgaagccttcagtccgttgcagaggagcgagctggacgccactgtggggctctgagagtcctgaattcttactgggttggtgaagattccacatacaaattgtttgaggtt

SEQ ID NO: 26083 - DNA, 459 bp, Homo sapiens
  misc_feature (1)...(459): n = A,T,C or G
tggacannnnnnnnncctgaagaccanataaaatctngtancnncggnggnnnnngggnganagccacagtacctgttcattaaataaatacattagttcttttgaaagtcattgcaggaaaatgcctactgactgttcggatgctctgctagcttgaattggatgtttggttctatccccagtggcagatgcctggagagccctcaagaatcccagcattggggaaagcagcattgaaggcctgactagtgtattgagcactagtggaagccctacagatggacttagtgttatgcaaggtccttacagcgaaacggccagctttgcagccctctcagggggcacgctgagtggcggcattctctccagtggcaagggaaaatatagcaggttagaagttcaagccgatgtccaaaaggaaattttccccaaagacacagccagtcttggtgcaatta

SEQ ID NO: 26084 - DNA, 450 bp, Homo sapiens
  misc_feature (1)...(450): n = A,T,C or G
atttgatgacatnctgatgacgtctgaacagncnggnggaattcctacaaatgtgccaaggaaccctcaatcagccctgattcagctttccagccagtcactggccaccctcttaggctggaaagggaagacaggcagtttctgctcctgttggcattcgctcaggctggtagctatttgcaagactgcctgaggccattccttggaggcaaggcaaagaaagctcagcccaaatcaggcttgagcctccctccagagcacagggagaaacagggtttagctggcttggtccagatacaacccacagcaggttctggtggtggctggggttgtgggggaggggtgggcagggatacctctttgtttcttttcaccccgaaatacaacagcccataacagagacttcctcggaccccactaacagggcaaggaacaagaagactacaccgc

SEQ ID NO: 26085 - DNA, 499 bp, Homo sapiens
  misc_feature (1)...(499): n = A,T,C or G
tggggaatanttttgatttcgtantccgtgtcgnggaattcctgtgttaaagctcaaatgaaccagcccacgtgatgctgaccaggaagcacaaggctgttagcctgtgtccaaggcaacggtgcccatggggccagaggcagctcctgcctgtgcagctgtatttagggctgcgttcccctccctgtcctgccagttgacgtcagtgtggggttactcagctaaggccaccacggtatatccacaaagccgtggtagcaggcgacattaaggctggtccagccattgtggtcagtctcctgcgccttctcaacgctcacccctcgccgcaccagcgtccgcagcagccccatgcctcctggacgccctcctccgggacgctctccaagccctcgacgccgtgctcctcctcgtcctggaaagggtacagagtcgtcccaggctatgctgcaggtgtggggccctggaactctttgtagtcagcgtggtcctcctcgac

SEQ ID NO: 26086 - DNA, 464 bp, Homo sapiens
  misc_feature (1)...(464): n = A,T,C or G
cganaagtaaaattcttaaagacctttcggtagaacgtctgnanagncnggnggaantcacttaagatactatgaaagatgacccatctcatcagatgacatactgatcttattttttggttatacattattgcaccagcattacggtgcagtctcctaactcaaaaactagtgacttttagttttaatctaacatttactcctttataaaaacagattttgcatgggagtggctatcctgtgtacatttccattattgtagtgaagatgaactagagcaactggtaaagtcaccacactgccctaattaagtaaataagatcatgtactactcaagctaattgattttacggaatacacaggaaaagtgaagtttgcttttcctggtgtcagagatgcctccagctacacaacttttgaactgtgctttttaaaggcttgaaaaaacaaaataagatgatctg

SEQ ID NO: 26087 - DNA, 453 bp, Homo sapiens
  misc_feature (1)...(453): n = A,T,C or G
aactgatngacattaggatagagcggcggaattccagctcgctaccacctctgtgggttttttcttttcaggaagcttagggtgggaaatgcttttggccattcttggtcatactcatttattcagataccatttattaatagtaagcccctgctttgtgtaagcactttggtagacactagggtgctcctttgacccccccatcccactccattgtgagctggctcttgtcctcagggtcctgctcaacatcatgtacctgatagtggagaccgatcatcacgagtgtgagggtgacaaggctgagtggaggaccatgcggcagaccttcagagccgagctgggctccccgctgtacaacaatgagccatttgccatcatgctgtttgggatggtgaccaaattttgcagcggtcacgcccctcactttcccatgaagaaagttctcttgcg

SEQ ID NO: 26088 - DNA, 482 bp, Homo sapiens
  misc_feature (1)...(482): n = A,T,C or G
ntttgatcgagtacactaggccangnggnggaattcggaacacaccccctcagccctcgccatcatggaaaatgccaatgttctggcccgttatgccagtatctgccagcagaatggcattgtgcccatcgtggagcctgagatcctccctgatggggaccatgacttgaagcgctgccagtatgtgaccgagaaggtgctggctgctgtctacaaggctctgagtgaccaccacatctacctggaaggcaccttgctgaagcccaacatggtcaccccaggccatgcttgcactcagaagttttctcatgaggagattgccatggcgaccgtcacagcgctgcgccgcacagtgccccccgctgtcactgggatcaccttcctgtctggaggccagagtgaggaggaggcgtccatcaacctcaatgccattaacaagtgccccctgctgaagccctgggccctgaccttctcctacggcc

SEQ ID NO: 26089 - DNA, 480 bp, Homo sapiens
  misc_feature (1)...(480): n = A,T,C or G
cttgagtagcatacacagngcgcggaatttttactctcttgagcctttggacttctctccaagcccctgtgggaggcggacagcagtgaccacctccccttcttttggactgcgacctccttccctcctgggagagccctgtgacctgcatgctactcttaactgttctattcaagactgaatagaagtatttcagtcttgcagaggaggaaatgctcagagctccgaggtgcggctgtggtcgagaaccgggtgctgggccgggcgcgggggctcacgcctgtaatcccagcactttgggaggccgaggtgggaggatcgcttgagcccacgagtctgagaccagcctcggcaacatgccaagaccccgtctctatttttaaaaaagaaaaagaaccgacttctgaatcgcagctccactcatgactaatacctcattatttcagctggctgcacctaattccccacttgcacggcagn

SEQ ID NO: 26090 - DNA, 470 bp, Homo sapiens
  misc_feature (1)...(470): n = A,T,C or G
tgtatgtataannagggaaaaaaaaatcggtagaccattcggtagagcttggaaaangccggcanggtggcacatgcctgtaatcccagctactcgggaggctgaggcgttagaatcacttttacctgggaggcagaggttgcagtgagccgagatagctccattgcactccagcctgggcaaaaatagcgaaactccgtatcaaaaaaaaaaaaaaaaaaggttaatttgcaaaaggaaaaaattccgggctctggagaaaaaacctggtttggaaaagtattaacttggacataaccggcactttccccggaaagccctgggtttggggggttctattaagcccacgggagttggaaacccaatttaaaagggttttttgtggacaaaaggggcttttcccaccatgggctttttcctcgggatggaagggaacaacctcccaaacctggtggggcaggggataaacc

SEQ ID NO: 26091 - DNA, 461 bp, Homo sapiens
  misc_feature (1)...(461): n = A,T,C or G
gatgtgnnnnggggnnnnnnttctgagacctacctagatcttggananncnnanaattngagggngaacagggagacggtgaaaatcaaaaggggttcttttccccacctttttaggtggaggggagcgcctgccattggttggatttttgttctgagatttcggggccgtgttcctaactactccatcccatgacctcgccacacctactggggcatctggctggtgcctgctgccatggccagcccccactctcaccctgcacagggggtcttgcagcccccaggcccacagcctcgttgggaggacagggtggccctggggacaagagggaggagcccaggggcttacctcactgagagtgctccccagcaggcatccactaccccagggccccccacatgtcatggcaaggttggtagtgaatgggcctggttgggagcagcccctggcccattgcc

SEQ ID NO: 26092 - DNA, 481 bp, Homo sapiens
  misc_feature (1)...(481): n = A,T,C or G
ctcgatcgcgtacataggacagngccgcggaattttcgaaccaaagcgacgcttcgaatttttaaaacggaatctctgcacccaaatgcaggactggtgacttaaggagctgcgaagtctgatttaccggcctactctcgacctgccccccacccccagctcaggggaccttttgtctgaacgccagagctactgaccaggtcggggggccgcggtggggagtggaagagccggtcctgctgtccgccctcccagccccaggtggaaggctcagttgtcggaaagacaaaagcgatttcttcccacccctgcagggccagaagttcaggctgccccgcctccactgggggatcgcacctgtgaattacctgaggtatgcatttcccagaaccgtgggcgtacccaccttggggggcatgttggttctggggggaccacctctccttgcattcaggggctgtgaagctgagtaattntcggt

SEQ ID NO: 26093 - DNA, 482 bp, Homo sapiens
  misc_feature (1)...(482): n = A,T,C or G
ctttgatcgcgcacactaggccangncggggaattcgctgtgcatggaaggtcgaggcatccctgctcctgaggaagagcggacacgacagggctggcagcggtactactttgagggcattaaacagacctttggctatggcgcacgcttattttagggccagcggcaggggactccagcctgctggacacttcagtccagctctctcctgactggggcttgcgactcacaggattgcatcgtcccagctgctaacttggggccggggcccctcccttccacatataccttgggtttgtgcatgttttctgctgggtgggttcagagggcaatttctcttttatgtgtacatatgctaaataaacatantttannnnnnaaaaaaaaaaaaaaaaaaaaaaaaaaannngggcccnccggctttaagggcgccggtaaacccccaaaacccccttcaaggggccttttttttttcaaccccc

SEQ ID NO: 26094 - DNA, 460 bp, Homo sapiens
  misc_feature (1)...(460): n = A,T,C or G
cggcgcccatacagagaccataggatagacggcggtattcccgccctgnggggctctggccgcgcctggcctggccgggaccatgtgcgcgtcccgggacgactggcgctgtgcgcgctccatgcacgagtttttcgccgaggacatcgacgggcacatggttaacctggacaagtaccggggcttcgtgagcatcgtcaccaacgtggcctcccattgaggcaagaccgaagtaaactacactcagctcgtcgacctgcacgcccgatacgctgagtgtggtttgcggatcctggccttcccgtgtaaccagttcgggaagcaggagccagggagtaacgaagagatcaaagagttcgccgcgggctacaacgtcaaattcgatatgttcagcaagatctgcgtgaacggngacgacgcccacccgctgtggaagtggatgaagatccaacccaagggn

SEQ ID NO: 26095 - DNA, 482 bp, Homo sapiens
  misc_feature (1)...(482): n = A,T,C or G
catcgaatagcctagcccagngncgnggaattcctgaagttcanagatactttagacaagaatatatctgtgatttaatttagtagttgtatctgctaagtgcacatgaagatacaatttttgtattttcattaacggttacttgtgcatgcttctcagtaacatgggcccttacttagtctctgtttctgccccaaagtcctgcaggcacccatacattagtgactcgttttgtcagggagtgctacagaaaggagcctgtccttttagaaagtacattctgttagcagttttgattacctcataatttgtcactaagggaataaagtaagttaaaagtttcagtgttttcctctgatactttctgaacatcattctcaagttaagggattgagcaaaggaaggcattttccaaggggcaccatgtaaaaatgggatggtatgcttccaagactgatgctgttttaaagtttttgcacatt

SEQ ID NO: 26096 - DNA, 482 bp, Homo sapiens
  misc_feature (1)...(482): n = A,T,C or G
ctttgatcgcgcacactaggccangnggtggaattcgtttcaggtttctgcctgtgatctgcaaagaggagcccctaccggactcatctctgcggggtttcccttcagcatcggcaaccccctttggcactgacatggacttctcaccacccaggcccccctacccctcctatccccatgaagaccctgcttgcgaaactccttacctatcagaaggcttcggctatggcatgccccctctgtacccccagacggggcccccaccatcctacagaccgggcctgcggaggttccctgagactaggggtaccacaggttgtgcccaaccacctgcagtttccttccttccccgccccttccctagtgacccgtatggagggcggngctcctctttccccctggggctgccattctctccgccagccccctttcggccgcctcctcttcctgcatccccaccgcttgaaggccccttcccttcn

SEQ ID NO: 26097 - DNA, 504 bp, Homo sapiens
  misc_feature (1)...(504): n = A,T,C or G
gtcaaactgggagtcaagcttggtccacacctgagtcgggccagagcttacatccagcttttgagcgatgtttactgaggtctggtgcagcaggtcctctgggaagtgtcgcacaaaggagtcgcccactggaaggttctgggcaggcgagatgcccagaggtgatccctgcccgcccctcccacctcccttcccacacagcccatggaggtgtttgtggacgacgagaccaagctcacgctgcacggcctgcagcagtactacgtcaaactcaaagacagtgagaagaaccgcaagctctttgatctcttggatgtgctggagtttaaccaggtgataatcttcgtcaagtcagtgcagcgctgcatggccctggcccagctcctcgtggagcagaacttcccggccatcgccatccaccggggcatggcccangaggagcggtgagtgcgagccgcccgccaaggctgcagggagcaccaccaggagcccagtgtctgacng

SEQ ID NO: 26098 - DNA, 445 bp, Homo sapiens
  misc_feature (1)...(445): n = A,T,C or G
accgaggcctttcganntaagtaggtcactcgaannnncncncngagtggcaactgtctgtaaggctctcctggatggataccttatgatctgtgtggattgtgggccctccacagagggcttggactggggctgctaccatgcctcttcccacgccatcttcccggccaccttctgtcagaagaatgacattgagctcacaccgccaaaaggttatgaggcacagactttcaactgggagaactacttggagaagaccaagtcgaaagccgctccatcgagactctttaacatggattgcccaaaccatggcttcaaggtgggcatgaagctggaggccgcggacctgatggagccccggctcatctgtgtggccacggtgaaacgagtggtgcatcggctcctcagcatccactttgacggctgggacagcgagtacgaccag

SEQ ID NO: 26099 - DNA, 481 bp, Homo sapiens
  misc_feature (1)...(481): n = A,T,C or G
catcgatagcactagcccagngnggnggaattccccggcttaattcagctgagtgttactacccagagaggaacgagtggcgaatgatcacagcaatgaacaccatccgaagcggggcaggcgtctgcgtcctgcacaactgtatctatgctgctgggggctatgatggtcaggaccagctgaacagcgtggagcgctacgatgtggaaacagagacgtggactttcgtagcccccatgaagcaccggcgaagtgccctggggatcactgtccaccaggggagaatctacgtccttggaggctatgatggtcacacgttcctggacagtgtggagtgttacgacccagatacagacacctggagcgaggtgacccgaatgacatcgggccggagtggggtgggcgtggctgtcaccatggagccctgccggaagcagattgaccagcagaactgtacctgttgaggcacttttgtttcttg

SEQ ID NO: 26100 - DNA, 481 bp, Homo sapiens
  misc_feature (1)...(481): n = A,T,C or G
cttcgatcgcagtccactaggccangnggtggaattcggaatagtaggtggaagccaaatgcatgatcttgtggaagtgaacgttaaaaaacagtctttaggtggggtatgcctgcagcccagccactctgcaggccggggtgggactggagctaggggtttgagtccggccttagcaacatagctcgcatctctaagaaaaataatcaggccggcacagtggctcacgtttgtaatcccagcactttgggaggccgaggtgggaggatcacttgaggccatgagtttgagaccagcctggccaacatggggacaccccatctttacaaaaaactagaaatttatctgggtgtggtggctcgtgcctgtggtcccagttacttatagggctgaggtgggaggatcatttgggccaggaggttgattttgccactatgccctagcctagatgacagtgagaccccatctcaaaaagaaactt

SEQ ID NO: 26101 - DNA, 495 bp, Homo sapiens
  misc_feature (1)...(495): n = A,T,C or G
gcgcacannnnnaatcgaaaatcgtagactctaggccgagtgcgggaattccagacatgtagctggtgttttcacaaatagccctgagcctggatacccatgagcacactactactctcaagcagttgctggaagatcccatatcttatcccagccatgccccctagacgcagaaggcttggggcctcttttggcacgtgccatggcatgttcttggtaggtgatccagttgagaagttaaatcttctgcggtgattaagtcatgaggctagcacgtagaccagcgctgagggaagggttccaggatgagattggagcctcgcaataaggagactactgcaaggcattggatgatactccagtgttgtcctcgagaaagccgagtgtgtcccagctctttctggtcattgcacttacgcagagatgcaccttctgctgctgtcatgaggctgtggggattgtgggcagactctgaacacttcctgagctagaatn

SEQ ID NO: 26102 - DNA, 585 bp, Homo sapiens
  misc_feature (1)...(585): n = A,T,C or G
cgcgatcgaacactgtccgagtggaggaactaagggctcctcccttctctccctccctgtcccctcgtgctccctgggcctgggaacatgttggtttcaacgcagggcggagaaggctcctaggagcccatatgcttccaggaggctcacccagcacgtccacgcggccctcagtcacgcgttcccgggcagcggccacggattttgagtcccttacgtccagctgcaacgtctccagggatcccggagggcatgccagggcccgggccgcctcccacagccggccctgtgttttcaggtccctcaacgtggcatacactggaggttttgggagaggaggaagatctgacttcccttctggcctccaagggctcctcccttctctccctccctgtccctgcctatctatacctttgaagctctgggatggatctgaagccagacgtacggccaagtgcaggccgatgcccgaggaacagccggtgatgagcaccacggtgcgggccatggtgagactgtggngagagngctgngctctgggcttgatatcacctgcttcgccccgccccgcctagcggcccncac

SEQ ID NO: 26103 - DNA, 489 bp, Homo sapiens
  misc_feature (1)...(489): n = A,T,C or G
agcgccncnnnnaatcgagattgtataccgtggcgggattcggatttttanaagggaatgataacatcggagttcactatttggaagataacacatttggcagctagtttctgaagaatctggcacccatacagacattaatctctaaggccaataggtgaaagattattacagtcttgctgaaggcagaaattcatgcatattgcagtcattcttatgggagtaaaaggaacaaattctgaccagtttaaaatatgacagttttaaagaaggaccaaaactaaggaaaaatagcttacttcagatctattccacagtaaatatggcaaacaagttgctgatgataatttttgtatctggtattggataattgctgaaagctgagggatggctctttttagccacccagtcccagacagctaagtaatataaaacagattctaaaaacagccttgcttaataggaaagagtgtgagattatgtaacttg

SEQ ID NO: 26104 - DNA, 456 bp, Homo sapiens
  misc_feature (1)...(456): n = A,T,C or G
cgatgataaaaagaaagagaagtttgagacatnctgatgacgtttgaacagnctggtggaattcctcttataaggatgtgtagcccagaaactcaatcttaacacattctaaatgacctggaatttcttggagcaaaaattccagtttaaatatcaggaaaattgtctagactaagagaatggaaacggactttgtgcaaccaacatcaggtacagaaaagagaccccaacaatcatcatgaacccaaacaggcctttctcctcactaagagaagagaacacacacaacccatgccttgttactctttgagaagatgtgccctgcctgtgatctatcagctagagacggaacatacaacctgttctcaatattcaaataattttttaaaggacatggtatcacactgagcaagtgaataatgcaattctgttgtagaagaatgaacggctgaaaag

SEQ ID NO: 26105 - DNA, 553 bp, Homo sapiens
  misc_feature (1)...(553): n = A,T,C or G
tgcagtaacnaagaaccaacaaaanttttgatnaccctccgaagcactagtccagngtgagggaattccacactctgaggaagaagaaaagacttatagaatccggccaggtgcggtggctcacgcctgttatcccagcactttgggaggctgaggtgggtggatcacgagatcaggagatcgagaccatcctggtcaacacggtgaaaccccgtctctactaaaaatacaaaaaattagccgggcgtggtggcaggtgcctgtagtcccagctactcgggaggctgaggcaggagaatggcgtgaacccaggaggcggagcttgcagagggccgagatcacgccactgcactccagcctgggcgacagagactctgtctcaaaaaaaaaacaaaaaacaccagtagacctactctaaaagaaaggatgttgttcagacaaaggaattacaccggcataagaccttggacttgaggagtgaaggacgaccaaccgaaaaggtagatatctggggaatataatgggttacttttcttctccaagtacctaaaan

SEQ ID NO: 26106 - DNA, 484 bp, Homo sapiens
  misc_feature (1)...(484): n = A,T,C or G
catcgagtagcctacgccagngncgnggaattcgacccttatgttctgaacctgacccaggaggagacagggctcagctcagacatcctgagctattatctcctctgcaaccgggccgtctccaaccccttccaacagaggctgactctgtcccagcgagctctggccaacatccactcccagctgctgggcctggagcgagaagcctgtgcctcagttcccttcagcgcagaagcctctgctgtccttggaggagactctgaatgtgacagaaggaaatttccaccagttggtggcactgctacactgccgcagcctgcacaaggactatggtgcagccctgcggggcctgtgcgaagacgccctggaaggcctgctcttcctgctactcttctccctgctgtctgcaggagcgctggccactgccctctgcagcctgccccgagcctgggccctcttcccacccagtgacgactacgatgaa

SEQ ID NO: 26107 - DNA, 463 bp, Homo sapiens
  misc_feature (1)...(463): n = A,T,C or G
aattgtagcccctcgnaannncnnnnattgatgtcccttagtccgtgtggtggaattcaagcgctcgtggttcatcccacccctgggcagtgcccgtcctttcccgccgtggatgatggtggcagccgctgttcccgccctcctcgtcctcatcctgatcttcatggagacacagatcacggcgtgagagagatgggaggaggaggcttatcgtcagccagaaggcgcggaggctgctcaagggctccggtttccacctggacctgctcctcattggctccctgggggggctctgtgggctgtttgggttgccctggctcacggctgccacggtccgctccgtcacccatgtcaatgcgttgacagtgatgcgtactgccatcgcgcctggtgacaagccccagatccaggaggtgcgggagcagcgggtcactggtgtgctcatcgccagcctcgtgggcct

SEQ ID NO: 26108 - DNA, 436 bp, Homo sapiens
  misc_feature (1)...(436): n = A,T,C or G
attgaagaccatnctgatgtcgctttagaacagcgcggaggaattcgtgcctgattattttatctaaattcagggagattgcgtggggcaggaaagcatgcattgaaaaatttctaaccacggttatttaagcataatctgaaaacatctagcccaaaggtaagttgctattttcatcacagttgcctatgcccagggaataagatgtattctttataattgaattggtttttcccacgtctaactggaaacaaaacagaaggggcgtcataaatttgaataagcagaacatactgttctcaacatactgtaatcaaaaggaggaatttcagtgggtctctgtgtgtgtatgatagagagagtgtgtgtttgtgtgtttcaaggtcacaacaggntcttttgttgatggaatttgatctttgttattttttttgag

SEQ ID NO: 26109 - DNA, 491 bp, Homo sapiens
  misc_feature (1)...(491): n = A,T,C or G
gcggcccnnnnnttcgaagaatgtatgccnttgcgggaattcctctcggtctatgggaaactcaggaaggtggccaagatggggccctacagcatgttctgcaaactcctcggcatgtggagacacatctgcaccccgagacaggtcgctgacaaagtgaagcggtttttctccaagtactccatgaacagacacaagatgaccacgctcacacccgcgtaccacgccgagaactacagccctgaggacaacaggtttgatctgcgaccatttctgtacaacacaagctggccttggcagtttcggtgcatagaaaatcaggtcgtatccatgaaccatcccttcactgctgccttgggagaggggaaggtgttcgggctgaggatgagatcaaaccaaagtttaaccacacctcagcattctatgacttcacatcgctgagtccataagagaaccaggaccctccagacccagaaaatacttgggtggat

SEQ ID NO: 26110 - DNA, 571 bp, Homo sapiens
  misc_feature (1)...(571): n = A,T,C or G
agacgagnnnaattgagnnccnatcngataaccgctccgngnngggcaantcggaagaacggggtgggtggctgcctgagtctggaggcgacgcctcggntgtgcagtctgaacctgcccttctcagctgagggtgctgacagcaaggggtgggaggcgggccccgagtccccagctgtggacacttgtattagctttaatagaagagaaatggaggagccatagaatattaaggatgaattcaggaaggcctgagaccatggaaaacttgcctgctctctacactattttccaaggagaggttgctatggtgacagactatggggcctttatcaaaatcccaggctgtcggaagcaaggcaagaagagaggcggaggcgatccttccaggattacactgggcagaagatcacccttgaggctgtcttgaacactacctgcaagaagtgtggctgaaaggccactttgcaaaagattggttcatgcaaccaggtgggactaaatactctctgatacctgatgaggaagaggaaaaggangaggcanagtcagcagagtttgagaagcctga

SEQ ID NO: 26111 - DNA, 528 bp, Homo sapiens
  misc_feature (1)...(528): n = A,T,C or G
gacaagcaaaattagaannccctttcgaacacctagtcagagtggtgcgaattccccaattcgtacgtggagaagtgggaatgcaaaagtactttgacctttaaccttcggtccggcgcggtggagggaaacgcctccgtctctatataaggaattttccggtctcttcgggtcctttttcctctcttgagcgtggggcgcccacaatttgcgcgctctctttctgctgctccccagctctcggatacagccgacaccatgggtttcggagacctgaaaagccctgccggcctccaggtgctcaacgattacctggcggacaagagctacatcgaggggtatgtgccatcacaagcagatgtggcagtatttgaagccgtgtccagcccaccgcctgccgacttgtgtcatgccctacgttggtataatcacatcaagtcttacgaaaaggaaaaggccagcctgccaggagtgaagaaagctntgggcaaatatggtcctgccgatgtggaagacactacaggaagt

SEQ ID NO: 26112 - DNA, 492 bp, Homo sapiens
  misc_feature (1)...(492): n = A,T,C or G
tggggcacgnnnaattggagattttagtcccgtgtggnggaattcgcggatgttggactagaggaaagaagaaggcagggtgggactgatgggctcagtggggagcagggccaggcacactgagccagacatgtcatgtctgagccccagattcgtggccatcaggtaggcaggagcaccccgcagatccaagatgatcaggcagcccttttgggctggcctctgtggcaggggtctgcagagctccttcttgaggtttggaaacagtcgtcatacctgttgattttcctgggggccaatcactagggatctggagctcaccaaaaacaaagcttacattttaatttgtgttgcacacctaccccataatgtctttataccccaaagatccttggtaaatgcttgggggttggaagcggagttgtcatcgtttaaaaggcacttaagtcccttcttccaatctgtcctgtctaggaatgtggagctctgccc

SEQ ID NO: 26113 - DNA, 571 bp, Homo sapiens
  misc_feature (1)...(571): n = A,T,C or G
ggagaatananaaggggcncnnaggggcnnnnncctcgaaccacagtcgagtgtgcngtaattcgcaccttcctgtccccatgcgtggacgactgcgggccctacggccagtgcaagctgctgcgcacacacaattatctgtacgcagcctgcgagtgcaaggccgggtggagaggctggggctgcaccgacagtgcagatgcgctcacctatggattccagctgctgtccacactcctgctctgcctgagcaacctcatgtttctgccacctgtggtcctggccattcggagtcgatatgtgctggaagctgcagtctacaccttcaccatgttcttctccacgttctatcatgcctgtgaccagccaggcatcgtggttttctgcatcatggactacgatgtgctgcagttctgtgatttcctgggctccttaatgtccgtgtgggtcactgtcattgccatggctcgtttacagcccgtggtcaagcaggtgctgtatttgctgggagctatgctgctgtccatggctctgcagcttgaccgacatggactctggaacctgcttgacc

SEQ ID NO: 26114 - DNA, 485 bp, Homo sapiens
  misc_feature (1)...(485): n = A,T,C or G
ntcgaaaccctagnnattgtagagcctagtccgngagctggaattcatacctgacaaaaatggaaagggggtggggaatctgacggtctgtcttgcctaattgattccgctaaacggaatgcaggagatgtgaacggcaggacgctccgattcccacgctcgggggcaagtgataaagcggggccgggcagcctatgacagacagccctgatggggggagggggtatgacaaaaacataaagtgcacacaccatactcatctccattgctaatgaaaggaaaggcgtttcccacccacagccatctgcagcttcccaaatgggcgcaccaactggtctgtatctggtacatagcctgcttctgctgattttttaaccactgtgcaatccggccataaataagtttggctatcttcggtgtgagagattatcagaattcaaggcaagctagtagaaagcacttgcaagaaacgcccatgactgccn

SEQ ID NO: 26115 - DNA, 510 bp, Homo sapiens
  misc_feature (1)...(510): n = A,T,C or G
tcgttttataaaaatatanngggagaaaaaaatttcgagaccctagnttgtgagtgcactatccagagcctggcgatttgcttgcagggaacctcacgacctgacccaaccactgtctacgtggacatgagagccctgagacacgacagagtccgcttagtggaaagaggatcccctcatagtctgcccctgatggaatcgggaaagatacttccaggggttcggattataattgccaacccagaaacaaaaggaccgctgggggactcacaccttggagagatttgggttcacagtgcccacaatgccagcggttatttcactatttacggagacgaatccctccagtcagatcacttcaactcaagactaagttttggagacacccagaccatctgggcacgcacaggctacttggggttcctgcggagaactgagctcacagatgcaaatggagagcgcctgatgccctctacgtgtaggggcactggacgaagccatggagctgcn

SEQ ID NO: 26116 - DNA, 473 bp, Homo sapiens
  misc_feature (1)...(473): n = A,T,C or G
tgagggtnccccntttaaagattcgtgtgncgtgtcgcggaattcgcaaggacaagagcgtgcgcatcatcgacccccgtcggggcaccctggtggcagagcggtagaaggctcatgagggggcccggcccatgcgggccatcttcctggcagatggcaaggtgttcaccacaggcttcagccgaatgagcgagcggcagctggcgctctgggacccataaaacctcgaggaacccatggccctgcaggaactggactcgagcaacggggccctgctgcccttttacgaccccgacaccagtgtggtctacgactgcggcgagggtgactccagcatccggtactttgagatcacagaggagcctccctacatgcacttcctgaacacgttcaccaacaaggagccgcagcggggtatgggcagcgtgcccaaacggagcctggaggtcaactagtgcgagatcagccggttc

SEQ ID NO: 26117 - DNA, 462 bp, Homo sapiens
  misc_feature (1)...(462): n = A,T,C or G
ctagaaaatcgatancactaggccagagnggtggaattcgccatccaggagctgttcaagcgcatctccgagcagttcacggccatgttccggcgcaaggccttcttgcactggtacacgggcgagggcatggacgagatggagttcaccgaggccgagagcaacatgaatgacctggtatctgagtaccagcagtaccaggacgccacggccgaggagggcgagttcgaggaggaggcggaggaggaggtggcctaagctgctcccatcgcttcccacctgtcccctcgaggcttctgacctttgatccgctaggccccccatctctgaaccctagagccccgctttccctccaaggctgactccccgctgaccctaacaatacctttggagctcgctttacctctggctacttcatctccgaccctggctcccctttgagccctaatttatctttaaccc

SEQ ID NO: 26118 - DNA, 461 bp, Homo sapiens
  misc_feature (1)...(461): n = A,T,C or G
catagagnatcgatanccgtgngcaggaatcccacggctgcggaagaggaggttcttcgggacacccgtggatggacacggcaaggaaacaccaggccaaccacagctggggataaaatagcacaaccacaccctgccgtccagcgcctcccagcctgtgccccttcctagtaccaccagcaaccatcaatcccgtctcctcctgcctcctctcctgcaatccaccccgccacgactatcgccatggcagccctgatcgcagagaacttccgcttcctgtcacttttcttcaagagcaaggatgtgatgattttcaacggcctggtggcactgggcacggtgggcagccaggagctgttctctgtggaggccttccactgcccctgctcgccggcccggaactacctgtacgggctggcggccatcggcgtgcccgccctggtgctcttcatcattggcat

SEQ ID NO: 26119 - DNA, 463 bp, Homo sapiens
  misc_feature (1)...(463): n = A,T,C or G
ntcgagnatcgtagaccactaggccagagtggaggaattccaggcacagaatggatgggcacagctgagtggctccactggctttaatctgccccacctcttccacaccaacctccaccctctggttccgatgtgcttggttacaaagcacctgattatttaagagaacgaaaaaccaccaccagttcctgtaaagaataagtcacaggtgcacaggtgaagggctgagttgtggtccagccccagggagtgtgggctgtgaggcaggagcgagctaaacctgtaggagcagcgccacggctgccaggatccacttcgctgccttctctttggtcttcaagttaaaggtccagacataggtggggccgcggatgcgtgttttgtacacgggacactcatagatgttcttggtctccatgcgcgccacaggaatggccttgatgaagatgacaggcatggccgg

SEQ ID NO: 26120 - DNA, 459 bp, Homo sapiens
  misc_feature (1)...(459): n = A,T,C or G
nttcgagattcgtantccgtgtggaggaattcagatatctgtccggccaactggaagcggattgttttaggggcgatcctgctggcctccaaggtgtgggatgaccaggctgtatggaatgtggattactgccagatcctgaaagacatcacggtggaggacatgaacgagctagagcgacagtttcttgaattgctgcagttcaacatcaatgttccttccagtgtctatgccaagtattattttgatcttcgttctctggcagaagcgaacaacctgagctttcccttggagcccctgagcagggagagggctcacaagcttgaggccatctctcgcctctgcgaggacaagtacaaggacctaagaagatccgcgaggaagcgctcagccagtgcagacaacctgactctgccccggtggtccccagccatcatctcttaactacggaggcccgcc

SEQ ID NO: 26121 - DNA, 473 bp, Homo sapiens
  misc_feature (1)...(473): n = A,T,C or G
cgcccccccccnnnnttcganatcgatancctatgcagagnggnggaattccaatctttcagctaacttattctactccgtgagtatggggccgggcctgctggggctgctctggggccacaggtacttcttgtgcaccttgctgcccgtacctgtgattgaatgtaatcgtgggaaccctgagtttcatcagagccggcgcacagtctcctgcagcccaggcgttgcctgagctcaacacggcctaggcccaagctttagcgctgccgggttcttggagtcctgtgggatgagtcagggttctgaattgggctgcaccccctggacaggatgatcggctgaatgtaacagaggaactaacgtccaacgacaagacgaggattctcaacgtccagtccaggctcacagacgccaaacgcattaactggcgaacagtgctgagtggcggcagcctctacatcgagatcccgggg

SEQ ID NO: 26122 - DNA, 543 bp, Homo sapiens
  misc_feature (1)...(543): n = A,T,C or G
ngggagcactgtcaggcgtgcaattcgagagtagccaacattggtactcagaccacaggacccagtggggtaggatgctgtacaccaggccggccgctcctgccgtgcaaatgttcctcagcagcacatagcacctatcgggtccaggagccggctgtgcacatcccaggacaggagcccctgaccgcgtccatgctggctgcggcgcccctgcatgagcaaaagcagatgattggggagcgtctctacccccttatccatgatgtccacacccagctggctggcaagatcacgggcatgctgctggagattgacaactcaaagctgttgctcatgctggagtctccagaatccctccatgccaagatagacgaggcagtggccgtgctgcaggcacaccaagctatggagcagccgaaggcgtacatgcactgaaaccagaaaaggaaatcctcgcttccatggctgccaaaaggacagagtttctggctctcatccctaaagccctgcaaactctaacttatttcccaattagtctggatc

SEQ ID NO: 26123 - DNA, 463 bp, Homo sapiens
  misc_feature (1)...(463): n = A,T,C or G
cttcgacnatcgatgaccactangccagagnggtggaattctagcaacctcaggttgtaatgagggttggaaacattaatagtgttaaggtccttagaaggctgcctagaatgagaagtatttgcataagaatgtatggaataagtctgaagtgtggtggccctgtccaaagactcagcatctagatgcttgggcagtggaggacaactcttacctggaagtcaaggaaatccctcaaggaccaccccctactcagacaaaacttgagaagaaacatgagaaaagttattttttggatgttcctgagtggtatcttgcttctaagtaagcaatccattgtctctaaacaaacatgttttgtctttgtcgggctgcaaaagggctcagcaggaggagcctccagctgaggccagtaaccacacgttgggggttgagggctgcctcacgcttgcctctctggcct

SEQ ID NO: 26124 - DNA, 475 bp, Homo sapiens
  misc_feature (1)...(475): n = A,T,C or G
cgccgccccgcnnnntttcgagatcgtantccgtgtggaggaattccctctccagactttgaggacacttggcgcttcctggaaaaccgggttaatgatgcaatgaacatgggccacactgccaagcaggtaaagtccacaggagaggcactggtgcaaggactcatgggtgcagcagtgacgctcaagaacttgacaggtctaaaccagcgtcggtgagaggaaggggtataagctacaatgcctagaagagaatgagcggacagattgaaagagctttgaaaagtataaggtgccatccacataacctggtgttcacgagaacacactaaaggactcctgagtcactaccacagccacctggaaaccacaaggcatttgatgctaccgttctggtcagggattgggctgcttcttcagttcctaataccagaccaagcctcctgatgcctttctgcactgcaactgtgtgatn

SEQ ID NO: 26125 - DNA, 551 bp, Homo sapiens
  misc_feature (1)...(551): n = A,T,C or G
agcgagatagtcgcggtgaattccatgattcctcagaggcgaaactgccaaactctttctcctgtcttgggttggctggcactggggcgggcatctagggtacagcctctgctcatggcactgggcctccagttcttccacatgtgtgcacccccagcttggccaaccctcagccttgcggtggggcccgaagcatcttcccttccgcttggcgtctctgggattgggatgagtgcctggctcccatctcctcctcaccttttgttgctatcggcagctgctggctcaagggcatcccacctccgggctctgggttcctctgccctggaagggctccaggacccgtcccaataaccacccacggccaggagggccaaggccccgtgctggatatttaaatttaggggccggtctccagggcgcgtagataaataaatacactcagcgtcaaannnnnnnnnnnnnnnnnnnnnnnnnnnnnnnnnnnnnnnnnnnnnnnnnnnnnnnnnnnnnnnnnnnnnnnnnnnnnnnnnngggccgccggcgggggg

SEQ ID NO: 26126 - DNA, 555 bp, Homo sapiens
  misc_feature (1)...(555): n = A,T,C or G
cccccgcccccccccatgaaaccntngcnnnattgaaccctatcagtgtggggaattcgacaataagaccttcctggtgtgggtcaacgaggaggaccacctgcgggtcatctccatgcagaaggggggcaacatgaaggaggtgttcacccgcttctgcaccggcctcacccagattgaaactctcttcaagtctaaggactatgagttcatgtggaaccctcacctgggctacatcctcacctgcccatccaacctgggcaccgggctgcgggcaggtgtgcatatcaagctgcccaacctgggcaagcatgagaagttctcggaggtgcttaagcggctgcgacttcagaagcgaggcacaggcggtgtggacacggctgcggtgggcggggtcttcgacgtctccaacgctgaccgcctgggcttctcaaaggtggagctggtgcagatggtggtggacggagtgaagctgctcatcgagatggaacagcggctggagcanggccaggccatcgacgacctcatgcctgccagaaatgaagcccagccacn

SEQ ID NO: 26127 - DNA, 459 bp, Homo sapiens
  misc_feature (1)...(459): n = A,T,C or G
cgccccccattgatgactcttagtcattcgtggcgaattcggggaatatcctcagcttgataaaaaacattgtccaaaaactaaaaaccctacaggtgacataaaactctgtggtggcaaatgagatgctttcttgctaagatcaggaataaggcagtgtcccctctcactattcctattctattgaacctcctgttggaagttctggctaatccagtaagataaggaaaggaaataaaaggcatatatattcagaatgaaggaacaacctactttgttcacaaatgaccaacacaatactgaaaagaacaaagtcaaagaactgatcctttaagacttgctgtaaagttatagtaatcaagacaatgtggtattagcaaagcagcagacaagtagattagtggaacagaagagtccagaatgtaccgcacaaatatagccaacatgtnttacaagggg

SEQ ID NO: 26128 - DNA, 459 bp, Homo sapiens
  misc_feature (1)...(459): n = A,T,C or G
cggagtccnnnnnggggnnnnnnccttgatgaccctctttgaagtgcggtggaattctctgattaccatattttttcagtttaaaaattaaatcctcgcaaatagacctttggtataggtgcattctaccctaggttattttctaggatcaagaatagaacaatttctgttctttccagcattactctttactattcatatgttcttgttcagtgttttgttgttctcatattctaggtggaaatgaagggtaatctctatgttctattttcagttttctaggaaaccagaaaaacatgggtagtagaaatgtatagaaaatgtatgaggtctcttaaccattgtgttaaacttgcattaagcttcttttttagcaatatcgatgtcagtgttacctcttctttcctttttatttattttttttgagacagagtctcattctgtcgcccagactggatg

SEQ ID NO: 26129 - DNA, 558 bp, Homo sapiens
  misc_feature (1)...(558): n = A,T,C or G
cgccgcgccccnnnnnnaatgatacaccatgcagagngttggaattcccttgaacccgggaggcggaggttgcggtgagctgagatcgtgccactgcactccagcctaggtgacagagcaagactctgtctcaaaaaaaataaataaaaataaaaaaataaattagctggtcttggtggcacatgcctgtagtcccagctacttggggcagggctctgaagcgggaggatcgcttgagcctaggagttcacggctgtagtgagctatgatcacaccacttcactccagcctgggtggcagactaagacactgtctcctaaaataataatagtaataataataataataacaccttcataaaattgtttacccaggggatgaatacctttaatcttcaggttcaggaaaagaataacatgaccaaactttggtgaatgttcattgcagcttcaagaggaaataacatataaatggagtctaaaaataccccgaaatcctttacanaaatgcaaattagaaaggcccgttgggatnttggtatatggcagtggtatctaa

SEQ ID NO: 26130 - DNA, 462 bp, Homo sapiens
  misc_feature (1)...(462): n = A,T,C or G
tgaagatcaaaaaggaannnnnncttgaaagacctntttgatgacgcttaaaccatgtggnggaattccgcctggattgctgcggatgaagaggagacatatgcccgggtcaggagtgatacgcgccccctgaggcacacctggaaacccagccctctgattgtcatgcagcgcaatgcctctgttcccaacctgcgtgggtccgaggagaggcttctggccctgaagaagccagctctgccagccctaagccgcactactgagctgcaggacgagctgagccacttgcgcagccagattgcaaagatagtggcagctgatgcagcttcggcttcattaacgccagatttcttatctccaggaagttcaaatgtctcttctaccttaccttgttttggatcctcattccactctacaacttcctttgtcattagtgacatcaccgaggagacagaggtggag

SEQ ID NO: 26131 - DNA, 435 bp, Homo sapiens
  misc_feature (1)...(435): n = A,T,C or G
nttgatgaccttattgagtgcggtggaattcgacatcgtcaggaagtgcatctgtgctgcctatttccaccaagcagccaagctcaagggaatcggggagtacgtgaacatccgcacagggatgccctgccacttgcaccccaccagctccctttttggaatgggctacaccccagattacatagtgtatcacgagttggtcatgaccaccaaggagtatatgcagtgtgtgaccgctgtggacggggagtggctggcggagctgggccccatgttctatagcgtgaaacaggcgggcaagtcacggcaggagaaccgtcgtcgggccaaagaggaagcctctgccatggaggaggagatggcgctggccgaggagcagctgcgagcccggcggcaggagcaggagaagcgcagccccctgggcagtgtcaggtc

SEQ ID NO: 26132 - DNA, 558 bp, Homo sapiens
  misc_feature (1)...(558): n = A,T,C or G
tgcgtcttagncnnntaatgaatccctnatgccagagngatagagatcccntagccagaggacccagccatgtctctgctgccccttcagtgatgccaacgttgggagatgccctcatcctgtacctgcatctggtcctgggggtggcaggagtcctccagccaccaggccccagaccaagccaagccctgggccctactggggacagagccccagggaagtggaacaggagctgaactagaactatgaggggttggggggagggcttggaattatgggctatttttactgggggcaagggagggagatgacagcctgggtcacagtgcctgttttcaaatagtccctctgctcccaagatcccagccaggaaggctggggccctactgtttgtcccctctgggctggggtggagggagggaggaggttccgtcagcagctggcagtagccctcctctctggctgccccactggccacatctctggcctgctagattaaagctgtaaagacataactcccnccnanaannaaaaacaatatcccctctttttcctttn

SEQ ID NO: 26133 - DNA, 455 bp, Homo sapiens
  misc_feature (1)...(455): n = A,T,C or G
tgacgtccnnggggnnnnnttttgagacctctttgaggacctctagacacgcggtggaattatggcagaacgcgtgctccttcacagtgggtggaacagagagctttttgctaaaagccacctgttttggggaaacagttttgtatagctgttaaaacccaagttttcattttgaataagtgctgtgttgcatttttaatgtgctggttttttgaagaaggaattttctgaaggctgagcattacgtttttccagtttgttgttaactttgcaacagtgtctgtgtgtgtcctttctgcatctgctgaccttctcggggtgggattggaagtggagttgttggggaagatgatttttgagccctggcggctgccagacagctgccgagagtgggggtgccatgagcacgcacaggcacactgnccacctgccagaattgagtgcatgactctgtg

SEQ ID NO: 26134 - DNA, 446 bp, Homo sapiens
  misc_feature (1)...(446): n = A,T,C or G
atgatgtcctctgacattgtggncgtattccgacatgtgatcggcttcccagggagggcgggaggcccgggcgttccccgagtttggggaagctggccgtcccggactgacctgctcggggagagccagcaaaggacacattcggcctggcccaagccctgacgatttcagtgttgttttctgcacgcgcaaaacacctggggaccgaggggatggcagtggcatcctatctttgacagctctgaacgagcttaaccttttttttcagacccctttgctgatgcaagtaagggtgatgacctgcttcctgctggcactgaggattatatccatataagaattcaacagagaaacggcaggaagacccttactactgtccaagggatcgctgatgattacgataaaaagaaactagtgaaggcgttaagaaaaaagttgcctgcaag

SEQ ID NO: 26135 - DNA, 452 bp, Homo sapiens
  misc_feature (1)...(452): n = A,T,C or G
nattgatgacccttagacattcgtggcgaattcngggagtttcccagcgcccctcgggtccgaccctttgagcgttctgctccggcgccagcctacctcgctcctcggcgccatgaccacaaccaccaccttcaagggagtcgaccccaacagcaggaatagctcccgagttttgcggcctccaggtggtggatccaatttttcattaggttttgatgaaccaacagaacaacctgtgaggaagaacaaaatggcctctaatatctttgggacacctgaagaaaatcaagcttcttgggccaagtcagcaggtgccaagtctagtggtggcagggaagacttggagtcatctggactgcagagaaggaactcctctgaagcaagctccggagacttcttagatctgaagggagaaggtgatattcatgaaaatgtggacacagacttgccag

SEQ ID NO: 26136 - DNA, 559 bp, Homo sapiens
  misc_feature (1)...(559): n = A,T,C or G
cccccgcccccccnccnnattgantcactatcgagagngttggaattctgcgcgtgagtcgtgagctggcaggacacacaggttacctgtcctgctgccgattcctggatgacaatcagatcgtcaccagctctggagacaccacgtgtgccctgtgggacatcgagaccggccagcagacgaccacgtttaccggacacactggagatgtcatgagcctttctcttgctcctgacaccagactgttcgtctctggtgcttgtgatgcttcagccaaactctgggatgtgcgagaaggcatgtgccggcagaccttcactggccacgagtctgacatcaatgccatttgcttctttccaaatggcaatgcatttgccactggctcagacgacgccacctgcaggctgtttgaccttcgtgctgaccaggagctcatgacttactcccatgacaacatcatctgcgggatcacctctgtctccttctccaagagcgggcgcctcctccttgctgngtacgacgactttcactgcaacgtctgggatgcactcanagccgn

SEQ ID NO: 26137 - DNA, 559 bp, Homo sapiens
  misc_feature (1)...(559): n = A,T,C or G
ngcggtgcnnncctcgatcactagtccgtgtggcggaattcctttntcttcttttctttcttctttctaaagagacccgaattctagtggttgtaaagcagcagcctcctctgaagaaactcgggaagagaggagaggtgcatgtgtttggcaactttcccgatgggatttaatatcttaagctcctgtaggaaacaggcagaaagtgagatgatatcttgagatctcggtggatgaagatgttttagccattcggggtttgggaggcctttagaaatccagtgaaagccttgggcctttttctagaatagtcacatgcactcagaagtttgctttctgaaaccagaccttcctgtttcagaacgttagccctgccaagaggtgtaggcagtactctagatcaccaatgtccaaaggacctttctgtgataacggaaatgttttgtgtctgcactgctcagtacaatagccattagtcgtgtgtgaccgctgtgtacttngaatgtnggctgatgcaattangaacagaattttttatttaanttattgaaaataaatg

SEQ ID NO: 26138 - DNA, 449 bp, Homo sapiens
  misc_feature (1)...(449): n = A,T,C or G
attatgacccttgacattgtggncgaattccgagaccaagcaggagaaggcgatggcgcacgccgaccccacggagctggcgctgagcggcctggaggccttctctttcgactacatcgtcaagtggcccctttcgctcatcatcaacaggaaagccctcactcgctaccagatgctcttcaggcacatgttctattgcaagcacgtggagcggcagctctgcagcgtctggatcagcaacaaaaccgccaagcagcactcgctgcactccgcccagtggtttgctggggctttcactctgcggcagcgaatgctcaacttcgtccagaatattcaatactacatgatgttcgaagtgatggaaccgacctggcacatcctggagaaaaacctgaaatctgcctccaacattgacgacgtccttggccaccacacaggcttcctggaca

SEQ ID NO: 26139 - DNA, 458 bp, Homo sapiens
  misc_feature (1)...(458): n = A,T,C or G
nattgatgcccctnngnnntttgatgacccttagtccangnggnggaattcctggattctggggatgggaacatcacacttctcagaggcattgctgcacgcagtgatattggcttcttatctctctttgagcattacaacatgtgccaggttggctgcttcctgaagaccccgaggttccccatctgggtggtttgcagtgagagccacttcagcatcctctttagcctgcagccggggctcctgcgtgactggaggactgagaggctctttgacttgtactactacgatggcctggccaaccagcaggagcagatccggctgaccattgacaccacccaaaccatctctgaggacacagacaacgaccttgtcccacccctcgagctctgcatcagaaccaagtggaagggggcatcagtgaactggaacggctcagaccccatcctgtgaccgtt

SEQ ID NO: 26140 - DNA, 460 bp, Homo sapiens
  misc_feature (1)...(460): n = A,T,C or G
tgccgttccnngganannnnnntttgtagaccttttgtcgacccttagaccatgtggtggaattccatatctctggatcaggaagaaggtcagtgtgacctgaacatgacaaataagagtagaatggtagaaatgaggttggagagaggagcaaagactgaaggccaagataaggagatggattttattctgagtatggtgggtagccatgggaaggtttcgatcatgattacttggggagcaagagagagagagctgagagatcagttagaagccttttgcaataatccaagtgagaaaagttggcttggatgaggacagtagcagtagaatcggtgagaaatggttggattcaggatacattcttttcagaagcagcactgagaggactagggtggagtggatgctgggcttgggagcaagagtcaggaatgacttataggtttttggctggtggtga

SEQ ID NO: 26141 - DNA, 437 bp, Homo sapiens
  misc_feature (1)...(437): n = A,T,C or G
nttgaggacccttattgagtgcggtggaattcctacaatctagtggagtccctgaagttgatggggatcaggatgctgtttgacaaaaatggcaacatggcaggcatctcagaccaaaggatcgccatcgacctgttcaagcaccaaggcacgatcacagtgaacgaggaaggcacccaagccaccactgtgaccacggtggggttcatgccgctgtccacccaagtccgcttcactgtcgaccgcccctttcttttcctcatctacgagcaccgcaccagctgcctgctcttcatgggaagagtggccaaccccagcaggtcctagaggtggaggtctaggtgtctgaagtgccttgggggcaccctcattttgtttccattccaacaacgagaacagagatgttctggcatcatttacgtagtttacgctaccaa

SEQ ID NO: 26142 - DNA, 551 bp, Homo sapiens
  misc_feature (1)...(551): n = A,T,C or G
cggggtcccnccnnaattgaaaccctatgcagagngttggaattcctctgtagntagtctgaaaatctgaatgtgtctttcaaaggctgctgtgatttctttggataaaatcagatttcgtatcccttagagagcttccactcctgcttcacctttccaaaaactagacctaaggtagaagccacctcgacagctcaaagccagagttagaacaatcatactgaatagatacaatagtttatctggtgcgtatttggagaaaggcatgacaatcaatacgaggcagcgcagctcggagtcacaggcccgactcggtttgaggctccgcggaccataattagctatcacatcaaacaggttctgtagcctctctcggcttttttcataaaacaggaacaataacagcccctccctctgaggaggtgcgtggaaagcagggtgacgtaggcaagtgtgaaatgccgtgcggngttatcttttagtagaagagtatcctttntggaaatgtcttccttctccctttcacntttctactcactntggggctagaa

SEQ ID NO: 26143 - DNA, 454 bp, Homo sapiens
  misc_feature (1)...(454): n = A,T,C or G
tgagtgcaaagaagnnnttttgagaccttttgaagacctctagacgcgaggnggaattcggagggccctcctggacccgggagcggaccctggtggcggttatgcccgatggcgtgcaacggcggctcgttggggacgtgatccagcgctttgagaggcggcgcttcacgctggtggggatgaagatgctgcaggcaccaaagagcgtgcttgccgagcactaccaggacctgcggaggaagcccttctaccctgccctcatccgctacatgagctctgggcctgtggtggccatggtctgggaagggtacaatgtcgtccgcgcctcacgggccatgattggacacaccgactcggctgaggctgccccacgaaccataaggggtgacttcagcgttcacatcagcaggaatgtcatccacgccagcgactccgtggagggggcccagcggga

SEQ ID NO: 26144 - DNA, 470 bp, Homo sapiens
  misc_feature (1)...(470): n = A,T,C or G
gaggagaaaaaaccgatnnccntnnntttgtagatcattagtcagtgcggtggaattcctactccgggccccaccgcccgccctgcacctccaccgcctcctggccttgaccttcagggacgcaccggggagagcggggcccctaaagtgatggagtggctgtggagtcttcagtttgcctgcatgccaggtgcaagccaaggagttgtaagagcatccccctcataagctaccagtaggccaggactccagtgtggagggatggatctctgaaggtcacagcttggcccttctctgaagaacgtccaccagcatgtcagcccagctgcactgcaggagtgaagggtgagatgactgtcaataaggataaaggccatcttccccacccgtcactcatcctgccaagccatcactgggtaaccaggactcatgggcagtgtcacctctggggccatgctggcatctgtaac

SEQ ID NO: 26145 - DNA, 474 bp, Homo sapiens
  misc_feature (1)...(474): n = A,T,C or G
gtcgtgtcccggggcnncncnnaactgatgtccatctgaccagtcnggnggaattcggcgtcctcgtggaagtgacatcgtctttaaaccctgcgtggcaatccctgacgcaccgccgtgatgcccagggaagacagggcgacctggaagtccaactacttccttaagatcatccaactattggatgattatccgaaatgtttcattgtgggagcagacaatgtgggctccaagcagatgcagcagatccgcatgtcccttcgcgggaaggctgtggtgctgatgggcaagaacaccatgatgcgcaaggccatccgagggcacctggaaaacaacccagctctggagaaactgctgcctcatatccgggggaatgtgggctttgtgttcaccaaggaggacctcactgagatcagggacatgttgcttgccaataaggtgccagctgctgccctgctgttgccattgcccatg

SEQ ID NO: 26146 - DNA, 458 bp, Homo sapiens
  misc_feature (1)...(458): n = A,T,C or G
nattgatgactattagncatggaggcgctatgccaagtgtggtggaattagaccatacgatggcacctggaaaacaacccagctctggagaaactgctgcctcatatccgggggaatgtgggctttgtgttcaccaaggaggacctcactgagatcagggacatgttgctggccaataaggtgccagctgctgcccgtgctggtgccattgccccatgtgaagtcactgtgccagcccagaacactggtctcgggcccgagaagacctcctttttccaggctttaggtatcaccactaaaatctccaggggcaccattgaaatcctgagtgatgtgcagctgatcaagactggagacaaagtgggagccagcgaagccacgctgctgaacatgctcaacatctcccccttctcctttgggctggtcatccagcaggtgttcgacaatggcagcatctn

SEQ ID NO: 26147 - DNA, 458 bp, Homo sapiens
  misc_feature (1)...(458): n = A,T,C or G
nttcgcgactatctgnttttgaggtcgctctagtccagtgaggaggaattcgcataagtcaaagatgagttttgtccttgcgaatcacacagattgagtctgtgttccccagggtgtgccgttacctgatttttaagtgagccagggcggacagcagcttttctgatttacagagttcttcagatttacaaatggacaatgacatcacagtttttagcactgaagccagtctcatgctagtaacagtgggtgagccgctcgagggactgggttctaatgaatactggtatgaacggggagtctctgcagtcgccagacaaatcatactcagccccttcccccgtagagcaacaagtggttcttttagagttgactggcagcatttcctgtcgggggaggtggggtttgatggagttagaaagctcgcctctgtgtacattctctcctgggctggtact

SEQ ID NO: 26148 - DNA, 584 bp, Homo sapiens
  misc_feature (1)...(584): n = A,T,C or G
aggacgacganttcggatcactnntncgngnggnggaanacttcgatcacctatccgtgtggtggaattcgagcaccgagggctgctttcaatccgctatcccatggagcatggcatcgtcaaggattggaacgacatggaacgcatttggcaatatgtctattctaaggaccagctgcagactttctcagaggagcatcctgtgctcctgactgaggcgcctttaaacccacggaaaaaccgggaacgagctgccgaagttttcttcgagaccttcaatgtgcccgctcttttcatctccatgcaagctgtactcagcctttacgctacaggcaggaccacaggggtggtgctggattctggggatggagtcacccatgctgtgcccatctatgagggctttgccatgccccactccatcatgcgcatcgacatcgcgggccgggacgtctctcgcttcctgcgcctctacctgcgtaaggagggctacgacttccactcatcctctgagtttgagattgtcaaggccataaaagaaagagcctgttacctatccataaacccccagaaggatgagacgctag

SEQ ID NO: 26149 - DNA, 453 bp, Homo sapiens
  misc_feature (1)...(453): n = A,T,C or G
nattgagccccttngnnattgatggccgtattcgngcacatgagtgtgtgttcttccccaaggtccccccacagctccaggacaccgctgtcctggcatttgtggccactcactttgtaggaaactcatctccttcctgaggagccgggaggctggaccagtcccgtcgtgcagtcaggtgggcggtgtgtctttccagaaggtcacgtggaaatgtctcgggacttgggtcccggagtgcccgtgaagcgtgtttttgctcctgaggtgcattttctcatcatccttgctttaccacaatgagcaatgaggtcgggttttatatgcaacttattgtatctgaattcctgtagcacacctcataggtatgatttttttaaattaaagaattcagaataaacattttttgatcccccnnannnnnnnnnnnnnnnnaaaaaaaaaaaaaagggg

SEQ ID NO: 26150 - DNA, 466 bp, Homo sapiens
  misc_feature (1)...(466): n = A,T,C or G
gggccgcaattgaaaccccttnnnnattgatgtcctttagacagngtggnggaattcgatctttctaaaaacactactggaagcacaatagctgagattcgcaggctgatgatcgagatagagaagctccagtggctgcaccagcaagagctctccgaaatgaaacacaacttagagctgaccatggcggagatgcggcagagcctggagcaggagcgggaccggctcatcgccgaggtgaagaagcagctggagttggagaagcagcaggcggtggatgagaccaagaagaagcagtggtgcgccaactgcaagaaggaggccatcttttactgctgttggaacaccagctactgtgactacccctgccagcaagcccactggcctgagcacatgaagtcctgcacccagtcagctactgctcctcagcaggaagcggatgctgaggtgaacacagaaacactan

SEQ ID NO: 26151 - DNA, 461 bp, Homo sapiens
  misc_feature (1)...(461): n = A,T,C or G
ggccccgaattgatgaccatctgacattgaggtcgtcttcggaaactctggctcggaattttgtcaactattctggctgttgtgaaaaatgggaactggtagagaatgtaaaccggttatacaaagagaatgaagaaaaccaaaagtcctatggcgagcggctgcagctgcaggatgaggaagacgacagcctgtgtcgcatctgcatggatgccgtcatcgactgtgtcctactggagtgtgggcacatggttacctgcaccaagtgcggcaagcgcatgagtgagtgtcccatctgccggcagtatgtggtgcgagccgtgcacgtgttcaagtcctgaaacaggctcccctcaccaggacagtcacccccaaacttgacccccaacatttcaatgcacagaagggactggaaagttatgttcaaaggctgaagctattttaaaacattattttgactn

SEQ ID NO: 26152 - DNA, 462 bp, Homo sapiens
  misc_feature (1)...(462): n = A,T,C or G
ggccccattgagcccctttgnnattgangacgcttagaccagncnggnggaattcggatctacagcagccaaaggcttgtccctgactttatattgctgcgcctggctatcgactgagtcgtccgtgaggaaaaagaggcgaggcttttccgagatcgtctcagcgatggcgcttcggtcgcagttttgggggttctcggtttgcaggaaccctgggtgcaggttcgcagccctgtcaaccagctccgagccggcagcgaaacctgaagtggaccctgtggaaaatgaagctgtcgccccagaattcaccaaccggaacccccggaacctggagcttttatctgtagccaggaaagagcggggctggcggacggtgtttccctcccgtgagttctggcacaggttgcgagttataaggactcagcatcatgtagaagcacttgtggagcatcagaatggcag

SEQ ID NO: 26153 - DNA, 477 bp, Homo sapiens
  misc_feature (1)...(477): n = A,T,C or G
agggtgnncnnnnctcgatagcactacttagtgtggtggaattcggaggcggcgggcgaagcgcacgtcgagcgggggagcggcgctgcctgtggagatccgcggaggccgacaggattcgttggctgccgtccccgctgctgtgcattgggttaaaaacgacaaccaacatcagccatgaaagatccaagtcgcagcagtactagcccaagcatcatcaatgaagatgtgattattaacggtcattctcatgaagatgacaatccatttgcagagtacatgtggatggaaaatgaagaagaattcaacagacaaatagaagaggagttatgggaagaagaatttattgaacgctgtttccaagaaatgctggaagaggaagaagagcatgaatggtttattccagctcgagatctcccacaaactatggaccaaatccaagaccagtttaatgaccttgttatcagtgatggctct

SEQ ID NO: 26154 - DNA, 476 bp, Homo sapiens
  misc_feature (1)...(476): n = A,T,C or G
agagaaaaaanntttgctcgacgtcactagtccgtgcggtggaattcacaggaggaaagagcatctacggtgagcgcttccccgatgagaacttcaaactgaagcactacgggcctggctgggtgagcatggccaacgcaggcaaagacaccaacggctcccagttcttcatcacgacagtcaagacagcctggctagatggcaagcatgtggtgtttggcaaagttctagagggcatggaggtggtgcggaaggtggagagcaccaagacagacagccgggataaacccctgaaggatgtgatcatcgcagactgcggcaagatcgaggtggagaagccctttgccatcgccaaggagtagggcacagggacatctttctttgagtgaccgtctgtgcaggccctgtagtccgccacagggctctgagctgcactggccccggtgctggcatctggtggagcggacccactcccc

SEQ ID NO: 26155 - DNA, 474 bp, Homo sapiens
  misc_feature (1)...(474): n = A,T,C or G
tgggggcnnnttttgtttgcactctctagtgcggnggaattccaggtccggatttggagaggagagtgccagtcaggcgcaaagacccggaggtgagcggagtaattggacagtgttcaggtacctancaggtctgtgggagggaccctgcgttccacaaagaggttgtattttgcataacaggtgatgaagccatgaagggttaagtatttcaggctaggattagcaggtgtgcgacttaaaagcagggagaccacttaggagtaatgcagcgagaatggatgaggcttgatttaaagtatagaagggtggctgggagcggtggttcacgcctgtaatcccagtactatgggaggccgaagcgggcgtatcacttgaggtcgggagttcgagtccagcctggccaagccccgtctctcctaaaaatacaaaaattagccgggcgtggtgtgcgccagtaatcgcagctactcg

SEQ ID NO: 26156 - DNA, 429 bp, Homo sapiens
  misc_feature (1)...(429): n = A,T,C or G
gccgcaccaccagccagcgcaggccctggtggagaggcctccctggctgcctctgggaggggtgctgccttgtagatggagcaagtgagcactgagggtctggtgccaatcctgtaggcacaaaaccagaagtttctacattctctatttttgttaatcatcttctctttttccagaatttggaagctagaatggtgggaatgtcagtagtgccagaaagagagaaccaagcttgtctttaaagttactgatcacaggacgttgctttttcactgtttcctattaatcttcagctgaacacaagcaaaccttctcaggaggtgtctcctaccctcttattgttcctcttacgctctgctcaatgaaaccttcctcttgagggtcattttcctttctgtattaattataccagggttaagtgacatagan

SEQ ID NO: 26157 - DNA, 457 bp, Homo sapiens
  misc_feature (1)...(457): n = A,T,C or G
ggccccattggagacctctgnctttgaaggcgtattcgaantccactcggacgaggactatgagaaggtgccactgcccaactcggtcttcgtcaacaccacggagtcctgcgaagtggaaaggttgttcaaggctacaagcccccggggagagccccaggatggactctactgcatccggaactcctctaccaagtcggggaaggtcctggttgtgtgggacgaaacctctaacaaagtgaggaactatcgcatttttgagaaggactctaagttctacctggagggcgaggtcctgtttgtgagtgtgggcagcatggtggagcactaccacacccacgtgctgcccagccaccagagcctgctgctgcggcacccctacggctacactgggcctaggtgatggcagtccatgtggctgccaggccaaggcagtcacaggggccctgaccccagg

SEQ ID NO: 26158 - DNA, 461 bp, Homo sapiens
  misc_feature (1)...(461): n = A,T,C or G
ggcggggttgagcccctngnnattgatgtcctctagaccagcgnggnggaattcggcctccacgctgaggtgagggctctactgggggtcctgccgccttggcgcattttggactcaagaccctgtgcacctctcagcaggcctttgctggacagatgaagagtgacttgtttctggatgattctaagagctcaggcctagggtgtccacccatccacccttcacatggggactgtgaacaggccatacagggggcctccagtggatggactggccaagaagttaatgcctaccgcaggacctcaccctggactccctaagaggtggtcaacagagcagccccttctagaacctgcccagaacttctagaacccatccgcggtccaccctgggccgctccctggcctcgctgccctgtcagtcgcctgtgagctcctgctccttcctgggcctgcagccct

SEQ ID NO: 26159 - DNA, 478 bp, Homo sapiens
  misc_feature (1)...(478): n = A,T,C or G
tggagnncnnnnnctcgatagcactacactagtgcggnggaattcggaaaggtgccgcccgcatctcccgccagacctgaatgaactgaaatgatcgagtgtcactgagtgcccaggaccacccctaccccccgccgtgcaggccggccccgcccggtcaccactctcggacctgtcactgagcattcaggacccccacccccggtcgtgcaggccgatcccgaccaatcaccactctcaacctgtgactgagcatccaggaccggcttgccatgcaagccggccccgcccgggcactgatctcggacctgtcactgagcatccaggacccaccccgctccgccgtgcaggccggccccgcccagtcaacactctcgacctgtgactgagcatccaggacctccttgccatgcaggctggccccacccggncaccactctcggaccttgcaggggcttccctgctccttgagaatggg

SEQ ID NO: 26160 - DNA, 451 bp, Homo sapiens
  misc_feature (1)...(451): n = A,T,C or G
nattgacgactcttagacttggatggcgtattccatgtctgtcccacctgtacctgacacagaagctggggagcctaggagagctggtggaagtgtgtctgaactcggagtgctctgggagcgggctccacagcctccttgtgggctccagccccttgtcagccgcagcctctcttgagggggactccctgtctcctgaggcccagctgggccaggactccatcctttcagatgcccctgcaggcctggggctccttctgggaagtatggggcctagggcttggtccccctcttctgaggccctctcctgtatcccgacctggaagctttgatgggtcatgggccatgccataccccctgtggcaatggagtgtgtggatgctcacctgtgccatctgtcctcctgtctgtgccaggaggcacctgagttctctgctggtatcctgccccc

SEQ ID NO: 26161 - DNA, 453 bp, Homo sapiens
  misc_feature (1)...(453): n = A,T,C or G
cttgacaccctgganatgatgtcctctagaccancgggnggaattcggaagcccaggcggagaacctcatcaccgccaatgcattagagccccagaaagtatagaactgaagtgcagccatcacgtggaagcctctggaacctgaggcggctgcttgaacctttggatgcaaatgtcgatgcttaagaaaaccggccacttcagcaacagccctttccccaggagaagccaagaacttgtgtgtcccccaccctatcccctctaacaccattcctccacctgatgatgcaactaacacttgcctccccactgcagcctgcggtcctgcccacctcccgtgatgtgtgtgtgtgtgtgtgtgtgtgtgactgtgtgtgtttgctaactgtggtctttgtggctacttgtttgtggatggtattgtgtttgttagagaactgtggactcgctttn

SEQ ID NO: 26162 - DNA, 500 bp, Homo sapiens
  misc_feature (1)...(500): n = A,T,C or G
agagcggatnnnnnnacctgagaccactgtcagngtcgtggaattccggngtcagcaaggagactccaggcttcagacacccacgtggaggaaatctgattccctgagcaaatctgacatccctggggaagggtcagcaagacctcgggttgagatgagaggtgacaggagctcccagactccatgagggggagcctgcttggtttatccggaaactgggattgggggtggggggcctccccttgccctcacctggacaacagctgcgccctctggcggtgaccgcatggaccaagggggtcccacctcagtctgggaacaaatgtcctcccagagaggctgagcctggcgccatgttcctggggaagtgcctggatcatggtccccctgggccattggagtcattgagccttaaatccacccccagcaaggcctggcccagaaccacccatcacccttcaatgcagtcaggtggaccagaggtccctaaagaagtggca

SEQ ID NO: 26163 - DNA, 502 bp, Homo sapiens
  misc_feature (1)...(502): n = A,T,C or G
ngagcggatnnnnnnnaatcgagantcatcgagancacttggaagtgcctgggaatgatggagccgcctgcatccgctctgcctgggagccaggcagctgactccgaccgggaggatgccgcggtggccagggatctggactgcagcctggaggcggcggctgagctgagggcggtgtgcggccttgataaactgaaatgccttgaggacggtgaggatccagaagtcattccggagaatactgacctggtgactttgggggttagaaaaaggttcttggaacatcgggaagaaaccattacaatagatcgagcctgcagacaagaaacattcgtttatgagatggagtcacatgccataggaaaaaagcctgaaaattcagcagacatgattgaagaaggggagcttatcctatctgtgaatatcttgtaccctgttatatttcataaggacctatacaaatcagccttcttttattttgaaggaacattttataatgata

SEQ ID NO: 26164 - DNA, 504 bp, Homo sapiens
  misc_feature (1)...(504): n = A,T,C or G
gggcgagngnnnnnntttgagacccatcgtagatccctagggcagtgtcgtggaattcaacccggctcgagaaagaatcttacacatgtgttgaagacattgatgtcatagggagcggggagctgcattcccttctgggctgttactgctaaatctcagtatgaacagaccaggcggaaagcttggtggccaagcagtctgtgtgcttccccgctgatggagaacgttgcgttgttcacaatagggcctcatgggtgtagccgcatggcagacccatggctggcgcagctgcctgttgccgtctgtcttcagtaactgctgctctgttaactgttctattctgatactacgcgtgttgttttttacaacaggtatgtttttgtttcagaaatatgtattgcttttctcatattttttgcaaattgtattgtcaacatgggtcatttaaagtcctgtatgaaccataacctgctgtggtacctttgtacatgtttgattctgtat

SEQ ID NO: 26165 - DNA, 498 bp, Homo sapiens
  misc_feature (1)...(498): n = A,T,C or G
gggcgaggggnnnncctgagancactgagancagtgggaatgacggcgaatcaaggaacccccacattctctcactgaagtttcccaccaggatgaccccacagccagagtcccttggcagcccctcaccccagaccccccttctaaggaaaaagagaggttcagagcgttggaccttcatgaacagtggcctggctggcgtggcagggccaaggcccacccactgccatcccccttctgtgtgtccctctcccccagttatgaggcccagggcctgagctctcttccccagcattgcccccacccggaaaccccacctttggagagttaattgtctgtgtgaggtgcttaacctatcagccctgagaacacaaagcaataatctttgttactgagatgcgcggctgttcgtgttttgggtttttttttttttttaaggttccctaataaaagaaaagctgcattttatggggttttatttttaattttctacacgtt

SEQ ID NO: 26166 - DNA, 449 bp, Homo sapiens
  misc_feature (1)...(449): n = A,T,C or G
gtctgagccttcgccctcctgctctccctccatgtccacctaggaggctgcctacacctgggcaagggcacccgggctcggctggatttccaggaagacccaccctatgacgactgcccccactcccagaccctccccccagcctgggattgagccctggggatgacccggggttggcaagggaagagctgaaatcgccctgtccttggggaccccaccctttgtgccatctgccgtttccctagtgctgggcatccagtcagccctcaataaatgcttatgaatggagaaaaaaaaaaaaaaaaaaaaaaaaaaaaaaaaaaaaaaaaaaaaaaannnnannnaaaannnnnnnnnnnnnnannnnnggannnnnnnnnnnnnnnnaaaaaaaaaaaaanaaaaaannnnnnaannnaannnnnnannntttaaanaacccaccccgc

SEQ ID NO: 26167 - DNA, 457 bp, Homo sapiens
  misc_feature (1)...(457): n = A,T,C or G
catcgacatcgatagcataggccangccgnggaantcggcgttcactgccaatctgtagggttgccattggctgtcaggaagagtcctgcacagagggtcctgtgccctgcagatgcgatggggcgcttccttcctttctcatccatttatctttcagttctcctttcctatgtaaagtgatggtggcatcacttttctcctttattccattaactcagaaaattaactgattcagagcgtgccttcctcccctctcgctccacaacaccacatagctctgcagcggtctcttcctaagtgtttggtggaacttgctggtgaagccatctagattgggcccagcggaagggctgagctgccaggatgaccccaaagggatgggatgttacagttgggtccttgggtccttgaaggcctttgctgccccagggctggatggggcagaaccagattgtt

SEQ ID NO: 26168 - DNA, 455 bp, Homo sapiens
  misc_feature (1)...(455): n = A,T,C or G
ctttgagattcgataccntgngcggnggcannccccgcccagagaagcacagcatgcgtgcctgcacttgcccccacgctgctaccctgctctgggtaccaaggacacaggcacagcagagcccccaccctcgaggcacctgtcatcttgtgacagggacaggctgaggggcaaatgaccagaaagggtggcaagtgccatgtcagacatatggtcttcatacaggggatgtcccaggactgctgggccagagacccctccatgtgggtcagcatcacccaagccaaaggccaaggaggtctcttggggggtgtggccgtcagaacaaagctgccaatgcgcgtacttttaaaggtgcggtcagctagtgaggctgtggctggccctggctgcatccagaccctggagtgtcctgcagccaggggcggatgcaggttttgtggggcctgaggctt

SEQ ID NO: 26169 - DNA, 458 bp, Homo sapiens
  misc_feature (1)...(458): n = A,T,C or G
aaccgagtacgtatgcatgngcggnggcanttaangactacaggatgagtctggggacccactggacccgctgcagctccagcaagtattaatcctattgctggacatcacattcaacacccggcttcaattagtggggcccaacagagcagaccaaagcggaaccgagtcacgcgcgccggacgccacccgacaggaggggaaacggggcagctctcaaaaccctggaggcgcagaccgtccacacgggacagggacgcccgctcggctccgctccgcgctgatcctcaaggtctcgcggtttccccgccgcccacccggacgccgacgaaagccagcgagctcctcagcctcaggcatctgcatctgggaccgacctcctgggctggctgatcaaagaggaagcagcagcaatgtctgctgtgggggctgcaactccatacctgcatcatcctggn

SEQ ID NO: 26170 - DNA, 502 bp, Homo sapiens
  misc_feature (1)...(502): n = A,T,C or G
gggcggggnnnnnnaattgaagacccctcgacagcccctnggaantcgcttctcctgccagaaagctgacggtagggaaagtgtccagcggaataggggctgcagctgaagtcctggtcaatctgtacatgaatgatcacagacctaaggcccaggccacctctccagacctggaatctatgcgaaagtcatttccccttaacctgggaggcagcgacacgtgttacttctgtaagaaacgtgtgtacgtgatggaacggctgagcgccgagggccacttcttccaccgggagtgtttccgctgcagcatctgtgccaccaccttgcgcctggccgcctacacctttgactgcgatgaaggcaaattttactgcaagcctcacttcattcactgtaaaaccaatagcaaacaacggaagagacgggcagagttgaagcaacaaagagaggaggaggcaacatggcaagagcaggaagcccctcggagagacactcccaccga

SEQ ID NO: 26171 - DNA, 566 bp, Homo sapiens
  misc_feature (1)...(566): n = A,T,C or G
ntttcgaacctctagtccacngtggnggaattcgtgagcgtcgtctatatctttggaaacaacccggtggacgaaaatggtgccaagattcctgatgagttcgacaatgatccaattctggtacagcagttgcgccggacatacaaatatttcaaagattatagacagatgatcatcgagcccaccagcccttgccttctcccagaccctctgcaggaaccgtactaccagccaccctacacgctcgttttggagctcaccggcgtcctcttgcatcctgagtggtcgctggccactggctggagggttaagaagcgcccaggcatcgagaccttgttccagcagcttgcccctttatatgaaattgtcatctttacgtcagagactggcatgactgcgtttccactcattgatagtgtggacccccatggcttcatctcctaccgcctattccgggacgccacaagatacatggatggacaccatgtaaaggatatttcatgtctgaatcgggacccagctcgagtagtagttgtggactgcaagaggaagccttccgcctgcag

SEQ ID NO: 26172 - DNA, 562 bp, Homo sapiens
  misc_feature (1)...(562): n = A,T,C or G
atcgactttcgtcactatccagagnggggaattcgaggggcagcagcatttcgctggaaaggcagcagatgcttttccagccccggttcagctggaaggcttggaggccggccagaccactctggcgtctcctgaagtgggtccctggagaccgaagaggctcagtggagtctgtctgttgtcagcactgctgcctgatccctgcaagacaaatggcactttccttcttcagaagcatcatctgccttcattattagcagtaatattattcccagttattaattcttaccggtgccagttttgcacatctttttgttgctctatttgtgtctcatttacttctcaaattgcccctgggggcaggaatgaggatgcagagagatgcacgttaattactgtcgcatttttctgtggagaaaactgaggccagggctgaacgctcacagctaaggagctgtgattcagacccagttctgtcagctctagaggcaccctgcatcatgcccaccagggtgatccccctgggatggaccatctcgggatatgaggcctcggaggctgg

SEQ ID NO: 26173 - DNA, 573 bp, Homo sapiens
  misc_feature (1)...(573): n = A,T,C or G
ggtgnnnnnaaggggnnnnnaggggnnnnntttcgaanacccctcgaaccactatccatgtggtggaattcggtttcgggatgaaactgttccacctcagatcatcagacgttagattctcgtaagaggtgcccaacctacatcccttgcacgtgcagtccacaatagggtttgtgcttctatgggaatataatgccacactgatctgacaggagtcagggctcaggtagtaatgctcactcacctgccgcacacctcctgctgtgcggccggttcccaataggccatggaatgcttattggtccacagccctggagttgggcacccctcttctaaggcagaagcttctactgtcttatgagcagcgtcctggcctccacagcagggagagagcaggaatacccagccacagatactggtcaagatattgatcaacttcctaccatcatggtggaggcaagcctggaggcctctgggtggtcatcangtcaccccagcacattttcctgccccggactcctggccacgctgaggttgctgtgagcagacacgatgtgcagggtcatggatgtg

SEQ ID NO: 26174 - DNA, 569 bp, Homo sapiens
  misc_feature (1)...(569): n = A,T,C or G
ntttcgaacctctagtccagcgtggngaattcgccatgtgtggcaggtgcgctgacagccattgtggccggcgaggaggagctccgtggcagctataactgggactacctgctgagctggtgccctcagttccaaccactggccagtgtcttcacagagatcgctcggctcaaggatgaagctcggccatgtcccccagctccccgtatcgacccaccacccctcatcactgccgtggcccacccaggagccaagtctgtgccccccaagccagcaaacacagctgcagcccgggccatcttcccaccagcttctcaccgctcccccatcagccatgaaggctccctgtcctcagctgccatgtcccccagcttctcaccctctctgtctcctctggctgctcgctcacccgttgtctcaccatttggggtggcccagggtccctcagcctcagcactcagcgcagagtctggcctggagccacctgatgacacggagctgcacatctagctgtggcccaggctgggccccgacctgggatgcgcacagtgtccgcaacgcaggccccn

SEQ ID NO: 26175 - DNA, 566 bp, Homo sapiens
  misc_feature (1)...(566): n = A,T,C or G
catcgacatcgatncacagtccacgnngggcaattccgggagtggtagagaaaggaacacatgtaattcagcaaatattttttgagcatctactatgtgccagacactgttctgggtgctgtagacagagcagagaacaaaacaaacaaatccctaaccattaagtagggttgacattcaggtaggtttgaaagctactgtttgaaagttacagagcagagaacaatacaaaatccctaaccattaagtagggttgacatttaggtggtttgaaagcttgactgtgcatcagaaataagagaggaaggctgggctgggtagctcacacctgtaatcccagcactttgggaggtcaaggtggggggatcatttgaggtcaggagtttgagaccagcctggccaacatggtgaaatcccatgtctactaaaaatacaaaaattagccgggcatagtggcacatgcctgtaatcccagctactcgagaggctgaggcagcagaatcgcttgagcctgggaggtggaggttgcagtgagctgagatcacgtcactgcactccatgcctgg

SEQ ID NO: 26176 - DNA, 454 bp, Homo sapiens
  misc_feature (1)...(454): n = A,T,C or G
atttgagatcgatgcatgcgcgnggacnttgagcattcgncttttcttacagccttgagtggagatggaccctagtgattatttattttgactgctttattttgaagatgaagagaaggaggccaaggtatgaaatgattatcagaaccaggaatgcaacttgaggtcaccattactagatacatagtgagtgccaggtggtttaaatactcattatcaccttcaatcctcacaaccattgtatgaaacagggatgctatgtttattttagggatgagaaaacccaaaactcaaggaggtaactcacccaaggttttgcagctagtaagtggtacagctgggatccaaacccaggtgtgtcccagctacgctgtgccatctactcctctgccctgctgctttcctaatcagtactccctgatgcttctgaggaagagtcgaacttatagaggtc

SEQ ID NO: 26177 - DNA, 454 bp, Homo sapiens
  misc_feature (1)...(454): n = A,T,C or G
aatcgagaccctgaggaccgtgcggnggaatccgngatatttccagtcatgtataaagatcaaatagggccattagcataatatatccatcactcctagcatgtatcatttctttgtgttggagacattccgtatcttctcactattggaaaattacaataaatggttgtaaattcagtcaccttatagagcactgcacctgtccctcctgtccatcgtcctcctgtgcctgttccccagcctgtggctgccccctccccagagaagccgatgcttgctggagcttggtcggtgctctgggtaaggagacgctggggctcacgccgtgctcaggctgctccctggtcatccaggcacttctcacctgcctttctcctccctgaccacctcccccctaggactgaagcgggtcacgggcgggtttaactccaagaacagatgtgatgccaggact

SEQ ID NO: 26178 - DNA, 458 bp, Homo sapiens
  misc_feature (1)...(458): n = A,T,C or G
nattgcactcgataccctcggcacgngccgnggaanttcaaaaaccagggcctgaggcaggagtcagcttgataggcccaagaagaagagggcatcaatgcatggggtggagtgaatggggaatgagcccatggtgtcatccagcacttctgcttatggatcatgatctcacactagctatgagtctcaagtctttgtatcactcggtcctgtaccaggccatggaatatgctgtataaatgtttattgaataaagaaaaaataatgattaacccgtacagcccctccatcagcaaattagaatatcaacattctaggctcagttgttcactccctagctccaggcacaacccaactgaaagaagtgatatttatggagctctcctaaggctttgtttctataaaaaaatatagagttcagcccacaaggaggatgtccagatgggcaaccagttgat

SEQ ID NO: 26179 - DNA, 566 bp, Homo sapiens
  misc_feature (1)...(566): n = A,T,C or G
cttcgacattcgatccactagtccgcgnggnggaattccgaagttaacaatgatgggcaaaatgcaaacaacttggaacttgaagaaatggagcgtcttatggatgatgggcttgaagatgagagtggagaagatggaggtgaagatgccagtgcaattcaaaggcctggattaatggcttcagcttggtctttcatcaccaccttctttacttcactaataccagaggggcctccccagggttgcaattgacctgaaaaactgtgccagctacaaggagggtctgacttcaggaaagtggtttaaataacagtgcaatttcaaaaaaatttataactttcttttgatcattaaggacagaggtgttttttttctttaggcttctcatgcatatgaatattttaagcacgaatggactactaaatatctgagttttttttttttttttttaaagatcctaacaaaacatagcggaacaatattggccttccaggggttactcatttcaattatgtgagtataccaggacagacctattttcatgtcttatttctttaaagagctgg

SEQ ID NO: 26180 - DNA, 566 bp, Homo sapiens
  misc_feature (1)...(566): n = A,T,C or G
nttcgaaatcaatcnacagtggggaanncgcgaaactggccatccgaaaatagcaacaacccagactggctcctcactcccttttccatcactaaaaatcacagagcagtcagagggacccagtaagaccaaaggaggggaggacagagcatgaaaaccaaaatccatgcaaatgaaatgtaattggcacgaccctcacccccaaatcttacatctcaattcccatcctaaaaaggcactcatactttatgcatccccgcagctacacacacacaacacacagcacacgcatgaacacagcacacacacgaccacagacacacagacgtgcaccaccatacctggcgaaaattttgtatttttggtagagatggggtttcaccatgttgctcaggctgttctcaaactcctgagttcaagcgatctacctgccacagcctcctagagtgctgggatgacaggcatgagccaccgcacccagcctctgcgtggggtttcgtcagggctgggtctgtgccctgaaggggagctcattccagcccagctccccactgctgcagatggtg

SEQ ID NO: 26181 - DNA, 554 bp, Homo sapiens
  misc_feature (1)...(554): n = A,T,C or G
cattaggaccacagtccagagaggaggaattcgctcttgtttggagttctctcaccctctttctctttccttccctcccccattctccagatctccctctgtctccttttctctgtctttcttggcccctgtctctctccatgttgggggtcctaactcccccaccccatatctacgtgtcctccgggcattgccctctccatggctctggtcaccctgaccctctgccctgcccaccgcaggtcccccggggtcccggaagccccttctggctgcacctgccatgtttacagagggcccctgggctgcgcggccccagcctgggcaccctgatttttaagccatagacctggggtcagggcaggaaggaacttcactctgctgcttccgagaacctcggccgtgacattcggggccgggcgggacccgccccacagactccaacttcccctccaaaccccgaagtgaaacccgccaccgggttacccccacaaggaggccgctgcgagaattcacccacccccgaanaaataattaaactcgcaggccaggcn

SEQ ID NO: 26182 - DNA, 455 bp, Homo sapiens
attgaaaccttgtagactattagtccagtgcggtggaattcagtggcgtgatctcggcttactgtaacctccgcctcctgggttcaagcaattctcctgcctcagcttcctgaatagctgggactacaggcgcctgccaccaccacgcccagctaatttttgtatttttagtagagacggggtttcaccatattggccaggctggtctccatctcttgaccttgtgatccgcctgcctcgacctcccaaagtgctgggattacaggcatgagccaccgctcctggcccacttttttatacaaacagcttaggtagagtaagccattcttttttttctttctttcttttttttttttttggaaacggggtttcatttttttccccaggttggagggcagggcttaaaaaagggttggttgaaccctaaccttccaaggttaagggggtcttgtttt

SEQ ID NO: 26183 - DNA, 453 bp, Homo sapiens
  misc_feature (1)...(453): n = A,T,C or G
atctgagtcgatgcatcngcgnggacnnncacacacagacacacacactgcctggatgcatgtatgcacacacatgcgcgcacacgttctccttgaaggcacacgtacgcacacacgcacatgcacagatatgccgcctgggcacacagataagctgcccaaatgcacgcacacgcacagagacatgccagaacatacaaggacatgctgcctgaacatacacacgcacacccatgcgcagatgtgctgcctggacacacacacacacacggatatgctgtctggacgcacacacgtgcagatatggtatccggacacacacgtgcacagatatgctgcctggacacacagataatgctgccttgacacacacatgcacggatattgtctggacacacacacacacacgtgtgcacagatatgctgtctggacacgcacacacatgcagatan

SEQ ID NO: 26184 - DNA, 544 bp, Homo sapiens
  misc_feature (1)...(544): n = A,T,C or G
nattgaaacccctttccagngnggcgtagaacctctgacgagatatcaatgccttggaggaggatcctgccgcccagaagatgcagctggccttccgcctgcagcagattgccgctgcactggagaacaaggtcactgacctctgacctacaatctccagtgctgccttgggacataggtacttgaggtacctgagagcccctcaggggaggaggccgagtggctgtggctgaggcccccaccctcccctggaacgcgccccaagccggagtgggtgcagccggaacccgcccagcgtctagactgtagcatcttcctctgagcaataccgccgggcaccgcaccagcaccagccccagccccagctccctccggccgcagaaccagcatcgggtgttcactgtcgagtctcgagtgatttgaaaatgtgccttacgctgccacgctgggggcagctggcctccgcctccgcccacgcaccagcagccgcctccatgccctangttgggcccctggnggatctgagggcctgtggcccccangg

SEQ ID NO: 26185 - DNA, 452 bp, Homo sapiens
  misc_feature (1)...(452): n = A,T,C or G
aattgaaatcgatagcatcggccangcggngaantaggaggcgctcatcttcgacaacaagcacaccaactacaccatggagcacattcgtgtgggctgggagcagctgctcaccaccatcgccaggaccatcaatgaggtagagaaccagatcctgacccgggatgccaagggcatcagccaggagcagatgaatgagttccgggcctccttcaaccactttgaccgggatcactccggcacactgggtcccgaggagttcaaagcctgcctcatcagcttgggttatgatattggcaacgacccccagggagaagcagaatttgcccgcatcatgagcattgtggaccccaaccgcctgggggtagtgacattccaggccttcattgacttcatgtcccgcgagacagccgacacagatacagcagaccaagtcatggcttccttcaaga

SEQ ID NO: 26186 - DNA, 551 bp, Homo sapiens
  misc_feature (1)...(551): n = A,T,C or G
gggatagaaccccctnncnnnnncattgaganccntctgcagngnggcggaantcgagagactccgaattcgagaggtcgaaggaagcacggngacagaaggaaaggatgtangaaaaggagagggtattgccctatagaaaaaggttccttttgtatccggaacttccctttcaaatgaaaaatattggaggcaaaataaccctcccgggaacaatctaagattgggggaaaccggtatgatccttggcccctggatcggattttccaaggcacttttggatcttcagttggtagttggggggcgagaaagaagtaactttaaaaatgagaagggggaaaagaaaaaggatgaagcccgggttcgtgcgaatttcttctagcgaggcatcagccaggagaaggactcggtgcgtctctgggctacgcanaagtttcccggcccgcggagcgcggcgggagggaagctgcaccagcctctgtggcgggcagagcangagcgcagaagcggctcgcgggactcagtctcggtcttgtcgggagagcactcgg

SEQ ID NO: 26187 - DNA, 453 bp, Homo sapiens
  misc_feature (1)...(453): n = A,T,C or G
cctgagttcatagcatgngcgnggacnttctaaaggccccacctcacctcccctaaaggtagtcttgcgccagggctcacgtgcctgggcagggctgattgccaaggggcccaatggcctcgtgactggggacccagcacctggcaggggtgggggtgggacactcagaggaaggagtggaggagggagagacgctggcccgggacccgaggggcgtgggcatcgggaggcgggcccgggttaggggcgggaccgccgcctggttaaaggcgcttatttcccaggcagccgctgcagtcgccacacctttgcccctgctgcgatgaccctgtcgccacttctgctgttcctgccaccgctgctgctgctgctggacgtccccacggcggcggtgcaggcgtcccctctgcaagcgttagacttctttgggaatgggccaccagttaactacan

SEQ ID NO: 26188 - DNA, 459 bp, Homo sapiens
  misc_feature (1)...(459): n = A,T,C or G
aatcgaactcgataccatcggcacgngccgnggaanttgacgccatctcaaacaaacaacaacaaaaaaactaagagtaaagcagggttcatgagagtctcaaaagtaagcactaagctgaaggtgaggaggtagggagagaaggggtaaggtgagatcactggtttagctaaccatccccctcaggagctgggatgactgggattggtactcaaacctcttcctctgatgccagcagcaagtaagaggagaggtgagagacaggaggaatttgaaatacacagaatgaatattaagggatctaaaacttcttggtaagtagaagaagagatggcctttggcgattagtggagcccaggtgggccttcaggttgagtgggaagtggtttctgggaggagggttaagggaattggcacagagcagtgttgagtgtctgtttgcaggttttcgccctgttn

SEQ ID NO: 26189 - DNA, 449 bp, Homo sapiens
  misc_feature (1)...(449): n = A,T,C or G
atcgagacccgagcccaggggggaattccagcagtgtgctagaggcttttaattcacgtaacagtccagggagggaaataatgctgtcatgtttatatagatgaggaaactggtcccgcactgaaactctaccatcccatctaccctctcttccaggtctcccccctggacttgtctcagggtataacccttggtataaccaagggtataacctgaatttcacattcagccccagcccaagactgccagagagccacagaggactgtaaaaaagccctccagccccagtgtctagctcagtgcctgggatagagcaatgataacatagtgaccatagctaccatgtgtcaagtgctagctacatgtcaggcatttatatgcatcaacactaaccagccctgcctcccccgcccccagtanaaccaatgaggtaggcatgatttaataga

SEQ ID NO: 26190 - DNA, 442 bp, Homo sapiens
  misc_feature (1)...(442): n = A,T,C or G
caactgatgactgagnacctngcggnggaattcggggagggagatagagggagagatgcagcttgaccccatttgggaccggagcaaaccctatgcttatctctctgtccttcctggggtggactcagatgggtggaacacatgccttcctcccactattccacccccaagttgatctgagtatcgccaggggcccaaagtacagaattgctctttgctttttattgaatgctccaaaggccaaacttctggggctgggggtcggtcttggaaacaggggtcctctgacttcctcatgggggcttgctcataccgcccctcctggtggatgggagtgaccattatgtggagtccctgccacttactgccttatgacctaagactgatgctgtggtgtgctggaggagcacctgatgtcttgtttacagagcaaggctttcct

SEQ ID NO: 26191 - DNA, 465 bp, Homo sapiens
  misc_feature (1)...(465): n = A,T,C or G
aggccgcggcccgcaatgagntcccagntatcctcgcacagngcggnggaattccttgagaatctaaaacataccacaaaaatacatccccagtcttttgttctgtctgaggttagaattaattcaaattcagaatctgttgtgagaaatgcccaggctttaaaaattaaaaatggatggatcttctctgaactcagggagggcacatacttagatacctacaagacttggaggaattaagagttcacccttcatctcaccaaattttccccatttttctctttcttgtagaaggagagaaaccatgctctctagcaacattgagcaaaaatcataaccactcatctaatttctaagaggcacctccatcgagggccggtctcctgcttctttagacctcttctatctttgttacaggagaggacctgtggatagacttagttttgacataaaacaatgcccatt

SEQ ID NO: 26192 - DNA, 456 bp, Homo sapiens
  misc_feature (1)...(456): n = A,T,C or G
attgagncctcgagnactatctgtccagngcggtggaattcggaaaagggaacatctcatcacctccgaggatgagtaccctggagccttatgacggcaccattggatgtcatgtttaattccatccaagttgtggatggcaggcaggagcatggagccctcaggaatccatggaggacatcaaggcatcccaaggccatattcccctaacattacttccactgctaacaacaggactgcctttccctggtgggaaaatgctccctttatgcccattcctgtatcccctccaacacccacatctgcattaaacacccgtgcctttctcttggagagggtttagatgcagatcccggccctggagctttaaaatgcttgcccttccttcttcaaggatcaaatgtttattggggttcagctttgttttctcaaaaggccatggtatcgtgcccctga

SEQ ID NO: 26193 - DNA, 464 bp, Homo sapiens
  misc_feature (1)...(464): n = A,T,C or G
nggccgcggcccccattgagntccctgggaccttcgtaccgngcggnggaattcccgggtgcgcccaggaacccgcgcgaggcgaagtcgctgagactctgcctgcttctcacccagctgcctcggcgctgccccggtcgctcgccgcccctccctttgcccttcacggcgcccggccctccttgggctgcggcttctgtgcgaggctgggcagccagcccttccccttctgtttctccccgtcccctccccccgaccgtagcaccagagtcgcgggtcctgcagtgccccagaagccgcacgtataactccctcggcgggtaactcattcgactgtggagttcttttaattcttatgaaagatttcaaatcctctagaagccaaaatgggacacagtaaacagattcgaattttacttctgaacgagatggagaaactggaaaagaccctcttcagacttgac

SEQ ID NO: 26194 - DNA, 458 bp, Homo sapiens
  misc_feature (1)...(458): n = A,T,C or G
ntttgaggncctcgatgnaccatctagtcagtgcggtggaattcgcgccacctccagcaggagctggagcggactcggaggcagctggtacaacaggccaagaagctcaaggagtacggggcacttgtgtctgaaatgaaggagctccgtgaccttaaccggaggctccaggacgtgctgctcctgaggcttggcagcggtcccgccattgatctggaaaaagtaaagtcagaatgtctcgagcccgagccggagttacggagcactttcagtgaggaagcaaatacgtcgtcctattaccccgctcctgcgcctgtcatggacaagtatatcctagacaatggcaaggtccatctgggaagcgggatttgggttgatgaggagaaatggcaccagctacaagtaacccaaggagattccaagtacacgaagaacttggcagttatgatttggggaac

SEQ ID NO: 26195 - DNA, 464 bp, Homo sapiens
  misc_feature (1)...(464): n = A,T,C or G
agggcgcgncccccaccgagnccatggaatngccctgacanncngcggaattnccgggngngcccaggaacccgcgcgaggcgaagncactgagactctgtctgcttctcacccagctgcctcggcgctggggcggacgcgcgccgcccctccctttgcccttcacggcgcccggccctccttgggctgcggcttctgtgcgaggctgggcagccagcccttccccttctgtttctccccggcccctccccccgaccgtagcaccagagtcgcgggtcctgcagtgccccagaagccgcacgtataactccctcggcgggtaactcattcgactgtggagttcttttaattcttatgaaagatttcaaatcctctagaagccaaaatgggacacagtaaacagattcgaattttacttctgaacgaaatggagaaactggaaaagaccctcttcagacttgaan

SEQ ID NO: 26196 - DNA, 466 bp, Homo sapiens
  misc_feature (1)...(466): n = A,T,C or G
aggaagcgggcccccactgaaaatccttgngangttagcanagngcggnggaattcccgatttgacagatggcaagactgaggcctggagaagtggaatcactggcctgaggtcacatgactagcacatggcaaggtcaggattcaagctaggtagtcagtatctcagccaggctgtctcctggctccctgaacattatggtgctgaccacaaactttcctgtccacttatacaaacttctagtgagtgtgtgtgattactagcttcatgaatacctgacccctccactctgaaggaggaacaggcctgtctggatcacttctctgtccctaactgagcccatctcatttagggaaactacagagcactgttgctttttttttttggatggagtctcgttctgtcgtccaggctggagtgcgggggcgtgatctaagttcactccagcctccgcttcccaggttca

SEQ ID NO: 26197 - DNA, 459 bp, Homo sapiens
  misc_feature (1)...(459): n = A,T,C or G
agggcgggncccccactgagaccattgagatcctggaaanncccgngcannagctcctgccgcccaacacccgatactggactcagaagcgacggttccacggtggagtctgtgagtgtcaggccctgcgggtcaggagccagactggtagacacaattgctgggggagacacaggctggacactgggaggggtgactgtgggagtagataagactatgaggaggcaaagtggaggtggcttgggttgagcagggagcaatcctttagatcaagcagggagatctccttggatgcaggagcacttttgctgctgggaggtgttttcctgctccaggaggcaggatctaactgctcctcctcggactccgatgtcatctcggactctgatgagctactgctggaatcgctgccctcatcagaggatgacgcttctccttttctctctggcaccttgttct

SEQ ID NO: 26198 - DNA, 467 bp, Homo sapiens
  misc_feature (1)...(467): n = A,T,C or G
gagacgcgggcccccactgatantccttgnngagccagcacangcggcggaantctgnggacctccaggccaagcataaccccaaggctatggcaggatgctgagctggctactggcacacctcctgtatcaccgtccaaactcggcaaccctgagcagatgctgagggggcaaccggcgctccccagacccccaacgtcagtggggcctgcttccccgcagtgtccaggagagaaggggcagggggctcccgccgaggctcccatcatgctcagctcgccccgcacctccaagacagactcatatgaactggtgtggcggcctcggcatgaaggcagtggccgggcgccaatcctctactatgaggtgaaacaccgcaaggtcacaaattcctctgacgattggaccatctctggcattccagccaaccagcaccgcctgaccctcaccagacttgaccccgggag

SEQ ID NO: 26199 - DNA, 560 bp, Homo sapiens
  misc_feature (1)...(560): n = A,T,C or G
ntttcgaaccactgtacagagcggtggaattcgtgaagccatatttgaattgaagagatgcctactcgaaaacatcaggaacggcttgtcgaaccaaaacaaaaacatccagcagctcattgagctggtgagacggctgtgagtgtgcagagaaacccagttcatgtgtaggaggctgctgtgggcagccctgtctgatggggcacccgtgtggggctgtgctctggtgcctgagaatggctggtgcccaatcgacatgagaagacgaggaaaagacagggtttggagtctcctcaacagtgttaaaagaggaagtgacctcacagaccagctcagagatgttaccaagaatatcacagcccccagggtagggagacaagcagcagtttgttctgtctcagctcctgtcaaggatcctgcggggtgggccctctgtatagctgctctctgtcactggcccctggagtgggagcagcgtccttagtcactgcangcccanngcgggcaggtggtcccatgacagaggggtgggggagtgnctgaggaagcagaagtatgcc

SEQ ID NO: 26200 - DNA, 462 bp, Homo sapiens
  misc_feature (1)...(462): n = A,T,C or G
agggcgggnncnncaactgagnccttgatanacctggcgaaancactgngnagcctggcttctaccctctacaagcttaagagggaaaacttagggaactatgacctaagcagtcaagcaagaaaccacacatatgcacatacccagaatcgaacaccactagaactacccaaaaactgagatggttgggggaggtatcatttattcatattactttctcccatgtactttttgaaagacagcttattctttcccttttagagatgagggaccagatttaagagcttattttgtgctttacattcattaactcacttgatctccacagcaactccatgagaagggtgctaatattaccactgggtactgagtagtacctctctttcactagttgcataataagaattaacccagagagtgacctgagggcgggattttggacacacttgacaagagaggaan

SEQ ID NO: 26201 - DNA, 463 bp, Homo sapiens
  misc_feature (1)...(463): n = A,T,C or G
cgggcgagggcccccactgagnttcaatgagttctacgacangcgnggaattccaagagtcatgcaaacaaggtggaaagcatttgtttcctccttgctcagagttactctttgaatcttatgcactttgcaaatgtgtaggaggatggacagtttttatgttggtcaatgctaaagagaatgggtttcctcagactgtatagataatagtggcacaaagtaatggcttactgaatatgttgaatgactggattcacaaaccttgtcttaaaattctggaatgatagtgaggcttgaaacctgaaagaaggcattttaagaaaataaagcaaacaatatttttgactcaaatcacggaataaattatacaaagacgtgtgcccactggagctataaaataagctcaagaaatatttctatcaggtgatggatactanaagtgtgaagaggtgtctctggtcan

SEQ ID NO: 26202 - DNA, 480 bp, Homo sapiens
  misc_feature (1)...(480): n = A,T,C or G
agagccgnnnnnnnnagaaactgatgctatcgaannnaatgatgancatccgnacagncnggnggaattcccgccaagctgggggcatcggcaaggccaagctgcgcagcatgaaggagcgaaaggtggagaagaagaagcagaaggagcaggagcaagtgagagccacgagccaaggtgggcacttgatgtcggatctcttcaacaagctggtcatgaggcgcaagggcatctctgggaaaagacctggggctggtgaggggcccggaggagcctttgcccgcgtgtcagactccatccctcctctgccgccaccgcagcagccacaggcagaggaggacgaggacgactgggaatcctagggggctccatgacaccttcccccccagacccagacttgggccgttgctctgacatggacacagccaggacaagctgctcagacctgcttccctgggagggggtgacggaaccagcact

SEQ ID NO: 26203 - DNA, 462 bp, Homo sapiens
  misc_feature (1)...(462): n = A,T,C or G
tggccnnnnctaccgataacagtacatgcgnacnancncnnaantnnaanccttaggnggcaatgtcttatataatttggctgtgccagcttgattgtctcttttgggtggccctgggcagaatgccttctctgggccttcgacattctgtccctgtctcctcaggatacatttgcacgggccaagaactgggtgaaggagctacagaggcaggccagccccaacatcgtcattgcactcgcgggtaacaaggcaaacctggccagcaagagagctgtggaattccaggtggggagatgacagacttgggggaaggagtggagtaagcagctccccccggcctcgcctgggatgctcatgggctttgggaagggccatgcttggaggcaacagggaaacttccatctgctgtcctctcgtgcctcaagcatgggcctaacatgtgctcctggttgaaatccn

SEQ ID NO: 26204 - DNA, 561 bp, Homo sapiens
  misc_feature (1)...(561): n = A,T,C or G
nattgagncctcgtagcacagtccangnnggggaattccnctctccaacttcatcggcctcaagcccatgcccttcttggctttaccacctgcttccccagggccgccgtcgggcttggcggcctacactgccaagatggcagcagctaatgggagcaagaaggctgagcggcagaaattctccccctactgaggccagctgaggtacaggcaggggcaggcaggaccaccagcagggggctgcctctgcaccctacccgcccaaggagactccaccctggggtcccaaacgccgctaacgcccagacgcatggatgcaccccctaccctgcctccatctatgggagttctttctctcagagtgggggcagtttctggcccaggggtctgagctgcggcagccccagggcagggggccctacctcctcagctctgtgcttggatacagggagcagccaggagactccctagtgcccccaccatggcgggtgtcactcacgcactccccatcccttaaggcttcctggcctactgcatccttgtgggagtcagggaggaggn

SEQ ID NO: 26205 - DNA, 478 bp, Homo sapiens
  misc_feature (1)...(478): n = A,T,C or G
agcggggannnnnnnttttgttcgacctccactagtccatgcggtggaattctttgtctctccccgcataaattccctgcatcctctctccctacgtaaattccctgcttgctaatatccatttcagagcctactttctggggaagccagcctgagacaccatctcatctgcacccgaggcctcagctccaggcacatgctagcagctcccaaatgaatacctgtggccagactttgctgctgagcaccgatctgtgtggcacatgtctgggattcagcatgtgggaagcaggagtcaccgccttcccaggaggaccccttccctgtcttccatggctccatgagtggcaccagtgtctgcccactgcccaggcctggagtcctatggacagattcggtgccctggagctccccaatctcccacagtgctcattcctcctcaccctccctgtcgctgccttggtgcagctcttcctgc

SEQ ID NO: 26206 - DNA, 496 bp, Homo sapiens
  misc_feature (1)...(496): n = A,T,C or G
gagggagtggcncnaggnnnnnnnnaaactgagancctcactgatgacactcggaagagcggnnggaacctttgaatctcaaccagctgctccagctgtgcctatgaatgcccctttcctgcacactttggaaactaaatcaagtctgccaatggtgcatgcggtgttccgccactcttgccttccttccttcactgaccactgggtaatgacaactgtggaccactcctgcatgacagagatatagaaatgaatcagaaacgaagcctgtccccacggaacttacagcttataaaggagaccacatgcttataattatggtgcaagaacaggcattctcgtcgcacatactggaaccaatagaagaactttcagaggaagaaaaaggaagggaaaatgaacagaaattaaataacaacaaaatgcatttaaggaaagctttgaagagtaactcctccctcactaagggactaagaacaatggtggagcagaactg

SEQ ID NO: 26207 - DNA, 557 bp, Homo sapiens
  misc_feature (1)...(557): n = A,T,C or G
nattgagncctcgntccactagtccgngnggnggaattccctgcggtaccacctcgtggtgatcgccctcatctacttcctgccgctcgcggngatgtttgtagcctacagcgtcatcggcctcacgctctggaggcgcgcagtgcccgaacatcaggcgcacggtgccaacctgcgccacctgcaggccaagaagaagtttgtgaagaccatggtgctggtggtgctgacgtttgccatctgctggctgccctaccacctctacttcatcctgggcagcttccaggaggacatctactgccacaagttcatccagcaagtctacctggcactcttctggttggccatgagctctaccatgtacaatcccatcatctactgctgtctcaaccacaggtttcgctctggattccggcttgccttccgctgctgcccatgggtcacacccaccaaggaagataagctcgagctgactcccacgaccttcctctccacgagagtcaacaggtgtcacactaaggagactntgtcatggctgngacacagccccctccgag

SEQ ID NO: 26208 - DNA, 465 bp, Homo sapiens
  misc_feature (1)...(465): n = A,T,C or G
aaaaaaaacctgatgacattagttcgagcgccgtaattccncacggaaggacactgccacatcctgtgggtttatatcatgttacctcttcatccatcctcaagaccctctgtgtacggggctgggaataacgggaactgtgtttaacatgacccaattttcaggctggcgacgagttcacgggtgtctcatcaaaggtggacacaagctagagagagctctctcctcccagccaaaacctaggaattccccactgcagctcctcaggggccctggacagtagctgtgaccaggctggtgaaaggcccgtccctcccatccagggctttcaaagaagtgggtagaatcacggccatcaagtaaaagccactgcggatgacagaggcctatctgaggaggctagggccatgtcctcccagctggcagagtcttgacagagcctctggtggcctctgccctggcatn

SEQ ID NO: 26209 - DNA, 559 bp, Homo sapiens
  misc_feature (1)...(559): n = A,T,C or G
nattgaaaccctcgagcacagtccangtggnggaattccttctgttttccatctacttcttttacttccttgatctctggttctttgacatctgngttctcctctctcgctctttttctgcctgtatctgtccatctgatgcctctcttttcctggctccatctctgtatttccctgtctttctcttgcccttctttctctgtggcccgggccccagttctgaaccagctggaggagttgctgagcgacatgaaggcggacgtgacccgcctgccagccacgctgtcccgaataccccccatcgcagcccgccttcagatgtccgagcgcagcatcctcagccggctggccagcaagggcacggagcctcaccccacaccggcctacccgccgggtccctacgctacacctccggggtacggggcggccttcagcgccgcacccgtaggggccctggccgccgcaggcgccaattacagccagatgcctgcagggtccttcatcacagccgccaccaacggccctccagtgcttgtgaagaaagagaaagaaatggtgn

SEQ ID NO: 26210 - DNA, 559 bp, Homo sapiens
  misc_feature (1)...(559): n = A,T,C or G
natttgagcacctgtccgagcggtgcaanncctcggatggggggtgggcagacctcagcccaggtgacacctgcctctaaatgaacccaaggaacagaatgacagagatctgcccgtccctaggatgagactcttgggacccaggtgtgggctcagcagtcaccggtgtggtgcaggggggacagctggaggtcccttgggagatcccccaccttcctagctacagctggagctccaagcaccccaaccccccagccttggagctgggcatcattttcctggggccacggcagctcccacagcctgacattctgttcccgggagaagaaacattcccagaaagcactcgtgtggccaaaagcctctttctgagcaaacacgatgtggactaaattagcaaaacatccagccggtgggcaacttcaaaacggaacaggctgcgtttctctgaaacacaaagccccggcctccctttggngcacccaggaccccaaattgccctaagactgtcccagctctcgcaccctctgccttcgccccccggngacctcgggctcan

SEQ ID NO: 26211 - DNA, 557 bp, Homo sapiens
  misc_feature (1)...(557): n = A,T,C or G
nattgagcacttgcagagcggtggaaannganaccaagattattctggttatcctggatgccatttcaaatatctttcaggctgctgagaaactatgtgaaactgagaaacttactataatgattgaagaatgtggaggcgtagacaaaattgaagctctacaaaaccatgaaaatgagtctgtatataaggcttcattaagcttaactgagaagtatttctctgtagaggatcagcctcttgatggagatgaggctattggacttggtgtctccaatcaccacccaccagccctcttcacgtttctgcgggaagagaggcgcaatgacagggcctgtgacttcctcctctcgctccagctgcaccagcaccaccgctggcccgccactgcggatgctgtccttatccaccacctcctaagatagttcgatattagggtagcagttacaaaagcgagccacatctgtaatctggctgtcagtcagctgaaagactgngttgcgttcttcatgctccatctccatgatgtcgaaaacactcttcactccctttgctgg

SEQ ID NO: 26212 - DNA, 471 bp, Homo sapiens
  misc_feature (1)...(471): n = A,T,C or G
acgggacatgagtcttacaagtgcggggaattcccttgccctacattggaatcccccaggaatggggcccaggctcccttgcctctgccttctggaacagatgggcatggcctggatcagctaatgcccagattccctttcctgtggggctgcccctgccagctgtcttgaccaacctcagtgagtatcagcaactgctcctgcagacggactgtgtcctgagcctgggcaggggtctcagctgctggcatggagactctgggtcccgaagctcctgggccctgcctacatcccagctctgctcttggatctgcaggcctggcaccagcatctcctgtagatacacttgcgccagaaatcctgtgtctccttccagcttccagaccacacttgggtggtcttggcagaccgctgatgcctcagggcatgttcgtgcaggggtcctgccccaactcatgttatgactctgan

SEQ ID NO: 26213 - DNA, 545 bp, Homo sapiens
  misc_feature (1)...(545): n = A,T,C or G
gggatgcactgacgcggttgcattctggagattccagggcttctctggagggggattggctgcagtgtagatttgcctctgaggaggctgccccagacttggcctcctcatgccccctcctgacctctgcccttctctggtcctggcatccctggagaaggtaggggtcttgacctaagtttagatttgatctccatgtgcagggaggctgtcctgggcctgacaggtcctccccctttctgaggtagcagtgccttgtggaggtttgacaccatgtccctagctccccaagcacacaccaagaaactgcaggggctcacggaggaagtgctgcctgggccagggggaccagctttcctccgtagagaccatgtgcagaacacttctgctgtgccaagaacatgagggagccagtgttttgtcagcaggaagaaagggcctgctgggatgaaagtgggaaggaaacagggttgggtagtcaggagacacctcangggcaacagcacaggcccagagtacctgctgcctccactggcgctgtnctg

SEQ ID NO: 26214 - DNA, 469 bp, Homo sapiens
  misc_feature (1)...(469): n = A,T,C or G
ggcccgggatagannnccntnnnaatgatgaccattagacagngcggtggaattcgggaggaatcctttagatctcattgctccaggatccagactagaatgtcaagctttccaggactctttaagcacttggattgttactgtagtagaaaacattggaggaaggctgaagctacgttatgaaggacttgaaagttctgacaattatgaacattggttgtattacttggatccatttcttcatcacgttggttgggctgctcaacagggatatgagcttcagcccccttcagccattagacatctaaaaaatgaagctgagtggcaagagattttggccaaagtgaaagaggaagaggaagagccattaccatcttacttatttaaggacaaacaagttattggcattcatacattctctgtaaacatgaaattggaagctgtagacccctggtctccttttgggatn

SEQ ID NO: 26215 - DNA, 457 bp, Homo sapiens
  misc_feature (1)...(457): n = A,T,C or G
actcgagaccattaggtagagcgccgtaattcccagctccgcgaaggtcttgcggtgccgctgccgccgctggtaatacagagtcccgtcgcgcaccacgtagcaggcggcagcttttcggattttacgcttgacattgccctcggtgcccggcgcatacggctcgcgctcgttcgtcaggtaacgcaggatggcccggtagctttcctcgcttgacatcgcggaccgcggctccctgagggcgcctgtcagggacaggtgaggaaaacggcccgctacctacgggcggctgcaggaggagcggcggcaccgtatggagaaacggctgcgcctttggcgagcgctcttcgacggctcccttagtccgaaggaaaagcgggcgagttggtaaccagggggaactgcacttctccagcgcgcgggatccgctggcgactgacaaaatggctgctgcccn

SEQ ID NO: 26216 - DNA, 453 bp, Homo sapiens
actgatgacactaggtagagcgccgtaattaactcgaaatgtcttttgaggacttggtgcagtgaccagggctgtatcttccctttggaaacactgttgaaaatttgtgaatattttgcagtcttgtaatttggaggggggcagcgaggagaggcagcgggggaggttagagagagactgatgggcttaagtgacaagggctataaatccacgattacacggatgtgaaaaggaaagccagtggcctcctgcctagggtttgggcatcctcagagttagcaaaatgtacctgctttggggtcaggcaggcaggggttaaagcccagcttctgctgcttgctggctatgtgatcctgggcaacttcttaacctgtctgagccttagtttcttcccttttgtgaaatgagagtagcaatgtccctgtgcaggggattcagtgaggtaacagcaaa

SEQ ID NO: 26217 - DNA, 550 bp, Homo sapiens
  misc_feature (1)...(550): n = A,T,C or G
aggttgaacccatccnannnnncattgagtncctattcagagnggcggaattcgaagtataaaatactgaagatcaatgagaattaatgacaattcatcaaagtcctccattttgttaggaaaaccattcatccatctatccatctacccacccatcatttataaggcacctaccatgttccaagcagtgagaacatgcttttaatcgggagagcccattcataacctgggggtgggggctgagggaggtggtgggagaggttcagtacccaggtcacagggcagctgtgggaaggctgcatgctgccatatgtaagcccggcactggagctgttgtggatgctggagacaagctcactgttgctttccagacgctcttgctcttctgtccaccggaggcagtcaggaccctggcctgagggccaagaatactttgtgcctgagctggaccagctggccgtggggtaccaccttctttgcagacagcaggcaggggctggatcccctgcttgatgctcctaccagtgcccctagtcttactgagagatcn

SEQ ID NO: 26218 - DNA, 548 bp, Homo sapiens
  misc_feature (1)...(548): n = A,T,C or G
agggatgagcatgcaggcgtgcaattccccggctcgagccgngtgcggcgctgggcggaagctaccatggcggccgagagaaagacaaagttgtccaagaatctgctgcgcatgaagtttatgcaaaggggactggactcagaaaccaagaaacaactagaagaagaagaaaagaaaatcattagtgaagagcactggtacttggatttgccagagcttaaagagaaagagagtttcataatagaagagcagagtttcttactatgtgaagatcttctctatggaagaatgtcattcagaggatctaatcctgaggttgagatatgagaccttggtggggacaattgggaaaaagtttgccagaaagagagaccatgccaattatgaagaagatgaaaatggagacataacaccaattaaagcaaagaagatgttcttacagccgcaggattaagatggatgccttaagcgatggcccaagggtgcttggtggaagtcagcagggcatctggagctcatcccgatggtgtctctatagttattantac

SEQ ID NO: 26219 - DNA, 546 bp, Homo sapiens
aggaggcttgacactactccatgtggaggaattcccagacacctcccagcttgaggacacctcccagctcgaggacacctcccagcgcgaggacacctcccagctcacggacacctcccagcttgaggacacctcccagcttgaggacacctcccagctcacggacacctcccagcttgaggacacctcccagctcactccgctctgccccctcctgctctgctacctcctagtcccatcgtctggaggtagctacagtcggaatatggtgtgtatccttctaaaacatctcatgtgtacctttaaacataaatttataatgttaataatggaaaaatagagtgcttgcgtatatttatgtttgttttctgcttatgaaaaatttcaaaaacatacacgaaggtagaggataccttaaaactctcacatacccgtcgcccgacatcaacaacccacaaacatgttacctcccccagagtcacagtcccacaggtaacaagtgactctaaatgggacaggggagaggtggatgcatggatggctccc

SEQ ID NO: 26220 - DNA, 512 bp, Homo sapiens
  misc_feature (1)...(512): n = A,T,C or G
cacaactttgtcaggtactacaacaagcagcgcgtcctggagaccgcggccaagcacgagctggagctgatggaactcaactccagcagcgggggcgagggcaagaccgggggctcccgcagtgacctggacaacctccctccagagcctgcggggaaggaggcgccgagctgcagcagccggctgaagctctcccacagcgacaccttcattcccctcctgaccgaggagaagcaccacaggacccggctccagagttgcaagtgacaggagggcccctcaggcagagatggaccaggcggtggacagatgggtagatgtggcaggcatgtcatcgacagcacaaaaagggctgtcctgtgtccccccaaccctcccctggacagactctgaaggccctcccggcacctctgccaggctgggtaagactcctctatgttgcctgctgtccangagccccggaagggagggtgtgcangagccgcanggccgtgtaggacgagtggaggccn

SEQ ID NO: 26221 - DNA, 546 bp, Homo sapiens
  misc_feature (1)...(546): n = A,T,C or G
nattgaatcacctttccagngnggcgtagttcggcctccagtgattttcctgcctcagcctccggagtagctgggactacaggtgcgtgcgtgccaccatgcccagctaatttttgtatttttagtagagacaagagtttcaccatgttggccaggctggtctcgatctcttgacctcatgatccacccacctcagcctcccaaagtgctggcattacagatgtgagccaccgcgcccggcctgttgcttatttttgactggctgtttcctgaaatcacttgtcaagctccaggaaatgttggagaaaggaggcccagttctgatcacacacacacagcctgggcctcactcctgagatcttcctgggctgctcctgtgggcccgagaagccttcttcccgctggagtgtacggttctgcagaccacgtagtggacgcacagccctggagtctgtgcgacccagcgtcttacttaaagtcagccctgggacctggctggnggtagtctagtccccttctgcagctctactggtgtgcagcanggtg

SEQ ID NO: 26222 - DNA, 499 bp, Homo sapiens
  misc_feature (1)...(499): n = A,T,C or G
agcgatgnaggggngnnnnnnaatggagacctcgagnactgtcgngagngcgnggaattcggctctggtgctggtggccgctctgtggggtggcacgcagccgctgctgaagcggttctccgccggcctgcagcgggttcatgagccgacctgggcccagcagttgctacaggagatgaagaccctcttcttgaatactgagtacctgatgccctttctcctcaaccagtgtggatcccttctctattacctcaccttggcatcgacagatctgaccctggctgtgcccatctgtaactctctggctatcatcttcacactgattgttgggaaggcccttggagaagatattggtggaaaacgagcagttgctggcatggtgctcaccgtgataggaatttcactctgcatcacaagctcagtgagtaagacccaggggcaacagtctaccctttgagtgggccgaacccacttccagctctgctgcctccaggaagcg

SEQ ID NO: 26223 - DNA, 493 bp, Homo sapiens
  misc_feature (1)...(493): n = A,T,C or G
tgagtacgagnnnnnnnnaattgagaccatgagcaccgtcgggaanccntagnttctgaatagntgtactccttgctagggacagccagtatcctcaggcctgttctcttttgcccacatgtccctttttaaatgcaccaccatcacagtggtgacaatgtgacttacggacagagccccgtttatcttgtaggtgacataagcgctctgcggcccagtggactgcggctggtgaccccagcactgacgtcccgaggacttttggaaaaagactttcaaaaagtatcccactttattcacagaggtaaggataaaagtttggaagttgccacatcttattgtgtgtatttagattctgattgtgatgagtagctgagaccctgccactgaaagacaattctgcaccaaggctgagtgatggggtgcgagacagcacaaaacacatgtaaatcacctttgttgagagggttataaatttgggctgcccatgacg

SEQ ID NO: 26224 - DNA, 502 bp, Homo sapiens
  misc_feature (1)...(502): n = A,T,C or G
ggagcacgggggnnnnnnaaatggagaccatcgagnactctcgngaagngcggnggaantcgaagactatacagagacaggtggtaaactagatgtgactcatgggctatattttgcttacccttgatctgtatagcacttttgcaaattatgaatgcatcatctctctgagagtctagtaagacccctatgtgggacatgtccccaaattcacaagtcattgctgttagaaaatgggtgcaagttctacacttcagatttgttggtataataaaaagcttgaaataacccaatttggacacagattatttaaatatgtaatatggaccatttctataaagaaggtgatggtataaagaaagaaaaaatatatatataaaatatataaatggtattttcagctggatttctagaatgtttagtgcatagtaagttttcagtattgacttgctaatgacttttaatagagaggttgggttctctgtatttttgaggattaaat

SEQ ID NO: 26225 - DNA, 496 bp, Homo sapiens
  misc_feature (1)...(496): n = A,T,C or G
ggaggaaggggnnnnnnnaatcgagaccatgagaacagtcgggaantcgcctgaagtccctcgcttttggggggggggtctctcacccccaggccacatagggccagtggtagtggttccctctatgtcgggcagagctgagggctgggatgctctgtgaccccagctggagcccacacctaagggctggcatccacatcatttcaccctgcagggagggaagaggccaccaggtggcagcacagccacacccgttcccacgttagaggagggcaaggctgggtactcagcagccactctgagccggggctccttccaggagctgaaatccacctgtctccatcttccttgcctgcctgggtactcatgccaagcagagactgggattaggggttctgtgctcttgcctaattaagaacattctcccatgtctcttgtgtggtcccagaaggagaagtgaagttgccaaggatatggggcaggaggcttcctctgg

SEQ ID NO: 26226 - DNA, 547 bp, Homo sapiens
  misc_feature (1)...(547): n = A,T,C or G
gagagcctcgacacactccagtggggcgaattcgcttttgccgataatactgactctagcccatgattgccttgcccaagccaaagaggaaggttaggttggcttgtcgagcccttgagcgttgggagatggggtgggaaggaggtgagcccctgcagagagttgggtagtgtccttcaggaatgaaaggaggggcaaaggagtcaccagaggtcctgcatttccatcaaggtttccacagtcatcaaggcttctctcttgagttgctgataggagatgtgagttatgcccagagatgtcttatcgtgaggaaaaagaaaacttccttttgttcacattcaagactctcagtgccatatgaagtagcaaaagggcgggatcggccagatcaagggtacattgattctaaaattacagcggccccattagacaactattttangtgctggagtatgtttgaaagtgtgctgggaaaaaggaagcatttcttcattgatttaaatcagcatgaatattatatgccctaataaaaaattttgacaggtaa

SEQ ID NO: 26227 - DNA, 492 bp, Homo sapiens
  misc_feature (1)...(492): n = A,T,C or G
gatggagggnnnnnnnaactgagacctgagaacgtcgggaanncggggccgggcagagggaagagagcaaggtctgctgctgctgccccgggctccgaggccagcttcacagagtccagagggctgcagaataagaacagagggggggccaatgggaaagggaggcggggcagcctcaatgccagcggacgaaggacacccccaaattgtgctgctgaggatatcaaagccagcccttcctccaccaacaaaaggaaaaacaagcctccaatggagctggacctgaactccagctctgaggacaataagcctggaaagcgtgtccgcacaaattccagaagcactcccactacccctcaagggaaaccagagactacttttttggaccaaggctgctcttctccagtgttaatcgactgtccccacccaaactgcaacaaaaagtacaagcacattaacggcctgaggtaccaccaggctcatgcacactta

SEQ ID NO: 26228 - DNA, 501 bp, Homo sapiens
  misc_feature (1)...(501): n = A,T,C or G
ggggagccggggccggnnnnaattgaaaatgatatcactacgcagngtggtggaattcttttctcatctccttcagatacgcacaagtggttcacaccccgagtgtcagggacagttcctggggcccgggatggacattcagcctgtgtcctaggcaagatcatgtacatttttgggggctacgagcagcaggcggactgtttttccaatgacattcacaagctagataccagcaccatgacatggactcttatctgtacaaagggcagccctgcacgctggagggacttccactcagccacaatgctgggaagtcacatgtatgtctttgggggccgtgccgaccgctttgggccattccattccaacaatgagatttactgcaaccgcattcgagtctttgacaccagaactgaggcttggctggactgtcccccgactccagtgctgcctgaggggcgccggagccactcggcctttggctacaatggggagctgtac

SEQ ID NO: 26229 - DNA, 492 bp, Homo sapiens
  misc_feature (1)...(492): n = A,T,C or G
ctttgcctcgagaccactaggccanngcgtgtaattcgagtggtcttccctcctgtggaatcgaggggaaattattcttcccaataccttgatttgattttcagtttcataagcttcttcctctgaatcttattgagggactatggtaccaagcaggtaggactgttcacctggtggaacagttcttgctctgccttctaggcttcatcccagaaatccagcctctttctggagaccccaaagctggagggagatgggctttcctctgggcctctctcctactttgccatccacactgctcctggctaaccccagcaataaccaacaaatggtaggaagccccatctattgctttttctcaattatgactgcatagtttgtggaaacaaagatcttgaggaagatgagggaagccctcccctcttcatagtccccatctcttctcctttgtacctgtcaacaccagagttcagtggttaaacagacaaaata

SEQ ID NO: 26230 - DNA, 495 bp, Homo sapiens
  misc_feature (1)...(495): n = A,T,C or G
agctttntnnaggggntnnnnagaagannnnnnnnttagannccttcgtagaccctagtccatgcggtggaattcgtatgccctcccccatgccatcctgcgtctggacctggctggccgggacctgactgactacctcatgaagatcctcaccgagcgcggctacagcttcaccaccacggccgagcgggaaatcgtgcgtgacattaaggagaagctgtgctacgtcgccctggacttcgagcaagagatggccacggctgcttccagctcctccctggagaagagctacgagctgcctgacggccaggtcatcaccattggcaatgagcggttccgctgccctgaggcactcttccagccttccttcctgggcatggagtcctgtggcatccacgaaactaccttcaactccatcatgaagtgtgacgtggacatccgcaaagacctgtacgccaacacagtgctgtctggcggcaccaccatgtaccctgg

SEQ ID NO: 26231 - DNA, 502 bp, Homo sapiens
  misc_feature (1)...(502): n = A,T,C or G
cggtgttnagggngnnnnnnaatcgagacctcgtagacactagtgcagngcggnggaattccaagtacgccacggccgagatccgcagacatttagccaatgccaccacggacctcatgaaactggaccatgaagaggagccccagctctccgagccctacctttctaaacaaaagaagctcatggccaagatcttggagcatgatgatgtgagctacctgaagaagatcctcggggaactggccatggtgctggaccagattgaggcggagctggagaagaggaagctggagaacgaggggcagaaatgcgagctgtggctctgtggctgtgccttcaccctcgctgatgtcctcctgggagccaccctgcaccgcctcaagttcctgggactgtccaagaaatactgggaagatggcagccggcccaacctgcagtccttctttgagagggtccagagacgctttgccttccggaaagtcctgggtgacatccacaccac

SEQ ID NO: 26232 - DNA, 453 bp, Homo sapiens
  misc_feature (1)...(453): n = A,T,C or G
tttgagancctgatcacgtcgggaattccgaaatcttatccatatttctggtttttttgtaaggagaaattaatagacggggcattatgaggtcaaaggttaggtacatcttcaagacttcctgtcctccagagatgcgtcagttcctcttccactgctgtgtccgggagtgcccccacagaaaagctgtcctgttacctttaaagacttttagcaacttggaccttgcctaaaacatgaggcacactgtaagtagcttttctcttcagggacagcatgaattcaggctacccatggggttggacaggagactgggctctgcatgtatggtgagtagttgtccctataagagaagcttttcagggtgcaggactctgagggctaacaccaggatggtcccagcaagccggaacagttgtccttttaccccaagggcaagccccttacctccca

SEQ ID NO: 26233 - DNA, 474 bp, Homo sapiens
  misc_feature (1)...(474): n = A,T,C or G
natcgtagaccactagtccagtggangggcattcggacaattcgtgatggcgggggctggttccgccgctgtatcgggggcagggaccccggtggcggggcccacaggccgcgaccttttcgccgaagggctgctggagttcctgcgacccgctgtgcagcagctcgactctcacgtacacgccgtcagagagagccaggtagagctccgggaacaaattgacaacctagccacagaactgtgccgcataaatgaggatcagaaggtggccctggatcttgacccctatgttaagaagctacttaatgcccggcgacgcgttgtcttggttaacaacattctacagaatgctcaggaacgactgagacggctaaaccacagtgttgccaaggaaacagcccgcaggagagcaatgctggattcgggaatttacccccctggctccccaggcaaataacagatgagcctatggac

SEQ ID NO: 26234 - DNA, 501 bp, Homo sapiens
  misc_feature (1)...(501): n = A,T,C or G
ggggagccggnnnnnnnnnnaatcgagaactgagtacgtgtcganggaaccgaaacgcttgagcccaggagttcaagaccagcctagagaacatatggagaccctgtcttcacaaaaaataaaaaagtcagccaagcgtggtggtgtgtgcctgtagttacttaggaggctgaggcaggacgatcgcttaagcccaggagtttgaggctgtggtgagctacaattgcgccactgcacgccagcctggctacagaacgagaccctgcctctctaaaaaaaaaaaaaaaaaaatttttgacgtaagcgttttatttacaaaaagggagggattgaccttattgtaaaaagacgtggggctgacagtacccgcaaagacacaccgaaggaagggaactgtggatctgtttacctggcttgggagttggttggtgcctcattctccactgtttattcatcccacaggggaacagtgggatagcagccactccagcctttgttgag

SEQ ID NO: 26235 - DNA, 502 bp, Homo sapiens
  misc_feature (1)...(502): n = A,T,C or G
agagaggcgggcccgnnnnnattgaaaactgacgatcctagcccagngncgnggaattcgcaggtgcacaccaccgcacccggcttggatgtgatcttttgtccacattcttttccaattggttcaaaggtgtaggtgtgccttttgcatacctgggaagggccccattaggctcgactcctcatttttctccattcaccatcagtttgagtctgaattcatagcatggcctggacagatgcagcaaggggccagttccaaggcagaattcagggtgaactcgattcctataggcttgggatgaatggctgctgggacatgaggcttgggtgtgagatgccccgtctgctgctgctcttggttcttagttcagagaaattctgggacccttcctcctcccggcaccacgttttcagtgaatggttctttgaagaggaaccctggtccataggaactgagtgaaagcaaggccaagtatgtccacccatggngacaaacgtcn

SEQ ID NO: 26236 - DNA, 493 bp, Homo sapiens
  misc_feature (1)...(493): n = A,T,C or G
agaaggcgggannnnnnactgagaactagttcgtggcgggaccnnanattatttttctttaatccggaagagaagagaacaagttgtgcttttccccccttcttcttgctaaatgccatggatataactgaataagcggctcagggctttccccgcgtggacgtccgaggccaccatctgcctgcattcgccggagccgccggagggtttacctcgagtctgtctcgggcggggaaggatgcgtggccgagccggggagcccgggcgccccgcggagccggcctcggtgccacccagccgggggtagatgctgcctcgcccaggggccacatcagagagaaagactctacagcttgcccagagtcgagcttaaatggagcagcatgatttttgtctgaaaagtctgagatgggaccagtggaaaggtgtgcattttaagaaggatttgcttccccatcttgtgccttctgtgtctagcagcacgacctggccn

SEQ ID NO: 26237 - DNA, 463 bp, Homo sapiens
  misc_feature (1)...(463): n = A,T,C or G
nttaganncccctcgatgacactagtccatgcggtggaattcctgtgctagtcacttgatacacatcatctctgatctttgcactgagcgaggcatgtgtattatgtctgcattacaaaaggggaaaaattaaggttcaagaagataaagtcaccaggcatggtggcgcatgcctgtgatcgcagcactttgagaggctgagacaggcggattggttgaatccaggagttcaagaccagcctgggcaacatagtgagacctcatctctacaaaaaaaataaaattagctgggtgtggtggtgtgtgcctgtagtcacagctcctcgggaggctgatgtggaaggatcacttgagcccgggagatagaggctgcagtgagatgagactgagccattgcactcagcctatgcaacagagtgagaccctgtctcataacaaaacagaaataacaaaaaataaggtg

SEQ ID NO: 26238 - DNA, 591 bp, Homo sapiens
  misc_feature (1)...(591): n = A,T,C or G
cgcgatcgatcaccagtcagaatggagcaactntagacagncagcgnctaaccagaaagggggcaggtctcagggggcctgggagctaggggcctgcccctctgaccctgaggcaagaagagcaccctgccgagtgaggtcctacctgcaggcagtcactgccccgggcatgggcctctcaaggctggcacgaagccattcagggagagggctccacaacaagctgagggtgcccgactcaaactgtagaaccgggagtggacacccacagacgcccaggctggatgcgtgcgcaggcacactggatctcgtggctctctgggccgctgccaccgcctttgaacgtgtcggggagcaggagccaggccagagcctggcccagaggacagcgagaagcacctgttgatgctggggccactggaggaagctccatccctctactctcagcccacaccaggcggccagctcagagcaccaggcgtggcgcaagcagggtggtcgtgggcagccagtcccgccctgctgcctggactgtgcccagcgggatgtgggcccgagcaggccagaaaaggccgagggcctagtgtcttn

SEQ ID NO: 26239 - DNA, 495 bp, Homo sapiens
  misc_feature (1)...(495): n = A,T,C or G
gggggggagggggggnnnntttgagnactctagtcactgtggnggaattccgtccctacgtgaactgaactatgaaacgagccactacccggcctcccccgactcctgggtgtgaggagcagggcacaggcgctccgggaacagtgcatgtgcatgcataccacaagacatttctttctgttttgtttttttctcctgcaaatttagtttgttaaagcctgttccataggaaggctgtgataaccagtaaggaaatattaagagctattttagaaagctaaatgaatcgcaagttaacttggaaatcagtagaaagctaaagtgatcctaaatatgacagtgggcagcacctttctagcgtgagctgtagagtaacgagaagtgctttatactgaacgtggttgatgggaggagagacgaggcattcgggccggtggggcgtaagggttatcgttaagcacaagacacagaatagtttacacactgtgtggngga

SEQ ID NO: 26240 - DNA, 459 bp, Homo sapiens
  misc_feature (1)...(459): n = A,T,C or G
catgacgcccctcggnnnatgangaccctctgaccgngcggnggaattcttccagagctacagagtcccccagagaccacgatcacgcagggctaggtcaaggggcaacaaagaactccacatttcaagagccccccaggggtccaaggggcctctccagctgagaaccgggaggcgaggctggcatcctaggcaccgaacacagcgtagcctgggaaggatgtgttaggtctggactctgaacactgttacctatgccctggcctggccagaacacagagagccccggtgaggaaggggagcaggctttgtcgccagatgacctgcgtctcccctcccacgtgcaggggctactgcctcaagcacaatgctcggacaggccaggggtgcagcacagatagtctgttctcgttccctgcaataaatatttctgcgctaaatcttaaacacatcgaatgt

SEQ ID NO: 26241 - DNA, 461 bp, Homo sapiens
  misc_feature (1)...(461): n = A,T,C or G
ntaganncccctgatgaccctagtcagtgcggtggaattctgcgccccgtgtccgcatcaatggccatgtggctgcccggttccccttcatccctatgccactggactacatcctgccggagctgctcaagaatgccatgagagccacaatggagagtcacctagacactccctacaatgtcccagatgtggtcatcaccatcgccaacaatgatgtcgatctgatcatcaggatctcagaccgtggtggaggaatcgctcacaaagatctggaccgggtcatggactaccacttcactactgctgaggccagcacacaggacccccggatcagccccctctttggccatctggacatgcatagtggcgcccagtcaggacccatgcacggctttggcttcgggttgcccacgtcacgggcctacgcggagtacctcggtgggtctctgcagctgcagtcc

SEQ ID NO: 26242 - DNA, 503 bp, Homo sapiens
  misc_feature (1)...(503): n = A,T,C or G
gaagccagannannnnnactgatnactgagtacctagcccagngncgngcgaacagccgagagcgagtggctaccgaagggtggcggaggcagcaccagggagagaacgttcaataaactctgaaagccagggaagggtcctccaaaatccgagggcctgtcccggtacgctgcaggagggatagagccgttcccaggagctcagctcctgcctttgcagggaaagtttgctatttttgcaggcggtagttgaggtttaattacccttaattgcatacattgtttatagcgctacgcaataaataattaccgagactaatatttaaaaaagaaaaaaaaaattaaacctgttttttaaaaaaaaaaaaaaaaaaaaaaaaaatttanaattttaaaagcggggggtggattttaaaggggccccaaaaaacccttgaaacccccccgggggggttttttttgggccccacattttggtgcgcccccccccccccccctcttct

SEQ ID NO: 26243 - DNA, 482 bp, Homo sapiens
  misc_feature (1)...(482): n = A,T,C or G
tgggtgttgcaggngtnnnnnnncctcgtagacctagtccacgtcggggaantcagctgacaagatctacaatctgtacaatgggtacacaagtggaaaggagcagcagatggcctacaacacactgatggaggtctcagcctcgatgctgttccgagtccagcaccactacaactctcactatgaaaagtttggcgacttcgtctggagaagtgaggatgagctggggcccaggaaggcccacctgattctacggcgactggagagggtgagtagccactgctccagcctcctgcggagtgcctacatccagagccgcgtggaaacagtgccctatcttttctgccgcagcgaggaggtccggcctgcaggcatggtgtggtatagcatcctcaaggacaccaaaatcacgtgtgaggagaagatggtgtcaatggcccgaaacacgtacggtgagtccaagggcccgtgagggagggtat

SEQ ID NO: 26244 - DNA, 423 bp, Homo sapiens
ctctgccaccaaaacaaataaaatctctggaaagaaaaaaaagaaaagaaaacaaaagactctgcctggtaatcaagagaattctcccagttcttacccaagcccaccaagcccacgtaaggctgcaagagttgcagtattactgggcttggggcacccccttgtacagatatggctgcagtgaccaaagacttagatcacaaccctcaattctttgaatacctggaaagcctcctcaaggaggatgagtacaaacaagcccagactacaaagattagaataaatacctaactcttcaacgcccagacactgacaaacatccacaagcctcaagaacatccaggaaaacatgacctcaccaaatgaactaaataaggcaccagagaccattcctggagtgacagagttatgtgaactttcaga

SEQ ID NO: 26245 - DNA, 595 bp, Homo sapiens
  misc_feature (1)...(595): n = A,T,C or G
cgacgatcganccccctnnnnattggaattactattccagagnggnggaattcatggccccccatgtggaggaatagttctgagctggccccactttggatgcagccttccccggcaagtctaaacccagtctctgtggctgcctgttcacagggaccgtggactgtgatgtttacagtacgaaagcactgggagagaacgctacatcacaaagtgtccttaacctgctgccgcctcagctttcccatttgtgacttggttaaaaaaattttttttgacagttttaagctcttattttaatttccacaggctgttgtagaatctgctcagccagggaggggaaaggagtcggcaatcaggtctcctcctgggcacctttgtgaggccagctggcgagagtggggggtgacactgaggtcccagcagctccaaatgcaggcagagccctgtcctcagagaaggtcacagcctagccaagcccagccaggtggatgggcccacggaacgcacaggaacctggaacggaggttgaaagcaggaagcacagtctgtgactccccagcccactctgcattcgaccacttggggcccagag

SEQ ID NO: 26246 - DNA, 492 bp, Homo sapiens
  misc_feature (1)...(492): n = A,T,C or G
cgagtgnnnnnnaatcgagnccttgtagaccactagtccangcgggggaattcctgcaacatcggagtgccgtggtacgaccgcgaggccaacgacgctgtcctctttggctttctgaccacctggttcctgggtgagttcctggcacagagtgaggagaagccacatgtggttgctcacttccatgagtggttggcaggcgttggactctgcctgtgtcgtgcccggcgactgcctgtagcaaccatcttcaccacccatgccacgctgctggggcgctacctgtgtgccggtgccgtggacttctacaacaacctggagaacttcaacgtggacaaggaagcaggggagaggcagatctaccaccgatactgcatggaaagggcggcagcccactgcgctcacgtcttcactactgtgtcccagatcaccgccatcgaggcacagcacttgctcaagaggaaaccaggtaggggctgggctgaagcccca

SEQ ID NO: 26247 - DNA, 458 bp, Homo sapiens
  misc_feature (1)...(458): n = A,T,C or G
nctgatgaacctgataaccgccgggaantcgangattctgggaatgaggagtcgtgacgtgctccttcagtgcccctgtactgccctgccatctcatgccaaagggaggggagcaagtggggacctggccatggcccctcagcaaaaacctattcacagcgggtggggaaacacacacagctcctgctgactccccttatggatctcagtttgctcctttttatggacctttaatggagagagagtaaccctccacagaatgtctgaattcttgcattctttacccttccatcactatattgattctttttttaaaaaatatgaacccaaactcccgcctcacttcgtctctacagaatgttcacagcaaaacacgtttggtctgtttttagattcttgaagaattcaatagtctttcaagatgtttaatgtgtttaaagctgggaacctgttgggag

SEQ ID NO: 26248 - DNA, 586 bp, Homo sapiens
  misc_feature (1)...(586): n = A,T,C or G
agcgatcgatcactgtcagagtggaggaactccagtgttttctgaagcanactgtgccaatttgatcagcactcttattacaaacttgataagccagtatcagaacctacagtctgatttctccaaccgagttgaaatttccaaagcaagtgcttctttaaatggggtaagaactatgcagaggcggcggcacacacttttaaactgtccttcagttaactgtgtggccttcatatgattttactctcgtaactttaacttactgattcaaactcttaagccatgtgcgacaaaaaaacaagttttaaatacacgtttactatgccttgtatgtacacagcacactctatcaccttggaagctacaagctggtatcattaaatgctgaaaggtaataaagggaacatcttagtggtcttatctctagttgggtatatttttggaaacaatacttgtgatgtttctattactgcctatggctcctatgtaactgaaacaattaatgatctactgatttaaaaaaggcagttaaatctagagcattagttgccttgtgcagaactccatgacagccatgtcctagaat

SEQ ID NO: 26249 - DNA, 553 bp, Homo sapiens
  misc_feature (1)...(553): n = A,T,C or G
nggggctccccnattcgaacactattgagtgtgctggaattcangcggacctgcangctctgctgcagagcggtgcccaggtccgcatggtggacatgcagaagctgacccatggcgtcctgcataccaagttctgggtggtggaccagacccacttctacctgggcagtgccaacatggactggcgttcactgacccaggtcaaggagctgggcgtggtcatgtacaactgcagctgcctggctcgagacctgaccaagatctttgaggcctactggttcctgggccaggcaggcagctccatcccatcaacttggccccggttctatgacacccgctacaaccaagagacaccaatggagatctgcctcaatggaacccctgctctggcctacctggcgagtgcgcccccacccctgtgtccaagtggccgcactccagacctgaaggctctactcaacgtggtggacaatgcccggagtttcatctacgtcgctgtcatgaactacctgcccactctggagttctcccaccctcacaggtactgctgggn

SEQ ID NO: 26250 - DNA, 463 bp, Homo sapiens
  misc_feature (1)...(463): n = A,T,C or G
actagaaanaccatgatgaactagcacagagcggaggaattcgagncatagctgagatcctgcgaggagttcgtctgcacttccacaatctggtgaagggtctgaccgatctgtcagcttgtaaagcacagctggggctgggacacagctattcccgtgccaaagttaagtttaatgtgaaccgggtggacaatatgatcatccagtccattagcctcctggaccagctggataaggacatcaataccttctctatgcgtgtcagggagtggtacgggtatcactttccggagctggtgaagatcatcaacgacaatgccacatactgccgtcttgcccagtttattggaaaccgaagggaactgaatgaggacaagctggagaagctggaggagctgacaatggatggggccaaggctaaggctattctggatgcctcacggtcctccatgggcatggacan

SEQ ID NO: 26251 - DNA, 465 bp, Homo sapiens
  misc_feature (1)...(465): n = A,T,C or G
gggcaggcctgagaccatgatcaccgtcgggaattcgnagaacgcacagcgtcgtgcgagtgcacgttcgtgaggaggaaacacgccttggacaaagcctgcagccaggatcagaaagcgtaaataaagcaggtgtccgcttttagcaggaagtcatttaggtgaagttactctatctcaattaacaaaaactagagtggcttggccgggtgcagtggctcatgcctgtaatctcagcactttgggaagctgaggcacgtagatcacttgaggtcaggagtttgaggccagcctggccaacatggtgaaaccccatctctactaaaaatacaaaaaattagccaggcgtggtggcgggcgcctgtaatcccagctacttgggaggctgaggcaggagagttgcttgaatccangaggcggaggttgcggtgagccgagatcgtgccactgcactacagcctgtgn

SEQ ID NO: 26252 - DNA, 463 bp, Homo sapiens
  misc_feature (1)...(463): n = A,T,C or G
catagaacncccctnatagaagnactcttgaaccgngaggtggaattcgatgatgacgacagagacattgagtactatgagaaagttattgaagactttgacaaggatcaggctgactacgaggacgtgatagagatcatctcagacgaatcagtggaagaagagggcattgaggaaggcatccagcaagatgaggacatctatgaggaaggaaactatgaggaggaatgaagtgaagatgtctgggaagaaggggaagattcggacgactctgacctagaggatgtgcttcaggtcccaaacggttgggccaatccggggaagagggggaaaaccggataagggttttccccttttggggatcacctctctgtatcccccacccactatcccatttgccctcctcctcagctagggccacgcggccccacattgcacttctggggggtgaccgacttcgtac

SEQ ID NO: 26253 - DNA, 460 bp, Homo sapiens
  misc_feature (1)...(460): n = A,T,C or G
gagccagccnccaggcgaatgagcctttcgantattagacccttcgannnncncccgnntnnnggnnanacnctgactcngaagataaacaaaaatttttatagcctggatttcaaggcgcgggaagtgagcaagaagccggcatgcggtcccggtgctgaggtgcgacctccaaaggcaccagaagacttttctcaaaactggaaggcgctgcaagagtggctgctgaaacaaaaatgtcaggccccagaaaagcctcttgtcatctctcagatgggttccaaaaagaagcccaaaattatccagcaaaacaaaaaagagacctcgcctcaagtgaagggagaggagatgccggcaggaaaagaccaggaggccagcaggggctctgttccttcaggttccaagatggacaggagggcgccagtacctcgcaccaaggccagtggaacagagcacaatn

SEQ ID NO: 26254 - DNA, 585 bp, Homo sapiens
  misc_feature (1)...(585): n = A,T,C or G
cgcctcgaccccntngnnatagatcncctttccagagaggnggaattctccacgctctcagcttcctgctctgcttcgtcgagctctgctgcacgtacctcaaggtgctcaaggtggcccgcttccattgcaagcgcatcgacgtgatcaccatgcagacgctcgtgctgctggtggacctgcaccccagtgtgcgggaacgctgtctggaggagcagaagcggaggcgacagcgagccaccaagaagatcagcaccttcatagggaccttccttgtgtgcttcgcgccctatgtgatcaccaggctagtggagctcttctccacggtgcccatcggctcccactggggggtgctgtccaagtgcttggcgtacagcaaggccgcatccgacccctttgtgtactccttactgcgacaccagtaccgcaaaagctgcaaggagattctgaacaggctcctgcacagacgctccatccactcctctggcctcacaggcgactctcacagccagaacattctgccgggtctgagtgaaggaccgcgctctgctgaagagttagaatgaggcagcggtgagaagaagg

SEQ ID NO: 26255 - DNA, 491 bp, Homo sapiens
  misc_feature (1)...(491): n = A,T,C or G
aggggtgttttnnaatcgtagacctgatgcacagtcgnggaagtcgaggaatgactgtgatgtgattgtcacctttttcccagcccattttcaccatattattgagcagctgcgtttccgccagagcagcgtggggaacatcttcttgtctgctggtgagtcctggctagctggcctgggttagggtgtatgatgatgtcgctaatggccactctggagaaggaattgggaactgagggccacagtattggagaggccactgaccgtgggaagttggggtgcaggacagctgtaggtggtggggcaggcagctactgccccggggggaggggatggtcggtctttggctgatgggtatgtagtgtgggggcaggaagggcgtgcaggtgtggtcactcgtggcctccccgtctccagcgttccagttctcctacacagctgtcttcggtgcctacactgctttcctcttcatccgcacaggttggtcctcn

SEQ ID NO: 26256 - DNA, 459 bp, Homo sapiens
  misc_feature (1)...(459): n = A,T,C or G
cttgaccccctccgnnnattgatgacccttagcccangcggnggaattcggaggggaaggggctgcagcacaagtggtgcctgattcccgggccattccctggcagccaagtggctgctgggctctgcacacagcccatcccccccagtgctgctgcccgcgttccagcttgcccccacctgccaggctgtgcagtgggttcaggtgggaagcagttgctgggcccacctgtctggcaagggcagttggggagccctggctgcttagcacaggggtgaccccagcttctggctcacacatccctgcagactgtgggtgcttagtgtggaaagaggaaggacctctgccctcctggcccttcctccagtgggacgagaagcccaggaaagaggctgaacccaggaagggctctgggcagcctggccgctggtctcgcagtgtgtggctggtcttggcctc

SEQ ID NO: 26257 - DNA, 475 bp, Homo sapiens
  misc_feature (1)...(475): n = A,T,C or G
atggttncnnnnatcgatgtcactactccagngncgnggaattcgcgatagcgttttgcccgcattcggggcgcgcggagctggggggtccctgtggggctcccggagttaagatggcgtcctcagcggagggggacgaggggactgtggtggcgctggcgggggttctgcagtcgggtttccaggagctgagccttaacaagttggcgacgtccctgggcgcgtcagaacaggcgctgcggctgatcatctccatcttcctgggttacccctttgctttgttttatcggcattaccttttctacaaggagacctacctcatccacctcttccatacctttacaggcctctcaattgcttattttaactttggaaaccagctctaccactccctgctgtgtattgtgcttcagttcctcatccttcgactaatgggccgcaccatcactgccgtcctcactaccttttgcttccg

SEQ ID NO: 26258 - DNA, 457 bp, Homo sapiens
  misc_feature (1)...(457): n = A,T,C or G
atttgatttcatagcactcgcagnggcanncnngccttatgngggggcgctcaaacagacaccatacaggccacctagcaacaacagatcaggtgtttgtgaactcagatgaacgacaggcttcttccaactacggctggggagttgcggaaggctctgtggcacagggagccctggaaagcaactggggtgtggatatgtaagggcaaggccactgcagggagcatgtctagaaatggaaaactggggggctgggtgggaacctgaaagctaggaccaagcttgcccactttgttatccttctggtaaagcggaagacaaaagattttatactcttcatttttccaacatatgttgattgaatacctattatgtgccaggcactgtgctgggcactagggaaaccaggatgactgagaccccgcctctgatcacagtggggcacgaaggaggaggg

SEQ ID NO: 26259 - DNA, 435 bp, Homo sapiens
  misc_feature (1)...(435): n = A,T,C or G
ctcttccagttgaaaatgtctgtagtagagaagggctgataaacataaagccattctcctccttgaacctcattttgtgcatctaaatagatctgtcgcctagtttctctgacgggcatctgcatgtctcggccgcgtcctgaccggagatggccaacctcatcctggatttcctcctttgatttatcaggcagtggccctggctcttccctacatagtgaagtttggggggtactcttctctgagtctgaccctccggagacagctgctggagtgtcttcctaagtcttgtcagagataggtaaataggaacataagggggtggagtctctagctcttctggtggggcctgtaggacaggnttttcctggtttccttgctactgtttctcctgggacatggtttttgggtcttttctatggntccttggtttgg

SEQ ID NO: 26260 - DNA, 458 bp, Homo sapiens
  misc_feature (1)...(458): n = A,T,C or G
natagatgaccatctgnccattgaggtgcatttccggcctcggggctctgctctcctacctcagtctgccctaccctggaatggggaaaatgcggacatgccactcagtccggccgcgaacagtgctccagaactcagagagttttccagacgggtggagatcgcgttccctgcccgccgaggtcccatcgcttccctgctgggaagacaaatgaggcgctttagccgtctccacggccagcccctccctcataacccgagattctttgtgggctcttagtccatagctgcctttgaggtggtgtagaccttgctaaccaggacggcccagtaggcagagctcatttttattcctgtctgcaatcgtgcaaaaacgcctcttatggaaaagccagagcgccaggagtcagcaaaacacactaaagattgggcagtcactggggagaacactcaccccg

SEQ ID NO: 26261 - DNA, 475 bp, Homo sapiens
  misc_feature (1)...(475): n = A,T,C or G
tggcnccnnnnnttcgatcgacatccctagtgcgnngcgaggaattgtacttgagcccctctctaatttaaatttgatattattaattatccaggtaattgtcttccgtgtggttgcctccttccccactccagtatccactttcagcaaaacgtcttgcttcaagtcccagatagaagagtctttgacttttcttcagaggcttattttagctagaatgtttaaagctacagatgcctatctgctcatctttccagctggattaggtgttgcttagatttgctagctgtctttaagtattacacagtttttgtatttatgcagccttatgtatagctgtagtggcgaggagtaggcaaattatatgattagtaaaagggctagtttttgatgctaggtatggaagtgtagcgacaattgtaaactgtcaagctgtggtgggaaggaatgttgaagtaaaaaggagtggagaacn

SEQ ID NO: 26262 - DNA, 458 bp, Homo sapiens
  misc_feature (1)...(458): n = A,T,C or G
ctcgactcctcgnnnatgatgaccctctgaccancnggnggaattcgcggccacagctggcggaatgcgaggagccgtccatctacagcccggccttccccagggagaagtggcagcgagaacgcacgcaggtcaagatccggaacgtcacttccaaccaccgggcgagcgacacggtggtgtgcgagggccgcccccaggtgctaagcgggcgcttcatgtacgggcccctggacgtcgtcacgctcactggagagaaggtggatgtctacatcatgacgcagccgctgtcgggcaagtggatccactttggcaccgaagtcaccaatagctcgggccgcctcaccttcccagttcccccagaacgcgcgctgggcattggtgtctacccggtgcgcatggtggtcaggggcgaccacacctatgccgaatgctgcctgactgtggtggcccgcggn

SEQ ID NO: 26263 - DNA, 459 bp, Homo sapiens
  misc_feature (1)...(459): n = A,T,C or G
atcgacattgataccatcggcaagngcggnggaanttcactctgattacaaccccctggtgatgtctgccaacctcaaggctgcagaggaggagctggtcttccagaaaaggcagttgctaagagtgtggggctctcaggacacccatgatttctacctcagcgagtgcaacaggcaagtgggcaatatccccgggcgcctagtggctgagatggaggtggggacagagcagactgataggaggtggcgttctccggcccaagggcacctgccttctgtggcccacctcgaggactttcaggggctcaccatcccccagggttcctccctggtgctccaggggaactccaagagactcccactgtggactccaaagatcatgatagcagctctggactatgatcctggggatgggcaaatggggggccaggggaagggcaggctggcgctgagggcagg

SEQ ID NO: 26264 - DNA, 465 bp, Homo sapiens
  misc_feature (1)...(465): n = A,T,C or G
naatgatgatcattagtccattgaggngcaattccccggctcgagcggccgctggggccaagccccgagggcccctgcaagcactttacttcctgttcctccccagccttaaccccaaagccctcctgcaccccaaagaagccactgaggctggccgagccacactgtctccccaggggcgtcgacctggcccagctgggtccccagggccagcacatggaataaaatagccagggccacactctnnaaaaaaaaaaaaaaaaaaaaaaaaaaaaaaaaaaaaaaaaaaaaaaaaaaaaaaaaaaaaaaaaaaaaaaaaaaaaaaaaaaaaaaaaaaannnnnnnnnnaaaccccccctttaaaaaaaaggggngaaaaaaccccccgtaaaccccggggggggtttttttaaaacccccctttttggggggccccccccccccccctttttttaagaagggggg

SEQ ID NO: 26265 - DNA, 464 bp, Homo sapiens
  misc_feature (1)...(464): n = A,T,C or G
aattgtagacactcgaaannncnnnnattgatgacccttagacagngnggnggaattcgagagccaccaggccactgagcgcagcatgctatcacttctcaggaagttgtgagggtgaggagaatagccgggcccactctgcagaggggaggaacaggcacaggctagaggcacgggctgatagagtgagtcctctccctcattcattcattcattcattcattcatccatcagacacctgctgggcatctgctgtgtgcgagacactgtgctgggtgccccagacacaagacagaaactcgggtcgctctgtgtgcctccacactggccttccctgctgcgtggacgcaggctctgtctcctaggctttaagccccatgcatcaggtggaagacaatttccagcggcctctgcccgcttgtttttcctcctctccttttcctgccgccttggtcttttttgtn

SEQ ID NO: 26266 - DNA, 476 bp, Homo sapiens
  misc_feature (1)...(476): n = A,T,C or G
tgcggcccccnnttcgttcgacatccctagtgagnngggnggaattcggccttcctgccattggagtggaatgaatggagcaggaaaagaaagtctgggatctgatatgtaaatgaacttggcagccatccggcagcagggaatgtcattggtacactttgggcccacctccagggtttgcagccaatgacggtgttgtctcagcccactctccccttcttgtttctcctggctttccgcacacccctgaggcccaggacccatacctatgagtctcccattcagaagtcttaagaaaggggggtctaccacattgcaaaccctcagtcgctaagagcccatgatggggacaggactcaccagctccatgcaccgccggctggcctctgcctcccgctgcaccagctcttccatgtcggccttcagctcttccaggcgccgctggtagtactggctgctctcccgctgctgggact

SEQ ID NO: 26267 - DNA, 456 bp, Homo sapiens
  misc_feature (1)...(456): n = A,T,C or G
aatgatgaccatctgncattgagggcatttcggcaaccgccaggctgtcgaggggccccacgctgaggggtagcacagcacacagcaggcgctcttcccaggctgggccccgtgacctgccttcctccagctaggcaccctgatcccatggctctcgtctgtgcctgactcctgctccaaggagcacaggtatcggatggatatcccatccacccaacctcctttccccagccctgggtcagcaccattgatacaggttagtcgcagcctcagtctcttcatctctccaatggagatgcttttccaatagttcaaaggtgtctgtactcagcaaaagcctaggaaaccttgttccaaggtgaagagggaaggaccagatggaatctcctagatcctcccagctactccccaacacacccatttggactctccccacgagtaacatcacttgtagca

SEQ ID NO: 26268 - DNA, 463 bp, Homo sapiens
  misc_feature (1)...(463): n = A,T,C or G
ctagacccccctngnnnatagatgactctctgtccagngnggnggaattcatcaaggcacaggatgttcaagatgtggtgatgacacagacacaggagcttcagccctgggaacaggagaggacaccatgcggagctcgaggagtgagaggggacaggcctgatgacacacgccaggggaccaagcccgcggggatgcctccaagcgtgtctctgtccacaggcagaaaactcatcccaccacctctcaggcctctgagagtttgctttttctgttttctatttcaaatattccatttctcccatttttggaggaactgtttttatactactttccaaaatcccaacttgcaagcatgcttaattcgtttcattttttttctatttttgacactaaaagcatttaatgctgtttttacctctgcatatagctttggctgttaatcctactttttaaattattt

SEQ ID NO: 26269 - DNA, 473 bp, Homo sapiens
  misc_feature (1)...(473): n = A,T,C or G
ggccccccntttgtggacctccttagngcggnggaattccagaaagggaaatggagacttagtgaggacacggagcctgtctcaggtcccccaaaatgcctgacattcttttccccattctttgcagctgcagatgaagtggcactcctaggctgccccacacccagctacaggtacctccacatacaacacaaacatctgggcccacagtgcccatagcagcctcccagccataccagtactcccacacagccagtcctcacacacaggctggggcatatcaccccgcatatggttacaaacacactcgggagataccaggacatatcatctgccctcacacacagtagcacagaggtgtgaaatggccgtacacacatcatgaaggggaggctgcacacagaccacctgcgcgcacacagttcaggtgcaaacatgcgtgagcttccatgcacacacagctcccaagtgtc

SEQ ID NO: 26270 - DNA, 441 bp, Homo sapiens
  misc_feature (1)...(441): n = A,T,C or G
tacgggacccctcgaatancgganccttcgnaanactgnnnnnatttntagcggctggataccgggttctccgcgagatcctttttatttctccccgtttggaagcgacgactggcctggccagaggactcgcgtgggagcgaggtgccggccccgacaggacggtgagcctacccgtatattacaagaaatctcaagtcaaacactggaaaagatgtcagaagattcagaaaaggaagactattcagacagaacaatcagtgatgaagatgaatcgagtttgagatcgctcttgttgctcaagctggagtgcaatggcgcgatctcggctcactgcaacctctgcctcctgggttcaaacgattctgcctcagccacccgagtagctgggattacaggcatgtgccaccatgcctggctaattttttttgtatttttagg

SEQ ID NO: 26271 - DNA, 478 bp, Homo sapiens
  misc_feature (1)...(478): n = A,T,C or G
cgcgcgccccnntttgatcgaccatcactagtccagngcggtggaattcgaaggaagcttctaacttttcttctggttgccggatgctggacaccggaagcgagccctataattatggcgacctccgcgacgtcgccgcacgcgcctggttttccagctgagggtagatgcggttactatgtggaaaagaagaaacggttctgcaggatggtggtggccgcagggaaaagattttgtggtgaacacgctggagccatggaggtgtggtatcgccctactctctcaagagtcggaaataagtatcctggtcctgtcggtgctggaacccggcccctcccctctttgacagctttctgcttgtgtcccctggattctccagctttcactttaataaacccagttttgccctccttgcggagcgattatgagttctagtgatgagaaattttttatttttctaagtaaagcgccagcagtg

SEQ ID NO: 26272 - DNA, 471 bp, Homo sapiens
  misc_feature (1)...(471): n = A,T,C or G
cccccccccccccccctttgaagacattatagagngccgtggaattcagcgaggtgccgggcgacgtgcgggcgtttctgcgggagcacccgagcctgcggctccagacggacgcccgcaaggtgaggtgcatcctgacaggtcacgagctgccctgccgcctgccggagctccaggtctacacccgcggcaaaaagtaccagcggctggtccgcgcctccccggccttcgactatgcagagttcgagccgcacatcgtgcccagcaccaagaacccgcaccagttgttctgcaaactcaccctgcggcacatcaacaagtgcccagaacacgtgctgaggcacacccagggccggcggtaccagcgagctctgtgtaaatatgaagaatgtcacaagcaaggggtggagtacgtgcctgcctgcctggtgcaccggaggaggaggagggaggaccatgatgacagtgacg

SEQ ID NO: 26273 - DNA, 476 bp, Homo sapiens
  misc_feature (1)...(476): n = A,T,C or G
agaagaaaaaannttcgattgccatccttagtgtggtggaattccggggcagtgccctcttgtccaggtctaacggtgataatgaatggtggactgagggctggagtccagccttcagcctcagcatcctcccacccatgcctggttttgaggctcactgaccctccctcctgggatagccaaagctcccagaagggaagaaggtaaattgtctttgtatcccagtatctgacaccaagaaagtggccaccagcgtttaatgagtgtgtgaaagactggatggggtggcctagcgaagtgggaagaacaggggctttggaggcagcagacctgaagcctaatcacccttgagcctcggttttctcacctatgaagtaggatatgccaccttaccaggctgctgcgagccacggacagaggggaataatgtcagttacatgctggacgctgggccaggcatagccaggtgtcaccca

SEQ ID NO: 26274 - DNA, 436 bp, Homo sapiens
  misc_feature (1)...(436): n = A,T,C or G
attgaaccccttnnnnactgangacctttagaccagcgtggnggaattcgtgtcctcttccatggcaccatcttggaccccagcactgccagtcccaaggagtattacactcaaaataccatccaagtggccattcagagtttacgtttcttcaacagctttgcagctcttcatctgcctgcttttcagtctattgtaggggcagagggcttgtcccttgcattccggcacatggccagctccctgctgggccactgcagccaagtctcctgtgaaagcctccttcatgaggtcatcgtctgtgtgggctacttcactgtcaaccacccagataaccaggtgatcgtgcagtccggccgccaccccacagtgctgcagaagctctgccagttgcccttccagtatttcagtgacccacggctgatcaaagtactgt

SEQ ID NO: 26275 - DNA, 476 bp, Homo sapiens
  misc_feature (1)...(476): n = A,T,C or G
cccccccccccccccccctttgagnccctnatagatgacccttagaccgtgcggtggaattcctttgtacttaatttgtgttgttttgttacaggggcctaagatcagggctgtcaccatttcattagatttctagatcccctcttctggcattatttgctatctttagctgtttttcacccatgaatataatcacccaatctattttcttatcatagtacttgattaaaaactgagtaaggtggccgggtgcggtgcttcacgcctgtaatcccagcattttgggaggctgaggcgggcggatcatgaggtcaggagatcgagaccatcctggctaacatggtgaaaccccatctcaactaaaaatacaaaaaattagccaggcgtggtggcaggtgcctgtagtcccagctactcgggaggctgaggcaggagaatggcgtgaacctgggaggcagcagttgcagcgagccaag

SEQ ID NO: 26276 - DNA, 458 bp, Homo sapiens
catagacgaccattatagagggcggtggaattctgaccatgtacccccgcctggggggcttcgtcatgaacatcctgtcccgcctcatcatgaagcaggtgtggaagtaccccaaggtgtgggagggcttgatcaagtgctgtcagcgcacaaagccccacagcttacaagtcatcctgcagctgccgccccagcagctgggagccgtctttgacaagtgcccagagctccgggagcccctgctggcccatgtccgatccttcaccccccaccagcaagctcacatccctaactccatcatgaccatcttggaggccagcggcaagcaggagccacaggccaaggaggcgcctgcggggcccttggaggaggatgatctggagcccctgaccttggtgccgaggcccacaccccagacccctcaggacctgatcggcctgcgactgagccaagagaag

SEQ ID NO: 26277 - DNA, 474 bp, Homo sapiens
  misc_feature (1)...(474): n = A,T,C or G
gcgggcannnnttcgtggacgtccactagtccgngnggaggaattcgggtttcctcaccctgttcggccctttgtgactcttggcatccggagactttcccctcgacccagtggagccgtcaggccggagcctcagagccttgacacccaagcactgccacggaagtctccccctttgccaagcctgggggactggtttctaagacaaccgtgggaaccactgtgacgggagaaactgcttgtgcttcgcgcatgcgcattggctgggccgactcgttctcccctcctggcagtcaggctgcgtcccctttaaagaacgccaccgctgagaactgaccctcacatctcccttcctgaatttctttagggaaagcaacaaccatccctgtaagccatgggttttcatgcggaggaaggagagggctagttgtctgagagggtaactgcttaaggctgcagactaggaaatgggat

SEQ ID NO: 26278 - DNA, 476 bp, Homo sapiens
  misc_feature (1)...(476): n = A,T,C or G
gcgaaaaaanttttgtggccactccttagtgtggnggaattcgcggcggcaggcgccatgtccggccgcgaaggtggcaagaagaagccactgaaacagcccaagaagcaggccaaggagatggacgaggaagataaggctttcaagcagaaacaaaaagaggagcagaagaaactcgaggagctaaaagcgaaggccgcggggaaggggcccttggccacaggtggaattaagaaatctggcaaaaagtaagctgttccttgtgcctgaggagatggtgaccctttatttcatctgtatttaaacctctctattccctgccataacatcttttgccacgtatagctggaattaagtgttgtcttggagctgttgtacatttaagaataaacttttgtaaaanaaaaaaagaaaaaaaaaagaaataaaaaaaataaaaaaaaaaatttttaaattgaaaagagacagtgggaagg

SEQ ID NO: 26279 - DNA, 476 bp, Homo sapiens
  misc_feature (1)...(476): n = A,T,C or G
agcgcacannnnntttgttcgacgtccatagtcagtgcggtggaattcctgggtttcaccgtgttagccaggatggtctggatctcctgaccttgggatccgcccgcctcggcctccgaaagtgctgggattacaggcgtgagccaccgtgcccggccgagacttttaattatgcaatgccagactgcattgcataaaccaaaggccaacagagaggcgacctttcaaattactggcacaagaagagccgagatcagaaagctccaacttaatgcaaacatcgacaagaaatccgacagaaatgacttctgtgtctggtcaacttaacataacatgacatattgtcaagcacatttggctttttaggtagaattgtctataaaggtttaactgctttagaaaatataaatgtgaagatttgtggtatttgggtttatatataagatatttctacattgaaaagagacagtggaaaa

SEQ ID NO: 26280 - DNA, 461 bp, Homo sapiens
  misc_feature (1)...(461): n = A,T,C or G
ctagaaccccctnatagatgaccctctagaccangcggaggaattcgttaattacaagaccatttgtgtgttacttaaataatcattaatttctcatttacactttccctaccttctctcctaccctgtggctatcattgtccttttttcacctccccctctctcagctctcatgtttctcaccattgcaaaatatgtgtggctttaaatttggcatctttacctaaatgcgtggaataaggtaaagacagtctttttaattgggtgaggccttattctcattgcattcatctttatactcatccttcacatgggtgggcggggaatataaagaaagagaaggaactgttgtgactttcggtgacatgtttttgctccatcacaggattcgaccgtccttccagttggagagatctcggagccatttggacatttcatcactcagtgtatgcgaaaacagg

SEQ ID NO: 26281 - DNA, 454 bp, Homo sapiens
  misc_feature (1)...(454): n = A,T,C or G
atcgagacactattgagngcggtggaattcccaggacagatggaagcctttctacacctgtggccagacggcagccttggagattggaagtccttcagctgctactgttactggggctgggctggccccacctgccaggagcccaggcctgggcctaaagaagcagtataaagccagggcccctgccactgcctcttcttttccctgctgccacttttccaggcctggaactactctgtcccactcttgctctattcagtttacagtcaaccctcccaagcacacaccccgcttcccttggaatccctgaggggtagaaggggccagaaaaaacgcttataaaaccagaggccctctgagatcatgtgagtcctccatggcaaggaagcagttccagggagagtcaggttccagctagttagggctgccagcctatggctgtgtgcctacacct

SEQ ID NO: 26282 - DNA, 461 bp, Homo sapiens
  misc_feature (1)...(461): n = A,T,C or G
ctagaaccccctnatagtagaccctctagacagngcggaggaattcatttggctcagatccagggccagtttctacatgtttagcaacatgtttgatctctcagtgtttcgggcaacaatgtaactgtcagtgcctgggcattccaatccctagcttacgtttaagcctgcaggggaagacatgcacttggtccagggtcacagagctgtcaaggcaccttgcacttctaggccaggacacagaaaggggagttggggaccactacaatgagcaatgttggtcagtagttttatttgtttgttttcactttatctgattttggtgtttgactaatactggcctcccaaaatcaactgggaatttttcctccagtgccaccccctttttatttgcatgacattttgtagaattggtgttgtttctttaagtattcggtagaattttttggtgaaaccattta

SEQ ID NO: 26283 - DNA, 507 bp, Homo sapiens
  misc_feature (1)...(507): n = A,T,C or G
agggaccagggnngnnnnnnnccttgaganccctcatcgatgatcctaggccangncgnggaattcgtctctattaaaaacactaaataagccaggcagggtagcgcatgcctgtggtcttagctacttgggaggctgagggcaggagaatcacttgaacccgggaggcggaggttgcagtgagccaggatcgcgccattgcactccagcctgggcaacaggagcaaaactctgtctcaaaaaagaaaaagaaaaagaaaatatgtatgtttaatatcctctacatagaatacaacccacagggattatcacagaaaaggtaaagaaatctgaatcacttgtattttttgtcagcgaaaatgcataattcttcttcatagtcaaatactcttttaagtaataacaaccagagcttgtgtaaagctgattttggtagtagatattatactaagagatttttatatacatatgtatcaactcacttcatccccagaacaactcaatgcg

SEQ ID NO: 26284 - DNA, 491 bp, Homo sapiens
  misc_feature (1)...(491): n = A,T,C or G
tggcgttccnaggnngnnnnaactgagaccntcactgatgaccnctcggaagngcggnggaantctcagcttcccacgctctggcacacagagcgacaaagtcaccctcattggcgccaaggtctgtgtggaggcagccaagaaacgcattcaggagatcattgaggacctggaagctcaggtgacattagaatgtgctataccccagaaattccatcgatctgtcatgggccccaaaggttccagaatccagcagattactcgggatttcagtgttcaaattaaattcccagacagagaggagaacgcagttcacagtacagagccagttgtccaggagaatggggacgaagctggggaggggagagaggctaaagattgtgaccccggctctccaaggaggtgtgacatcatcatcatctctggccggaaagaaaagtgtgaggctgccaaggaagctctggaggcattggttcctgtcaccattgaag

SEQ ID NO: 26285 - DNA, 491 bp, Homo sapiens
  misc_feature (1)...(491): n = A,T,C or G
aggnaggtcncnaggggngnnccctccgtagacccccaccgtttnacantcgaaannncnnnnnannnnggggganacagagcgacggagtcaccctcaagggcgccaatgtttgtgtggaggtttccaagaaacgcattcaggagatcattgaggacctggaagctgaggtgacatgagaatgtgctataccccagaaattccatcgatctgtcatgggccccaaaggttccagaatccagcagattactcgggatttcagtgttcaaattaaattcccagacagagaggagaacgcagttcacagtacagagccagttgtccaggagaatggggacgaagctggggaggggagagaggctatggattgtgaccccggctctccaaggaggagtgacaatattatcatctctggccggaaagaaaagtgtgaggctgcccaggaagctctggaggcattggttcctgtcaccattgaagaaaaggtgccc

SEQ ID NO: 26286 - DNA, 456 bp, Homo sapiens
  misc_feature (1)...(456): n = A,T,C or G
tgcgttnnaaatccgagatcagtcgnacgtgcgaaggaacncnggggacatggngccccacacatactgtgggaaaggtgtctgtctcctcactggcattatgggtgcaggctgcactgcccttgtggtgggcgtggtggcccgaaagctggaactcaccaaagcggagaagcacgttcataacttcatgatggacactcagctcaccaagcggatcaagaatgctgcagccaatgtccttcgggaaacatggttaatctataaacacacaaagctgctaaagaagattgaccatgccaaagtgaggaaacaccagaggaaggtccttcaagctatccaccagttgaggagcgtcaagatggaacagaggaagctgaatgaccaagcccacactctggtggaccttttcaagatgcagaatgtcatgtatgaattaattacaaaacctcatggccg

SEQ ID NO: 26287 - DNA, 462 bp, Homo sapiens
  misc_feature (1)...(462): n = A,T,C or G
cgggnacnnnncctacgacatcttcaggggggaatcaggtacgcagcatgggcgcagctcaggccgtcgacgaaaactgatggcgggattggcaaaggcagtgaatagtctgatgacaactcctatgatgagaagtacctgattgccacctcagagcagaccattgctgccctgcaccgggatgagtggctccggccggaggacctgcccatcaagtatgctggcctgtctacctgcttccgtcaggaggtgggctcccatggccgtgacacccgtggcatcttccgagtccatcagtttgagaagattgaacagtttgtgtactcatcaccccatgacaacaagtcatgggagatgtttgaagagatgattaccaccgcagaggagttctaccagtccctggggattccttaccacattgggaatattgtctcacgttctttgaatcatgctgccagtaaa

SEQ ID NO: 26288 - DNA, 462 bp, Homo sapiens
  misc_feature (1)...(462): n = A,T,C or G
catgatcattatctgncnnatgatgactcttagcccagcnggnggaattcgaattccaccacagccatatcgactgttttgcagaggatttgtgtgtgctgcctcatgaggggagggctggtaggagggggggagaggtctctgtcctactgctctccagagggcatttccccttgcgccttctcccacagggcccagcccctctcccctgccccagtccccagggggtactctggagtgagcagtgcccctgtgggggagcctgtaaatgcgggctcagtggaccactggtgactgggctcatgcctccaagtcagagtttccctggtgccccagagacaggagcacaagtgggatctgacctggtgagattatttctgatgacctcatcaaaaaataaacaattcccaatgttccaggtgagggctttgaaaggccttccaaacagctccgtcgccccta

SEQ ID NO: 26289 - DNA, 567 bp, Homo sapiens
  misc_feature (1)...(567): n = A,T,C or G
natggacattcggtccactatccgcgtggtggaattcgtcttgctgacttcaagaatggaactgcggatcttcgtggagaacatattgtgatgttcgtgcctcagagctaaaactatgagtgaatttcggattcaccatgacgtcaatgaactgcttagcctgctgcgtgtccacggaggagatggggctgaggtctacattgacctgcttcaaaagaacaggaccccgtacgtcactaccactgtctctgctcacagtgccaaggttaaaattgcagagttttctcgtactccagaagactttctaaagaaatatgatgaactgaaatctaaaaatacaaggaaccttgacccgctggtgtacctgttgtcaaagctcacggaagacaaagagactctgcagtacttacaacagaatgcaaaagaaagagctgagcttgcagccgctgctgtgggcagcagtaccaccagcatcaacgtccctgccgcggcctccaagatctccatgcaggagcttgaggaactgaggaagcagcttggcagcgtggccacaggctccacgctgcn

SEQ ID NO: 26290 - DNA, 568 bp, Homo sapiens
  misc_feature (1)...(568): n = A,T,C or G
nattcgaacctctagtccacngtggnggaattcgtaactctggctagagagacacatgtgtcttgtgtcaaggcaggaggataacccggatgaccttctgaggtctcttcagcccttttcgctagtggtcacccaccaccatggttacttgccagcaacatctctattgctggatggtccctgtctataaccttgggctagtatattttttccaatatgggaccttagtcttactactgatgagttctatgggtctcttgctagggggtaaggatttttattcttgggcttatagagccagttagatcataattcttatgaaatagagagtgtcctaaatatcactgaaataaaaagtaggaaaaagaagcttgaattttaagactgaggctgctctgcagattctagtttggctttcagagttcaagagtggtggcatcttcacctgaattcttcaatgccagggtaataaaccaaaatagtcctaatcagtatatgctagttgagcatcggcataattttctttcctctggctgatcccagcccttaaaggaangggtagacccgt

SEQ ID NO: 26291 - DNA, 563 bp, Homo sapiens
  misc_feature (1)...(563): n = A,T,C or G
atcgacttcgatcactatccagcgngggcaattcctgtagtcctagctactcgggaggctgaggcagaagaattgcttgaacccattgaaatttctagtttttccacatcctcagcaataattctttataataggcattaatgggtagagagtggtgtctcactgaggttttaattttcatttctctaatgaccaacaatattgagggccttttaggtacttctcagccagtcatataccttctttggtgacatgtcttttcagatcttttgtccatattttaactgggttgtttgttttgttatttttgggtgataagagctctttatattatttggataccagttatttaccatatatatgatttgaaaatatttcctccccatttgtggcttgtttcatttttataatggtgtctttagaagcacaaaaattataattttgataaagtctgactggcagtttttccctcctttggattatgattntggtatcttatttaagaattatgcctaatgcaaaatcataaagtttttctcattttntgctagaagttctatagn

SEQ ID NO: 26292 - DNA, 455 bp, Homo sapiens
  misc_feature (1)...(455): n = A,T,C or G
gagccggggggccccattaggccaatacgatggctcggaacnncgcagcctacagcacaccccctcctctgagctctgaatatgggacccattgccaggagctttaagacaaggtgtttctgccaaacggggacctccatccagagaaaaggaagaaggtgcagggtgggccaagaggcaagtgaaggttggcctgagtctgggccggaaactcagaggatgtttctcctctgctgggagctgtagtttcttatcaaaatagatattgttccaccatccccctccttggcccttcaagtgggctgaagcccttggaaagtgacataggaagtccccagatcttgcccttctcactccagaggctagtggtcacagacagctgggaatggcagccacagagggtcccctctgggagaaacagcttcaccccagcctcagggcccttggccatcact

SEQ ID NO: 26293 - DNA, 567 bp, Homo sapiens
  misc_feature (1)...(567): n = A,T,C or G
natcgaacttctagtccaccgtggnggaantcccaacgctgaggacatgacatccaaagattactactttgactcctacgcacactttggcatccacgaggagatgctgaaggacgaggtgcgcaccctcacttaccgcaactccatgtttcataaccggcacctcttcaaggacaaggtggtgctggacgtcggctcgggcaccggcatcctctgcatgtttgctgccaaggccggggcccgcaaggtcatcgggatcgagtgttccagtatctctgattatgcggtgaagatcgtcaaagccaacaagttagaccacgtggtgaccatcatcaaggggaaggtggaggaggtggagctcccagtggagaaggtggacatcatcatcagcgagtggatgggctactgcctcttctacgagtccatgctcaacaccgtgctctatgcccgggacaagtggctggcgcccgatggcctcatcttcccagaccgggccacgctgtatgtgacggccatcgaggaaccgcagtacaaagactacaagatccactggtgggagaacgtgtn

SEQ ID NO: 26294 - DNA, 565 bp, Homo sapiens
  misc_feature (1)...(565): n = A,T,C or G
cttcgacattcgaacaccagtccgcgnggngcaattcctgagacaggagaatcgtttgaacccgggagccagaggttgcagtgaaccgagattgcatccagcctggacgacagcaagactctgtctcaaaaaaccccccaaaaacccaaaatgaagcccttctgaaaaggataactgctaactaatgtgtagatgatgggagctccttccctttttcacttcgtgggagattttttggagggaattcctgaggttcacattgttaacacatagccatcctcatccgctctgtttctgcaggggtacacatgccacccttgagctggctggctcagtgggcgcacacgggcgctgtggtctgggtctttctgccaccggtatcacagtgtagctggtggccttgctctgggctctcctgccacaggctgtcccctccaggaggacagatgggtaggtgggctgctctgccagcccgtgacacaggtctagcccagccaactgtctccaaggaaaggagggtggaaggggccgccctgtacaggagtcacttgggatngatgctgtg

SEQ ID NO: 26295 - DNA, 521 bp, Homo sapiens
  misc_feature (1)...(521): n = A,T,C or G
aattagaaccaccattcgagtgagccgtaattcgcgactggcctaagtcgccgcataactgccacgtggggatgagatttgctgggctggtagcggcggctgctgcgggaggtcccgcccacgtgaagccagcctaactgagctctggactttggggacagctgtcagtggcctatgccgcangacaccatgaagcaactgccagtcttggaacctggagacaagcccaggaaagcaacatgacactctgacctggtcacagccagagacacttggaaatcctccatctccccggcatggtcatgtgatggtggcagcagggacaaagctcttcatccacggaggcttggcggnggacagattctatgatgacctccactgcattgatataagtgacatgaaatggcagaagctaaatcccactggggctgctccagcaggctgtgctgcccactcagctgtggccatgggaaaacatgtgtacatctttggtggaatgactcctgcaggagcactggaca

SEQ ID NO: 26296 - DNA, 466 bp, Homo sapiens
  misc_feature (1)...(466): n = A,T,C or G
gaggcggaggggcccctaccgaggccatcgangaggcccttcgnancgccnggnggaattcccaacgcctacgtgactgacgaagacagcatgatatatgatttcatccgagatttttccaaatggagtgagagaacaagaaagcctgtacaagccctctatgggtatgactactttgccagaacctgtgaaaagtgggtggatggcataagacagtttaaacatctcccagatgatggagtctcactctgtcaccaggctggaatgcaatggcatgatctcagctcactgcaatctctgtctcctgggttcaagcgattgctctgcctcagcctcccaagtagctgggaccacaggcgtgcaccaccacacaggtaacatctgccggcacctgctgccccgggtccagtgccccgccttgattgtgcacggagagaaggatcctctggtcccacggtttcatgcc

SEQ ID NO: 26297 - DNA, 560 bp, Homo sapiens
  misc_feature (1)...(560): n = A,T,C or G
natcgaacttctagtccacgtggnggaattcgaaatgagagatctgggcacagagaaagtgctaactagtaaaacacaaagaaaatgaaggcgtgagtcgtagctgaatttgagagctcttcctacctccaagtacacaaaggcttctttcctgggctgagttgggtgtcagaggagagtgggtatttgggattcagggagcagggccctttcttcaaccctgtaagaacaaccttgctcctcccacagcctggcctaattcttggtcagagttgagggagacccatggtttggaggtaacttctgaccccaacctgatcctgtgattgcttgcaggccatttactgccttgtgacgttggtcttcttttactcatctgcctcattttgggcctggttggccctgggctntagtctggcagtgtatggggccagctaccactctatgagctcgatggcacgagcagcgttctctgaggatggngccctgatggatggtggatggacctcaacatggagcanggcatggagagcacctttaggatgtgacctactgacagc

SEQ ID NO: 26298 - DNA, 544 bp, Homo sapiens
  misc_feature (1)...(544): n = A,T,C or G
gctancacaaggaanaaaaaaattagaanccctttcgatgcacagtccaagtggtggaattcttgggttataggcaaggccttttctctggcatggaattgttaattttctgacacgtctagatgtgaaatttctgaaaatgttgaagcagagaaacattcacacacaaaaagcaacatagtcatgtgggtccagatggcctcagtcctagatgttggcaccctttgctgtgtctcctcagagtatcctgttccgcctcctgccagctggacctccctcagtggatgtcttccctcccccgaccccagcctgtcagtccgagcacagtgcaggtttggctctgacttgggcctttggctgcagtgggggtggatttcagagcctctcatggcagcatctaagtgaccagagctgggatgagagaggggaaggggcaatgtgagtggcgctatgggacgggccagccctgctcctgagccagccccgccctctgccccctggccttgggctctgtgctagggatggtgaagaatgggggcgtgcn

SEQ ID NO: 26299 - DNA, 569 bp, Homo sapiens
  misc_feature (1)...(569): n = A,T,C or G
cattgacatcgatcactactccagcgnggnggaattcgtgaagccatcctatttgtttccggngaacaatgacggngtgggagaggggagaggagagagtttgggaaagggagatggagaagaactcaaggacattgcaaccctgcccggcgcagatctgattttcacatctctacctggacattgagcctccaggcaccatgttgaggagagatgaaaaccagggcggtagaacttcagggtgaaggacagagtcctgggtggggcagcggctgcagggcgcaccagagaacccagccagaggggttgtgagtaccagtggtgttgcttccaccctgcagcaggtgggatgaggtctgtgtgtgtgtgtgaaccatcattttttgatcatcatgaccaatgaaacattgnnnaanaaaaaaanaaaaaaaactnattattaattttaacaaactaaaaattcaaaaaattnctctcgggttataggagaccgggaacacccgacatgccctcctgacctgactgcatgtgtgtgcccattccatttggtgtccacccccctcctccca

SEQ ID NO: 26300 - DNA, 562 bp, Homo sapiens
  misc_feature (1)...(562): n = A,T,C or G
natcgagatcgatcgcgcggngcaanncgcactgggtggtactcacactccctgtgttccgtctgccaccctgtgtaccacatgtcactgtcttttttttctttctttcaagcgattctcctgcctcagcctcccaagtagctgggattacaggttcccaccaccacgcccggctaatttttgtatttttagtagagacggggtttcaccatgttggtcaggctggtcttgaactcctgacctcgtgatccacttgcctcagccgcgtcactatccttaaaaaattgttaacaataattattcatcagtgtgtctttctgaaaataaaatgagaaaagtgcccagtttctaagatgtacaagttgcatttttgtcacctggttatctagatacactaatgcatggccaaaagcattccaagtgtttctctctgtagccagcctggcccgagccccccacaatgaccatcgaagccccacgtggtcctggaaagcagcgtgttcatgctgtggaatgtaaagagctgtttcccatcaccggngccagcagttcacatgtgagg

SEQ ID NO: 26301 - DNA, 587 bp, Homo sapiens
  misc_feature (1)...(587): n = A,T,C or G
aggacgacgcccctcgatcactntccagnggngnnnaanncctcggatcaccagtccagngnggtgcaattcagtcagggttctaattccgagtcaccaccacagcggcctcctttcagcatcgacctcttcaaagaggaacatctgctggccttggaagactacgtggtcaacacttacttccgccacttcaagctctataaatacgtcttcacaccccaggtagggggtggtggaccatgaggagccaccctcaaccgcccctcccctcagcacaggtgcactcctttcagcctccctctgccttgcttcccaggtgcggctggatctgtctttgacttacatggggctacagccacccaaactgtggccagagagtgagacgggtaagggagagtgccagggcagggctgggctgggccaggcctggggccacagtctcttcctgcttctggtttgcagagaaagaagaaagcaaggagatggaggagcaggcagttaccccgcagaaagaggaactagagacagtggccccaccagagccagagccaagtgaggatctggagagggcaggctgccctgtcccn

SEQ ID NO: 26302 - DNA, 493 bp, Homo sapiens
  misc_feature (1)...(493): n = A,T,C or G
tgggaacnnggggnaattgagacctcgagacctctgtccgngnggnggaattcgagtcagtctccaggtctggatcccaggtatctattgttgaattgttcccaagtgactctgacatgtgactgggtctgggagctgctgaattgagggtgccagggggatctttgaggagacctagggtattcttcaaacagtgggtttcccagggaggagcttttccataaacaagaacagaaacaaccttagtttaaaacagaacaaaaaaccttcccccagttctgatctattaatgatatttgccaacttccattgtgtataatcttccattgtgtatccaaacacttacctgtgcctactctgtgctacagcttctgctgaatgactgcaatacagtgacttgtgggacacaggctctgcccttgaaaagctcacagtattgtggaaaggacagatttcaaccactagaatatatatgataagctctattctagag

SEQ ID NO: 26303 - DNA, 493 bp, Homo sapiens
  misc_feature (1)...(493): n = A,T,C or G
nggggtccnggggnaatcgagacctctaagcaccgtggtggaattcgacctggaaggggaggtgacagaggagtgtggcaagttcggggccgtgaaccgcgtcatcatctaccaagagaaacaaggcgaggaggaggatgcagaaatcattgtcaagatctttgtggagttttccatagcctctgagactcataaggccatccaggccctcaatggccgctggtttgctggccgcaaggtggtggctgaagtgtacgaccaggagcgttttgataacagtgacctctctgcgtgacagtggtccctctccccggacttgcacttgttccttgtttcctctgggttttatagtgatacagtggtgtccccggggccaggcgcgctctgcccagcccagcctacagtgcggataaaggtgcggatgctgctggccctgannnanaaaaaaaaaaaaaaaaaaaaaaaaaaaaaaaaaaaaaaaaaaaggggccct

SEQ ID NO: 26304 - DNA, 569 bp, Homo sapiens
  misc_feature (1)...(569): n = A,T,C or G
ccttcgacattcgaatcactagtccacgnnggggaattcctggagacgacgtgcagaaatggcacctcgaaaggggaaggaaaagaaggaagaacaggtcatcagcctcggacctcaggtggctgaaggagagaatgtatttggtgtctgccatatctttgcatccttcaatgacacttttgtccatgtcactgatctttctggcaaggaaaccatctgccgtgtgactggtgggatgaaggtaaaggcagaccgagatgaatcctcaccatatgctgctatgttggctgcccaggatgtggcccagaggtgcaaggagctgggtatcaccgccctacacatcaaactccgggccacaggaggaaataggaccaagacccctggacctggggcccagtcggccctcagagcccttgcccgctcgggtatgaagatcgggcggattgaggatgtcacccccatcccctctgacagcactcgcaggaaggggggtcgccgtggtcgccgtctgtgaacaagattcctcanaatattntctgttaataaattgccttcatgtaaaanaaaan

SEQ ID NO: 26305 - DNA, 463 bp, Homo sapiens
  misc_feature (1)...(463): n = A,T,C or G
gaggcgnaggggcnccctactgaggccctcacagtacggctacgancgccncnggaattcnnaggaggtagcgatcctaggaaaacttgtaaataacctgtttaacgacacttagtgagctggcagcgctttgggacaaaatgacgaaggctgtgacagaagggtccagactgacccctgcgacgcagccagggaagtgggacagagagggatggacagctgtcctgcaggaggcagcctgacctgagagctcccctttaaaaacgtttggtgaggaagggcccctctctggctcgccgtttgtagtaaatgagctgggcttgtgggcctgaccgtctgtcttgcttgggaaaggggaggaagcccctcagcctggcttccccagcccttctgggagccagcactgtgggtgattgggttttcccagggtgagcgtcggagcctgtggggctggtgccctgtg

SEQ ID NO: 26306 - DNA, 453 bp, Homo sapiens
  misc_feature (1)...(453): n = A,T,C or G
gagcggagggcccctactaggcctcgcagtgacctcncgannncncgccngtccagngcctcctgggacaagacggtgcgcctatgggacatgtttgacagctgtttgaccaaggagacgctggccctgacctctgaggctctggctgtgacttttcgccctgatggtgcggagctggctgtggccacactgaactcacagatcaccttctgggaccctgagaacgcggtgcagacgggctccattgagggcaggcatgacctcaagactggcaggaaggagctggacaagattacagccaagcacgcggccaaggggaaggccttcaccgccctgtgctactctgcagacggccacagcatcctggcgggaggcatgtccaagttcgtgtgcatctaccacgtccgtgagcacattctcatgaagaggatcgagatctcttgcaacctgtcn

SEQ ID NO: 26307 - DNA, 494 bp, Homo sapiens
  misc_feature (1)...(494): n = A,T,C or G
tggcgactnnnnnnnaatcgaganatctagtaccgctaggnggaattcccactgaccaaatccttaaccctagcgatggcttgggagatggggggttggatagcatcctctttcttggcccttccttatcctaggaaaagagggttcctctccttgtgtgtgtctcttccccccacccctaattcttctgctctgtttgggaagacgtggaggaaaaggtgacttctgcccccaccgctcttacccccactgtagtggcctttggagatgcccccacctcccccccaccaactctcgcgtgttggagagaaggggccctcccagcacaaagttgcattcctcccccctaatttattctaatttattaactttgacccaccctttctgagcctgcagccttcccgtgtggcctgagggctgtcgagtgagctgccccagcccctcccagcccttgcccagcctgggggagtggggaaggcttgggcatggccccg

SEQ ID NO: 26308 - DNA, 464 bp, Homo sapiens
  misc_feature (1)...(464): n = A,T,C or G
agagctgnnnaaactgagcctagngcatagcacgngcggnggaattccttccttttgcttgcgaaaagcagagggaaaagtaaaggggactggatcttgcaccttaagtactagctcagccacagaggggtagaggactaagtgggcttttggggtccccaattctaggacttgactcattgatgacttttctggacttgccctaggccagaggggagcccactgcccaaagggagcatcccacgctaggcacccttcatcataagcgactgaagagccctccctaagggaacatcagcagtagcctggcagtacgccccataggtctatagtggtggtggccacagggtgaggttcctctgcttaaggaaaggggagagaagagtgggaaggactgtctcagtgccagctcagccacagtacagtagaacaccaagtagacttctaagatttttgactgtagg

SEQ ID NO: 26309 - DNA, 463 bp, Homo sapiens
  misc_feature (1)...(463): n = A,T,C or G
atgagtgtnncaactgatactagagcntgtgcggnggcattctgaccatctttccaacccctggggaagacatttgcaactgacttggggaggactcagcttcagcacagcctctcctgcgggccagcccgctgcgaaccctccaccagctaccggagggaggagggaggatgcgctgtggggttgtttttgccataagcgaactttgtgcctgtcctagaagtgaaaattgttcagtccaagaaactgatgttatttgatttatttaaaggctaaaatttgtttttttattctttgcacaattgtttcattgtttgacacttaatgcactcgtcatttgcatacgacagtagcattctgaccacacttgtacgctgtaacctcatctacttctgatgtttttaaaaaatgacttttaacaaggagagggaaaagaaacccactaaattttgctttgtttcct

SEQ ID NO: 26310 - DNA, 468 bp, Homo sapiens
  misc_feature (1)...(468): n = A,T,C or G
gagagggccccaatggagacactagatagagcgccgtaattcgngcccttgagcttgaatggaagcagcctctggagggggcagccactgcccttcgagggagagcagctcttcagcagtggccagagtgccacgtgactctgcagatgacccctgggagccgggtgatgggcacctgctggggcttttgttttttctttttcactggctggcttgatcctcagtggcaaaaggacccctgagccccttctccgagccctggagcactcctcgggacaccgagaggcctcagggctgggttcacagctcctcccgcagggggagcctcagaagtggaggcagctgctgatgggtgagtttacaacttcttatcctgcctaaggcgagtaggcatttttattccgtttccagtccttgagctcagcagatcaaaataacagtgaccctgcaaccccacagagcccgcga

SEQ ID NO: 26311 - DNA, 463 bp, Homo sapiens
  misc_feature (1)...(463): n = A,T,C or G
gagcgcccnaactgattcgtgggcatcacnccagncnggnggaattccccgggtccgcgctgggggagcctcgcccccgcccccaccgggagaatgtgtcgtctccgcttctctcggtgtggcgtgacggtaaccccatactctccttttgactccttttggaacccccacttttacgttgtgtccctccgcctcccccatggcgcaacaggagtcagtctctttctgtacaagggagaaaagctgtacgcgtttgtctcgtggttggaagcctccccttggcggggagaagctttttttcttgctagtattcgctgtgttcatgatctagaaatgcggtctggtctcgcctcgcctaccaatctctgctctctatgtatgtagcgtacgggttgttttgggtgaatcttgaggaataaatgcctttatatttcacaggctgtaaattgaacttcccacacga

SEQ ID NO: 26312 - DNA, 552 bp, Homo sapiens
  misc_feature (1)...(552): n = A,T,C or G
tggcttcncccccnatagaaaaccatcgcangnattgantnccttgatcatgccactccagcctaggcaacagagtgagaccctgtctttaagaaaaaaaagagaaacaccagaactacatgttaatagacaccacattaaaatttaacatcatacaatttaattgtaattaaaatagtgcctgacagttgttaggttgggtaggtgtaagaaaagcaaagaatgatgagaatctttaacatttattgttacaagaactaccttggggaaaaaactcacttaaataatgactgtgttattcaattagagagactgaaaaggaacaaaacacgaatagaaacaaaagcataaattctaaacagtgggcacttatataccaatattggctgaccccctttttttgagattgtctgtgggttgtacttgtaagtacaggagttctgattgactccatttcagtagttgctttgaccctagcgtagcattttgtaagtgtgaattctactagctattaatatattntagggggaattccatggtcagataagtttg

SEQ ID NO: 26313 - DNA, 461 bp, Homo sapiens
  misc_feature (1)...(461): n = A,T,C or G
ctttgaagtacgattacnccagngcggnggaattcgaccaaccctatactccctcagacccagcctggacagagatctttggtgttctctctgtggccaccatcaagtttgagatgctgagcacagccccacagagtcagctcttcctggctctggctgacagcagtatctccacgaagggcacaaagagtggcacctttgtcatgtataattgtgcccgtcttgccacactctttgagagttacaagtgtagtatggaacaaggtctgtaccccacttttcctcctgtgagcagtctggacttctcactgctacatgatgaggtgagtgtccctcctggtagctggcacaaggaggcctggacttcccctcccagcacctttctccccaacagggtgagtggttgttgctcttcaacagtatcctcccctttccggatctgctgagccggacagcagtgc

SEQ ID NO: 26314 - DNA, 473 bp, Homo sapiens
  misc_feature (1)...(473): n = A,T,C or G
tggcgcgggnnnnnnnaatcgagaccatagacagccgtnggaantctcgagntngaccagccactctccagctcggctttcgcggcgccgagatgctgtcctgccgcctccagtgcgcgctggctgcgctgtccatcgtcctggccctgggctgtgtcaccggcgctccctcggaccccagactccgtcagtttctgcagaagtccctggctgctgccgcggggaagcaggaactggccaagtacttcttggcagagctgctgtctgaacccaaccagacggagaatgatgccctggaacctgaagatctgtcccaggctgctgagcaggatgaaatgaggcttgagctgcagagatctgctaactcaaacccggctatggcaccccgagaacgcaaagctggctgcaagaatttcttctggaagactttcacatcctgttagctttcttaactaggattgtccatatcagac

SEQ ID NO: 26315 - DNA, 470 bp, Homo sapiens
  misc_feature (1)...(470): n = A,T,C or G
gagagggcccccatggagacactagatagagcgccgtaattcgggatccctgtgggaagtatattatggttttgtagggttccccagattctgaccagataggggagagggataagggtgtgaatggagacttttacccagggccagactttcctgagcagccagggaacagcgtgagaaggagggtgggaaaataggcaaggggacgctgggggagcaggtgtttgttctggctggggacagccttgcttccatcctgatctttgcacagggatgtccactgtgctcagggttagctccttccagtgaaaagtgtagacatttacagacctggccctgggtcatgcctggcccataggtatgggaggattgggggtccctccagggtgtccacaggcaggcttgagatcccttttggacagcttaaggtctgtatccaaggctctagggttacgaccaaagcatgagtn

SEQ ID NO: 26316 - DNA, 480 bp, Homo sapiens
  misc_feature (1)...(480): n = A,T,C or G
tgggcaagaggggcnnnaaattgaaaaccactcgagaccattgtgcagngtcgnggaattctagcttcagcccttctttagctcagctagagttcacaggagagccaaaaaataaaaggattctgagcatctcccgagtcctgggcagggaaggggagggaaattgctgcttctccaactcttgcttggggccaagccctgcaccagttgcttcccagctgttatctgccagatcttcccatcttgtggcatgtggtgcccccaccaacatcccaaggggaccaatccccttgccaccactttgcatcacctgggaccacagatttggacaggaagggctctgagaagaggccacagccctcattttacagatgaagaagctgaagcccggggaggggagcgaccctcaaggccacccagctggacacgggagacttgagcccagccttctgactgcattcagccctctctatgacgcag

SEQ ID NO: 26317 - DNA, 474 bp, Homo sapiens
  misc_feature (1)...(474): n = A,T,C or G
atggccaggggncnnnaatcgagccctttgataaactacgaanngtcgnggaanactttccagaagtttccccggcgatatcatagcttctgaggctacacatttttcaatgttttgctttgccatcaacactttgccagccaccagggtggcatataaaaacgtgaatagaaagtatttttcctgaagaacacatcgccaataaatcacctgcacccaaatctccatctcacgcgctacttctggcaaggcatatcatgaggctagtgaagcacctacaagaaacttataactcaaggttgtaaaaatggcatggtgactcttacaatcatatcacagagggcctctccaacaatttaaacctcatgacctaagtgaaagctgtgaaaggatccacattaattcttcagaggcagggctaagactttcaagactgaaaagagactagcataaggagacttaacaggaacccag

SEQ ID NO: 26318 - DNA, 474 bp, Homo sapiens
  misc_feature (1)...(474): n = A,T,C or G
aggcaaggggggcnnaattgannccatcgagaccactggccangtcgnggaattcttctccggaagttttcccggcgatatcatagctgctgaggctacacattcaacaatttcttgctttgccatcaacactttgccagccaccatcctgccatctaaaaatgtgaatagaaagtatttttcctgaagaacacatcgtcaataaatcacctgcacccaaatctccatctcaggcgctacttctggcaaggcatatcatgaggctagtgaagcacctacaagaaacttataactcaaggttgtaaaaatggcatggtgactcttacaatcatatcacagtgggcctctccaacaatttaaacctcatgacctatgtgaaagctgtgaaaggatccacattaattcttcagaggcagggctaagactttcaagactgaaaagagactagcataaggagacttaacaggaacccag

SEQ ID NO: 26319 - DNA, 477 bp, Homo sapiens
  misc_feature (1)...(477): n = A,T,C or G
agagccaggggnnnagggcgaatgagngccattcgnanaaattgagggtcttcggagcgncagccggaattcaggagaaacactttccatctattacatagattattttcccagtcggcgtggttttggtattctccgcgggagagacagaaattgaggttgcctctttagccaagacttccgccctcgatcaagatggtgggtggacggccttcctaacctttacggggcctggcggtgctgacgcctgagctggtaggggtggagcaggtaggaaacagcaaatgcaaaagctgctgcgcggaagtcggccatggactggaaagaagttcttcgtcggtgcctatcgacgcccaacacctgtccaaacaaaaaaaaaagtgaacaagaattaaaagatgaagaaatggatttatttacaaaatattactccgaatggaaaggaggtagaaaaaacacaaatgaattctataagac

SEQ ID NO: 26320 - DNA, 498 bp, Homo sapiens
  misc_feature (1)...(498): n = A,T,C or G
ggggcggnnnnnnnnnaatcgagacctatcgacancgcgggaattcccgagagccccttcacccgccctgctgcgccataggcagaggcttataaagaaatgggttctgggccaggtgtggtggctcaagcctgtaatcccagcactttgggaggccgaggcgggtggatcacctgaggttaggagttcgagatcagcctggccaacatggtgaaaccctgtctctactaaaaataaaaaaattagctgggcgtggtggtgggcgcctgtaatcccagctactcgggaggtttaggcaggagaatcgcttgaaccctggaggtggaggtggaggttgcagtgagccgagatcgcgccattgcactccaacctaggtgacaaagctacacgccatctcaaaaaaaagagnaaaaaaaaaaaannaaaagggggtgacaaaggggtccccctctggggggaaaaaaacgaggggctttggagtggtacaaaaccggcccc

SEQ ID NO: 26321 - DNA, 474 bp, Homo sapiens
  misc_feature (1)...(474): n = A,T,C or G
gccagccccccatggaccccttnnatagatgaccattagtccatgcggtggaattcgagaatgggtttcatcccagcctacgtcacatttgcccagagccttatgttttctgggtttttttcctccagttctgtttctaaaaaccagcttgagtttggctgaactgtcctttctcaacagaagcgcttttgcaattgatcccgggcaacaagtcaaaataagcttttaagtggagattttgtttttttcaaatgtatatgctttggaaattttgattttttagccagagggttttaccaagtgttatttgaagcacattacgatgcctcgagagggcggcccgtgcacgcgctttcaagaaaatgttctcgggacactcggtcttctctttgaaaggacattttctcattggttttgccgtgaaaatcctgtggagacttcgcaaagaaaacgcagccttacatttgctcatta

SEQ ID NO: 26322 - DNA, 470 bp, Homo sapiens
  misc_feature (1)...(470): n = A,T,C or G
tggggagggnncnnaatcgagacctttgaagccgttggaanncgcggaggctacatggaggtgatcaacctgcaccctgagatcaagggccagctggtgaagctgctgtcggtgcgcctgtgccccccagtgtctgggcaggccgccatggacattgtcgtgaaccccccggtggcaggagaggagtcctttgagcaattcagccgagagaaggagtcggtcctgggtaatctggccaaaaaagcaaagctgacggaagacctgtttaaccaagtcccaggaattcactgcaaccccttgcagggggccatgtacgccttccctcggatcttcattcctgccaaagctgtggaggctgctcaggcccatcaaatggctccagacatgttctactgcatgaagctcctggaggagactggcatctgtgtcgtgcccggcagtggctttgggcagagggaaggcacttacca

SEQ ID NO: 26323 - DNA, 481 bp, Homo sapiens
  misc_feature (1)...(481): n = A,T,C or G
tgggcaagaggngcnnnaatttgaaaaccactcgaganccntcgggcagngtcgnggaattcttttgaagactgttgttaaaaaaagtcaaaactacaacatatttcagttggaaaatttgtatgcagtaatcagccaatgtatttatcggcatcgcaaggaccatgataaaacatcacttattcaggtaaactcttgagtggaaactttttacaaatgctcttgtggtcacattaatatatcacttatgtaggattgttgaggctttatttaatctgtgtaagaaactgattgtaggaacttaaagaccatctttctatttccaaagttgatgtcccattccataaagatcatttttaatatgtggattatgaattatttctaaatgcaagtgagtttagtatttttccaatctataacttaattagtttgtttgtttatttatttatttatttagagacagggtctctgtcgcccaggc

SEQ ID NO: 26324 - DNA, 476 bp, Homo sapiens
  misc_feature (1)...(476): n = A,T,C or G
atggcnaggggnccnnnaattgaaacccctgagaccctccgaagnggcnggaattccgatggaagccacacttgcttcagggttacctggcccgaggactaaggccaagccggtgccatcatcttttgggaaggttcaaaagatggcatctctgccaccaggctgggggcccagagggacaggaaggagcagccaggggctttgatggggaggtagggagctggtggaacagctttctcactcctgtcagcaaggagtcaggaggtaccatctcgtccccccacagtggccccggcatctatggcccaccgttcagagggggatgctatcttctcacaccaggacaggcccatttgtaggagcccattggtattccaagtgagaccaccaactttatagtccccatgtccctgtcccaactccacagcttctagagaatccagctgcaggggaagcctgtccccaactcccattct

SEQ ID NO: 26325 - DNA, 506 bp, Homo sapiens
  misc_feature (1)...(506): n = A,T,C or G
aggggcggggnnnnnnnnncctcgaganccnctcgtagaccactaggcagtgtggtggaattcgccactcaaggtagaaaatgaagagcatggggccccagaactgtggtgccatccagcttgccgggtgggacagtgtgtggtggtcttcagccaggctcctagtgggagagccccactcagccccagtttgaactctcgcccatcacctatcagtgccactcctccagctctcgttcctgaaacccgagagtaccgctctcagtctccagtaagaagcatggatgaagctccttgtgttaacggccgctggggaacactgagacccagggctcaaaggcagactccttcaggttcccgggaagggagcctttccccagccagaggagacggctctcctatcctcaatggtgggagtttgtctccaggaacggcagctgtgggtggctcttctttggacagtcctgtacaggccatatctccaagtactccatctgctcctgaag

SEQ ID NO: 26326 - DNA, 496 bp, Homo sapiens
  misc_feature (1)...(496): n = A,T,C or G
gggcgggnnnnnncctgagaccactgtagagccctctggaantcggcaggctaactggccccacgcacaacttgcaaggtggggcgcaccaggctcactgcacagcccatacccacagacccctcagattggagtcggtgcagaagcagaacgcatgactcgcaggaaacagaccaggttccaaggtctccagggtcccaaaggctggggtaactgaaggttcccacgctcaggcctccactcttcaagtccgctgctactccactgagatctgtaatgagtctcctgccatctacgcacagtggtgactcctcttctccaaggccccgccaggagtctttcattccaacgtgttcgcaggatcttctggggaaccgtccagcctggcagctgcaggaactgcgagaagttaagggtttggtgccacctattccagcttcccttgcaaggagggtgttgggcaccagaaggccctggggaaagtgggagccgcaan

SEQ ID NO: 26327 - DNA, 496 bp, Homo sapiens
  misc_feature (1)...(496): n = A,T,C or G
nggtagagngnnngnnaatcgagaccatgagcaccgtcgnggaantcgcactgcgaccccacctttgagctggaggagatgatcctggagtccaggcccctgcacaagaagaagaagcgcctggccaagaacaagtcccgggacaacagcagggacagctcccagtccgagaatgactatcttcaagactgcctcgatgccatccagcaagacttcgtgatttttaacagagaaaagctgaagaggagccaggacctcccgagggagcctctccccgcccctgagtccagggatgctgcggagcctgtggaggacgaggcggaacgctccgccctgcccatgtgcggccccatttgcccctcggccgggagcggctaggccgggacgcccgtggtcctcaccccttgagctgctttggagactcggctgccagagggagggccatgggccgaggcctggcattcacgttcccacccagcctggctggcggtgcccc

SEQ ID NO: 26328 - DNA, 497 bp, Homo sapiens
  misc_feature (1)...(497): n = A,T,C or G
ggaaagaggcccnnnnnattgaaaaactgagaccctaggcagngtcgtggaattcgtacgaggcagagctggccatgcggcagctggtggaggccgacatcaatggcctgcgcaggatcctggatgatctcactctgtgcaaggctgacctggaggcccaggttgagtacctgaaggaggagctgatgtgcctcaaaaagaaccatgaggaggaagtcggttcccttcgatgccagcttggggaccgccttaacatcgaggtggacgctgcacccccggtggacctgaccagggtgctggaggagatgcggtgtcagtacgaggccatggtggaggccaaccgcagggacgtggaggaatggttcaatatgcagatggaggagcttaaccaacaggtggccacaagctctgagcagcttcagaactaccagtcagacatcattgacctgagacgcacggtcaacacgctggagatcgagctgcaggcccagcacagg

SEQ ID NO: 26329 - DNA, 493 bp, Homo sapiens
  misc_feature (1)...(493): n = A,T,C or G
cgagtgccnnnnaattgagnaactgagaccctagtcagngncgtggaattccgcctcggcccgcagagcttgccccctccccacccgcagacatgtccgagtccaagagcggccccgagtatgcttcgtttttcgccgtcatgggcgcctcggccgccatggtcttcagcgccctgggcgctgcctatggcacagccaagagcggtaccggcattgcggccatgtctgtcatgcggccggagcagatcatgaagtccatcatcccagtggtcatggctggcatcatcgccatctacggcctggtggtggcagtcctcatcgccaactccctgaatgacgacatcagcctctacaagagcttcctccagctgggcgccggcctgagcgtgggcctgagcggcctggcagccggctttgccatcggcatcgtgggggacgctggcgtgcggngcaccgcccagcagccccgactattcgtgggcatgatcctgan

SEQ ID NO: 26330 - DNA, 495 bp, Homo sapiens
  misc_feature (1)...(495): n = A,T,C or G
agggcaggggnnnnnaatgagacccattgagggcgtgaannccatccctccatctcaatcccgtatctaagcacccccccccccccaggcaaagcagggctttgggtatcacatcacacaaagggaacaaaagcgaaacacacaaacccccctaagcttacactggggtgctccaaaaaacaacaattgaagttccttgtgctaacgttttggaaaaggaaaactggaacccaccaaaccaaccaatcaaccgatcaaagaaaaaattcccctatgaaacaagggattttgtctttttgcattttgggggataagccatcaatattcagcaaaatgattcctttttttaaaaaaaaaaaaaggggggggaaaggaaaaatttaccaggggggtgggccccgggcgttaaattcacagatttttttaacgagaaaaacccccagaaaaagcctcctcaggggtttttaccctacaaccttgcttttgggttttccn

SEQ ID NO: 26331 - DNA, 460 bp, Homo sapiens
  misc_feature (1)...(460): n = A,T,C or G
aggagcgggcnnccccccctggtaggccatgagnantctcgcacgtcnggnggaattccaaagaatgaaaacccagtggactacaccgttcagatcccaccaatcaccacctatgccattacgcccatgaaacgcccaatggaggaggacggggaggagaagtcgcccagcaaaaagaagaagaagattcagaagaaaggtacaggccgggcgcggtggctcacgcctgtaatcccagcactttgggaggccgaggcgggagaatcgcttgagctcaggagttttgagaccatcagcctgggcaacatggcgaaaccccgtctctacaaaaaatacaaaaattagctgggtgtggtggcgcacctgtagtgccagctacttgggaggctgagatgggaggatggcttgagcctgggaggcggaggttgcagtgagcaactgtactccagcctgggcaacn

SEQ ID NO: 26332 - DNA, 568 bp, Homo sapiens
  misc_feature (1)...(568): n = A,T,C or G
ggatagcccccnaggnncccnaatggatgacatatagagggccattcccngnnnccagancaggnagacttgggttattttccttgccactagggtattcattcctatttccagacttcataatctaacttactatgtgcagaggccataaaatcttacctgctttatacagacacaaataaggactcctccattcagagagagtaactcttttggataaaatatggtttgtttttgattctctgcagtagatcatctttttttatttttttgagatggggtctcgctctgtcacccaagctggagtgcagtggcgcagtcttggctcactgccacctccacctcctgaactgaagcaatcctcccacctcggcctccagagtagctgggaccatgggtcccaccacgccaccacgcttggctaattttgtgtatttttggtggagaagaggttatgccatgttgtccaggctggtctcgaacttctgagctcaagtgataacgcctgccttggcctcccaaagtcctgggatcaaaggcatgagccaccgctcctggccagatcata

SEQ ID NO: 26333 - DNA, 576 bp, Homo sapiens
  misc_feature (1)...(576): n = A,T,C or G
tgtcttccnnanagggcccccnaattgaggnccccnattgatgancaatccgcgnggngcaaancaggtcactcactgcccaactggtagcaaaacccatctggagcagcgtgtgagggatggatactcactcacattagggggtggcccagttgctgaggattgcaccagtggtaccctgggaaaatatccctgtggaggggaatgggaggagtcaaactgtggaagataagaggagtactgcacacaaggacagtagagtgtctgttccctgcagagggatagtgaggaactgatgaggtgactgtgagtgcccggggcctctgtcgttatcttggaggatcactttgaggtcaggagttcatgaccagcctggccaacatggtgaaaccctgtctctactgaaaatacattaattagcttggtggcgggtgcctgtggtcccagctgctcgggaggctgaggcgggagaatcgcttggatccgggaggccgaggttgcagtgagctgagatggcgtcactgcaccccagcttgggtgacagagcangactccgtctcaaaacaaacacacagg

SEQ ID NO: 26334 - DNA, 479 bp, Homo sapiens
gaacgtaactcgagttcgtgtaccctagtccgtgtggtggaattctatcttttcacatttttaatgtctgtaggatatgtagtgatatcccttattttattcataaagatgacaatttgtgttttctttgctatggattagctgctaggagtttatcaattttattattcctctcaaaaaatcaattcttgtctttgtggattttttccagcatagatttatttttgatatcattgatacttgcttttttcttattattttctttcctctcctttcttttgagtttatttttctatcccacaatgcttagagaacatgtcctgtttgatttcaatcccttgaaatttgcgaagacttgtttgtggcccaaaacatggcctacttggataaatgttctgtgtgtatgtattagtctgttcttgcattgctataaagaactacccgagaccggataatttataaagaaaagaggtttagtt

SEQ ID NO: 26335 - DNA, 478 bp, Homo sapiens
  misc_feature (1)...(478): n = A,T,C or G
agacgtactcgattcgattacctagtccgtgtggtggaattctatttataaatatttttatttctattcttagttttttcattgttttgttacatttactttttatctttgaccttttatttagtagttctttaatatttagaaaaatttatattttatcctactgtttatcattatacaaatatctttatataattccttagtcccttttttcttacttaggttccactatttggtttgtcacatttaaatgacatcttcagcttccacttattacccataaggaaatcaagcaacttatgtaacttttcattctcttccagttttgtgatttaagtagtgttattcctactgtatcagagcatgtaatatgtaatactgttctctctttatccacaattttgttttagttttagatcttcaataatatattcaatactgaccacccatccacttctaaagtgttcacaattatctn

SEQ ID NO: 26336 - DNA, 479 bp, Homo sapiens
gaatgaactcgattcgtaatcagtgtggtggaattcgggaggcaccgagttcgtgttcaaagtgaatcacatgaaggtcacccccatggatgcggccacagcctcactgctcaacgtcttcaacgggaatgagtgcggggccgagggctcctggcaggtgggcatccagcaggatgtgacccacaccaatggctgcgtggccctgggcatcaaactacctcacacggagtacgagatcttcaaaatggaacaggatgcccgggggcgctatctgctgttcaacggtcagaggcccagcgacgggtccagcccagacaggccagagaagagagccacgtcctaccagatgcccttggtccagtgtgcctcctcttcgccgagggcagaggacctcgcagaagacagtggaagcagcctgtatggccgggcccctgggaggcacacctggtccctgctgctggctgcacttgcctgccttg

SEQ ID NO: 26337 - DNA, 486 bp, Homo sapiens
  misc_feature (1)...(486): n = A,T,C or G
ctcgatccgtgcataggccgngncgngttatttgtgtcaggctccctgggagggcctggagggttgatagcggacagggccaacagtacggccagtgagctggactcctgggctgcagggggtactgcagggtgcccctgaatggcatactttatcggggcctctcagctcatgtaaaagcctggtaatcagggaaggcaagctcacggcattctgagtgagcggggtaagggttggggccagcagggatttgaccatcagatccacatgcagtccaagatggcacagtgtcagccgaagtttgctggctgcagtgaatgagcagagaggcatcagcagaagaaaagagaccatttttataatttttaagtttgttttttaaaaataggtcatatatgtacatggcaagaaaaaaaaaggttcatgcagtacaggagggtatttggtgaacgataaatctccctgtgtggcactgaattcctctgn

SEQ ID NO: 26338 - DNA, 476 bp, Homo sapiens
  misc_feature (1)...(476): n = A,T,C or G
cgaggggnnnaaatgattgcctagtaagtgtcgtggaattccagcaggcgcagcccagcctcgaaatgcagaacgacgccggcgagttcgtggacctttacgtgccgcggaaatgctccgctagcaatcgcatcatcggtgccaaggaccacgcatccatccagatgaacgtggccgaggttgacaaggtcacaggcaggtttaatggccagtttaaaacttatgctatctgcggggccattcgtaggatgggtgagtcagatgattccattctccgattggccaaggccgatggcatcgtctcaaagaacttttgactggagagaatcacagatgtggaatatttgtcataaataaataatgaaaacctttnaaanaaacnaaaacccaaaaaaaaaatacaatttttaaataataaaaaatcattaaaattatattcttattntnccgtgggggcccccctcccctccccggcn

SEQ ID NO: 26339 - DNA, 455 bp, Homo sapiens
  misc_feature (1)...(455): n = A,T,C or G
ntttgaagaccattagaccagngcggnggaattctggactcaaagcccagctccaccactgagcacccgtgtgactctttccatatgtattacgtggggataataataatagctgcttcacaggatgaaatgaagtttgaggtgagaagcattcaccatggtgcccatcgtgttactccattgtcagaggaggaaacggggtcaggcaggaaagcaacttaaaggagggcctgcaagcagccagggtcagagacagggcttggttctgcttcctggtgaagcatggcttcggggtgctgcctctccctccctgtttgaatctgcagattgtgttaggcccccagctgagggcctggagtggtgggattggtcccagtgcctggcgcacattggcctgcagagtagattaactgaatgaccaaagagcaacagaagtctagtgattcttgtctttg

SEQ ID NO: 26340 - DNA, 480 bp, Homo sapiens
  misc_feature (1)...(480): n = A,T,C or G
gaacgaatttgtctcgattacctatgcagtgaggtggaattccgtgcatatatcctgtcagtcaatattaagaaattactaggttattttgtgtttatgtgtgcactattagatttaatgagttatgctagttgttgcctcttatatccacattcagtcttcattgtctgttctgtaataatagatctgggccctgtaaatacctctcccatgacagtaagcacagagtgaaactttgtcaatcgagggtgctgctgacacactgaaggggcaagggctgcttttcctggttccattgtgctcctctaagcagacacctgcaacacctgtgccatctgcaataccagctcctgtagcacatacactctgcctctgcagcacctcgttctggctgcacacttcttgggcggtgcctaacttcagcagcacccaatggtcagcagcgcacagtacccccacatgaatggcttcccttgacan

SEQ ID NO: 26341 - DNA, 480 bp, Homo sapiens
  misc_feature (1)...(480): n = A,T,C or G
ggacggaactgagctcgtagtccgtgtggtggaattcgtggggtgcacgcttcgggttggtgtcatggcagctgcggggagccgcaagaggcgcctggcggagctgacggtggacgagttcctagcttcgggctttgactccgagtccgaatccgagtccgaaaattctccacaagcggagacacgggaagcacgcgaggctgcccggagtccggataagccgggcgggagcccctcggccaggttagtggggacatgcgtgagcagaacctcttgctcgtcctgtcccaccccggttgggttgctgacctcgcctggggtctcagggccaaggcctaaggatcgccgacctctgccccccagtcctttcagcttaacttactctttcatccgatgtttactgagctcctgttccgtgccaaactctgtcctaggcagggagcgtatgttggtgagttgtgcaaaaatctcttcccgatn

SEQ ID NO: 26342 - DNA, 484 bp, Homo sapiens
  misc_feature (1)...(484): n = A,T,C or G
agaacgtattttggactgagaccctctgcgagngngcnggaattcgaagaaggctgttgccatctccttgcccaagggtgtggtggaggtgacccatgacctgcagaaacacctggctgggctgggcctgactgaggccattgacaagaacaaggccgacttgtcacgcatgtcaggcaagaaggacctgtacctggccagcgtgttccacgccaccgcctttgagttggacacagatggcaacccctttgaccaggacatctacgggcgcgaggagctgcgcagccccaagctgttctacgccgaccaccccttcatcttcctagtgcgggacacccaaagcggctccctgctattcattgggcgcctggtccggcctaagggtgacaagatgcgagacgagttatagggcctcagggtgcacacaggatggcaggaggcatccaaaggctcctgagacacatgggtgctattggggttgggg

SEQ ID NO: 26343 - DNA, 481 bp, Homo sapiens
  misc_feature (1)...(481): n = A,T,C or G
agaacgtacttggttcgtatacatgtggaggaatcccccgacttgcagacgcattgcccggtactaggaaggagtgaggtgtgttcccaccgtacacttcccacacgagctgcggctgccagcctcgggccatcagcctaggagagcagatgcagctccaggggctcgacttatagccagttacagctccccggctcttctgtgtggcagagcgtcgtttccgggccctcagggctggggagctcagttcccattgcttgtgctcagggctgagtcttaaagaagggtttgccggccctaacgctgcagcgcgtgcgcggtgagaggccctttttgagcctgtttactcctgtggccttgggcagaacagtaaatactctgtgcacggaggaaagacatgcccaagaggaaggaagtactgaccatcggctggctgtgagcagcttagcaaggagcccttgctccctgggaaaggcggtgn

SEQ ID NO: 26344 - DNA, 428 bp, Homo sapiens
ccgccacgtttgagcgggcgagcccggcggccgggagacgccagggaacggggctggtgggggtacaaaggctcggttccgtcgccttcagccctgcggtgggggcacggggcaagtgaggggacggcagaggcggcgttcggtgtgaggctgcgccctgggctcctgaaaatccagggctgcagtcatttgaaggcttgactggggctggaggattttcatccaagatggctcactcacccagctgttggcaggagacctcggttctttgacttctccgtaagactgtagataggatctcactctgtcacccaggctggagtgcagtggcatgatcaaactcctgggctcaagtgatcctctgcctcaaactcctgagtagctaagactacagctctgtgcccccatgcctagagtctcccactgcc

SEQ ID NO: 26345 - DNA, 476 bp, Homo sapiens
  misc_feature (1)...(476): n = A,T,C or G
cgcgccccccnnttcgatagcactccttcagngcggnggaattcggttggttttcagcccaggggaaagacactgcttaatgaggaataggcccctggccaggctcaacccctagagcactggcacaaacagtctagaacccatctgagctaagcagacacttactagacactcctctcctctccaggctgctggacatcgtctcttcttatggcaagggctatgtggtgtggcaggaggtgtttgataataaagtaaaggtgagccggggcagagaagagaagaagccaccagcagtgcctccctctggtctccccagctcctccctgcctctacagagactgatcctcctggtttggattgggctttaatggtcggagcactctccttttctctctagaaaggccacagagtgctgggtgcagtggctcacgcctgtaatccaagcactttggtaggccaaggcagggggattg

SEQ ID NO: 26346 - DNA, 446 bp, Homo sapiens
  misc_feature (1)...(446): n = A,T,C or G
nttgagacattaacaggcgggtagattcccgttcattcacagaatctgtgatgagatcactgggagagtgcccaagaaagcgctgggaatcaccctcatcatgggcatagacgagggccccgaggggctgaagctcatttctgacatcatccgtgagaagatgggtattgacatcagtgtgctgatgggagccaacattgccaatgaggtggctgcagagaagttctgtgagaccaccatcggcagcaaagtaatggagaacggccttctcttcaaagaacttctgcagactccaaattttcgaattaccgtggttgatgatgcagacactgttgaactctgtggtgcgcttaagaacatcgtagctgtgggagctgggttctgcgacggcctccgctgtggagacaacaccaaagcggccgtcatccgcctgggactcatggana

SEQ ID NO: 26347 - DNA, 461 bp, Homo sapiens
  misc_feature (1)...(461): n = A,T,C or G
aatgatgaccattcgnannnncnnnnattgatgnaccctctgaacagncnggnggaattcaataaataaaacagtngcttaggtgcttagatatattttacttcttagctttattagtctgccttggtaggtacataaaatgcttgaaagattcagataaattaaatgtgtaaatgaatagttttggtagataatgttgattattcacaatcaacctatcaactaattgaacataaataaaaatctagttagagcattgctctttttagaccaaattagtagattcataaataaaacggaatctgtcagttgactctaaagttttaagaaagacaacttttgtaattttaataataatttaatgacagacctgaaactggctttttaaacaaaagtacctcttgggtattaaaaacatcagatggcactgtgtctatcatgattctcaacatacactgttc

SEQ ID NO: 26348 - DNA, 458 bp, Homo sapiens
  misc_feature (1)...(458): n = A,T,C or G
gaggcgggagggcgccaatgaggccatcaatgatggctcccaganagncaggaggaattcgttgcgggggaagtggagacgagccacccttgacctttgattgcaagaacttttcttgagcaggatagaggcacgtggacggtgaccctcgggatgcaataaatgctgagacagatcagcaaacattgagtgggccagacactgttctgaaaaatacgcagtcgacttttgaacagcacaggcttgaactgcatgcggccactaatactcggacttccttctgcctctgccatccctaagacagcaagacccacccctcctgctcctcagcctactcgatgtgatgatgatgcagagattcagagagtctaagcaacttttctaaatcatctagctggaattcagtaactgagccaggatctaccccaggtctgtctgactccaaagcctgtgtcttn

SEQ ID NO: 26349 - DNA, 587 bp, Homo sapiens
  misc_feature (1)...(587): n = A,T,C or G
cacgccatcgaccccccntccnnatagtatcactattccagagaggcgcaattcgtgacttanagatttgnggattcaatgtgttatttggaattaattgatttcagtgataaacagccttcctgtcacttacgatgcccactggcggggaagttttgtgtgctttatgcaatattaagtcccattggtaacactcagtgttcattcttctctttccagcaaaaccactgaggccagttatatctacttcctaatgtgattttgactaaagttgtttgaattctgtctctttggaatcttctaactgtaaagcacgctctaagactccataaaacaccgtatttatattaatatccatttgagttgtaaatatgcaggaaataattattcactgtaaaggcctggattaccctaagactgaggaggaagttatagctggtggctaattctataaaagataattgcataaacttattagtaatattccttgaagaagattgcgatgtagctaatactgcacttcacaagcctttntaaaaaatttaatcatccaaagactaaaatcaactaagtttctcacaagcaga

SEQ ID NO: 26350 - DNA, 443 bp, Homo sapiens
  misc_feature (1)...(443): n = A,T,C or G
nattgatgtccatctgaacagncttgaggaccttctgcanacacgaaccagttctctcaatgcataaagaagagcgtaactccagacttgatggaagagatgtataagaaagctcatgctgctatatgagagaatccagtctatgaaaagaggcccaagaaagaagttaaaaagaataggtggaactgtcccaaaatgtcccttgctcagaagaaacatcaggtagcttaaaagaaggcaagctccctcagagctcaggagcaggctgctgagagctaaaccaaacaattttctataaagatttttcagataaagacgataaacatatggacagaaaaaaaaaagatttaacctctttgagtctcagtattcccacctctaaatggggtcactaatatttctaacccaggcctcttataaggatcaagtgaaaaaatttatgt

SEQ ID NO: 26351 - DNA, 463 bp, Homo sapiens
  misc_feature (1)...(463): n = A,T,C or G
gaggcgnnaggngcccctaccgaggccctcctctagtgggcatccgcancagccnggnggaattcgggttcccagcccacgggaaccctctcatgcagggccggtttggagggccatttggacaagcagcacagagccggggaacctccgacgcagccagtgcactgccctacgcgggccctgggggtaccaggagggagctcagtgcccatgtcagtgggccccaggctcagtccaggcctgcactccgaagtgtgtactctaacagcctccccagttctcacagaggccccaccattgtgggagggccccctgcagctcccatgtgacactgaggaagtgaacactgaccacccaatcgtcaaacagaagggctccacccagagcaggaagagggcccaggaggaagacccctggctacaggcagacagggcagttgtgcagcacgtgctgacacgtagcc

SEQ ID NO: 26352 - DNA, 443 bp, Homo sapiens
  misc_feature (1)...(443): n = A,T,C or G
gggattgatgccatcgaannnnactgatgtcctctgaccagccggnggaattctctggtcctagtgaagaggaaggcctgtgtagcatttaggctttgggcctgatttgttaaggccacagcctgttgacacctgttttggtcctgcgaccctttactggtctccgctggctttgaatcttcctctgggctctactctggagaacataagggctgctgtggttgagtctggctagcactgtctgtggttggcagtgtgtacacccctccgttcagttccttgggggtatttttcagaaatccaaaggcaacccttcgtgcagtgctcacttttttaagtacagttgattacccttgcctgctggggggcctggccatgggccagagatggaggagccccagtggctgacaggccagcctcactcaggcacgtacctgctgacc

SEQ ID NO: 26353 - DNA, 448 bp, Homo sapiens
  misc_feature (1)...(448): n = A,T,C or G
gagcgnnngngggccactgagccctcactgaggctttcggancgcccccggattctcctggcagttgtcatatgtactgtgtcagccatcatgtgtgtcagcatgatatgaacgatttgtaaccctggaccgcggaaggctatgtctaagctgctttacatccgcctggcgctgttttttccagagatggtctgggcctctctgggggctgcctgggtggcagatggtgttcagtgcgacaggacagttgtaaacggcatcatcgcaaccgtcgtggtcagttggatcatcatcgctgccacagtggtttccattatcattgtctttgaccctcttggggggaaaatggctccatattcctctgccggccccagccacctggatagtcatgattcaagccagttacttaatggcctcaagacagcagctacaagcgtgtgggaaacca

SEQ ID NO: 26354 - DNA, 582 bp, Homo sapiens
  misc_feature (1)...(582): n = A,T,C or G
gcggcgtnncnnncactgataatcgattgcgatccagcggggcaantcctctcgggccctctccttttcgtttccggaaacatggcctccggtgtggctgtctctgatggtgtcatcaaggtgttcaacgacatgaaggtgcgtaagtcttcaacgccagaggaggtgaagaagcgcaagaaggcggtgctcttctgcctgagtgaggacaagaagaacatcatcctggaggagggcaaggagatcctggtgggcgatgtgggccagactgtcgacgacccctacgccacctttgtcaagatgctgccagataaggactgccgctatgccctctatgatgcaacctatgagaccaaggagagcaagaaggaggatctggtgtttatcttctgggcccccgagtctgcgccccttaagagcaaaatgatttatgccagctccaaggacgccatcaagaagaagctgacagggatcaagcatgaattgcaagcaaactgctacgaggaggtcaaggaccgctgcacccttgcagagaangctgggggcagtgccgtcatctccctggagggcaagcctttgtan

SEQ ID NO: 26355 - DNA, 443 bp, Homo sapiens
  misc_feature (1)...(443): n = A,T,C or G
gggatcgatgaccatctgaccagngtggaggaacctgccccgactcggcttgcaagcaggacctgctggcctacctgcaacgcatcgccctctactgccaccagctgaacatctgcagcaaggtcaaggccgaggtgcagaatctcggcggggagcttgttgtctctggggtggacagcgccatgtccctgatccaggcagccaagaacttgatgaatgctgtggtgcagacagtgaaggcatcctacgtcgcctctaccaaataccaaaagtcacagggtatggcttccctcaaccttcctgctgtgtcatggaagatgaaggcaccagagaaaaagccattggtgaagagagagaaacaggatgagacacagaccaagattaaacgggcatctcagaagaagcacgtgaacccggtgcaggccctcagcgagttcaaagct

SEQ ID NO: 26356 - DNA, 449 bp, Homo sapiens
  misc_feature (1)...(449): n = A,T,C or G
ggggattgatgnccntnngnnnnncatcgacgacttttagaccagtctggtggaattccttgaggtcaggagttcaagaccaacctggccaacatggtgaaaccccgtctctactgaaaatacaagaattagtgggtatggtgatgcgcatctatggtcccagtttctccggaggctgaggcaagagaatcgcttgaacctgggaggcggagtttgcagtgagccgagatggcagctgggcgacagaaattgctggaatccacaaataccaaactatggccattgaagctgaccttggaggtggcagcttggtttatcttgcttattttcatcctggagatccttcttaagtggctatccaacttttctgttttctggaagagtgcctggaatgtctttgactttgttgttaccatgttggtaaggatagagatcctgagggttcgttt

SEQ ID NO: 26357 - DNA, 439 bp, Homo sapiens
  misc_feature (1)...(439): n = A,T,C or G
ngggttgatgacatctgaccgngttgaggaccttcgcctgctttccccgagagccctggagcagcagtttcagagaatcctggatgatccctcaccggcctgcccccacgaggaacatctggcagctctgacagctgctcccaggggcacgtgggcccaggtgcggacatccctgaagacccaggcagcggaggccctggaggcggtggaaggggccgctttctttgtgtcactggatgctgagcccgcggggctcaccagggaggacccggcagcgtcgttggatgcctacgcccatgctctgctggccggccggggccatgatcgctggtttgacaaatccttcaccctaatcgtcttctctaacgggaagctgggcctcagcgtggagcactcctgggccgactgccccatctcaggacacatgtgggagttcact

SEQ ID NO: 26358 - DNA, 467 bp, Homo sapiens
  misc_feature (1)...(467): n = A,T,C or G
agtgctcntactgtttcactactcagtgtggtggaattcgcgtctgtatgatcttcggagcctgctgcatcggacctcggccagtgtgagcggcaagaggataggagattatctttcttatcgcgatgggacgggaaagggcagttggggtcggagtcggcggcagagtgcagagcgcgggcggtggaggccctggagcagcgggctaggggcggaaccgagtgcctgtcaggcgcgtctggagctcttgggcccgccgaggagatcgcagcgtacaggcagctcgcctactgcgtaaagcgaaccccagcataaaagatgacaacagcagccaggccaacctttgaacctgccagaggtggaaggggaaaaggagaaggtgatttgagccaactttcaaagcagtattcaagcagagacctaccctctcatacaaagataaaatacagacagactactcaggatgg

SEQ ID NO: 26359 - DNA, 556 bp, Homo sapiens
  misc_feature (1)...(556): n = A,T,C or G
ggaatcccnncnattgacccccatcgcccnnaatagattnccntcgcagngnggcggaattccagagaagtgtttacccagctggctagaggaatcaataggtttacaacccaagagggtctgactgtattgcctgtgctcttaaccattgcatttgttgcctcccacaaactagtttccatgcttgtaaactagtgggaaaattgcatgctgtatttatctcacagggttgttttgagatcccaataatgttaagaggcagtgctttagtgtacagagtgctggtcccctgacagggaaacctgaatgtgtcaatgatttgttcacacttccctccctctgcacatgcccttctccctcttttctgcttgntgaactcatgtcttcaagacttagctcagatatcagcgtccagattntattctaacagtggaggaatttaagcaacgccgcgtggcgggggggtcgaggggggcacaccagacttgtgttctgaaattacagctgacttgtaatgcanggaatggagtgtagccggccagaatgagtacaagan

SEQ ID NO: 26360 - DNA, 553 bp, Homo sapiens
  misc_feature (1)...(553): n = A,T,C or G
nttcgaacnatagtccagcgcggtggaattcaggacatgctcaatgccgctgctgcgctggacggtgccttggaagagtcaggccctgggagcactggggagctgagacactctctagggctgaccgtttccccatgcaggaccagaggaagtgggcagaagaactccaggcgcaagcgggatcttgtactctctaaactggtccacaatgggcataaccacatcaccaatgacaagagattcaatgggtctgaaagcatcaagtcctcttggaatatttcagtagtgaagtttcttctggaaaagctcaagcaagagctggtgaccagtccccacaattacactgataaggagctaaaaggagcctgtgtggcctacttccttactaagaggcgtgagtaccgcaactccctgaacccctttaaaggcctgaaggaaaaagaggagaagaaacttcgaagtcgccgatatcggctttttgcaaccgatccagtatcatgaggcattntggacctgaggaccaacgtctgtggaatgatgtgacagaggaact

SEQ ID NO: 26361 - DNA, 476 bp, Homo sapiens
  misc_feature (1)...(476): n = A,T,C or G
aggcgggnnnnnnnaganttagttacctcccgaaggattgatgacttccgcaaagacnggnggaattctgggagacgaagcagggagagagtgaacttcagccccgtgccctccccactgtcacggctggggcaacccaacccgcgcctgaagcggcttggcttgacctgcggaagcgcgggccgggatggcgtggggagagggaggttgcattggagttttcgaaagacttatctttctgcaggctcgcctctgagctttgtctccttggagccacctcacttagacagcttcggatgtggatgcagatttgaaccatgttgcgtccccagggactgctatggctccctttgttgttcacctctgtctgtgtcatgttaaactccaatgttcttctgtggataactgctcttgccatcaagttcaccctcattgacagccaagcacagtatccagttgtcaacacaaattatggt

SEQ ID NO: 26362 - DNA, 473 bp, Homo sapiens
  misc_feature (1)...(473): n = A,T,C or G
aggtccggnnnnnnnnngnaactgatacctccgnacaggactgaggccatccgacaccacgtagaatggcgatcgttaaaaagtaaggaaacaacaggtgccggagaggatgtagagaaataggaacacttttacactgttggtgggactgtaaactagttcaaccattgtggaagtcagtgtggcgattcctcagggatctagaactagaaataccatttgacccagccatcccattactgggtatatacacaaaggactataaatcatgctgctataaagacacatgcacacgtatgtttattgtgacattattcacaatggtgcctttttaaaacttcatttttaattgcttaggactcggtggtggtttttctagactgcccttccatctggtgacttcggtacatttacttactcatcctgagagttcacctgcagatccacttgtggggcttacgtgggagacgtgc

SEQ ID NO: 26363 - DNA, 483 bp, Homo sapiens
  misc_feature (1)...(483): n = A,T,C or G
aggaagnaaaaggnatannnnnnncctgatgaccnctgaacacgtcgaggaantcttgcttccctgatatgagctctgagcttccctgaaccaagatctgcctattactgctgtgccccatggggggctccttccctgcctgacccactgttgcagaatgaagtcacctcgcccccctcttcctttaatcttcaagcctcactggcctgtcctgctcagcttgggccagtgacaatctgcaaggctgaacaacagcccctggggttgaggcccctgtggctcctggtcaggctgcccgttgtggggaggggcagtgttagagcagggctggtcataccctctggagttcagaggaagaggtaggaccagngcttttttgcttcttttggtatttttggctgggtgggagggaaagtctctttaaaatggggcaggccacacccccattccgtgcctcaatttccccatctgtanactgtagat

SEQ ID NO: 26364 - DNA, 487 bp, Homo sapiens
  misc_feature (1)...(487): n = A,T,C or G
agggagttacacggagtnnnnnnntttggagcccttcgtagaccctaggccatgcggtggaattcggcaggaggaggttggttggggtaattctatcttcttgagtcagatgccttcgccaggctcctaggagaaagagcagtagtccctccccaaccttgcaaatagctaaggaatcccgtacctcttgccccttacctgcagcctggggagttccacataggaacaggaggaggaataagactgccatggggagagcctgccaagttctcttgctccaagacctggtgtccccagggaggaagcagagtccagataaaggcccacactcgctggtctggagtgacaaggggctctggaggggatgggaatgctggggcgataaagcccagcagcatgtctactatggataaagtgaccaccacttttctatcctggagagaaaaggacccagcccaggccactctgaagatgacctttttgctct

SEQ ID NO: 26365 - DNA, 491 bp, Homo sapiens
  misc_feature (1)...(491): n = A,T,C or G
gcggtccgnnnaaatgagactgtagtccgtgtggnggaattcccccagttcctgaggaacatgcgctttgccaagaagcacaacaaaaagggcctaaagaagatgcaggccaacaatgccaaggccatgagtgcacgtgccgaggctatcaaggccctcgtaaagcccaaggaggttaagcccaagatcccaaagggtgtcagccgcaagctcgatcgacttgcctacattgcccaccccaagcttgggaagcgtgctcgtgcccgtattgccaaggggctcaggctgtgccggccaaaggccaaggccaaggccaaggatcaaaccaaggcccaggctgcagccccagcttcagttccagctcaggctcccaaacgtacccaggcccctacaaaggcttcagagtagatatctctgccaacatgaggacagaaggactggtgcgaccccccacccccgcccctgggctaccatctgcatggggcttgggt

SEQ ID NO: 26366 - DNA, 482 bp, Homo sapiens
  misc_feature (1)...(482): n = A,T,C or G
agggccggnnnnnnnnnagaaattgataccctccgnanangactgatgactctcgnacagncnggnggaattcggctgcggtagctgcggatacaagccttccgcgggtcctgcctggcgaccccgacctcctcctgctgtctctccgctccgccaccccgaacccgccaaggtcctgtccttttcctcctgtcctttgccagcgttgggccggaccgggccgagccgggccgcccgggcgcagtctttaaccatggcgtccctcttcaagaagaaaaccgtggatgacagagtttcgctgttgttgcccaggctggagtgctggagtgcaatggcatgatctcggctcaacgcaaccatcacctcccagattcaagcgattcttctacctcagcctaccgagtagctcggattacagatgtaataaaggaacagaatcgagagttacgaggtacacagagggctataatcagagatcgacg

SEQ ID NO: 26367 - DNA, 573 bp, Homo sapiens
  misc_feature (1)...(573): n = A,T,C or G
gggggggcnnnnnnnntttcgaatcttagtatcgcgaggnggaattcccccaaagaaggtaaagggagcaagccttccccactgtctgtgaagaacaccaagaggaggctggagggcgccaagaaagccaaggcggacagccccgtgaacggcttgccaaaggggcgagagagtcggagtcggagccggagcccgtgagcagagctactcgaggtccccatcccgatcagcgtctcctaagaggaggaaaagtgacagcggctccacatctggtgggtccaagtcgcagagccgctcccggagcaggagtgactccccaccgagacaggccccccgcagcgctccctacaaaggctctgagattcggggctcccggaagtccaaggactgcaagtacccccagaagccacacaagtctcggagccggagttcttcccgttctcgaagcaggtcacgggagcgggcnnggatatccggaaaatacaagaagaaaagtcattactacagagatcancgacgagagcgctcgaggtcgtatgaacgcacaggccgtcgctatgagcgggaccaccn

SEQ ID NO: 26368 - DNA, 464 bp, Homo sapiens
  misc_feature (1)...(464): n = A,T,C or G
ggccggggnnnnagacctgaagctcccgaaggactgagacatcgagacccccacaaggctcctgaggaacctgacccattttactatgactacaacacggtgcagactgtgggcatgactctggcaaccatcttgttcctgctgggtatcctcatcgtcatcagcaagaaggtgaagtgcaggaaggcggactccagcccaacctgcaaatcctgtaagtctgagcttccctcttcagcccctggtggcggcggcgtgtaacaccttcccgaggaaactccgctgccgaccctgcctgagcgcgggagcctgaggaccgggtggaggcggtggggacccagccgcgcgccgggagcgctccccggaatgagccgccccacccaccccaaggctggagccgctgcaccctgctgtccctctccaggccttggcaatgacgatcccccaaagagcccgtctgcacc

SEQ ID NO: 26369 - DNA, 479 bp, Homo sapiens
  misc_feature (1)...(479): n = A,T,C or G
aggcggggggnnnnnggaaactgatgccatcgnanannactgaggccctcagnacagncnggnggaattccccagacccccacaaaggctcctgaggaacctgacccattttactatgactacaacacggtgcagactgtgggcatgactctggcaaccatcttgttcctgctgggtatcctcatcgtcatcagcaagaaggtgaagtgcaggaaggcggactccagcccaacctgcaaatcctgtaagtctgagcttccctcttcagcccctggtggcggcggcgtgtaacaccttcccgaggaaactccgctgccgaccctgcctgagcgcgggagcctgaggaccgggtggaggcggtggggacccagccgcgcgccgggagcgctccccggaatgagccgccccacccaccccaaggctggagccgctgcaccctgctgtccctctccaggccttggcaatgacgatcccccaaa

SEQ ID NO: 26370 - DNA, 494 bp, Homo sapiens
  misc_feature (1)...(494): n = A,T,C or G
tgcgcccggggnaatcgagnatcgtagacctctaggcagngtggnggaattcgatgagaaagctcagactcagggccagcaaccccggtcccagcggagcgcccggcacgcgccgacacttcagcaccagtcgcggtggccaccactgtgcgcggagatggctgcgacgcgtgcgcaggtgaaatggccaccagacccaggctttctggaatgcattcattttctgcagttgaagggacgatcccggatctgaaagaaagagccacagtgactccaagagtggagccagggcatgctggacactgcatagctatggccacgtgtgtcacctccgagggagatgtgagagaaacacagagggatcgcttgtgactgtgccttctcgatgtatgatggactgttctgctcaaatagtaagtgtgaacaaggagccggtgaacataggaaacaaagaatatttcatttgacattataaggaatgagacaattctagt

SEQ ID NO: 26371 - DNA, 585 bp, Homo sapiens
  misc_feature (1)...(585): n = A,T,C or G
cgcgatcgaacccnntcgattagaacactagtccgagtggtggaattccctgttcttgtatcgcgctcgctctgccttcccctatgcccaccgcttcccaccccagacttggctgtccgctctgcggccttcgggcccagccctttcgggcttgctgagcctggaggccgaggagaatgcacttccgggttttgctgaggctctgaggagctaccaggaggctgcggctgcaggcaccttcctggcagtagagttcaccactttggcggactatttgcatctgttgcaggctgcggcccaggcactcaatccgctaggcccttctgcgatgttttacctggctgcggctgtgtcagatttctatgttcctgtctctgaaatgcctgaacacaagatccagtcatctgggggcccactgcagataacaatgaagatggtgccaaaactgctttctcctttggtaaagattgggctcccaaagcatttataatttcctttaagttggagactgaccccgccattgaattaatcgagctcggaaggctntggaaatttatcagcatcangtggtggtggctaatatct

SEQ ID NO: 26372 - DNA, 448 bp, Homo sapiens
  misc_feature (1)...(448): n = A,T,C or G
natcgagtctttgtccaggcgggatttcgacgataatgggctcataaactgccttagatttgcctggaattaagaatttttgtttttattagaaatacttggtaaacatctcatgccctacaacagtgtttttttgtttgttttttgtttatttttgttttttgggtttcttttttgagacagagtctcgctctgacgcacaggctggagtgcggtggtgcaatatcggctcactgcaacctccgccttctgagttcgagcgattgattcttctgcctcagcctccccagtggctgcgactacaggaatgaggcaccacgcccggctaattttttttttttttctctattttgggaggggatggggtttcaccatgttggccaggctgttctcgaactgcaacctggggtgatccatccgccttaccctcccaaagtgcggggattan

SEQ ID NO: 26373 - DNA, 494 bp, Homo sapiens
  misc_feature (1)...(494): n = A,T,C or G
ggagcggggnngnnnaatcgagacttctagtccctgtggnggaattcgcgcccgcgccgcccgctccagctgggctagtgctgcacattccggccagcccctcctcaagaccccattcccaagccccttctcagctccctcgggccggcagagcggctctgatcagtaaaatgctgttgaaggcccacgggcatgactgcacccctcactaattggtcattggtttggggaggacaccactgtcccagtggaaccttgagcacaccttggagccctcctcttcctctccggacctgtgccaaactgtgagtggcacagagcaaggactggatgtgttctcttctttgttgcatactcagttccttgaccacagtgccaagcacacagcgagcactccctgtgtatctgctgagtaaataaacgaatgaacaaacccaacacatttcagccaagtcctgctgatgtttctcctccgatctagctcctcctttccc

SEQ ID NO: 26374 - DNA, 460 bp, Homo sapiens
  misc_feature (1)...(460): n = A,T,C or G
ntcgagattcgtagaccgtagggagagtggaggaattcgatacttcctccagcatggctgctgagtacccagagttgcgaagagttttttaactgatttagccaggcggcaatcatgagtgaatggatgaagaaaggccccttagaatggcaagattacatttacaaagaggtccgagtgacatgccttgagacgaatgagtgtctaggatgggttttaactacagacccagtctctgccaatatagtgcttgcgaacttccttgaagaaggcagcatgtctgtgaccggaattatgggacatgctgtgcagactgttgtaactatgaatgaaggggaccatagagtgagggagaagctgatgcatttgttcacgtctggagacttgcaagcatacagcccacaggatctggaagagagaaagaacagcctaaagaaatggcttgagatgaaccacatcc

SEQ ID NO: 26375 - DNA, 461 bp, Homo sapiens
  misc_feature (1)...(461): n = A,T,C or G
nttcgagattcgtagtccagtgtggaggaattcatcaagggaagatcaaacacaggtgcactcagctgcccagggcctctgggacacttgccttgacttgcaacttgccttgaacatcacgatcaaagcagcaggtgctgtggtctctcaaaattgatttttatttgactctgtggctctaagactgccttgaaccgcctgaggcctatgcatctgaacaagtgggtctctcccttgagcaccaggagtgggtgccagccggccccgaggattcccagcaccccacctatggtcttgccagcataggcttgctagttccttcttggtcagaggtagctgcagaggggggaggccaagggtttggtctaagctgtgccctgccacctggcaggaggcccactcactgcccaagtcatggcaacaggctggagcagcccaggagatgggcctaaaatgttctg

SEQ ID NO: 26376 - DNA, 585 bp, Homo sapiens
  misc_feature (1)...(585): n = A,T,C or G
ngagtgctttgatcaccagtcagaatggagcaaccnctatcagccacataccacatagggaggccacagatgggccgtggtgggtggaggtagcctttgcaccatgttgagcagagacggctggctctcctcagggctccggctggaaggtgtataccggaaagggggcgctcgtgcccgcagcctgagactcctggctgagttccgtcgggatgcccggtcggtgaagctccgaccaggggagcactttgtggaggatgtcactgacacactcaaacgcttctttcgtgagctcgatgaccctgtgacctctgcacggttgctgcctcgctggagggaggctgctggtattcctaagatccctgagagccaaggctcaaccaggatctctgccttcccccaccagaatccatggtttggcagccctccgccccatcacttcccaccctgggggatcatccagagacttggctcagggggaggtgggaagggggcagagacacatccatcctgcatttgtgcctaaaaaatcctcccttctgaccagcctgcactcttttcttccaggtccctcccaaccctctt

SEQ ID NO: 26377 - DNA, 461 bp, Homo sapiens
  misc_feature (1)...(461): n = A,T,C or G
catcgacatcgataccatcggccagngcggnggaattcagacagtgctgtgtgtgcacacgccctcatggaccacaaggcactctctgaacctagaactgaaaatatcaattaccgagcagccctctgcaacacccagagccccaagacagcccagggcgcagcgggggcagggccctcccatcagttttcttatttatttatttagagatggagtctcactctgtcaccaggctggagttgcagtgaggagagatcggattactgcactctatgcctgctgacagcaagagactgttgtgcctcagcctcctgagtagctacgactatagctgcgtgccaccagcgccagctaatctttgtattttagcagagactgggtttcaccgtgctgcccagggtgggtttgaactcctgagctcatgcggtctgcccagctgaggctcccaaatcctatcattg

SEQ ID NO: 26378 - DNA, 542 bp, Homo sapiens
  misc_feature (1)...(542): n = A,T,C or G
tcctccaaatctcttcatgttccattgtctctcctcttttagtcttaatcttcactctaacccncccccagcagtcccccccnnnnnaatagattacatagcatcgcanggacnnnnannannnaacacannnancgnngaggggngagcgccagagacggccggccaccgccaggagacatcaancnaaagggcaacgggacggacatcagcaacggccctcacaactacgctgngcgncgcctgcggcagccctgccaggngctgnggctgactgtgatgcgtgaacagaagttccgcagcaggaacaatggacaggccccggatgcctacagaccccgagatgacagctttcatgtgattctcaacaaaagtagccccgaggagcagcttggaataaaactggtgcgcaaggtggatgagcctggggttttcatcttcaatgtgctggatggcggtgtggcatatcgacatggtcagcttgaggagaatgaccgtgtgttagccatcaatggacatgatcttcgatatggcagcccaga

SEQ ID NO: 26379 - DNA, 461 bp, Homo sapiens
  misc_feature (1)...(461): n = A,T,C or G
aggagcgggcnnccncccctgatgnntcattgagnatcctcgcaccgncnggnggaattcgctgagtttgctgcggaacgagactgggaacagttccatcagcctcggaatctcctcctggccttggttggggaagtgggggagctggcagaactctttcagtggaaaaccgatggggaacctggcccccaaggctggtcccccagggaacgggcagcccttcaagaggagcttagtgacgtcctcatctacctggtggcattagcagcccgctgccgtgtggatctgccgctagcagtgctctccaaaatggacatcaaccggcgacgctacccagcccatctggcccgcagctcttcccgcaagtatacagaattgccccatggggccatctctgaagaccaggctgtggggcctgcggacattccctgtgactccacaggccagacctcaacctagaa

SEQ ID NO: 26380 - DNA, 447 bp, Homo sapiens
  misc_feature (1)...(447): n = A,T,C or G
agtggcggnnccccaatgagccnctgatagctgggaaanccgagaggggacttcagggccagaggtggactacatgtcagacggctccagtagctcccaagaagagcctgagagcaaggccaaggcgccgcagcaggaggaggggcccaagggtgtcgatgagcagagcgacagtagtgaggagagtgaggaggagaagccgcctgaggaggacaaggaggaggaggaggagaagaaggcacccaccccgcaggagaagaagcgcaggaaagacagcagcgaggagtcggacagctcagaggagagcgacattgacagcgaggcctcctcagccctcttcatggcgaagaagaagacgccacccaagagagagcggaagccgtcgggagggagctcaaggggcaacagccgcccaggcacgcccagcgcagagggtggcagcacctc

SEQ ID NO: 26381 - DNA, 463 bp, Homo sapiens
  misc_feature (1)...(463): n = A,T,C or G
catcgactttgatnaccctcggcacgngccgnggaantcgctgagaacagagaggccctgccctctgtccactagcgagaatccctagctgtcccattccagtctttctccccggcattcacaaactttgcaagcgtggtccagggccttctccagatctgttccaacttggagtgtgaagggcttgagcatacgggggaagagagtctgcagaagttgggggaaaacttttaaaagataccctcattgtgtcaaagagtgtgccaatctatttttgtatcagcattggaagtgcactttcccctggggcgtgtgggtgtgtgaatgtgcaagtgtctgagagatactgcatcagccctagacccccagagccagtcccgccctttacagagcagcccttagcctggggccatgggtcaggctgaccttcaacaattatttctagatgatttctggataagag

SEQ ID NO: 26382 - DNA, 477 bp, Homo sapiens
  misc_feature (1)...(477): n = A,T,C or G
cgcagcccccgncncnttaganattcgatatccctagtccagngcggnggaattcgctgtctacacccacagatgacagcatggagtgtgtggacagcgagcgcaggccccacttcccccagttctcctactcggccagcggcacggcctgaggcggcggtggactgcgctggacgatagcttggagggatggagaggcggcctcgtgccatgatctgtatttaatggtttttatttctcgggtgcatttgagagaagccacgctgtcctctcgagcccagatggaaagacgtttttgtgctgtgggcagcaccctcccccgcagcggggtagggaagaaaactatcctgcgggttttaatttatttcatccagtttgttctccgggtgtggcctcagccctcagaacaatccgattcacgtagggaaatgttaaggacttctgcagctatgcgcaatgtggcattggggggccggg

SEQ ID NO: 26383 - DNA, 457 bp, Homo sapiens
  misc_feature (1)...(457): n = A,T,C or G
ntagagatcgtagnccgtgnggaggaattcggggaacctggcgatttgcttgcagggaacctcaggacctgacccaaccactgtctacgtggacatgagagccctgagacacgacagagtccgcttagtggaaagaggatcccctcatagtctgcccctgatggaatcgggaaagatacttccaggggttcggattataattgccaacccagaaacaaaaggaccgctgggggactcacaccttggagagatttgggttcacagtgcccacaatgccagcggttatttcactatttacggagacgaatccctccagtcagatcacttcaactcaagactaagttttggagacacccagaccatctgggcacgcacaggctacttggggttcctgcggagaactgagctcacagatgcaaatggagagcgccatgatgccctctacgtggtaggggca

SEQ ID NO: 26384 - DNA, 473 bp, Homo sapiens
  misc_feature (1)...(473): n = A,T,C or G
gcccggccgccnnnnttaganatcgagaccatagtcagngnggtggaattcagaacgcccagggcccggggtcggcggcgcacggtccccagaagagtgaacatgcgtcaaggggactctcatcctggaatgggagactcggtctgttggatccctgggacctagggtttcagctcacgaggctttgcagagcaccagggtccccatggaatagagccggaggcaggaattaccctaagacctttggtctcccggatggagagcctggggcacaccagagtggctagagatccctctacaccaaggaggcccggacaggtccagtgcccttggagtgcccagggcacaaccttgggatacaggaaccactgttcccttggaaagcctggcaggagtcaggcccagaccgagaagaggaaggcggagctcgtggcctcatcagctccatgtctgtctttctcttgtaaagggct

SEQ ID NO: 26385 - DNA, 459 bp, Homo sapiens
ctcgcacttcgagaccatagtcagagtggtggaattctgagaaggaaagaagatccacaatagcatttcccccagaactcatcagtccacatcccccgtcttgcagcccctcccacccttgtttggggtgtcccattgtccagccccagctcctacctgtaacagctcttcaagctcctgctggaagcggtcagtcagcaaatctactagctggctgcgggcaaagtccgcccggctgaagaaagtgaattcgggattacagagcaggtagagggcatgcgccccagcctcaagcaccgctggctctgcatgcttcaccaccacctcctggagttgctgcaggaacagctccaggtgctgagaagaaaaggcacaagatggtgtgctgtggggatgggaggaggacactcttctggcgggaagtggaacggggttaaaagcattaaacttcaaggataa

SEQ ID NO: 26386 - DNA, 466 bp, Homo sapiens
  misc_feature (1)...(466): n = A,T,C or G
ttgggatngccttccgcananncncnnntactgtaatatcatcgcananncnggnggaatncgnaggcgctggagctgggctatgggcttttttgggcactgtctgaatcaacttccacggcctgagagacccttcggtgcccacaggcggctgcaaggagagtgggtgttcctggcacgggggcccagacgggctgtatgagtatctgcggccctcagggacccctgcccggctgtcctgcctctccaagaacctgaactatgacacctttggcctcgctgttccctcaaccctgccggctgggcctgaaatagggcccagcccagcacccccctatgggctcttcgttgggggccgtttccaggctcctggggcccgaagctccaggcccatccgggattcgtctggcaacctccatggctacgtggctgagggtggagccaaggacattcgaggtgctggggg

SEQ ID NO: 26387 - DNA, 476 bp, Homo sapiens
  misc_feature (1)...(476): n = A,T,C or G
cgcccgcccccnnnntttagannatcgatgtccctagtccagagnggtggaattcgttaagaacaagaagcctgaaaactcatattgagactaagtaaggctaaaccacatatgaaaatgaggtagaagaaatttagtgggtaagagcaatccagatgaaaccatctgggatacctgagaaaaactcccacagtgagacttcataactgaagatagaatttcgggtgaaggtgggaaagtttcctctctaggaaaaggtagcatttgctggagtgagtgcagctgcaagtagtagtggacagctaaagattatacctcaagggttctggaaggttctcgcatgggctaaaaatgtacctctggtggagccgaagcccacatgggatgccacatgggatctgggcaaggaaaatgaatcagggctgacggcccagtactggtttcagccatgtcaatctgtggttagactagttact

SEQ ID NO: 26388 - DNA, 457 bp, Homo sapiens
  misc_feature (1)...(457): n = A,T,C or G
nttagagattcgtanncagtgnggaggaattcaccagatcggcgccaagttttgggaggtcatcagtgatgagcatgggattgaccccactggcagttaccatggagacagtgatttgcagctggagagaatcaatgtttactacaatgaagccactggtaacaaatatgttcctcgggccatcctcgtggatctggagccaggcacgatggattcggttaggtctggaccattcggccagatcttcagaccagacaatttcgtgtttggccagagtggagccgggaataactgggccaagggccactacacagagggagccgagctggtcgactcggtcctggatgtggtgaggaaggagtcagagagctgtgactgtctccagggcttccagctgacccactctctggggggcggcacggggtccgggatgggcaccctgctcatcagcaagatc

SEQ ID NO: 26389 - DNA, 417 bp, Homo sapiens
  misc_feature (1)...(417): n = A,T,C or G
ctccagcctgngcgacagaacctgtctcaaaagaaaaagaaatgttaattaagcgtttgtgctgttaagggaggagaccacctctcatattgttttatgcccaatttctgcctccaaagaaacaagtaaaaactaaaaggcagaaatgaaatccacaggcagacagccaggtgccaaccctgggcctggttaaagatcgacccctgaccaaaccggttatgttatctatggattccagacattgtatggaaaagcattgtgaaaatccctgtcctgttctgttccgttctgattaccactgcatgcagcccccagtcgtgtaccccctgcttgctcaatcgatcacaaacctctcatgtggacccccttagagttgtaagcccttaaaagggacaggaattcctcacttggggagct

SEQ ID NO: 26390 - DNA, 474 bp, Homo sapiens
  misc_feature (1)...(474): n = A,T,C or G
gcgaataannnnncctcgatggcactactcagtgnggnggaattcccactccaaagtccatggattcaatggactcatccatttgtgaggaggacttctcgccctctggctggaagctgatacctgaagcactcccaggctcatcatgggagctttcctcagcaccttcaccttccctcccagtgtagcctcctgtcagtgggggctggacccttctaattcagaggtctcatgcctgcccttgcccagatgcccagggtcgtgcactctctgggataccagttcagtctccacatttctggttttctgtccccatagtacagttcttcagtggacatgaccccacccagccccctgcagccctgctgcaccatctcaccagacacaaggggaagaagcagacatcaggtgctgcactcacttctgccccctggggagttggggaaaggaacgaaccctggctggaggggatag

SEQ ID NO: 26391 - DNA, 496 bp, Homo sapiens
  misc_feature (1)...(496): n = A,T,C or G
agganntttgccaggnnnnnnnnnaactgatgaccntcactgatgaccctaggaagngcggnggaattcgctgcactccagcctgggcgacagagctagactccatctcaaaaatacaaacaaacattcaaacaaaaaccctgaaaccaaaaaccaaaacaatcctaaagactgctgtagcctaatgagaggttgatatagtttgggtctgtgtccctgcccaaatctcatgtggaaattaattcccactgttggagatggggcctgctgagagctgattggatcacaggggtggatttccctcttggtactgtcctgagttctcatgagatcttttgtttaaaagtgtgtagcacttacccaccgccaccccagaccccatcttggtcctgctcctgccatgtacgacacctgctcctgctttgccttccaccacgagtgaaagctcccttgaggcctccccagaagcagatgctgccatgcttcctatacagcc

SEQ ID NO: 26392 - DNA, 460 bp, Homo sapiens
  misc_feature (1)...(460): n = A,T,C or G
agagcagnnnnaaatgagattaaagcntggcggnggcannnccaaacctagagatgcgattttgttaaaccagttaaaatatattttaaaaatattctattatctatctatctatctatctatctatctatctatctatctatctatctatctctccatccatccatgtaatcaaggcttttggaatttgaaaagtaatattacatgtacaaagatttcctttggaagtgagatgcttataaaaaaagtattaataattatatgtatatatgtatagatataaactaattttacttcaaacctttaaaatttatatgaaagaagcttaaaggattttgatatattttcaaacaaaaattatgatcatttgaagtaagttacattactattgtagacatagttttctagttacttgttatttaaacaaaaagtgtcagctcacacgggctttaatttggtg

SEQ ID NO: 26393 - DNA, 472 bp, Homo sapiens
  misc_feature (1)...(472): n = A,T,C or G
tgagttaagnanttttgatacattagncagngttgtaggacctccaggccagaatgacgggaacacaggaaatcaggggaaacatgagtgacccaaccctgtgatctcagcccctgtgaacccagacttagctgcgatcccccccaagccagcaatgacccgtgtctcgctacagagaccctcccgctctaggttctgaccccaggttgtctcctgaccctgaccccacagtgagccctaggcctggagcacgtggacacccctgtgaccatctgggccccagagccaagctgtgtccctgtccctctgtgcccagaccaggcctgcccaggtaacccagacccactgttctggaaagaggcccggagggctcccagggtacccgcaacccacaccgtgagctcaggaaaaggacgcatggaggccccggccagatggcttgaagcccatatcaggccctgccgacctgacc

SEQ ID NO: 26394 - DNA, 463 bp, Homo sapiens
  misc_feature (1)...(463): n = A,T,C or G
agagccgnnntttttgatacgaaggcctccgcacagncnggnggaantcgnccagggcggggatcctgcgctgccagccgtgtgctcatggagagtttctgtttgcgtgctggccgccctctcaccctgcacaccggctgcaccctgctggacgcaccatgggactgcccatctgtccgtcatttggtccacccagagggcacttggtgcagcctccccaagcccctgctcactcccggtcactccctgttccccaggcccctgctaactctcgctttctctcccctcccacctgctgccctgggtgcaggtaagtggagtggtggggacgagggggctggcggggaggaagggggctcttctccagaacagtatcagggtttgctgggaattggaggggtgacaagcagggttacggcctctgacagacctcagcagatccagcaacctccctccaggtggg

SEQ ID NO: 26395 - DNA, 457 bp, Homo sapiens
  misc_feature (1)...(457): n = A,T,C or G
gagcagnnnaattagtacgttagacctcngcanggcacnccnngattccctgccccgcaagcccagcaccggttttgccgccttgtctcgaagtgtcaattaggccatctcctgcctcgggacggagagcgccctggaaaaggcggaggggccggtgaggagcagggcttccctcgcttcggggctttgagcttccctgtgaccgtcatttccttgtagcgtataattgggttggccattaataattgctcgataactgcataatggtgaaacctggtaccactcaaatgcaactttcttgctcgttttcacaagtcgatgttatcgaaatgaagcacttttctctgaattggtgtgggttttggaatgatttttgcagagatagtcacgaccttagtcacacaagagcgatggcaagatttttacccaagccatctgacttggaacccatggatta

SEQ ID NO: 26396 - DNA, 474 bp, Homo sapiens
  misc_feature (1)...(474): n = A,T,C or G
cccccccccaggggnnttagagattcgtattgcagtgtggaggaattcctaagataaaaatatctgcagggtcctttccattcctatttagagggagtcctggctccatgaccccctcccgagtggactgtccaagcagataggctcacacgagaaacagtgaggctgaaagggggggctatggaagagcggtagggagtccacggagaagatgcagtgaatgcttgcatgcattcacacgtgtgtgtgtcccagctagttcactcctttcgccgtgcgtggtggaggctggcctctctggctgggtgcagtgaatggccagcgggtttcttttctgctgggccaaggcgctttgggggtggagggggtggtgctggtgctgcactgggctgactgcggcgctgacgcagcgtttccccccatccctgttgcctgtgtgttgtgtggatctgttcctagtataggcaacataat

SEQ ID NO: 26397 - DNA, 475 bp, Homo sapiens
  misc_feature (1)...(475): n = A,T,C or G
cgccgccccgcnnnntttagaatttcgagaccactagtcagagaggtggaattcgggatgaagacctgcagtgagcccccaggcgatggcggctctcgccaaaaggaaggagagtgaggctgggggcggcggctcatgcctgtcattccagtgctttgggagcctaaggcgggaggatcgcttgaacccaggggattgaggctgcagtgaacctcgatggtgccagtgcgttccggcatgggtgacagagcaaggctactgaaaaaaaagaagggaaatgccacctggtttccctctgtgtcctccccgccaccatctctgcccctgtggaaggcagagcttcggccttccgtgatggaaaccacttcctctacactgctcctgtcacgtagcctccgcgggaaggccgcccctgcctcttccccagcgtggcaccatcctctccctgtccccccgcttcagggagtgggggctc

SEQ ID NO: 26398 - DNA, 463 bp, Homo sapiens
  misc_feature (1)...(463): n = A,T,C or G
agaggccgnnnaaatgatacgttggcctcagcancgncnggnggaattcgaccttttaaaaagggctaaataaacaatctctacatgtaaaaggcttttgacttctacttcctctgtatagagcaactgttgaactcagctgcctgtagatagcggtgggtgtgctcgcaaacgtgccgccatgtctgttacgctaacatctgtgaagagagtgcaaagttctccaaacctattggctgcagggcgtgattctcagtcaccagactcagcttggagatcttacaatgatggcaatcaggagacactgaacggagatgctacatattcctctcttgcagcaaaaggttttagaagcgttcgaccaaacctacaagataaaagatcaccaactcagagccagataacagtgaatggaaactcaggaggtgccgtgagtcccatgagttactatcacaggccgttn

SEQ ID NO: 26399 - DNA, 474 bp, Homo sapiens
  misc_feature (1)...(474): n = A,T,C or G
cccgcccgcccagcnccnatagagatcgtantncgtgtgcaggaattcccaaaacataacaagaggacattataaaaggaaaatgacagactagtcattttctcaagaacatagatgcaaaatcctacacaaaatattggcaaatttaattcagtgatacctaaaaaggataatatgctatgaacaggtaggatttattataggagagccagagttggctaaacattaagaaaaattaagaaatttaatttagcaattgacagaatacaggaaaatatcacgttattactttaatagagaaaataattttgataaaaattctaccccagctcatgattttgagaaattgtgtttttgtgtaattttaactttctttctaattatgttcttatatttaaagagtgccctttgttaacagcttatcaagtttggtctcgttttgctgttgttgatgttgttttactaactgagaaa

SEQ ID NO: 26400 - DNA, 479 bp, Homo sapiens
  misc_feature (1)...(479): n = A,T,C or G
cgccagcccaggncnnnttagantacctgatgaccntaggccagagncgcggaattcgcagctaggggcccagcgtggaggtgcccaggtccgcctcagcaaggtgcccgcgcccaccttccaacccaaaaggccggcgcggaagggcagcataaaggcagcggccacctgcggatacccaagtggccttacaaggtggccaaggaggagaaacgggaggcggaggaggccgagaagaggcgccaggccaaggtgcaggagaagcgcccgccgccctggaagaagaggacgtgagagtccgcgggtgcttggcacggggtttgagggctgggtgaggccgcggggctgggcaccatggcagctctcgggaccaccgggcagcgcgcgtttccacgctgtctctctaggatgctcccagaaaggggctgggggagccacatcgattcgcttcacaccagccaccctagcaatcagtacac

SEQ ID NO: 26401 - DNA, 462 bp, Homo sapiens
  misc_feature (1)...(462): n = A,T,C or G
agaggggcnnnttatatgagtactacagcctcgcggnggcanncgccagggnctatgatcacaaacttcgacagtacgtggccctaaaaaaggagcgttatgttatgcgctttcatcgncaagcagctgaggagatccggattttggagcatcttaagaaacaggataaaactggtagtatgaacgttatccacatgctggaaagtttcacattccggaaccatgtttgcatggcctttgaattgctgagcatagacctttatgagctgattaaaaaaaataagtttcagggttttagcgtccagttggtacgcaagtttgcccagtccatcttgcaatctttggatgccctccacaaaaataagattattcactgcgatctgaagccagaaaacattcttctgaaacaccacgggcgcagttcaaccaaggtcattgactttgggtccagctgattccagt

SEQ ID NO: 26402 - DNA, 453 bp, Homo sapiens
  misc_feature (1)...(453): n = A,T,C or G
attgatcccctnnnnnattgatgtcttttatacagtgtggtggaattccacacggactggatgaggaacgcaacagaaagggagaggtcaagatgactcatgctttccacttgagcaactgggtgaggcgaggggccccttactgagatgctggtttgatttgatttgaagcttgagaggataagaagctttgtttggaaacactgagtttgagatgccagttggccatccaagtgcggacactaggaaggcacgggttctactgttggtctctgaggcggaatactacacctcgggggttgacaagatgatccaccgggtgggagcacgtttctacacccatgcctacgaattttcacctataataagaaacaaacgaagctcctctggtttagaatatggtgtaagagcagcctcccagccagtctccatctctgtgaggcacacgacacn

SEQ ID NO: 26403 - DNA, 455 bp, Homo sapiens
  misc_feature (1)...(455): n = A,T,C or G
tttgacatcgatcacactagcaagngcggtggaattcgaaggatgctcgaacttgcccaggactcacgcttcagcttcacaatcccttggattttaatgacatttccaaactgtcacctttgtagggctgggtcaaagtctaaagaggacaaataaatagagacttctgtggcctcgttgtgcctattgaacaggagagctgcatgtcacaatcaatgagacctgcacagcttgtgaatcatcactgagactagttgtgtttttaatacctttaaaatgaagccacagcatctattctggaaatgtggcgtaggcttaaaaaccttgctccaaagaggatatcgtttcagccagcatgcagtgaatatctgtggctacacaaaaaaacaaactgtcctcgaatgctggaggaggaaatatgacattgtgatgccaggcagttttctgtgacactt

SEQ ID NO: 26404 - DNA, 470 bp, Homo sapiens
  misc_feature (1)...(470): n = A,T,C or G
ccccccccccggggaannnnnnattgatgacctctgacagtgtggccgaattccatcactcgggcccggagcctccaacatggccgcgcccagagacaaggcggcttcctgccctaccatcgagtagactccggctagaacatccttcccctgggactcgccagcctcggcggctctgctgctccctcggaggaccacgtcggccgcaggaatctggacttatcgctgaggggcggagcttcggccccattcagcgcggcctttccacccttgttccctctgacccctacccccaaagttgatggtgaaggataagcttccccaaatacagggtttctcgagctcttagtattgaaattttcaggaaagagacatcaggagcagctgaactcaaatgtgaaataaatgtcgcaccagctgaatcagaagcatcattttatgcatttgaagtaaaatttttttcaatatta

SEQ ID NO: 26405 - DNA, 578 bp, Homo sapiens
  misc_feature (1)...(578): n = A,T,C or G
cgcgatagatcccttccagagtggagcaactctacagatgggatgcttgngtcaatttcagtcttctgcccacacagacagtgccaggctgaatagcctcctccatagctcactgatactcatgcaggggcatctgtgggataatgcctagaagtgaagggtctggaccaaaggacaaatgcatctggaattttgttcgatttgtcaaagttccttccagtgtataggggcctgattccccagattcctcacttctacaaactctcatccactgttgtttgcttagggatttcagcagctgtttagtccaacattttagccccagacatgggctgacccaagatttcctgcggttctgtctccctctaggaatatccgcgtggctgtccttccttgctctgaaagcacaacctgcctgttccggacccggcctctggacgcctcagacactctagtgttcaatgaggagttctgggtatccatgtcctatccagcccttcaccagaagaacttaagagtcgatgtctgtaccaccgacaggagcccatctgaagagtgccttggtagggccgtgtctg

SEQ ID NO: 26406 - DNA, 468 bp, Homo sapiens
  misc_feature (1)...(468): n = A,T,C or G
tgcgttccggggagannnattgagtcctggnnangacgcctcatagtccatgtggtggaattcagcgaaactgggtctcaagttaaaaaaagaaagcaaggttagagtaatttacaacgaaggaaaaaaacccacagcacacccttcgcggctgtcagcgctctcctgatgtcacagtggctgcgtgtccttggggtgggtgaggtgtggggagcccagcccctggccctgcctcccgcgccccgctccccttctctctcttactcggttaagccatagcgaggcctccgctcgtttcagatatgaatttgttttatagattataaatatgcatatacagtgtatgtataaagcagaatgcctgcctttcctggttattttttgtaccatattagaaattatattatttattctttaccaattttgggaataaaaggagctttggttatttaatataataagagctgt

SEQ ID NO: 26407 - DNA, 450 bp, Homo sapiens
  misc_feature (1)...(450): n = A,T,C or G
aaagatgtctattagacctgtcgtggcgaattccttatttacaaatcttacttaatctcactgatgctttctgtcattggctaactgatccaccttgaatgaagcctcctccaacaagtctggaatctgtccaaatctaaattaacaggtgcgcctatgaattccctcagagaacacactgtggatgctttagcaacctcttaccatgcctcctgaagtatctggattgcatatggtggccataagtagtccatgggcttctgatgtaaaaaacaaacctgccccttttcactgtgttctgtacagcatcagggcagttattgctgaccacatactggaccctctggaaacagagggctctgcatccatgtccacgagccttcatgcccatctggccatcaggccttgggaagcagcaccccacagccttggcacagctacagagacctn

SEQ ID NO: 26408 - DNA, 451 bp, Homo sapiens
  misc_feature (1)...(451): n = A,T,C or G
atttgatgccctctgacctttgtnggcgaattcagcagaaaaggccaaagcagcagccggggaggccaaagtgaaaaagcagctggtggcccgggagcaggagatcacggctgtgcaggcacgcatgcaggccagctaccgggagcacgtgaaggaggtgcagcagctgcagggcaagatccggactcttcaggagcagctggagaatggccccaacacgcagctggcccgcctgcagcaggagaactccatcctgcgggatgccttgaaccaggccacgagccaggtggagagcaagcagaacgcagagctggccaagcttcggcaggagctcagcaaggtcagcaaagagctggtggagaagtcagaggctgtgcggcaagatgagcagcagcggaaagctctggaagccaaggcagctgccttcgagaagcangtcctgcagctgcag

SEQ ID NO: 26409 - DNA, 449 bp, Homo sapiens
  misc_feature (1)...(449): n = A,T,C or G
ntttgatgccctctgacttgcgaggcgtattcgacgaagggatgggggaggagcccagcccctttcggggccgctcgcgctcggcgccccccaacctctgggcagcacagcgctatggccgcgagctccggaggatgagtgacgagtttgtggactcctttaagaagggacttcctcgcccgaagagcgcgggcacagcaacgcagatgcggcaaagctccagctggacgcgagtcttccagtcctggtgggatcggaacttgggcaggggaagctccgccccctcccagtgaccttcgctccacatcccgaaactccacccgttcccactgccctgggcagccatcttgaatatgggcggaagtacttccctcaggcctatgcaaaaagaggatccgtgctgtctcctttggagggagggctgacccagattcccttccggtgcgtgg

SEQ ID NO: 26410 - DNA, 566 bp, Homo sapiens
  misc_feature (1)...(566): n = A,T,C or G
natcgaacttctagtcccngnggngcaattcggcgaagggagcggcgtgccgtccgggtcgcctaggcctggggtcgggagcgcgcacgctgtgcgccctgggcgcgctcgggattctcgcctggcgcggctggggaaggtgaacagtgtggcccgccatgttcttctccgcggcgctccgggcccgggcggctggcctcaccgcccactggggaagacatgtaaggaatttgcataagacagctatgcaaaatggagctggaggagctttatttgtgcacagagatactcctgagaataaccctgatactccatttgatttcacaccagaaaactataagaggatagaggcaattgtaaaaaactatccagaaggccataaagcagcagctgttcttccagtcctggatttagcccaaaggcagaatgggtggttgcccatctctgctatgaacaaggttgcagaagttttacaagtacctccaatgagagtatatgaagtagcaactttttatacaatgtataatcgaaagccagttggaaagtatcacattcaggtctgcact

SEQ ID NO: 26411 - DNA, 460 bp, Homo sapiens
  misc_feature (1)...(460): n = A,T,C or G
cgccccattgatgccctcgganattgangtcntctaaaccagctggnggaattcccgtctttacaaaacataaaaaaattagccgggtgtggtggcgtgcacctgtgttctcagctacttgggaggttgaggcgggtggatcacttgaactcgggaggtcgaggtcgcagtgaactgtgattgtgccactgccctccagcctgggcaacagagcaagaccctgtctcacaaaaaacccaaaaaacaacccaaataggaaacaaagaacagcagtagaggcagtgccatttcagaattcctccatctcttttcagggagggatataagaccttcttcaacacactctaccataacaacattccccttttcatcttttctgcgggcattggtgatatcctggaagaaattatccgacagatgaaagtgttccaccccaacatccacatcgtgtctaactaca

SEQ ID NO: 26412 - DNA, 460 bp, Homo sapiens
  misc_feature (1)...(460): n = A,T,C or G
cgcccgaattgatgcccctngnnnatgatgtcctctagaccagctggtggaattcgctgtatggagcctacctccgcatccacgcgcacttcactgggctcagatacctgctatacaacttcccgatgacctgcgccttcataggtgttgccagcaacttcaccttcctcagcgtcatcgtgctcttcagctacatgcagtgggtgtgggggggcatctggccccgacaccgcttctctttgcaggttaacatccgaaaaagagacaattcccggaaggaagtccaacgaaggatctctgctcatcagccagggcctgaaggccaggaggagtcaactccgcaatcagatgttacagaggatggtgagagccctgaacatccctcagggacagagggtcagctgtccgaggaggagaaaccagatcagcagcccctgagcggagaagaggagctagagcn

SEQ ID NO: 26413 - DNA, 450 bp, Homo sapiens
  misc_feature (1)...(450): n = A,T,C or G
nattgatgactcttagacattgtggccgtattccgagaccaagcaggagaaggcgatggcgcacgccgaccccacggagctggcgctgagcggcctggaggccttctctttcgactacatcgtcaagtggcccctttcgctcatcatcaacaggaaagccctcactcgctaccagatgctcttcaggcacatgttctattgcaagcacgtggagcggcagctctgcagcgtctggatcagcaacaaaaccgccaagcagcactcgctgcactccgcccagtggtttgctggggctttcactctgcggcagcgaatgctcaacttcgtccagaatattcaatactacatgatgttcgaagtgatggaaccgacctggcacatcctggagaaaaacctgaaatctgcctccaacattgacgacgtccttggccaccacacaggcttncttgg

SEQ ID NO: 26414 - DNA, 460 bp, Homo sapiens
  misc_feature (1)...(460): n = A,T,C or G
gccccccattgaaaaccntnnnnnnatgatgtctcttataccagctggtggaattcggcatatcttcattgtacaagtcttgggaaatacagattccaaggagaaaatataaactatcagtagttccaccacccaaagacaaccactttgaacacagtatggtatttccttgcaggcttttttccatgtgtccgtaggtacatagagttaaataaccaggaacatgctgctggaggaggtctgttgctgtttttactctatcatgagcattctctgatgtctttaaagactctttagggccaggtttggtggctcaccctgtagtcccagcactttgggaagccaaggcaggaggatcgcttgagcccagcagtttgagaccagcctgggaaacagtgaaaccccatctctaccaataaataaataaataaataaataaatattagccagacttggtggg

SEQ ID NO: 26415 - DNA, 449 bp, Homo sapiens
  misc_feature (1)...(449): n = A,T,C or G
cactgggaccctccgaaactgaggnctattgaganagncnggnggaattccagccatttgggtcgtggagtgcgagcacggccggccaatcgccgagtcagatgtccaggaggggcgcggccattcgccgcccggcccctgctccgtggctggttttctccgcgggcgcctcgggcggaacctggagataatgggcagcacctgggggagccctggctgggtgcggctcgctctttgcctgacgggcttagtgctctcgctctacgcgctgcacgtgaaggcggcgcgcgcccgggaccgggattaccgcgcgctctgcgacgtgggcaccgccatcagctgttcgcgcgtcttctcctccaggtggggcaggggtttcgggctggtggagcatgtgctgggacaggacagcatcctcaatcaatccaacagcatattcggttgcatct

SEQ ID NO: 26416 - DNA, 552 bp, Homo sapiens
  misc_feature (1)...(552): n = A,T,C or G
cattcggaacaccgntcagngaggggaanccatggaactactcttaagagcggcacagctctcagcccctccctgccccatttatgaaacaggaaaggatgttctcagatttacttacaaggtacaaacagatgaaagccaacacagtggttctagacattctgctagggagttgaaagcaggggtcccattcatatatcctggcttggaaccaagctttttctctctctgtgaatgaataaacagtgagaaaagagaggctgtgataagtaaacacatgcccaattcatctgaaagcaaccccatcccttcctctctatcttggcatttactgtagagagagagcactgttagtttccacgggtgtcattctcctcttattcttacatgcagatgctcagttttattcaggacagcaattcaccaactaaaagagtaaaaagttcccaacctctcttgcagtaagactgacctaagtgccagccaattagatgtgaccacagtgtggtgtgggactctggggagactgctcagatcgaagtgacccagctg

SEQ ID NO: 26417 - DNA, 443 bp, Homo sapiens
  misc_feature (1)...(443): n = A,T,C or G
ggtaacactgaacatcngatactgnggctacgaaaaaccggaannaaacctnactcgtctcccacctgtcacgaatggccagcgccttagtgataaatattttataggaatgtcttcccgaggctgtgctggagacttccctggccgcacagtgaccgttcagagcccacgataagcaagccgaaacccggtttggcgcagaggcgcgcaaggagagaggtctgtcctttgactctgtgagttgggcagcctaacatggttattgttaattgacggtaaagtatctcgaggtccgntagtctatgtttttgttcttatttatcactgtgtatgtctttgggcttctcttcactttgtatggcagattattttgaaaaagtttacccttgtgtttgtctcagctgttttaaaggggatctgccgtctagggagttccccttgaa

SEQ ID NO: 26418 - DNA, 454 bp, Homo sapiens
  misc_feature (1)...(454): n = A,T,C or G
gcccgaaatgatancctccgaaaactgngccctacgganagnctggnggaattcgnggcagactggagacctggggctacgtggcagcagcttatatgggagaagtgttgggatggcccggagaaggggatgaggaatgaagggtgacctcccagatttggggccacagcagccggccaggcgacagcaccatggccaagtagggaaagacagaagaaggaacagttgtgggaaagaaagctaaaggtatgcccatgggggtgccagattctgacactactgcctgacaccccacagcctaaagtagtgctggacagttccatagagcataactcaggagcaccaggggttatgggttcagcatcggctgcccctcggagcagggcagggtttctcacctgtagcactgctgacactggggccggatcctctgtcacaggagctgtcctctgtg

SEQ ID NO: 26419 - DNA, 456 bp, Homo sapiens
  misc_feature (1)...(456): n = A,T,C or G
atgcgtgnnnttaatagactgaagtactngcggnggcanncgataacttcttttcatttagcatgatgattttgagacttatccatgtgcttgtttatattagtagctcattttttattgttgaataatagtttgaataatattgttgacagtagtcaattggatataccaaaatgtgtttattcaccagttgaaggacttttgagtttttacttttgggcttttatgctgctgtaatcatccgtgtgcaggttttgatgtatgcatgtgttttcttttttttttttttttaaaaaaggaattttgttttgtcccccatatgggagggcaggggcccattttgggttaattgaaacctccccttcttgggttaacgcatttttcttgcctaaccttccaaagaagtgggaattacgggcccttgccaccaccccaatttatttttttttttttttn

SEQ ID NO: 26420 - DNA, 545 bp, Homo sapiens
  misc_feature (1)...(545): n = A,T,C or G
nttcgaacatcgttcactagtccagagtggtggaattcactgtgcactacaccaggcccatgcgcgacattgacacgctgatgcaggaatggtccccggagtttgaagagcttttgggcaaggtaagcctgcccacggcagagattgattgctgcctggcagagtacattgacatgatctgtgccattctagacatccctgtctacaagagtcggatccagtccctccatctgctcttttccctctactcagaattcaagaactcacagcattttaaagctctcgctgaaggcaagaaagcattcactccttcatccaattccacctcccaagctggagacatggagacattaaccttcagctgagacacttcccaagctgctgtttcaaggctgagctggcccctctgccccagctgagatggacagatcgttgtcagctacttgatgtccttgcccatgccacagcttggctcangggcagtgcatgtcctgctgccctctctgccagagggcacagaacatgtttgtttaatgaacctgccn

SEQ ID NO: 26421 - DNA, 548 bp, Homo sapiens
  misc_feature (1)...(548): n = A,T,C or G
cataggatcactgtccgagaggnggcatctttagaagatcctcttcctcttcttcgcatcatcttcctcttcgtcttcctcatcctcatcatccagttctcgaagccgctcacgatccccatccccccgccggagaagtgacaggaggcggcggcgagcatgtgttcagggagcgccatgcacctgggatgcaggtgcctaagagttgagtcttgaattgtcttatgtttggggggctgatgacaccctcttttgtcaggtacagctcttatcgttcacatgaccattaccaaaggcaaagagtgctacaaaaggagcgtgcaatagaagaaagaagggtggtcttcattggaaagatacctggccgcatgactcgatcagagctgaaacagaggttctccgtttttggagagattgaggagtgcaccatccacttgcgtgtccaaggggacaactacggcttcgtcacttatcgctatgctgaggaggcatttgcagccattgagagtggcacaagctgcggcaggcagatgagcagccctttgatt

SEQ ID NO: 26422 - DNA, 452 bp, Homo sapiens
  misc_feature (1)...(452): n = A,T,C or G
gcnagtacctggacctaccgatcggaaagctacgnanagncnagaggaatancgggagctgccgacggacggagcgcccccgcccccgttttgtcgcccgcccgttttcgccatgcccttctccagcagccacaacgcgctgaagctgcgcttcccggccgaggacgagttccccgacctgagcgcccacaacaaccacatggccaaggtgctgacccccgagctgtacgcggagctgcgcgccaagagcacgccgagcggcttcacgctggacgacgtcatccagacaggcgtggacaacccgggccacccgtacatcatgaccgtgggctgcgtggcgggcgacgaggagtcctacgaagtgttcaaggatctcttcgaccccatcatcgaggaccggcacggcggctacaagcccagcgatgagcacaagaccgacctcaaccccgaca

SEQ ID NO: 26423 - DNA, 539 bp, Homo sapiens
  misc_feature (1)...(539): n = A,T,C or G
nattgaaacactattccagagnggcgtaattcggcggcaggaaggggcggcccttacctggcaggtctgggcgcacctttagcaggaggactccgtggggctccaccagccagaagcctttggaaggcaacgaaggcaatgctgctccctgagtccagtccccgcccccaaacccagcccaggtgccttcagctacttcggcttcttaaaccctgcagtgttaaacagaggcattgagaaaggggaaaggcgggtatttttaaaagccaaagattgacccagttacttgagggtagggaggcgggcccagtgcaggaggctgcatccctggcctgctggtgcccaccgggggctgtgcctgtgccgggccgcagggaagctggctgcccccattcctgctgctgctgctgctgctgctctgtggctggttcaaagactgagcgaaaggctgtccggagggcagaccaggtgccttgccgcagagaaaacaccaaagtctcctgttcgctcataaagaagtttttgggatgggagagaat

SEQ ID NO: 26424 - DNA, 461 bp, Homo sapiens
  misc_feature (1)...(461): n = A,T,C or G
aactgagaccntccgaagngncgnggaattcgctgaaggagaatgaagaccatttctttaagcatcaggcagatatgcttctgcacggaatcaaagttgtatcctacggggactgttttgaccactttccaggatatgtgcaagaccttgccactcagatctgcaaacagcaaagcccaggtatgggatctggcttcactttcctttttctttcttttttctttttttttttggaaacggagttttgcttttgtggcccaggctggagggcagggcccccattttggttaaccgcaacctccgcctcctaggttaaggggattttgcctcacccttccgaggggctggaattacggccatgccccaccatgccgggttaattttgtattttgggaaaaaaaagggttcacccgggggggcaaggcgtggcttaaactcctgacctcaggggacccccctgc

SEQ ID NO: 26425 - DNA, 453 bp, Homo sapiens
  misc_feature (1)...(453): n = A,T,C or G
gcccgaattgataccatcngaaactgaggacttccggaaagncnggnggaattcccagggcctgagagtgacttctgcctaaaggtagaggctgctgttcttggggcttccggaccagccgactcccagcacgagagtcagcatgggggcctggaccaagacggggaggcccggcctgcccttgacggtagcgccgccctgcaacccctgctgcacacggtgaaagccggcagcccctcggacatgccgcgggactcaggcatctatgactcgtctgtgccctcatccgagctgtctctgccactgatggaaggactctcgacggaccagacagaaacgtcttccctgacggagagcgtgtcctcctcttcaggcctgggtgaggaggaacctcctgcccttccttccaagctcctctcttctgggtcatgcaaagcagatcttggttgccgg

SEQ ID NO: 26426 - DNA, 441 bp, Homo sapiens
  misc_feature (1)...(441): n = A,T,C or G
nggagaatgagacatcgaaactgaggcatcggagaggcaccaagnattgccagactcctgcctgctggtgtggaacatggcgatttccctcggggaacgtatcactgggggtttcctcctgccagagctccagcccctggcaggctccctgcggcgggatgtggttgaagggaacttctacagtgctacgctggccggggaccactgctttgatgtcctagacctccactttcacttccggcatgcagtacagcaccgtcatcgggatggtgtccactgggaccagcatgcacaccgccacctctcacacctgcttctgacccatgtggctgacgcctggggcgtggagctgcccaagcgtggctatccccctgacccgtggattgaggactgggcagagatgaatcatccattccagggaagccataggcagaccccagg

SEQ ID NO: 26427 - DNA, 532 bp, Homo sapiens
caatcggatcactagtccagagaggaggaattcccgtcacagcgcagagcagccggcgagcggcagcagctccgggctcgagagcccgcgcccatgccagtgcccatgcggggccgccgccagtgacgccggagaggtgttccccccacactggggctcccactactgcgaggagtgacccacgaaggccacagagatggccggggcttcggtgaaggtggcggtgcgggtccgccccttcaattcccgggaaatgagccgtgactccaagtgcatcattcagatgtctggaagcaccaccaccattgttaaccccaaacagcccaaggagacgcccaaaagcttcagctttgactactcctactggtcgcacacctcacctgaggacatcaactacgcgtcgcagaagcaggtgtaccgggacatcggcgaggagatgctgcagcatgcctttgagggatacaacgtgtgcatcttcgcctatgggcagacgggtgccggcaagtcctacaccatgatgggcaagcaggag

SEQ ID NO: 26428 - DNA, 450 bp, Homo sapiens
  misc_feature (1)...(450): n = A,T,C or G
ggcagaacggaaacctacgaaacggaaagatcncgananctggngnaatatatgaagcatagagggggattctctaaatagtgcggcattttttttctggagatttattgtctataatctgaagaaagagaaaattagaacaaacaacaaaccaaaaagataataaataaaccaaaatgcatcttgctaaattttgactctaattctgatacttaaaagggggaataggggctacttgtctgttagaaaattgctaagtccttaattgtgatgaaaagtctcaaaagtgatgtgctcaactaagattataatttctttttagtttttatgattacagatttaatgatatggcaagaaaaaaattaaaagcagaaatttacaatctattaaattagaaaatattcagttccctgaaatatgttgagatggataagtcatgactgtatttaa

SEQ ID NO: 26429 - DNA, 454 bp, Homo sapiens
  misc_feature (1)...(454): n = A,T,C or G
atcgccaccattatggagngcgctggaanncccagagcggatgtgaggggcgccgatggcggagggaacggcggaggctcctctagagaatggaggtggtggcgactcgggagccggagctttggaacgaggagtggcgcccattaagcgtcaatacctcaccaccaaggagcagtttcaccaattcctggaagccaaagggcaggagaagacttgccgggaaaccgaggtaggagaccctgctggcaatgagctggctgagcctgaggctaagcggatccgactggaggatggacagacggcggacgggcagacggaggaggcagcagagcccggggagcagctacagactcagaagagggcccggggacaaaacaagggccggccccatgtgaagcccacgaactacgacaagaacaggctgtgtccctccctaatccaggagtcggctgct

SEQ ID NO: 26430 - DNA, 531 bp, Homo sapiens
  misc_feature (1)...(531): n = A,T,C or G
ccatcgatcnccagtccagagaggngcgaattcctttaaggctttcgctatgatcatcgacaagctggaggaagatatcaacagctccatgaccaacagtaccgctgccagcaggcccccggtcaccctgaggctggtggtgccggccacccagagcggctccctgattgggaaaggcgggtgtaagatcaaagagatccgcgagagtacgggggcgcaggtccaggtggcgggggatatgctgcccaactccaccgagcgggccatcaccatcgctggcgtgccgcagtctgtcaccgagtgtgtcaagcagatttgcctggtcatgctggagacgctctcccagtctccgcaagggagagtcatgaccattccgtaccagcccatgccggccagctccccagtcatctgcgcgggcggccaagatcggtgcagcgacgctgcgggctacccccatgccacccatgacctggagggaccacctctagatgcctactcgattcaaggacaacacaccatttctccgctcga

SEQ ID NO: 26431 - DNA, 446 bp, Homo sapiens
  misc_feature (1)...(446): n = A,T,C or G
gggagtaacggacgtccgantacgganacctccgnanaacaagagcaaagacctaaattaagacctaaaaccatataacccttagattataacataggccatttgcttcatgacattgaatgtagcaataaatggttggatatgacacgaaaggcacatttcacaaaagaaaaaaatagacaaactggacttcatgaaaatttaaaagttgtatgcatcaaaagacaccatcaacagagtaaaaaagcagcccacagactgagagaaaatctttacaaaccatatatctgataagggattaatatccacaatatatagagaactcctaaaactcaacaacaacaaaaaagccgattcaaaaatgggccatcctgggtgccgtggtatgtacccagttattcaagaggctgaggcaagaggatcacttaatccaggagctggagtcn

SEQ ID NO: 26432 - DNA, 434 bp, Homo sapiens
  misc_feature (1)...(434): n = A,T,C or G
accgaacgattcgaacncggacctccgaaanctcgacaggtgangncaagcccagcttcttccaggactgcctgatggttttgtttgacgacctttagcagcacatccggaggcctgtggtgctgcagtcgatcctcagcctgatggacaggggcgccatggtcctgaccaccaactatgacaacctgctggaggcctttggccggcggcagaacaagcccatggagtccctggacttgaaggacaagaccaaggtccttgaatgggcaagagggcacatgaagtacggcgtcctccacattcacggcctctacacggacccctgcggggtggtgctggacccatcggggtataaagacgtcactcaagacgcagaagtcatggaagtcctccagaacttataccgcaccaagtcctttctgtttggggctgcg

SEQ ID NO: 26433 - DNA, 459 bp, Homo sapiens
  misc_feature (1)...(459): n = A,T,C or G
naaataagagcatcctagcagcggcggaattcaggagttctccaacccgcgctgcggagtccttcctcgggaggcggcgaaggcggtccaccctgcgcgtgatccttcatgcccggcccctgcccctccctccgggtggaacttccccctcaccgccagacttaagctgaggatcgttggatctctggcggggtgcagaactgagcccaggccacagtaccctattcacgctctgtgcttgtgccaaggtaaaagcagctgttaagtatgcccttagcgtaggctaccgccacattgattgtgctgctatctacggcaatgagcctgagattggggaggccctgaaggaggacgtgggaccaggcaaggcggtgcctcgggaggagctgtttgtgacatccaagctgtggaacaccaagcaccaccccgaggatgtggagcctgccctccggaagactc

SEQ ID NO: 26434 - DNA, 462 bp, Homo sapiens
  misc_feature (1)...(462): n = A,T,C or G
cctgagaacctccgcagngncgnggaattcatccgcccccggcccagaagggccgggctcggtcatccccagtcccgtcgcggccactgacccttgagatcagccctcccctccccaccttcccgtgccaggccagcccagggcccgaagcccacccactcgcgtctctagcagccgctcttgtcctctgggtacggctcgcgggagtgttggttaccatggtgaagctggcagccaaatgcatcctggcaggagacccagcagtgggcaagaccgccctggcacagatcttccgcagtgatggagcccatttccagaaaagctacaccctgacaacaggaatggatttggtggtgaagacagtgccagttcctgacacgggagacagtgtggaactcttcatttttgactctgctggcaaggagctgttttcggaaatgctggataaattgtgggagagtc

SEQ ID NO: 26435 - DNA, 545 bp, Homo sapiens
  misc_feature (1)...(545): n = A,T,C or G
cattcgatcactatccaggggggaatcgtggatggcctggaccgcgccgggaagagcacgcagagccgcaagctggtggaagcgctgtgcgccgcgggccaccgcgccgaactgctccggttcccggaaagatcaactgaaatcggcaaacttctgagttcctacttgcaaaagaaaagtgacgtggaggatcactcggtgcacctgcttttttctgcaaatcgctgggaacaagtgccgttaattaaggaaaagttgagccagggcgtgaccctcgtcgtggacagatacgcattttctggtgtggccttcaccggtgccaaggagaatttttccctagattggtgtaaacagccagacgtgggccttcccaaacccgacctggtcctgttcctccagttacagctggcggatgctgccaagcggagagcgtttggccatgagcgctatgagaacggngctttccaggagcgggcgcttcgggtttccaccagctcatgagagacacgactttgaactggaagatggtgcatgcttccanaagn

SEQ ID NO: 26436 - DNA, 465 bp, Homo sapiens
  misc_feature (1)...(465): n = A,T,C or G
naaataagagcccagtaagcagcgncgnggaattcctcagccacgctgtgtatcgcgtacctgatgaaattccacaacgtgtgcctgctggaggcgtacaactgggtgaaagcccggcgacctgtgatcaggcccaacgtaggcttctggaggcaactgatagactacgagcgccagctctttgggaagtcgacagttaaaatggtacagacaccttatggcatagttcccgacgtctatgagaaggagtcccgacacctgatgccttactgggggatttagtgccactgaagcctgcgtcagcagcccgagcggggccggcatctgctccccgccgtctgctccctctccactctcttctcaaatggctgacttctggttctccctcaagtgttttttacactgggtgttcaaatttattttaagagatagggagggaggggacataaagggaatgcatacatt

SEQ ID NO: 26437 - DNA, 461 bp, Homo sapiens
  misc_feature (1)...(461): n = A,T,C or G
ccttgattgacgacccttagnccgngcggtggaattcgacgcctggccggtgcggccccgcattcacgtgctgcagattttggggcaatcatttcacctgactgaggaggacagcaagctcctcgtgttctttagaactgaagccattctcaaagcctcctggccccagagacaggtagacatagctgacattgagaatgaagagaaccgctactgtctattcatggaactcctggaatctagtcaccacgaggctgaatttcagcacttggttttacttttgcaagcttggccacctatgaaaagtgaatatgtcataaccaataatccatgggtgagactagctacagtgatgctaaccagatgtacgatggagaacaaggaaggattggggaatgaagttttgaaaatgtgtcgctctttgtataacaccaagcagatgctgcctgcagagggtgtga

SEQ ID NO: 26438 - DNA, 463 bp, Homo sapiens
  misc_feature (1)...(463): n = A,T,C or G
ggnaggcatcgacccctcgnnnatgatgatcactagaccangcggnggaattcgaacatcagaaatggtaactacaggaggaaagatgtaagatttgggggctatttaaatttctctctccttttttgcttttttcttttctttctttccttcctttcttttctttctttctttctctctttctttctttctttcctttctttctttcttctttctttttttttctttttttgacggagtctcactctgtcacccaggctggaatgcagtagcaccaccatggctcactgcagcctcaacctcctgggctcaagcgatcctcccacctcagcctcccaagtagatgggacacaggtgcacaccaccacacctggctactttttatatttttttgtaaagacagcatcccacgatgttgtccaagctggttttgaactcctgggctcaagagatcctcccaccn

SEQ ID NO: 26439 - DNA, 462 bp, Homo sapiens
  misc_feature (1)...(462): n = A,T,C or G
catcgtcgacctcgtcagngncgngcaattagctttctggcttcatttttgactcacaatgaggtcatggtcattcataagctgcaggtgtttggtttgttgaatcgttttgcatgactgatatcagttcaggtttcccaaacttgttctgtggatcataaacatctataagattaaagaccatggaagtcatgtttttgtaactttttgtttaatacatagagaaaatgagactcacatagtgggttgaccaggccttcaaagcaaggtaatggggacacctgaataaaagcctcactgtcttcactcccattgctctggtgtcttacatataggcctttcttcttactcctgttaagctgccttgtatttttttgacctatcaaaatcatttttcaattacttgtttcccctagatttcagatgtcacggtatgaaaggttttatatatatttaaaaaat

SEQ ID NO: 26440 - DNA, 482 bp, Homo sapiens
  misc_feature (1)...(482): n = A,T,C or G
agggcatgcccggnncgnnttttgactgacgtccattagaacangcggnggaattccaaatccccatccctaatagttactggtgaacagatggactcatccctttcttattcgagaagccccatcacatgctatgtcctatcacatgctataccagaagctagggctgcagaggtggatgacgcccccagatccctgccccctaggggcttaagagtctagcaggggcacctgacccaagtaagtacaatgcagggtaaggctggctaaagagcacgtgaaaaggagctgggaacacagctggtcagcagagcttcagggagggctgaaggacaggctgcacacgaggcactcagaaaacagcagtgaaacagaaggcaggcagcaacggcagtggtactggacctggggaacaccaagttcaagctctatatacaacgaggacaaaaatgaaccaggctccctgaaagcagggaatctaa

SEQ ID NO: 26441 - DNA, 462 bp, Homo sapiens
  misc_feature (1)...(462): n = A,T,C or G
ntttcgattgccattcgtccagagcggnggaattccccggcttgtcccacatcggcgccatcagagctggagcaccttcaaatctatgacactgggctcgctgccccccaagccccgagaacggctgactctgcaccgggcagcagcctgggagcccacagaaccaccggatggtgacttccagacagaggtgtgagtgccacgctggactgcccactgcatataaatatatatatctctctattttcacactccactttggaactacccaggagccagcgccctctcccctctcccgagggctgggcagggaggcgccgtggactcagccaggctgggggagccggacatggcttggcctggggtcccagggcccttccttgtttctcagaggcccctcagccactggaaccccatcttcagcccagcctgtccgtccctgtcccgggctggggagggggg

SEQ ID NO: 26442 - DNA, 443 bp, Homo sapiens
  misc_feature (1)...(443): n = A,T,C or G
nactcgagactgaangcctngcggnggacttcccactttcctggcctaggcccaagggacacagcaggagaagcagtgtgataggagagaggctagggttaaattcatctttacacagcgccggatggatggaaatcttggctcacataaaagacagactcagggaggattttatgacaaaagtccctcctttgagggcaggattcccccaggaatcctggacactttagtgagaactggaccagcccttggcacaaaaccctgcctgccctgtcccccactcccaccccccagggaattctaggtgaaaatgtgaagctcagggcacagcaagcgcatgacacgggtgtattacattcggtccgagtgtgtccttagtttccctgtgtgcaaaatggggctagtccaggctcttcccacctcactgggacaattgcaagggn

SEQ ID NO: 26443 - DNA, 458 bp, Homo sapiens
  misc_feature (1)...(458): n = A,T,C or G
nntgatgaccctcgtccatgcggnggaattctgttgttgccaccctgtgtgacttttgaagctgtaaaatgagcttccagggcttgggtggcgtcggggcagggccgccgaggctgggaggaagcccttctgccttttgctggtgtttctggaatttgctttccctcacctctcacttccttctagaaggagcttcctgactggaaccagagaatgcatgtctgtccacttggtggctgctgggtggggccgggaacaagggcccctgaccctgtgtgctggccgggacctgccaccagccccccagcctgcttcttccccttaagctttgtgcccctggatgcgctaacattcactcttgtttgtccctggactggccatgaagtgaggagatggttatttaaagagaattccctatttatttgacaaaaaatccagttaatatattaatgtgaaat

SEQ ID NO: 26444 - DNA, 460 bp, Homo sapiens
  misc_feature (1)...(460): n = A,T,C or G
nntgatgaccttcgtccgngcggnggaattcgtttcaccatgctggtcagtctggcctcgaactcctgacctcaagtgatccacccgcctcggcctcccaaagtgctgggattacaggcgtgagccaccgcgcccagcccaaagcaggtacatttttatccccatttcacagatgaggaatctgaggctcagagaggcaaagtctctcccaaataccacagagcttgtgaatggcagaactgggaggaaagtccccttccctgaacctcagtgttcccatctgcaaactgttcctccaggagaggctggaaggggccagcctcgtgcgctcccggaggtccagctgccctcgggacaggcaagtggctgtccaggccactgcatggtgtatcactttcagttcctgggaagaaggttaaatacctccgaggggcccattgaggctgcggcagcaaaggag

SEQ ID NO: 26445 - DNA, 464 bp, Homo sapiens
  misc_feature (1)...(464): n = A,T,C or G
cttcgattgcagnatccctagtccagtgcggtggaattcctctggtggaggacgggatccccgagttcagtcacgagactgccgactgccagtacctcttctcttggtacacctcagccgtgtgtcctctgggggtgggctttgacagcgagaatcccggggacgacgggcagatgcacaaggggctgtcagaacggagccaggcagtcggcgcggtgctcagcctgctgctggtggcgctcacctgctgcctgctggccctgttgctctacaagaaggagaggagggaaacagtgataagtaagctgaccacttgctgtaggagaagttccaacgtgtcctacaaatactcaaaggtgaataaggaagaagagacagatgagaatgaaacagagtggctgatggaagagatccagctgcctcctccacggcagggaaaggaagggcaggagaacggccatatt

SEQ ID NO: 26446 - DNA, 266 bp, Homo sapiens
  misc_feature (1)...(266): n = A,T,C or G
gataagcctcactagtgccgagaggggccgattctattcgctcaactctcacatctcattcagcaccagcggatccacacgggagaaaggccatatgtgtgtccgttgtgtgggaaagccttcaaccatagcactgttctgcggagccaccatagggtacacactggggagaagcctcacaggtgcaatgagcgtgggaaaaccttcagtgtgaagaggacactgctgcagcaccagaggatccacaccggtgagaagccctaccn

SEQ ID NO: 26447 - DNA, 460 bp, Homo sapiens
  misc_feature (1)...(460): n = A,T,C or G
cttgattgacgtccctagtccgtgtggtggaattccgccagagcacctgaagaagcaggccgtgagcgaggctgcgagtgccctgggcgccgtttctcacgcagtgaatgcttttccaggcctctgttgcttcctgcaccacacctggtggggtgggagcgtcctctaggtgcccctagttctttgtcctgcctcccagagggaggaaaagcccctgggggcttctggctccctgagattgggctctgagacgagacgggttcccaaggccctggtggggctggagtctcacctgtttgcatggagaaatgggctggccccacagcctcacaggagcagtttgtgggctggtttccccaggaatccagaccctaacccgtgagaatctggattttggcttgtgagccctgcttatttggagccgggtctagagggaaccctctatcagcctcaggaaaan

SEQ ID NO: 26448 - DNA, 477 bp, Homo sapiens
  misc_feature (1)...(477): n = A,T,C or G
agggcnaatcgatagcatacactaggccgngcggtggaattccgaaattcaagatcaaggtaccagcagattcactgtctgttgagggcaaacttcctagatggcgatcttttctctaatctcacatggcgggaggggcaaggcagctctctggggtctcttttatgaaggcgcagtgagaagctcaacaggtttgtgaaaagaaaaaaaaatacataagggcacaaatcccattcacctaatcacctaatcgccttccaaaggctccacctccaattaccatcatgttggggattaggtttcatcatgtcaatcttggtgtggtgggtgatggggtagagggctggtctataaacattcagaccataataatcagtaaataaacaggcccaggatctaacccagatatgatcagttacagagctagtgatcttcaccagcctgggcaacacggtgaaactccttctttacaaaaaa

SEQ ID NO: 26449 - DNA, 462 bp, Homo sapiens
  misc_feature (1)...(462): n = A,T,C or G
ntttgattgacattcctcagngcggnggaattcggcctcttcattctgcaggaggtggaaaggacacctgtagacaggtgatgctcacccctcacctggcgccatggggctgggaggtgagcggctggcatgtttgttcctagggagcaccatgtgagcttaaggctcccctgaccggccccaccacatggcccagcctcctagcacagcagcgctgacctcagtgcagtctgaggattggaatccaccatgagatgatgtgagagctgtgtgccccaggatcaactttttctccaacttggccatcagccagcgagttgctaaggacctgagtcagcactcacgttgcctattcacactccgcttgaaagtccggaaggtggctactgcaaaatcacccctctgagaagtcctctctccacatcttgtccccctttgtgaagacccctagttcgctctgca

SEQ ID NO: 26450 - DNA, 462 bp, Homo sapiens
  misc_feature (1)...(462): n = A,T,C or G
nttcgatgtcactcgcccagngcggnggaattcgcagttctcaacacaccaagccttattcccactcccttgggttgctgctgagccaaatagcatctttacagaggaagtgggatcagaggcaggaagtgtggaaagttgctaagaagcagggcttgcctctgtcctcccggggactccacagggatattcgtgcagggcaggggctctgtgccagccctgctctctcagatgccacagccactctgcagaggtgactcttggagctggaggaagtcaaaactgggccactgtttgtactgatggtgtatcagcatgagcagcgtggccctggccccacactcccaaatctgccactccatagacccacttgcctcaaggctttatatttggctgctttcttacaatgagaattaagattnttaaactgaagttgaccatacaggttgcattagccctaan

SEQ ID NO: 26451 - DNA, 477 bp, Homo sapiens
  misc_feature (1)...(477): n = A,T,C or G
aggggnnnaatcgatcgacgtcactagtccgtgtggtggaattcctttgctgacatcatcaccgtgtaccagcagaaggtggaggatgtggtgctgcccgagaaggtggacgtgctggtgtctgagtggatggggacctgcctgctgtttgagttcatgatcgagtccatcctgtatgcccgggatgcctggctgaaggaggacggggtcatttggcccaccatggctgcgttgcaccttgtgccctgcagtgctgataaggattatcgtagcaaggtgctcttctgggacaacgcgtacgagttcaacctcagcgctctgaaatctttagcagttaaggagtttttttcaaagcccaagtataaccacattttgaaaccagaagactgtctctctgaaccgtgcactatattgcagttggacatgagaaccgtgcaaatttctgatctagagaccctgaggggcgagctgcgcttn

SEQ ID NO: 26452 - DNA, 478 bp, Homo sapiens
  misc_feature (1)...(478): n = A,T,C or G
agcgtnncaatcgatcgcgtactctgtgcggtggaattcttcccctaggacagggtccagtccttacaacaacccaattacagtgtcttgtctgaggcccccaggtagtaagtggtggaaccaggatttgaacccacgatggccgggctcagtctgtttccactactctcctatgccacagagacccgctgtccagacaggctggagagaggagtgagagaaagaattttcagtcccagtcaagactggccaaggagccaagctcaagccttaaacttgctggatgcagttgacaaaagagaggaagaggcattagaaaaactccttcaagcacttattccaacattcgcttttgaccacagggtgagttacaccatgacacacaccaaaccagccttgaataccaaggagaggaaatcacaaagaacgccattctgggctagcccagctggccaaacggcctctgcagaccatgggn

SEQ ID NO: 26453 - DNA, 478 bp, Homo sapiens
  misc_feature (1)...(478): n = A,T,C or G
ntggtnnnaatcgatcgacgtccactagtccgtgcggtggaattcgccagaaagggggcctgttgtgcacgcttcagggcaagctgcagcccgaggactggacatcattggatggaccgctgcagggcctgcagacactgctgctcatggttctgcggcaggcctccggccgcccccacggctcccatggcctcttcctgcgctaccgtgtggaggccctaaccctgcgtggcatcaatagcttccgccagtacaagtatgacctggtggcagtgggcaaggctttggagggcatgttccgcaagctcaaccacctcctggagcgcctgcaccagtccttcttcctctacttgctccccggcctctcccgcttcgtctccatcggcctctacatgcccgctgtcggcttcttgctcctggtccttggtctcaaggctctggaactgtggatgcagctgcatgaggctggaatgggcct

SEQ ID NO: 26454 - DNA, 475 bp, Homo sapiens
  misc_feature (1)...(475): n = A,T,C or G
atgggnnncatcgatctcataccctatgcggtggaattcgcttaatggaggtcagttctttaaggggtgcagcacttaggttggatcccttgggccgcatggtccttacaagctgaggcaagcctatcgcctctgctccttctcaagactgcacctccttatgtcccctcaggctgtcaccgtgcctactgtggagatggtcaccggcatgagggtgtggaggactgtgacggctctgactttggctacctgacatgcgagacctatctccctgggtcatatggagacctgcaatgcacccagtactgctacatcgactccacgccctgccgctacttcacctgagggccgtgaggagaaggtgggctgcgccccacagaactggcagcagcttctccactgtcatcaaactggccatgtcctggccccgtctccaccaacctttgtgtgacaaaaacaaggacaaattcctgct

SEQ ID NO: 26455 - DNA, 431 bp, Homo sapiens
gcatttttctggggggatgtccattttggagggatccattttgatcctttgtactctataatgtgaactttcccctgttccaacacttaaaagagaattattagcacataatctaaaagatggaatttttttttttttttttgaaacagagtctcgctctgtccccaggctggagtgcaggggcgcaatcttggctcactgcaacctctgcctccggggttaaagcgattctcctgcctcagcctctggagtagctgggactactcgggcatgccaccacgcccggttaatttttgtatttttagtaaagacagggtttcaccatatgggccaggagggtctcgatctcttgacctcgggatccacctgcctcggcctcccaaatggctgggattacagcactgcgccctcctaggaaattattttttagg

SEQ ID NO: 26456 - DNA, 476 bp, Homo sapiens
  misc_feature (1)...(476): n = A,T,C or G
ggaggnnccattcgatagccgtactcagtgtggtggaattcgttgaggcaaaccctggaaatgccagctctcaggtcaagcaggtgggggaaaaaaggagagggcaggggaccagaagtacaagagagccttttgtgccctccctgcgggccaccaagagaaactgagtactgggacaggtaacctaagtaagagacacctcagccgccacagctttcagagttcttcctgggactccctgggtaggggcgggcgcggctcacgggagacccaggagggatgcctgggaatgactgcgcttgccttgggttttctgtagcggcttctgcggatggacctgcccgtcgcagatgacaacaccgtccacttcaattccaccctcatggctctgatccgcacagccctggacatcaagattgccaagggaggagccgacaaacagcagatggacgctgagctgcggaaggagatgatgg

SEQ ID NO: 26457 - DNA, 476 bp, Homo sapiens
  misc_feature (1)...(476): n = A,T,C or G
ggtggggnatcgatcgagtgcactaggcagtgcggtggaattcaactcagagagcgagcgccgcagtcccagcagcgaggatgaccgggacgagcgcgagtcccgcgcggagatccagaacgccgaggactacgacgagatcttccagcccaggaacagcatcagtcggacgccaccccggagaagtgagcccttccctgcacccgcagaggactgacgcagccacagcaaaggaggcagcaaagcccagccctgccatggatgtgcagatcccggggccaaatatggaggtcctgccccggcccccagtggttgcttccacacctgcacccaaggctgagcctgtcatcatccctgccacccggaacgagcccatcgggctgaaggcctacgacttcctgcccggcgagaagatcccccaccaagccgagctggtggacgaggatgccatgtcacagatgcgcagaggccacgag

SEQ ID NO: 26458 - DNA, 446 bp, Homo sapiens
  misc_feature (1)...(446): n = A,T,C or G
natcgagatcgtatgccatngcggnggaattcgcagatggcaagcccaaaaacttcacctgcgaggtgtgcggcaaggtgtttaacgctcactataatctcacccgccacatgccggtccacaccggagccagaccgttcgtgtgcaaagtctgcggcaaaggctttcgccaggccagcacgctctgcaggcacaaaattatccacacccaggaaaagccacataaatgcaaccagtgcggcaaagcgttcaaccgcagctccacgctcaacacgcatatccgcatccacgcgggctacaagcccttcgtctgcgaattttgcggcaaaggctttcaccaaaaagggaactacaagaaccacaagctgacccacagcggcgagaagcagtacaaatgtaccatctgcaacaaggccttccaccaggtctacaacctaacactccat

SEQ ID NO: 26459 - DNA, 440 bp, Homo sapiens
  misc_feature (1)...(440): n = A,T,C or G
tttgagtttgcgaccatagcccgngcggnggaattcattcttggaaccatggcggcagtggcggcggcctcggctgaactgctcatcatcggctggtacatcttccgcgtgctgctgcaggtaagtctgacggggtttcgggtgggagagggttcccaactcgcgcccctagaacccgcaagactgcgtcgcgattgccgcttcccggacccgtcctattccgattgccgcgatccttgcctgcccaagtgccgctgccggcaccgcgcgccccctgcccattccctgcgccgtcctcctcgcgctgaccctccctagtgcgcccgcgcctgccagggaacaaagactcggggcgcggcgggcgaccgctgcggacgatcacccaggcatttagcgacctacgcggtaagaaaaacccgctacacccggactcgaccccg

SEQ ID NO: 26460 - DNA, 471 bp, Homo sapiens
tgggggcaatcgatcgcgtacactatcagtgtggtggaattcacagagctctgaagtgtcctgggtcaaatgcaacacatcctgtcctgtcttcttaaaggacttttcctgtccaatggcttcccaatgctttctggtgttccaaaatcaatcacacaccacacaggcctaaaccgccatggcccagggctctacctgaccgctggccaacccccaaggcaggttcccagaggcccattgaccaggtgttccattcactcaactcttgaattcatatattaaagtcaactttttagcacctatgggacacagtgatggctttctcgtttcctcattgcccttgagccgtctctgtcagcactgtattgtgggtagttctatttttgccatacttaatttgttctaaactcttgaaacagaaggcattgatttgttgaaacagaagggattgatttggtatatcatgcaaac

SEQ ID NO: 26461 - DNA, 472 bp, Homo sapiens
  misc_feature (1)...(472): n = A,T,C or G
gaggnncaatgattacatactccgtgcggtggaattcgtaaaatgggaataataatagtgcctacctcagaaggttgatgtgaggaatgaaggtattgatacatgtaaacttagagcagtgtgggtacaaaataaacatgatgcaagtgttcaatcactgtttttgggagaatgccatattctttaagccgttaaagaagaaaaaatgattaagaataatttcaaagtaatgcatgtttcaagggctaatgccaggttgctcccagagtggtctctcccagtgtctagaaattttaacatcttatgaaaatgatatatatggtcaaaaatgtatttaacctttcccttggctgccttccagggccagaggaagatcttccaaggaagatggaatacttggaatttgtttgtcatgcaccttctgagtatttcaagtcacggtcatcaccatttcccacagttcccaccagaa

SEQ ID NO: 26462 - DNA, 437 bp, Homo sapiens
catcgctagcattcacaggcggggaattcccatgccccccttgaattcaagatggcagcaggttcaagtggggccccttggatgcctaagcctggggacgactacagctacaatcagttttccacatatggcgatgccaatgccgctggtgcttattatcaggattattacagtggtggctactatcctgcacaggacccggccctggtccccccccaggaaattgccccagatgcctccttcatcgatgacgaagcatttaagcggctgcagggcaagaggaaccgagggagagaaaaaatcaactttgtggagatcaaaggtgatgaccagctcagtggggcccagcaatggatgactaagtcattgacagaagagaaaaccatgaagtcattcagcaaaaagaaaggtgagcagccaacaagccagcagcgggg

SEQ ID NO: 26463 - DNA, 436 bp, Homo sapiens
  misc_feature (1)...(436): n = A,T,C or G
attgattgacgacactanccangcggggaattcgattctcccgtactccctcaacatagggagaagaaaaacaaattttcctttgttttatggaatgagtttatagattcctattctctgtaaccagtgacttcaagtattgttttatctaagcagtggagtgaaggtcatgagcctctgagctggcctgagttacggccacctgggcgccatagtgaaggttatgggataagtctgtgcctgggcaaacctagataacggacatctgggttgcttggcaacggtcacgtgcaatcctgagtttgtcctgcctctatatccctgctttcatgccactgtaagcttgcttcaagctagcccacccccttttgtgaagtgtgtatagaagtcaagtgctgtctttcttccgggcccagtcttttggacgttgagtcag

SEQ ID NO: 26464 - DNA, 486 bp, Homo sapiens
  misc_feature (1)...(486): n = A,T,C or G
cttcggtagcatacaagngccggacattttgcgtacaggcaccagngcagnggcgagatctcggctcactgcaagctccgcctccttggtttacgccattctcctgccgcagcctcccgagtagcaccaagccaggctaattttttgtatttttagtagagacggggtttcactgtgttagccaggacggtttcgatctcctgacctcgtgatccgccggcttcggcctcccaaagtgctgggattacaggcgtgagccaccgcgcctggccatgtttttgatattttatttgtaacttgttggtaaacctaaacctcatgctaaatccttacatcctaaataggatttttcaggtttcatatttctctagtattataatttggttttccctcactcctgattttttcctgatagtttctttactaaaatatcccagcagaccgtgttcacttctcatngaaaatagtgtgggattagacttcatn

SEQ ID NO: 26465 - DNA, 474 bp, Homo sapiens
  misc_feature (1)...(474): n = A,T,C or G
gggtgccggnncgccnnnnaactgagtacatagcacagngcgnggaattcctgacaaccacctcgttgagtggcatcggacacccacgacccacgagacggacggcttccaggtgaaacgggctggggacctgagtgtgcgctgcacgctgctcctcatgctggactaccagcctccccagttcagactggatccccgcctatcccggctgctggggctgcacacacagagccggtcagccattgtccaggccctgtggcagtatgtgaagaccaacaggctgcaggactcccatgacaaggaatacatcaatggggacaagtatttccagcagatttttgattgtccccggctgaagttttctgagattacccagcgcctcacagacctgctattgccccctgacccaattgtcatcaaccatgtcatcagcgtggacccttcagaccagaagaagacggcgtgctatgacat

SEQ ID NO: 26466 - DNA, 492 bp, Homo sapiens
  misc_feature (1)...(492): n = A,T,C or G
ccttgaattgcatatcataggccgngncgngtaattctgaatgaagcactgcggagtagggcggctaaatctcttggtatttgcaatggtctgcatgtgtctcccaaaattcatgtactggaaacttaatccccaatgcaacagtgtgggaggtggggcctaatgggaggtgtttaagtcatgaggcctctgccctcatgaatggatgaatgttgctattttaaaaaagcttgcattggctaggtacagtggctcatgcttgtaatgccagcatttgaagccacttactatgtgggttctagattgactgatgcgaaccatccatgagttaacctaacaatgccataggctggacaccctaactcatatccagtagttcaacaatgtatagccaatcactaatcaatgttatttctgtaaaccaatgagaattcctgtcaaacaattttttttttatcagcccactccttatttccttcacctttaanaacc

SEQ ID NO: 26467 - DNA, 488 bp, Homo sapiens
  misc_feature (1)...(488): n = A,T,C or G
ggggtgtnnaagggattgnnngnncctgatnanccctagagagcgctcgnggaangccacccanctcagcctcccaaagtgctgagattataggcgtgagccaccatgcccagcctgaatggatgtttcttagatttactcactcttggccaaggtttcattagttctggttgatgtaagttctgtgctgtgtgcaacacatttgctaactctgctcaggcctaattctcattcaaaatatgtcaattaatcacaagaggggccatctaagagtaggcataaaggaggtcaaaactagaaaagaaaaaaaaatgtttccactacgttattacctcaagatcttgaaattaagatgtttcaaggttaaaacgtaactttcacctttacaaaaagtatcctattctcaactttacaaggtattaccaactataggtattaacatccctactttatgataggacaattttatatgtttaggccaggcacag

SEQ ID NO: 26468 - DNA, 490 bp, Homo sapiens
  misc_feature (1)...(490): n = A,T,C or G
catcgaatagcctaccntgcgcggnggcanncttcagaatgcaggttcgggatgcgacaacctggacagcggggagcgaaagcgtgaccgggctgcactggcagcctgacctgggacttggagcagggttggggagggaatcctacgtgcgtgcgcagcgaaagggcgggactgagaggggctggcctagggagaggctacactggcagtctccgtgtgtccccgccctctctccgccctggcaggtactgtgatcctagaattgtccaaggaaaaaactaacgagcggctcctagaccggcaggcggcggccttcaccgcttcagtgcaacacgtggaggcggagctgtcagctcagatccgctacctcacccaggtcggtgtgtctggggggttctgcgagcgaaccccagctctgggtcaaagcctcaggcttgggtgatccagggtggagcattaactgggcaggaccagacctccccagccggca

SEQ ID NO: 26469 - DNA, 495 bp, Homo sapiens
  misc_feature (1)...(495): n = A,T,C or G
nattcgacttgcagaccactaggccangncggggaattcgctttaagatttccggggatggaatccgaaatggaaacgcacagcgccggggcagaggagggctttacccaggtcacccgcaagggtggccgacgggcgaagaaacgacaggctgaacagctgtccgcagcaggagagggcggggatgcgggccgcatggacacagaggaggccaggccggcgaagaggcccgtcttcccacccctctgtggggacgggctcctgagtgggaaagaagaaacaaggaaaattccagtcccagctaacagatacacaccattgaaagaaaactggatgaagatatttactcctattgtggaacatttgggacttcagatacgctttaacttgaaatcaaggaatgtagaaatcaggacttgtaaggaaaccaaggatgttagtgctctgacaaaagcagctgattttgtgaaagcttttattctcggctttcaggtg

SEQ ID NO: 26470 - DNA, 492 bp, Homo sapiens
  misc_feature (1)...(492): n = A,T,C or G
catcgaattgcctaccncangccgnggaannccttggcaccagcacccactaggctccagatcggggcctcatgctgacttccgttctcacacaacgagtgggaaacaggtgtcctaacactgtgagagaaaaaatcccaaagtttagtttttcccattcgcttgccctggcctccaggcattcctgcagcagcaaacacatcatcagccttaggagctggcctgtgaggttgaccactctgtaggtggacaagcctcgcccgagaagagacatgagcagttctgcgtaggctttaagacagaatcaacatggaaagcacgacccacatggtttcaatagaacttgcctcctgaacctgactaggttactcgcctgatgaaccagtatctccatcacccgtgggactgacagacccagagtgtcataacctaaaattcagaagtgtagactataatcttaaattattcagcatatgtgcaacagccttgggg

SEQ ID NO: 26471 - DNA, 453 bp, Homo sapiens
  misc_feature (1)...(453): n = A,T,C or G
aggcggcnnnnnnnnaacggatagccgacntctgacncgncnggnggaattncccagccatcccaacatcctgcgtctctacaactatttttatgaccggaggaggatctacttgattctagagtatgccccccgcggggagctctacaaggagctgcagaagagctgcacatttgacgagcagcgaacagccacgatcatggaggagttggcagatgctctaatgtactgccatgggaagaaggtgattcacagagacataaagccagaaaatctgctcttagggctcaagggagagctgaagattgctgacttcggctggtctgtgcatgcgccctccctgaggaggaagacaatgtgtggcaccctggactacctgcccccagagatgattgaggggcgcatgcacaatgagaaggtggatctgtggtgcattggagtgctttgctatgn

SEQ ID NO: 26472 - DNA, 445 bp, Homo sapiens
  misc_feature (1)...(445): n = A,T,C or G
aggcgcctnnnnnnaaccgatagcaaacatctgcggggcaannccgaagccgngtccaggcgttctcacgcccgcaacaattcctgagtagggccttgcttgagttcttcggaaagactcatccacccccacatcgcctctttaggaagtcacttaatgctgggcttcattattcccacatccctttccttactacttgcctgcacttcttgagaaaaagactgcagaaaggagaggtggggctttcagtacaaacaagcaaaccgcaggtccctgtggggggactctccaggaagaagggtaatttcctgcctccttaaattggctgctactgtcagttattttgctcccaaccccagagcttcacttgctccttcacttcccagttccgcaagaaccgtgggcgacagttatggagaagcgtctgcaggaggctcatctgtat

SEQ ID NO: 26473 - DNA, 467 bp, Homo sapiens
  misc_feature (1)...(467): n = A,T,C or G
atggcccnnaatcgatgtcatactcagtgtggtggaattcaccggagcaggcagctgggggtgggggggcggccctgggataggggctgtggcagtacgcggggacccggctgcggtggctgcgggactgacgaagtcttgctgtgtggcccaggctggagtgcccggctggtctcaaattcctgacctcaagtgatctccctcccaaagtgttgcgattgcaggtgtgagccactgcacctggctgctgagaaatctttgcctacagtgagggaaactactaaagttcctggggaagcaaagtagaatttcataagaacaaaatggatggagaggagaaaacctatggtggctgtgaaggacctgatgccatgtatgtcaaattgatatcatctgatggccatgaatttattgtaaaaagagaacatgcattaacatcaggcacgataaaagccatgttgagtggc

SEQ ID NO: 26474 - DNA, 452 bp, Homo sapiens
  misc_feature (1)...(452): n = A,T,C or G
agggggccccnnnnaaccgactagcaaatgatcagacnggngcaattcgaaaccccgtctctactaaaaatataaaggttggctgggtatggtggcgggcgcctgtggtcccagctgcttgggagactgaggcgggagggttgcttggacctggtaggcggaggttgcaatgagccaggattgagccactgcactccagcctggagacagagcaagactctgtctcggggaaaaaaaaaaaaaggtattttccccccccccaaaaagatgttcgggagggttgtccaacattgtgaatgtacctgagcccacaggatcgtatacttaaaaggattgggagggcaaatgttatgttatatatgtcttaccccaatacaaaaggccttctataaatatatagttttatttggggggagctcctctttgtataaaggttatcccggggggggtgn

SEQ ID NO: 26475 - DNA, 474 bp, Homo sapiens
  misc_feature (1)...(474): n = A,T,C or G
tggccgccnnnnttcgatagcactccgtagngacgngcaatncattccccaaagacccacgcctgaaggccactgggagacgcaggaggaggacaaggactcagctgaggacagcagcactgctgacagatgggacgacgaagactggggcagcctggagcaggaggccgagtctgtgctggcccagcaggacgactggagcaccgggggccaagtgagccgtgctagtcaggtgagctgggtctggtggggaggtgtgtgtatggggctctttcctccttgggcccagggctacttccccctcccgctcttctacaggtcagcaactccgaccacaaatcctccaaatccccagagtccgactggagcagctgggaagctgagggctcctgggaacatggctggcaggagccaagctcccaggagccacctcctgacggtacacggctggtcagcgagtataactggggtggg

SEQ ID NO: 26476 - DNA, 479 bp, Homo sapiens
  misc_feature (1)...(479): n = A,T,C or G
ttatagaaactcgagaccctcggacagngcggnggaagtcctcaaaagacaatgaagttcccaaatgctcttctaggcagaacaaatataaataatgtttctcacaccaaatgtgtgcaaagttcaaatattgcattaatggtgctttttattgtgcaaatcatacgactaacccatcatgtcctttctgtgtcaggaagaacatggatgggaatagaaggatctttgaaatcctaccctctgtgtaaatcagtatctgtgaatttttctcttgttagtactgatttatttactctttctggtgtatctgctctttcccttaaaacctttatgataaaaacatatttgaatgcccactttgtgcctagtattttgctccattctagtaatttagcagtaaatatggctgagtaatgtagacgatcaccataggcagagatgcataaactgaaaactgaagaatagctaggagtcggcgg

SEQ ID NO: 26477 - DNA, 445 bp, Homo sapiens
  misc_feature (1)...(445): n = A,T,C or G
gccggctnnnnnnaacggactgcnggcatcgncnggngcaanccaaactcctggcctcgtgatctgcccgccacaattgttttttatgtgttgggttatatccagaaaccttgcctcccgtcaacctaaagtgacatcagagtgttctcctaagaaagagtttattcaggaacagcaaggggattgcagtcaggatatgcgtgctacactggaaggcattttggggggtgttcgcgataaaggcaacactttaaaaggcaaagaagtccatgtaagctgctctagaacgaagttcacaggtcacagcagctcctggcaggaggcagtactgttcaccgcaggagtggccgtcactgggcgggcgccctcgtcgcagtcccgagggttctggagtgagttctgctacaggcaagtcttcgagagcttcttcacggcctcccctgac

SEQ ID NO: 26478 - DNA, 460 bp, Homo sapiens
  misc_feature (1)...(460): n = A,T,C or G
nattgaggacccttagnccattgaggngcaattcaggctgctcttctgtcagacttcctctttgtaccacagtggctctggggccaggcctgcctgcccactggccatcgccaccttccccagctgcctcctaccagcagtttctctgaagatctgtcaacaggttaagtcaatctggggcttccactgcctgcattccagtccccagagcttggtggtcccgaaacgggaagtacatattggggcatggtggcctccgtgagcaaatggtgtcttgggcaatctgaggccaggacagatgttgccccacccactggagatggtgctgagggaggtgggtggggccttctgggaaggtgagtggagaggggcacctgccccccgccctccccatcccctactcccactgctcagcgcgggccattgcaagggtgccacacaatgtcttgtccaccctggg

SEQ ID NO: 26479 - DNA, 479 bp, Homo sapiens
  misc_feature (1)...(479): n = A,T,C or G
natcgagacccctgagatcactcgngcagngcggnggaattcgaggaccaggaactgcgtggagaacagtctggccacttttctgtaaggttgattgctctttgttgggggtccagacgagtccccggtccccacagactctcccgagcctggagacagcaagggcaagggctgcaagacagtgaagatggcaacactcccttgtcccccgccactgtgaggtctgtcgaggcagttgcagagctgctactggcttaatagctccagcagggtgtgggtagaggtccaggcctggaggacctgcacagtgaggagacatgggaacaggcccccatgtaacagtctggccacttttccgtaggtctgctactgggggtttgctttagtccctagtcaccttggattttccagtgcctgaaggtatcaacagtggagggtgcaaaacagcacagatggtggcctgcccctccctccgaagg

SEQ ID NO: 26480 - DNA, 466 bp, Homo sapiens
  misc_feature (1)...(466): n = A,T,C or G
catcgaccgccnctctgnnnnaagacgaacccttagnccacgcggnggaattcgtggtgttttgtgtttcatctccagcttggtgttccatggcccctaggcgaggtgatcatggagtggggccaatgggcccccggccctggctttgggaccttgtgctgagggatgatttgctcctgaccttgattaacttaacagttcccagctggaagggacactttcaggacccagtccactgtatggcatttgtgatgcagaattatgcactgacatgaccctgggtgacaggaaagcctttcgagaggcccaaggtggcctcgccagccctgcagtattgatgtgcagtattgcaccacagctctgcggaccttggccattgccgcagtcgcagcttccttttttctgtttgcactgtttgtttgtatgatgttagctaattccactgtgtatataaattgtatttttt

SEQ ID NO: 26481 - DNA, 448 bp, Homo sapiens
  misc_feature (1)...(448): n = A,T,C or G
aggggcccccnnnnaaaagaaaatacgngcacggccagncnggnggaattctggctcactgattgggaaggctggcaccaagatcaaggagatccgagagactacgggtgcccaggtacaggtggcaggggacctgctccccaactccacagagcgagctgttacggtatctggggtgcctgatgccatcatcctgtgtgtgcgccagatctgcgctgttatcctggagtccccacccaaaggagccactatcccctaccatccgagcctctccctaggtactgttcttctctctgccaaccagggcttctctgtccagggtcagtatggggctgtgaccccagctgaggtcaccaagctccagcagctctcaagccatgcggtcccctttgccacacccagcgtggtgccaggactggatcccggcacacagaccagctcacaggag

SEQ ID NO: 26482 - DNA, 449 bp, Homo sapiens
  misc_feature (1)...(449): n = A,T,C or G
aggggcccccnnnnncccgactgcngagcatctgccagncnggnggaattcgctgggaacaccgagaccgagagcgcgtggctgtgtctacaaaggcctcctctttgagggagacacgcgaggcacgggtggggcgatgagacaggatcggccggtccttgacagtctctgaagctgggagaacatgaccccatgctctcctgttggagtcaccacctctttgccaacagccaccaaacctccacctccaattaagctccacccccatgtccccactgccctccggacatctgttcagcacccccctcgacctggccaaggctccacgcaccgccctggtttcccgctctgcccagccccccgctgaagtctctaatgggttcttccgattccacctgtccaaggtaaaaccctgaggttgtccctcctccgcggcacctccaggtatc

SEQ ID NO: 26483 - DNA, 474 bp, Homo sapiens
  misc_feature (1)...(474): n = A,T,C or G
naagagacctcgataccgttcgnggaantcgctgcgaggagggggcctttgagggcagcgcggngtcgaaatcccatcccagcgctgtgacctcttggagcccacattgcctctttggtggaggggagggagtggtccagctccgagccgagcctgggagctgaatgacccagtgtgcaaggcgcacctcggagaccgaaagcaaccgctcccccggcttcaatttcacaccacctgcagatacacgtctcagaatctgcggctaggaagacctgggccgccagaagctaaacgtgtgcattttgtcatcagccccggtttctcgttttagagtgagttcccacctgccctacctaaactgacctgaaacggaaagttgtatgcccccacgaccatcctcactgcagaactgcagagggntttaagctccttattacctggttcttataatcctgtccctttccaggcgagatg

SEQ ID NO: 26484 - DNA, 456 bp, Homo sapiens
  misc_feature (1)...(456): n = A,T,C or G
nttgatgacatctgccattgtgggcaattcggncccggaggtcctggtcgggagccagagggcctcctccaggcaggaggccaggaggctgaggagctcctccaggaggggctcaagcccgtcctggaggaatgtgataactaggttggggctggggaggcagcccagcgcgagtcctccccgggcaaataggctccgagggccccggggcctcctctcctcctctcaggcagcagggccctggagacaggcggaggcggggccagggccggtccctcaccccacatcgggatcggggccccccacttccccccaaggggccctgcccaccaccaccttcccggtgacccagatgaccacatttaataccaaatggggtggggggaggcgcccctccagtgccaggggcacgtgctgtgagcttcctgggagcccaggttgtgctcactgctctcn

SEQ ID NO: 26485 - DNA, 447 bp, Homo sapiens
  misc_feature (1)...(447): n = A,T,C or G
tgcggcttttnnnccccagctagcaangcatcgacnggncgaattncagagaatgaccaaatgtgaaaaacaatatatgtgacgctactttccttgcttctgacaatggaattcctcctatgaaaggaacaggaacgctgcagatctatttacttgatattaaagacactgcccctcaggtgttacctccccaggctcagacttgcgaaactccagaccccaattcaattaatattacaccacttgattatgacattgatcccaatgctggaccatttgcttttgacctttctttatctccagcgactattaagagaaagtggcccatcactcggcttaatggcgattttgctcagcttactttaaagataaaagggattgaagctggtatatatgaacctcccatcataatcacagattcgcgttatccctccaactcaaatattt

SEQ ID NO: 26486 - DNA, 447 bp, Homo sapiens
  misc_feature (1)...(447): n = A,T,C or G
ggggccggnnnnnaaaaggatagacgatcatggcacancnggnggaattcangagcttctattcttgacccagcccacgacacgtgccggggctgtcagcgccgtgagaggcacctgtgtctccccgagctgaggacggatgacatttgtacctacaggggtaaaaaaagataaagcaaacacggaacagcacactcctcccggccttccttcttctgacaccgttttcctttagaagatctgaaactacaagtcaggacatgacacgtggagcgtcccaggcacgcgcagcctctgctgtttgatttccgacgtgagtctatagcaagaaggttgccgtctgcaagccaggaagggagtcctcaccaggagctgagatgttgctactttgatcttggacctccagtcttcatgatttctttacgttgctgtgaaaacctggatgtt

SEQ ID NO: 26487 - DNA, 464 bp, Homo sapiens
  misc_feature (1)...(464): n = A,T,C or G
atggcnnnnnaactgaaactgangatactgcgaaggaacnccgncagtcagacccaggaggtggccaccctgagcaaggaactcctgcaattcacggtatccattattccttacagcctccggcggctcagagggctggaagtccagaacatgtatgtgggaccccagaccatcccagccaccccccatcttcctggcctctttggcagatccaccctgtccccccaccccacaaaggggggctacgcagtcactgacttcctcacctacaactgcctcacggtaagcatgaaccctccttccctgaaggtgggatttcaggaagaccccaccaccccgttttaccttagtccagggacataactcccaagttgggcccgtggccctgatggcttttgggaaaggtccctgaggggcacttgagtggtggggggcacttggcggggcccagccctgacagctgc

SEQ ID NO: 26488 - DNA, 468 bp, Homo sapiens
  misc_feature (1)...(468): n = A,T,C or G
aggccggnnncactgatnactgangatcctagnacangcgnggaattcgaccctgctgagcagcgtgtttggtgcgtgtggcctgctcctggtaggcttcgcggtcagcactgactactggctgtacatggaagaaggcacagtgctaccgcagaaccagaccaccgaggtcaagatggccctgcacgccggcctctggcgagtctgcttctttgcaggtacagccctcacccgtcttccactcaacagtttctgccttgcctggggtctgagagtcttatccatagtcccatcccttgagttccagaaatccagaaacggatcctgattctctcctggaagttcaaatttctacgtggagccccagtgactagccctttattcctggatctaggagccccaatgctccaggcccctaacccctaaggaattctggagccttcctttaaagnttgtaggctaagttta

SEQ ID NO: 26489 - DNA, 465 bp, Homo sapiens
  misc_feature (1)...(465): n = A,T,C or G
ctcgacccccctnngnnnattgatgacccttagtccagngcggnggaattcctgggccgccaagggccttacatccgcctccctatccaccaagagcttccccttcttcaactctatgaacgtcaaccccctgtcatcacagagcatgttttccccacccaactctatctcgtccatgagcatgtcgtccagcatggtgccctcagcagtgacaggcgtcccgggctccagtctcaacagcctgaataacttgaacaacctgagtagcccgtcgctgaattccgcggtgccgacgcctgcctgtccttacgcgccgccgactcctccgtatgtttatagggacacgtgtaactcgagcctggccagcctgagactgaaagcaaagcagcactccagcttcggctacgccagcgtgcagaacccggcctccaacctgagtgcttgccagtatgcagtggaccggcc

SEQ ID NO: 26490 - DNA, 468 bp, Homo sapiens
  misc_feature (1)...(468): n = A,T,C or G
agcggaaannntttgtagacactagnttgtgcggcggaattccggaagagctcctttcagcaaaataagaatgaaccacaaaacagggtgcagggggccttgtcaaggcatcatagcgtggtgccatgggaacatccccttcctttgtcctgcctcagctgacagtgcctcggagatgccctgagctacgtcagcccggctggcatccaaggggttccttattggctcacaagacacgttgctttttcaggaccagagagacttggaggtcctcacctgcagccctgggcctttgtttaggctgtgctgtgaggctggctctctgtggtcagcatctcagcgtccctgcctggccagcaaaggggtgacattttccttgggtgccctcttgcaacatggcgttaaattctcaaaaaggtgcaaacccttagggtgaagtttgtgtctagaatataatgggtaagggcc

SEQ ID NO: 26491 - DNA, 455 bp, Homo sapiens
  misc_feature (1)...(455): n = A,T,C or G
actgacnccagggggtctgnannaaccccanangcataagctatcacctagcagcctcaaaacgggtcaatattaaggttttcttccggttggaggccaaccagcccgacagtgccatccccaccttcacctcggagggatggagaaagaagtggagacagtcctttcccaccattcctgcctttaagccaaagaaacaagctgtgcaggcatggtcccttaaggcacagtgggagctgagttggaaggggccacgtggatgggcaaagcttgtcaaagatgccccctccaggagagagccaggatgcccagatgaactgactgaaggaaaagcaagaaacagtttcttgcttggaagccaggtacaagagaggcagcatgcttgggctgacccaacatctcccagcaagatctcatctgtggagctgccacagagaaagttgtagccaaggact

SEQ ID NO: 26492 - DNA, 482 bp, Homo sapiens
  misc_feature (1)...(482): n = A,T,C or G
ggccatgcgcccgttgaagacacatagagngccgtggaacactgacagcaccccgaggaaagctgatgggctgacagaattaagagctactcttttgaaccgttggcttagcaagaggtggggtgactcttgagagacagacaacattgaggctgtggcatatggccctcccacaggagacttcccaaggtccttggcctttgttagaacctggtatagcaggttctggaaactgtgtgggtgggaggcaggggtgacagagccagctgtaaccaaactcacttgaattgccctagaaattatttctgggacaagagaaggctggtgctctctggtaactgctactaccttcttgtccctacttcctgcctcagatacctgctatacaacttcccgatgacctgcgccttcataggtgttgccagcaacttcaccttcctcagcgtcatcgtgctcttcagctacatgcagtgggtgtgggg

SEQ ID NO: 26493 - DNA, 440 bp, Homo sapiens
  misc_feature (1)...(440): n = A,T,C or G
ntttgaagaccctnattgatagacgcctagacagcgtggaggaattccgggctccgggccctgatagatggggtgcggggacggagacaaatgacggcctttgggctcggaatacccacctttctggtaatgcagcccagcgggtcccagcctcgttttccagccctcactcaaaatggagtcgctctggttcgaacgcctctgacaagtgtgtacctacgtgtcagggagcctgctcacatgaccgtgtggagaaagttctttccctgaggaccatctggagtggacgcgtgcactacccctctctgaatacaccctccccacgaggccctctggagcatcctgtagagccagcccctacccagagaccctgagcccagagaatgcgctgggtggtgagcctggggacgaatgcagagccctaggtctcctctccagaa

SEQ ID NO: 26494 - DNA, 466 bp, Homo sapiens
  misc_feature (1)...(466): n = A,T,C or G
ctagatcccccctccnnnttttgatgtctcttagtccagngcggnggaattcattcgagaccacaggcgggagggagctccctggttcatgtctttggttttagcatgagcttgctacctaagccttgattgctggtcccagaggaagaccacagagggcaactcactggtgaatgttgatgccaggattccagaggaagtagcagcctcctgagcctaccgtgcacagaaaggaattcccatagccaaggaattcattcattattggataatgaaaggattataacgtaaacatcaggaaacctattatctaattctaccaacagattaaaggcgttaaatgtctctgtctgttattaattagtaggggtcaaaaaggcgcctgattgataatatccagcagccaacccttcagcaagatagagcagtattgttgaccacttactggtaactaataattntcacg

SEQ ID NO: 26495 - DNA, 432 bp, Homo sapiens
  misc_feature (1)...(432): n = A,T,C or G
ntttgatgaccctcttgaagngcggtggaatnactcaggatgngcagaaggcgatggacgagaggagatttcaagatgcggttcgactccgagggaggagctttgcgggcaacctgaacacctacaagcgacttgccatcaagctgccggatgatcagatcccaaagaccaattgcaacgtagctgtcatcaacgtgggggcacccgcggctgggatgaacgcggccgtacgctcaactgtgcgcgtgggcattgccgacggccacaggatgctcgccatctatgatggctttgacggcttcgccaagggccagatcaaagaaatcggctggacagatgtcgggggctggaccggccaaggaggctccattcttgggacaaaacgcgttctcccggggaagtacttggaagagatcgccacacagatgcgcc

SEQ ID NO: 26496 - DNA, 462 bp, Homo sapiens
  misc_feature (1)...(462): n = A,T,C or G
gcgtttnnnnagatgagaccctgnncnngctcgtagacattagtccagtgcggtggaattccattcatggacccaggctgacaaaggagccaccatctataacattgccaaacactgtggcataggagaatgccactccctctcacctcgggctggaagtgacacacgcgtcttttgcccccaacccattggtcataggtagtcacctgcttttcctccccacccccaaggaacttgaggatatttggtgagcagtgcgagtctcttttaaggctttctgaggacctggaacatatctgtttatttgtttaagagagaaaatacgatgatgaagagtgcagaccatggagccagaccccagagtgtagagcctggctccccacttgctgactgtgtgaccgtgggcaagttactcaacctctctggagcatagtttcatcatctggaaagtgcgactgataa

SEQ ID NO: 26497 - DNA, 463 bp, Homo sapiens
  misc_feature (1)...(463): n = A,T,C or G
aggggttnnnnnnagatcgagaccattagtccagngcgttggaattcgttgaaggaaaccacccccaacttggttgctggggacttgaagacttcagtgtgatctttacctaggggagggacagagctgggctggtggagcccatgggtgctgcctgatggtgctgtggggtgggtgctcatgtgccaagtcctgcttggcagtggagacctggggcccttaaagtgttacaacagcctgcagcaagggaagttccccgtagcctcagtcttctctgggcttgaggctgctccttggcaggcatttaaagtaaaaaataaaatggggctgggcgcggtggctcacgcctgtaatcccagcactttgggaggccgaggcgggcagatcacgaggtcaggagattgagaccatcctggctaacaggtgaaaccccgtctctacttaaaatacaaaaaaaaaaaaa

SEQ ID NO: 26498 - DNA, 561 bp, Homo sapiens
  misc_feature (1)...(561): n = A,T,C or G
agcgtgcnnaactgaaccataccgtgnatcantcggaanggngcaannccgagngggtagacaagaaccggctggcgctgaccaagacagtgaaggatgctgtacagattaactcagattagtacctgagcgagctcgcagagcagcctgagcgcaagatcactcgcaaccaaaagcgcaagcatgatgagatcaaccatgtgcagaagacttatgcagagatggaccccaccacagcagccttggagaaggagcatgaggcgatcaccaaggtgaagtatgtggacaagatccacatcgggaactacgaaattgatgcctggtatttctcaccattccccgaagactatgggaaacagcccaagctctggctctgcgagtactgcctcaagtacatgaaatatgagaagagctaccgctttcacttgggtcagtgccagtggcggcagccccccgggaaagagatctaccgcaagagcaacatcttcgtgtacgaagttgatggcaaagaccataagatttactgtcagaacctgtgtctgctggccaagctcttcctgg

SEQ ID NO: 26499 - DNA, 418 bp, Homo sapiens
ctatgaagtagtaggtaattcaggctgtagagtctgtaataactttccatgcctatgtcataggattctaatttgttcaggcccagcaatacccaggagatgacattaaaaggtgttgattttattgagggtcagtggatgagggagaaaaagttttcaaaaattaaaaaaaatttttttaaaggtgttgactttagaccacaaaaagagtttgagagagcaagcagaacctgtcaagaaagacttcctaggggaggtagaagttgaacaggatcttagatgacttacatcagaagcagcagtcctatcaggaggaataccacaagcaaaggcagatgaggtggcaaagtccacatccaaccccagaaagtcttcttccccacccatgtctgcatggggccccaggaggctgtcccct

SEQ ID NO: 26500 - DNA, 401 bp, Homo sapiens
gtagagacggggtttcaccatgttggccaggctggtcttgaactcctgacctaaggtgaaccgccagccttggcctcccaaagtgctgggattataggcgtgagccaccacgcccagctgtgactggccttttttgaacaccccatgcagatgtacccttcctcaactgcccttggtgttagtaaaggccaagctctcattttctcccctgggtggccggcagttttatttctggtgctcctggaagaaaaaatggccactattacagaagcctaggaaaaatgtcccctcccagaacattctgtctccagctcacataaggcatggccagcagcctgcccgcccacctcaggcaaggcccatgtgctctgcggagtgtctgaccttgtgggtaaaggggg

SEQ ID NO: 26501 - DNA, 461 bp, Homo sapiens
  misc_feature (1)...(461): n = A,T,C or G
ggggtnnnnnnnngacgagatcactagnccgngcgttggaaatcgttgaaataccgcggcgcggacggtagttgctgtggtttccgttctgagctcgcagcttaagagctgaagatcgcggacttagcgttgccgcgtccgagtccggccatcagtggctgcagatccggaggccaggagctcaaccacccttcttcggaacagggccggcctgctgctgtgccctcgacgctcggtgcctgtatctactccggggcctaggtcggctccgggggcggcttatgagaaggccgccggcgagatgttcaaaaacacgttccagagcgggttcctctccatcctctacagcatcggcagcaagcctctgcaaatctgggacaaaaaggtacggaatggccacatcaaaagaatcactgataatgacatccagtccctggtgctagagattgaagggacaaatg

SEQ ID NO: 26502 - DNA, 458 bp, Homo sapiens
  misc_feature (1)...(458): n = A,T,C or G
gggttaannnnagatgagaccctagccgngcttttgagaccattgagaagaccggccaagagcaaggtaggctgcccttgcccatccccagtctctcttcagccacgggaaggaattattaagatttaaccgtcagggaacagtgggtcatgccagcactttgggaggccaaggtagtaagatcacttgaacccaggagttcaaggccagcctgggcagcaggggaagaccctgtctctacagaataattttaaaattagctggtggcatgcgcctgtggtcccacctcctcgggaggctgaggtgggaggatcccttgagcccgggaggtagaggctgcagcgagctgagatcacaccctgcactccagcctggcagacagagggcgatcctgtctcaaaaaaaaaagatttaacagacaccacctactgtccccagcatcttacagaacaaaagaa

SEQ ID NO: 26503 - DNA, 555 bp, Homo sapiens
  misc_feature (1)...(555): n = A,T,C or G
agaanaccnnnnnnnttttgaattttcgatcacctatccgagtggtggaattctcccgccttggcctcccnagtgctgggattacaggcgtgagccacagcacccggccttgttctccattttaaagtttaacttcctcattctttgtctccttgcccctagtctcagtaaacaactccctcctagcctctatcacctgctctgtccttagtaacctgctttgtccttagtcatccttagtcacctgctctgtccttagtcatccttagtcacctgctctgtaaccgtccttcccgccaaaactactcaccccaccactccggctcctaccctcgctctctttttttttttttttttagaaaaggaatttttgttttgtcccccaggccggacttgaaactgnaggggcgcaatttgggctcactgaaagctccgcctccggggtacacccattctcctgcctaaccctcggatagttggaatcatggcccccgcccccaccccagctattttttgtttttaagaaaaacggggtttcccatgtggccggccggg

SEQ ID NO: 26504 - DNA, 445 bp, Homo sapiens
  misc_feature (1)...(445): n = A,T,C or G
ggtccgncnccccccagggagcatganaccctgcgaanncncccnacaagaagcaagccttttgtgcagcaggcctaccccatccagccagctgtcacagcccccattccagggtttgagcctgcatcggccccagctccctcagtccctgcctggcaaggtcgctccattggcacaaccaagcttcgcctggtggaattttcagcttttctcgagcagcagcgagacccagactcgtacaacaaacacctcttcgtgcacattgggcatgccaaccattcttacagtgacccattgcttgaatcagtggacattcgtcagatttatgacaaatttcctgaaaagaaaggtggcttaaaggaactgtttggaaagggccctcaaaatgccttcttcctcgtaaaattctgggctgatttaaactgcaatattcaagatgatgctg

SEQ ID NO: 26505 - DNA, 459 bp, Homo sapiens
  misc_feature (1)...(459): n = A,T,C or G
aggcgctnnnnnnccccggaacgtggncnacagtctggncgaattntggggttntatatgttaaactccgggcgggtcagctctcctacaaagaagatccaatgggatggcaaagtttgttggctcagactgttgctaacaggaactctgaagcccgggctttcaagccagaaacaatctcagcattcacttctgatccagcacttctgtcatttgctgaatatttctgcaagccaactgtgaacatgggtcagaaacaggaaattctggatctcttttcttcagtactctatgaatgtgttacccaggagaccccagagatgttgcctgcatacatagcaatggatcaggctataagaagacttgggagaagagaaatgtctgagacttctgaactttggcagataaagttggtgttagagtttttcagctcccgaagccatcaggagcggctgcaga

SEQ ID NO: 26506 - DNA, 474 bp, Homo sapiens
  misc_feature (1)...(474): n = A,T,C or G
tgggtacnnnnttcgattgacactcnttagnngcgnggaattcttaatagctttcagtagttgtatctcataagtctgtaacctacaggttccatttacctttgttttcttatttcttgaagttgctgagtcattttttaattagaatttgctgtattctagatgtggcttattgaatctctaacattgtttaacttgtacactagatgttgatgaaatcggtgattgagattttgtcccagcagacaggtgtgtgatggcaacagtgaaataaatacaaaaccttctcccaacccagaaatcctctccacgaaggtagagacagaaaacgcttttattaagcattaaaccagaatgtgatgcacatcacagacaatccactaagaaattgcaagggaagaaaaaagcctcactccttcatatggcctagcagatgtagcccattacacacgttttcaagataaacaacaacaa

SEQ ID NO: 26507 - DNA, 446 bp, Homo sapiens
  misc_feature (1)...(446): n = A,T,C or G
tgcggcttttnnnccccaggctgcgnncgatagnctggngcaattnctcgggaggctttcgcaccacggccagcatggtgtctgtcctgccccaggatcccacgcagccctgcgtgcactttcttaccgccacgccagacccatccaggtctgtgttcaaacctttcatcttcggggtgggggtggcccaggccccccaggtgctgtcccccacttttggagcacaagaccctgttcggaccctgccccgattccagactcaggtagatcgtcggcataccctctaccgtggacaccaggcagccctggggctgatggagagagatcatgtatcccccagggagtaggggctaccttgaggggatgatagacctcccccactcccagtgggactctggaaatatgaaggaactacggagtggaagagatttcagagctggggagag

SEQ ID NO: 26508 - DNA, 477 bp, Homo sapiens
  misc_feature (1)...(477): n = A,T,C or G
agagaggcccccaatgaagcccctngatagangaccattagncagngcggnggaattccccttttgtgtctctgtcctcccagagagggaccccatcgtaccctactcccctcccacaaaggaagctgtagtgcgcgtcctcaggcgtgtccccatatggatctgctggcattcgtttgtcagagcacccaggggtagaagtccttggtctcagtctgcagacgtctgcctgagtgcagccaggtgcccccccagagtgggtagccttgtccacatgcccatcagcagcacctgaggggtcccaacagccctacatcccaccaactttctgcttttttccagtcaaatggctcttgagtgctacctggctttatttatttatttattttttgagtcaggtctctgttgcgcaggctggagtgcagtggtgcaatcatggctcactgcagcctcgaccttccaggctcaaacaattct

SEQ ID NO: 26509 - DNA, 447 bp, Homo sapiens
  misc_feature (1)...(447): n = A,T,C or G
gggcgctgnnnnnaacggagcgtcgngcacggacagncnggnggaattcgnccggcatgatggttcgccacgcgcagagctcccctgtggtcatccagccctcccagcactccgtggccctgctgaaccctgctcagaacttgcctcacgtggccagctccccagccgtcccccaggaagcaacctccactctgcagatgtcgcaggctccgcagtccccacagatacccatgaatgggtctgccatgcagagcttgttcattgaagaaatccacagtgtgagtgccaagaacagggcagtgtctatcgagaaagcagaaaagaaatgggaggaaaaaaggcaaaatctggatcactataatgggaaagagtttgagaagctcctagaagaagctcaggccaatatcatgaagtcaataccaaatctggagatgccgccagccacag

SEQ ID NO: 26510 - DNA, 438 bp, Homo sapiens
  misc_feature (1)...(438): n = A,T,C or G
gagccgctnnnnnncccagcntttgagcactgcggncnntngnannangagaaggatgcttttcattccaactggatgggcgtgtgtcttgtactgagcatgacccctgtgggcccaatactctggaacctggggagatccgtgagtatgtgcctcccccagtaccgctgactccagggccaagcactcacctggcagagcaatcaacaggaatggctgctcatgcacccaaaatgtcagataaacctgctgctgacaccaaccagatgctgtcgctctccaaaaaagctctggcagggacttgtcacaggccactgctacctgaaagacctcttgagagaactgactccaggccccagcctttagataaagtcagagacctcgctgggtcagggaccaaataccaatccttggtttccagacagaggccactggacn

SEQ ID NO: 26511 - DNA, 449 bp, Homo sapiens
  misc_feature (1)...(449): n = A,T,C or G
agcgggctnnnnnnnaaccgaccgttgagcaccgtcncgccnggnggaattcctcccaaccaccttaaccaagtcagcccctcccacatagtccctagttaagatcagaatgagctttatctgcttcttaaactttgttgttcctacctctgcaatccctcttaggctatggaactactgcgggatgaattcaccaagccgcagctgggactgcctttgtactcctctctctagacagtctgccccagtctcacacatggccaaagtctggtaggtagttgctgagttcctgagtgttgctctctgggccaaggcagtacagggcaacttcccaaggcagagcagacaggagtagtgcttggatttggatcagaccacactgggctttgctgagaggaactgggccagcatacagaatggtttttaatggactgggtttgaaacagttn

SEQ ID NO: 26512 - DNA, 448 bp, Homo sapiens
  misc_feature (1)...(448): n = A,T,C or G
agcggccngnnnnnncctgacttacgacntctgaccancnggnggaattcgctcttggtcaatagcagggtgtggtgctcctgccaggggacgcattctccgtgtgacctctacaccccaggtcaggtcaggatgtgatttgcttctccagggccgtgactcactagatccacctcccactggtgcctggtggcccccgacagccctggccctgtccaggccctggcctgtcctacagtcacaggtgctggcctgtccctgctgtcctcctgaccacctggtgctcccggccaccctgcccgcccccctgtctcctcgggacagcctggctgcctccacttgctggcccctgccggcccaccctctttccaagcctgccctgcccctcagctcctggggtggggaggggagacctcgccttctgcctgcagcgactcccacctgtcac

SEQ ID NO: 26513 - DNA, 449 bp, Homo sapiens
  misc_feature (1)...(449): n = A,T,C or G
gggggcnnnnnnnaattgactgcctctacnatcgngnggngcaattcgtggcctgcagagagccggcactatctctactgctgctgctgctgctactgctgctgttgctaccgctgcctctgctgccaccgccactactgctgccagcggagccgctaggagtgagcatcccctctccgggatacccagctccgcggcgtctcccgcgcgccctggccccacacggacctgccagccccagggaacaaaagcggagcccgctcgccctctactgcagccggaggatgagtcgagagggctgagcggagagtgtggtcctcggcggctggagctatttccttggcttctctccatgacgattcctgactcgtggccccggcaatcttgggaagacatcatccagcttcttcagtccagaccctgggcaccccccttttgccaggatcgtc

SEQ ID NO: 26514 - DNA, 460 bp, Homo sapiens
  misc_feature (1)...(460): n = A,T,C or G
agcgccanaaaatccgttttaccgttgcaactacgaaagagcggnggaattcggctttgccaacacccagaactgggggcctgggtcccatgcggcctagtttgcacttactaagccatggggcttgaaacaaatggctcctctgctctgtgactcagtttccttatctgtgaagggcagctagcattctgaaggatggccagaagggtggtccccccgagcatggcatagatggtccattggtattggctgggatcctcatctgcctcctctgctctacccatggcaggtgataagggttagagaacccctctgctgcccacacgttccctggcctccatctccagcagcagggttatccccaccccctggcaaagaataggggtccctgggcctctcaacaagaagtaccagatcatgcaggtagcagacaatcatcggggaccacagggccactaag

SEQ ID NO: 26515 - DNA, 448 bp, Homo sapiens
  misc_feature (1)...(448): n = A,T,C or G
agccggctnnnnnnnaaaagacatcgnagcancgtcnggncgaannncnngaactcctgacctcgagatccacctgcctcggcctcccagagtgctggaattacttgcgtgagccatgcgtccagcaagaaaaggggtgttgatgaaccatagagacctctcagagctccacatttgggggatggggtcacataatcaggagagttcccgaagaaagtgccatttgagctgtgatctgacggaacactaataagtagtcagcttggctcagatggggagaggagagggcattctgggccgaggacacatcgtgggtgaaatcctggaggtgggaagcggcactgtgctccagagggactggaggagagccagagtgactggcacatcaggagggcacaggggatgcccgagctgctggtgagacagacaggactgacagaaacagcta

SEQ ID NO: 26516 - DNA, 446 bp, Homo sapiens
  misc_feature (1)...(446): n = A,T,C or G
gaggcgctnnnnnncccaggcatcgcagcacgtctgngcaattnnggntaangcaggatacagggctgcagttgttgggtgaagctttgcccgaaagttgagaaatgggtgcagcgcacggatgcagaacaggagtcgcagaccaaagcagagatccaggatatgaagcaagagttatccgcggtcaatatgatggacaagtttgccagatctgccaggctggaaagaaagatcaacaagatgatgaataagctcaaaactcatgtgaaagtacagacagctcaatcaggaatgctaaaatgggttataagtgttgctttctacaaattgccaggtaccgtgatcaggctataaggcagtcttgtggggttatccattacttgacagggtctcgctctgttgcccaggctggagtgcagtgggccatctatgctcactgtagcctc

SEQ ID NO: 26517 - DNA, 463 bp, Homo sapiens
  misc_feature (1)...(463): n = A,T,C or G
naccttaagacaatcagtaagaaccgccgnggaattttaaaaggaagacaacaaaaaccaccagaaatagtcttagaaatgcgtatgttcgtacttttatccctcagtatctgngaggaatttgttccaggacctcccatggatgctcaagtctctgatataaaataacatattatttgcctatcacctatgtgcatccttctatatactttaaatcagatgtccccaacattttaggcaccagggactggttgtgtggaagatgatatttccatggatggtgcaggggaaggaaggatggtttcaggatgaaactgtttcacctcggtcatcaggtgttcaagcagtagattctcataaggagcaggcaacctagattcctcacatacgcagttcacaatagggtaagcacttctatgaaaatctaatgccgctgctgatctgacaggaggcggagctcatg

SEQ ID NO: 26518 - DNA, 447 bp, Homo sapiens
  misc_feature (1)...(447): n = A,T,C or G
caatgaccccntctantgagncctattgnacgngcggnggaattcgcgtgctttgggccccggcggggagctggagccagagcggctaccccgaaagcttcgggccgagcttgaggccgcgctggggaagaagcacaagggcggtgatagctccagtggcccccaacgcttggtttctttccgtctcatccgggatctgcaccagcatctgagagaaagggattccaaactatacctccatgagctcctagaaggcagtgaaatctatctcccagaggttgtgaagcctccacggaacccagaactagttgcccggctggagaagattaagatacagctggccaatgaggaatataaacggatcacccgcaacgtcacttgtcaggatacaagacatggtgggactctcagcgacctgggaaagcaagtgagatcattgaaggctct

SEQ ID NO: 26519 - DNA, 445 bp, Homo sapiens
  misc_feature (1)...(445): n = A,T,C or G
taatgagnccctccgantgangcctntgaaaaccngcgcccggccttcctggngggcgtggtccgcgtggccgagtaccgaaaccattggtcggacgtgctggctggcttactgacaggggcggccatcgccacctttttggtcacctgcgttgtgcataactttcagagccggccaccctctggccgaaggctctctccctgggaggacctgggccaagcccccaccatggatagccccctcgaaaagaacccgaggtctgcaggccgcattcgacaccggcacggctcaccccatccaagtcgcagaactgcgcccgccgtggccacctgatccccagctgtgtctcctccagggccccagccatgtgttcgtcgccccgtgtgccccgtcctcgattgaggtctgagccgacgcccttgcccctgcccctacccctgccagg

SEQ ID NO: 26520 - DNA, 443 bp, Homo sapiens
  misc_feature (1)...(443): n = A,T,C or G
aatcgagaccactaattgangnccntgaatacagatgtgtttacgctgagtggtttgagctggctgggaatcgtcaggacggcctgctgcggactggactgactggagtgaatctttaacagtccggatactgtggctttcccagagatggggtttggtgtaggcacgagggacgtggcgctgacgacggtgggggtggcagccttgcaggttcccacggtggcctggctcacacacacttgctgctgcccagaagttttcgttacagaactgaccgtagatgaagacacgggagccattccttcagactgttgtgcaggaccgtttgctgagagggccacggcaggggaagtggcagttgtgataacccctcctgctactctcagcattgtggttccaggcttcgagagctgtgaggtggctggcacagtcttcaaggtgct

SEQ ID NO: 26521 - DNA, 446 bp, Homo sapiens
  misc_feature (1)...(446): n = A,T,C or G
nattgaagaccattgactgangnccngtgaaacggctgaatctgttgagcatcgccctctacctcctctcagggagcatcattgctgtagccatgcagagaggggcacggctgccagcggaggttgcaggtcaggtcctctgggctctccctcccctgacctggcggcagcagggcacctgcacccctggggagggccggctgcctgctgatgggccatcctttgcgtttaccaccccacaccttcccttatcctttgcttttgaaaggtaacaacccccaagtacccagtgctgtgttaaacactttacttcctcccaacaacactagagcgttggctattatgacccccattttatggattaggaaaccaaggaaccatgagattaagaaacttgccccaggacatacagctaggttgtcccaggtcctgctgcgaggaggcgg

SEQ ID NO: 26522 - DNA, 475 bp, Homo sapiens
  misc_feature (1)...(475): n = A,T,C or G
gcggtattnncnnnngnnnnnnnnnaaatcgtagaccattagatcgangngtntgaanacgcacgttcagacaactcagtggagcattcagattacagagccaaactctcacagatcagacaaatctaccatacggagctggagaaatacgagcaggcctgcaacgagttcaccacccacgtgatgaatctcctgcgagagcaaagccggaccaggcccatctccccaaaggagattgagcggatggtcagcatcatccaccgcaagttcagctccatccagatgcagctcaagcagagcacgtgcgaggcggtgatgatcctgcgttcccgatttctggatgcgcggcggaagagacggaatttcaacaagcaagcgacagaaatcctgaatgaatatttctattcccatctcagcaacccttaccccagtgaggaagccaaagaggagttagccaagaagtgtggcatcacan

SEQ ID NO: 26523 - DNA, 444 bp, Homo sapiens
  misc_feature (1)...(444): n = A,T,C or G
naatgagacctttgatggaggcctgaatacggacgagcctggggctgggggctgcagagatgctgaaattgatgacgcccttgacactcttttcttcccaccccggcggctcttgcagcgggcactgctactaccagactgtggtgacccccgtcatcgagcagatcctgcctgactcccctggctcccacctgccccacaccgtcaccctggtgtccatcccagcctcatctcatggcaagcgtggactttcagtctccattgaccccccgcacggcccaccgggctgtggcaccgagcactcacacaccgtccgcgtccaggggtgagtggccggcctgccgaggctgccgtcggtgtggctatggctgttgatgtgggtggcagagtctggcactgngggccctgaaaatgaatgggcgagtgtttgcgtacagatggggn

SEQ ID NO: 26524 - DNA, 228 bp, Homo sapiens
atttggatggcaagcgtggactttcaatctacattgaccccacgcacggcccatcgggctgtggcaccgagcactcacacaccgtccacgttcaagagtgagagcccggcctgccgaggctgccgtcggtgtggctatggctgttgatgtgagaggcagagtctggcactgcgggccctgaaaatgaatgggcgagtgtttggatacagatcaggcccaactctgacg

SEQ ID NO: 26525 - DNA, 445 bp, Homo sapiens
  misc_feature (1)...(445): n = A,T,C or G
natcgagattcgttgncagtgcggnggaattcatctatcttcccatctcctaaaactcagaatgcacagtaatacttaaggcttgtacaagtgtcttcagacccactttttcatacacttgctatatagtagtatgcagtatttatattattcctgaaaataaaatgaggggagaatattccctaagcaactggcaatagtattcctgaaatacctagaaatttctatctgaatgagggagacacttatgaacaccttatccttacatatatttgcatacttatctcatattttgtgacataattatttaacccagaatactttctggcagacatacagaaagctctgtgtgatcaataagggagtgtctcatttttctacttccctctttctgtgggtgacatgatctgaggttctatttgattactaagcaaaatctgttacn

SEQ ID NO: 26526 - DNA, 477 bp, Homo sapiens
  misc_feature (1)...(477): n = A,T,C or G
cgagagggccgccattgagacctttgatagtagaccatagtccgagcggtggaattcgctgcaagtcctgcggccggggctggtcgtggtgcatgcagaggacggcaccacctccaaatactttgtgagcagcggttccatcgcagtgaacgccgactcttcggtgcagttgttggccgaagaggccgtgacgctggacatgttggacctgggggcagccaaggcaaacttggagaaggcccaggcggagctggtggggacagctgacgaggccacgcgggcagagatccagatccgaatcgaggccaacgaggccctggtgaaggccctggagtaggcgagccagccgccaaggttgacctcagcttcggagccacctctggatgaactgcccccagcccccgccccattaaagacccggaagcctaannnanannnnaaaaaaaaaaaaaaaaaaaaaaagaaagaaggatttta

SEQ ID NO: 26527 - DNA, 443 bp, Homo sapiens
  misc_feature (1)...(443): n = A,T,C or G
natcgagatcgtagtcagtgcggnggaattccccggctcgaggggagggcctttgtcctgtgcaccattgcacccagcacagagctcatggatagacaggaaaacaaactgctctcaagtaccatctgtagtactacaataccgccatgtcaccggcctggtgtcgaaaggccattttcggctggaatgacagacactcccacccccaccctggggtaatctcagtttccctgctccttgcactgctctcggtcctgtggctctctatgccacccgcacccccaccatcacctgtgccgccttctctccctcagcttttccctggggaggagaggaccaaagtcactggggagctctcagaccgacatcctgacctctggagatggggcagaatccccgggcctcatagcagccttcggagggtcccaaggatgtaggctggg

SEQ ID NO: 26528 - DNA, 447 bp, Homo sapiens
  misc_feature (1)...(447): n = A,T,C or G
nattgaggatcgtatgaccatctcgcagngcggnggaattccggaatcctgcagagcccattgctgtccagaataaccagcagctggcgctaaaggtagagggagtggttcagcacggatctaaaccaggactcttccgcaaaattcagtctgtctgtctgaatgtttcttccacactgcagagtaaatctggacaagactacaagatacccattgacaacatgaccaatgagatggagcaaagggttgaacctcataatgattacttcagtactcaatttctgttgaactttgctatccttggaacacacaacattacagtggaatcttctgtgaaagatgccaatggtatagtatggaagactggtcccagaactaccatatttgtaaaatccctggaagacccttattcccagcaaattcgcttacaacagcagcaagcccagc

SEQ ID NO: 26529 - DNA, 459 bp, Homo sapiens
  misc_feature (1)...(459): n = A,T,C or G
agcggtgnnnnttaaattacgtgagcactngcggnggcanncccacagctcctcaatcagtttgaaaacacaggccccccaccggcagataaagataaaattcaggccctccccaccgtccccgtcactgaggagcacgtaggctccgggctcgagtgccctgtgtgcaaggacgactacgcgctgggtgagcgtgtgcggcagctgccctgcaaccacctgttccacgacggctgcatcgtgccctggctggagcagcacgacagctgccccgtctgccgaaaaagcctcacgggacagaacacggccacgaacccccctggcctcactggggtgagcttctcctcctcgtcgtcatcgtcctcctccagctcgcccagcaacgagaacgccacaagcaactcgtgagcccacgtcggccgtcgggaaagcacggagcctttcccacccaccctagct

SEQ ID NO: 26530 - DNA, 460 bp, Homo sapiens
  misc_feature (1)...(460): n = A,T,C or G
agagccggggnaaatgaaacatgagacatcagcccgngcggnggaattccttggaaaatagaaataaatcaattttaactcttgtctcttttatacatgttcaggttttgtaggtttgtttaatctgctgctcttatggccaggtttctttttacttcattatactggatttgaggacttcgagtttcccaataaagtagtattaatgtgcattatcattaatggccttattggaacagtactctcagagttcctgtggttgtggggctgctttcttacctcatcattgataggcacacttgcactaagccttacaatacctctgtccataatagctgacatgtgtatgcaaaaggtaaggaaactatttattattcatagatattttaggtgtgttattaaaacaaacctaatgaaagttgagatgtgattaaattataaggatacaaacataaataat

SEQ ID NO: 26531 - DNA, 443 bp, Homo sapiens
  misc_feature (1)...(443): n = A,T,C or G
attgaaatcgtagacctctggccgngcggnggaattccacaaacataattctaaacatttgtttcttagaaattcttattggttagagaaattattttgaaaaaattcttttttctgaaattaaatccctagaccctgaatctccatctcccactgcaggagccctggcaaacacctcagtgccagtggggtcaggaacaactcctgtttggagctcagtgaggggctttggggaggggaataggggagtgcattttacatttcaattcacttaaatatttaatttgtttaaaaactttaatttctaggcagtatttgaagacagacctctggctccatcgttcaacgtttacaaaaagatgagaaaaatgccagcaaaagctcattgcttttgcaggatgggggaaggaggggaagggtaggggacatagcccactcaaagg

SEQ ID NO: 26532 - DNA, 565 bp, Homo sapiens
  misc_feature (1)...(565): n = A,T,C or G
aacgcgnttttgatnccccttgaagccccactccgagnggngcgaaacggaatcttgcggcatccacgagaccaccttcaactccatcatgaagtgtgacgtggacattcgcaaagacctgtacgccaacacggtgctgtcgggcggcaccaccatgtatccgggcattgccgacaggatgcagaaggagatcaccgccctggcgcccagcaccatgaagatcaagatcatcgcacccccagagcgcaagtactcggtgtggatcggtggctccatcctggcctcactgtccaccttccagcagatgtggattagcaagcaggagtacgacgagtcgggcccctccatcgtccaccgcanatgcttctaaacggactcagcagatgcgtagcatttgctgcatgggttaattgagaatagaaatttgcccctggcanatgcacacacctcatgctagcctcacgaaactggaataagccttcgaaagaaaatgtcttgaagcttgatctgaatcagcactggattgagaacttgtgctgagtttgaccttgattgaagttactgn

SEQ ID NO: 26533 - DNA, 472 bp, Homo sapiens
  misc_feature (1)...(472): n = A,T,C or G
tgggcggntnntncaatgataccatcgacagncgcnggaannctccgagagaggttacagaacggccacaggaaggtaaccgctatgtagaactgcctaacccgaaatcgcccatttaaataatgaagaacataccgaaaaggaaaaggaggggaaatctggaaaacatgaaagtcaaggctaatgcacctgagaattaacccattaatatttattggattctttgggctcaactctgagccagaatgttgattttaactgaacctatactcaatgacaaagcagttctactttggccaccctgaggagtgtactgaaaatttataaactctccaaggagagcttaaaaagaatacatacatgcgaagttaacaatacatcaatgcagcgcaaaatcttgcaatatgtaagacaaggaataaaattgttcctatcttttcatcatcagctctattctgaggagtatgcttan

SEQ ID NO: 26534 - DNA, 477 bp, Homo sapiens
  misc_feature (1)...(477): n = A,T,C or G
atggcacgggnccnnnaactgaaaccatcgagantcctgcgaagngtcgnggaantctggaggaggacagaggagttggagcttgaactggatgtgggccctctagatccacacatatggcggctttgggtgggaaggtgtgggcctgactcttgagagcagggctgaatggtgggcaccatggcgtttgtatctgaggactgggccaagattacagagggagtgagcaacgcgtggctttggatatgcatcgaggttgtcagctctgtgtccagcctgcgtgtggtaagcagcaaccactctacaccagttgctgggcacccagcagggactgggacagacaggacaggtgaacagttaaatgagcaagaacattctggggcaggcacaggggctcacacctgtaatcccagcactttgagaggccaaggcgggcagatcacttgaagccaggtgttcgagaccagcctggccagc

SEQ ID NO: 26535 - DNA, 565 bp, Homo sapiens
  misc_feature (1)...(565): n = A,T,C or G
nggcgcgnncctcgtcacatttcgagngccgcaatncatggaataatgggttcatggattaatggttatcatgggagtgagaccaatggctttgtaagaagaggaagagggacctaagttcgcaccctcaacccccttgccatgtcaggccctctactgcctggattctgcagagtcctcacagcaagaaggccctccccagatatagtccctcgaccttggacttctcagaccccgtaattgtaagatatacattcactttctgtatagatcacccaatttcagaaacagaaaatggatcaacacaggatgcatccatgctctacgtggacatcatcctctttcctccatttcattggccctgaagacatctgttctagatcctctgtctgttgcccttcatgaatttttggacactaaacttggcctttaagaaaaatataaatgagcttttatttaaaaaaaaaatcgacaatggcagcatctacaaccctgaaggctngatatcacagaggaaactctgcattctcgcttcttgaaggtngtccgcatgttgccagtgctg

SEQ ID NO: 26536 - DNA, 478 bp, Homo sapiens
  misc_feature (1)...(478): n = A,T,C or G
atgggncgggnnnnnnnaaatcgaagaccatagagagccnctnggaanncgctgaccagagtgaggttttttttagcctaacggaattagagtattcgctggttatccggatcacaagggacggtggcctggccggacttagaggaaactctggggcacaaggaggtgatgcctgtcacttggacatgggtgcagccgccagagccgccctccagggcacagggtgggcccgggtgagcttgtgtgctcacacctgggcaggccccgcggcagcaatggcagctctcctgtacaggctgagtttcagccacaccaagaagtcaaagctaaccgaggctgtgccttccgagacccccgggatggcccctgggaggccaaggagtcggggactgggtacccggagcagagtcactgtggccacggagaaccgcagctgagctttatgaagccacgtggccacacctgccggtgcctccac

SEQ ID NO: 26537 - DNA, 489 bp, Homo sapiens
  misc_feature (1)...(489): n = A,T,C or G
cgggacaaggaggnnncnnnnaatttgaaaaccactggatgaccantcngccagngccgnggaattctgacaggtacctgatagcacactgtggtgcttctcagtgggggtctgggggtcaaccagatcagaaacacttggatggggcctaacacagatgcccttctgggccctgttcatgcagtagagcatgtaagaaagctttaatcctcccaacatgcctgggagttaggtggtattctccttatctcacagagtagataatttgagacacagataattcgaggcacagagaatttgagacacttgcccaaggtcacacagctagaaggaggcagggctggagttctctgagtatataagacttacagacatactgtaagtatacctaagacttactgctttaaaagtcagtgccaagtgagtggaaaaattcattctgtaggttgttctgcctcaaaggtggcctgggcggagggatcttcgggg

SEQ ID NO: 26538 - DNA, 477 bp, Homo sapiens
  misc_feature (1)...(477): n = A,T,C or G
agggcagggnnncnnaattgaaaccatcgagaccctctgaagngtcgnggaattccctgtagctgctttcctcagggagcgtgaactgatcgtcttggcccctctactgagactggagtggagggacacagcactccatggggggaccgtggtccccaactccaggactgtccagcagtaaagcaggcagtagcctcagaaacgctgggaggagtagggaggatgccaaggcacaggagcctcttccagggatgcaactgacacagactggagatgagcacctaagaattatgatgctctttccggtccccatgtagctgggggtggcgatatgaccagccctggccagtgagttctaagtggaagtgatgcggggtgctctagatctggaggatttcattgccagacacaggcccctccaggactgtccttccctctgccacggtggttggcagtgtcccaggcaagcctgctccn

SEQ ID NO: 26539 - DNA, 493 bp, Homo sapiens
  misc_feature (1)...(493): n = A,T,C or G
atgggggcnnnnaatgaaaatcgtagaccgtgtggnggagtgcatggcctcctgtgccgtgtacttgctcggatccacaccggcacacgcaccccaatcatagccaccgtggtctctggcattattgcagcattcatggcattcctcttcaaactcactgatcttgtggacctcatgtcaattgggaccctgcttgcttactccctggtgtcgatttgtgttctcatcctcaggtatcaacctgatcaggagacaaagactggggaagaagtggagttgcaggaggaggcaataactactgaatcagagaagttgaccctatggggactatttttcccactcaactccatccccactccactctctggccaaattgtctatgtttgttcctcattgcttgctgtcctgctgactgctctttgcctggtgctggcccagnggtcagttccattgctttctggagacctgctgtggactgcagtggttgtgctgt

SEQ ID NO: 26540 - DNA, 482 bp, Homo sapiens
  misc_feature (1)...(482): n = A,T,C or G
agaggnnnaggcccccccccccattgaagnccntnatagtaagacattagacagagcggaggaattcgcagctttattcataataatcaaaaactggaagcaaaccagatatccatggggcatactatatttagaaagtatataattatacttagtattaggaaagtatactaatattatataacccccttatttacaggccgtacattccaagaaccccagtggatgcctgaaaccatggatagtactgaactctatgtatactgtttttcctatacataaaaacccatgatgaagcttaatttataacttaagcacagtaagagattaacaactaataacaaggtagaagaattatagcaacatactgaaataaaagttgtgtgaacgcagttgtgtgtgctcgctctctgtctctctctctctctctttctctctctctctctctctcttgctctctctgtctctctccctctctcaaa

SEQ ID NO: 26541 - DNA, 453 bp, Homo sapiens
  misc_feature (1)...(453): n = A,T,C or G
atcgccacttcatagagngcgtggaanccagcccagaagcgggtttgaacgtgcctagccgcgcccccagcctcttaccctgagcggagcttgagccccatacctctagtcctcccggtctttatctgagttcagcttagagatgaacggggagccgccctcctgtgctgggcttgcggctggaggctgcatcttcccgtttctagggtttcctttccccttttgatcaacgcagtgctcagtcctggcacgggacccgagccacctctcctgctcctgcaggacgcacatggctgggtctgaatccctggggtgaggagcaccgtggcctgagagggggcccctgggccagctctgaaatctgaatgtctcaatcacaaagacccccttatgtcatgccaggggtgactgtctctggtctttggccctgggtgctgggacatagcacccgan

SEQ ID NO: 26542 - DNA, 561 bp, Homo sapiens
  misc_feature (1)...(561): n = A,T,C or G
nctcgancactgtccagngnggnggatttgcaagcgcttcgagccagatgatacctcatgaatttttcttttccagcacttgtgcctttaggaagtagtactcaactttcctagacccctgatggtagaggaggatgagtttgttcataggaaggtctacggggatgcctccttccagctattattttagtgtccatgaacaagatggactcacttgcatttctcgcattgtactggggaagatagaataaacaatcacaagtgtgctgaaaaggaaaaaatatatagagtggtgcgggagtgtagcactctatgggcttacttgcttgttctaggggtgcaggtacgtaggcaaggctgatatttaacctgggacctgttggtgcactgagaaaggatagaagtggcagagtttggtgacatgagtgatgaggaaggaggcatcangaattattcccagctatgtaatgtgagcagctgagcagatggaagtgtcatttactgagataggggaacatttgacagaaaagtttgagttcagtttgggacatttggggttgg

SEQ ID NO: 26543 - DNA, 576 bp, Homo sapiens
  misc_feature (1)...(576): n = A,T,C or G
tgagttnnnnaagctcgatcactgtccgtgtggnggttttcgcgtccnctctgtcgcccgcgcctggcctaccgcggcactcccggctgcacgctctgcttggcctcgccatgccggtggacctcagcaagtggtccgggcccttgagcctgcaagaagtggacgagcagccgcagcacccgctgcatgtcacctacgccggggcggcggtggacgagctgggcaaagtgctgacgcccacccaggttaagaatagacccaccagcatttcgtgggatggtcttgattcagggaagctctacaccttggtcctgacagacccggatgctcccagcaggaaggatcccaaatacagagaatggcatcatttcctggtggtcaacatgaagggcaatgacatcagcagtggcacagtcctctccgattatgtgggctcggngcctcccaagggcacaggcctacaccgctatgtctggctgtttacgagcaggacaggccgctaaagtgtgacaagcccatcctcagcaaccgatctggagaccaccgtggcaaattcaaggtgggcgtccttacgan

SEQ ID NO: 26544 - DNA, 583 bp, Homo sapiens
  misc_feature (1)...(583): n = A,T,C or G
tgatgaaaanaancctcgaacaccattnagngnggnngattcgaatcactatccgtgtggtggaattcacaagaccaccatcttcacggacgccaaggagtccagcacggtgttcgaactgaagcgcatcgtcgagggcatcctcaagcggcctcctgacgagcagcggctgtacaaggatgaccaactcttggatgatggcaagacactgggcgagcgtggcttcaccagtcaaacagcacggccacaggccccagccacagtggggctggccttccgggcagatgacacctttgaggccctgtgcatcgagccgttttccagcccgccagagctgcccgatgtgatgaagccccaggactcgggaagcagtgccaatgaacaagccgtgcagtgagacccccaagaggcccatttcccccaataaaagagatttgggagtctgcctggttgctgcctctttttcccgcccctccctgggatgggtcccactccctgtgggctccttttggggcttgtgcttggcagttcctgtgctgtcctgtctcccagatcctgagaccctggctgagaacttggccca

SEQ ID NO: 26545 - DNA, 576 bp, Homo sapiens
  misc_feature (1)...(576): n = A,T,C or G
tgtgatgannaaaagctcgatcactgtcagtgtggtggatttcgtgctgcacctgcagggaggcagccaggacggccggctgccccgcaccatccctctccccagctgcaaactgagtgtgccggaccctgaggagaggctggactcggggcatgtgtggaagctgcagtgggccaagcagtcctggtacctgagcgcctcctccgcagagctgcagcagcagtggctggaaaccctaagcactgctgcccatggggacacggcccaggacagcccgggggccctgcagcttcaggtccctatgggcgcagctgctccgtgagctgagtctcccactgccctgcacaccaccacattggacctgtgctgtcctgggaggtggtgttggaggccccatgaagagcgccctggactgctgagggtgggccaacagcccagagctcaagacacttggctttggngggaaggaaactgaggcccagagaggggcaaccactggccaagggtcacccagcaagttttggctaagagcctggcctccagccccagcagtgtggccagagcagggccgactgg

SEQ ID NO: 26546 - DNA, 475 bp, Homo sapiens
  misc_feature (1)...(475): n = A,T,C or G
nggcagaggcncnnaaatgataccactgatagccgtnggaannntcggctcacgctctgaatcccagcactttgggaggccaaggggggaagatcacgaggttgtgagatcaataccaccctggctaacatggtgaaaccctgcctgtactaaaaaaatgcaaaaaattagccgggcatggtggcgggtgcctatagtctcagctgctcgggaggctgaggcaggagaatggcgtgaacccgggaggtggagcttgcagtgagccgagatcatgccactgcactccagcctgggcaacagagcgagactccatctcanaaaaaaaaaaaaaaaaaaaaagttttggctggcctacgggattttaaaattggaaaggggctggaccccctttttttgggacaatttcccccattggggaaggggggtataacccaagggctggcccccaattggattgggaaaaaaaacaactttt

SEQ ID NO: 26547 - DNA, 583 bp, Homo sapiens
  misc_feature (1)...(583): n = A,T,C or G
agacgatgananananangctcgaancactagtccgtgtggtggaattcgagagcacatcgacacaagagtcttccagcttttaccaccttgtgaattctatgtatttattattccctttgaaatggaaggggacacaacagagatacccgggggtcttccatctgtatatcagaaagcactgggtcaaagagaacagaagatacagatctggcagaaaactgtgaaggaggctcatttgacaaaggatcaaaggaagcagttccaggtactggtagagaacaagttttatgaatggttgattaatacaggacatcgccaacagctggacagccttgtaccccctgcagcaggctccaaacaagcagctggataaggatcttacatgcagacactgngccctggaaatacaaggataaatggaggatggtgctcatcttgaaacttgaaactaaattgggaaggtgctattgctgcttaagagacattgngacttttctgtcttttttttttttttttttttggaggaaaaatctgtttttgcccccaagctgtgggggagggggccagattgggttattgga

SEQ ID NO: 26548 - DNA, 585 bp, Homo sapiens
  misc_feature (1)...(585): n = A,T,C or G
agatgagaannnnnnngctcgaacaccntnnnnnnnnnntttcgatcactactccgtgtggtggaattcccgaaagctgcaggattgcagagagctggaatcttctcgacggctggcagagatccaagaactgcaccagagtgtccgggcggctgctgaagaggcccgcaggaaggaggaggtctataagcagctggtaaggcctgtgtgagggacctgggtagcttaagagggtggggggatggtcctggggcagtgcctgctatatccctgcctagatgtcagagctggagactctgcccagagatgtgtcccggctggcctacacccagcgcatcctggagatcgtgggcaacatccggaagcagaaggaagagatcaccaaggtacactgccagggccatggagggtgggtcatgtgggctgtcaggcatagtgtggccgcacagggacctcacaccctcaggcagagctgtccagtcacactctaacacagaatagtcacacacaatccatcccagtcacccctgacacagtgacacagtccctgtctggtacacatgaggacccttcactgctagccag

SEQ ID NO: 26549 - DNA, 577 bp, Homo sapiens
  misc_feature (1)...(577): n = A,T,C or G
tgtgggaanaaaaaatcgatcactatccgtgtggtggatttctagccctggtgggaacgactttgagatctttgccgacccccggactgttggccacagcgtggtgtctcctcaggacacggtgcagcgatgccgggagattttcttcccagagacagctcatgaggcgtgaccggggcccacatctgtgtgtcgtgacttctgaagagtttggcctaggcctaaagagaggtcctggtgttggatagatgccagggcccctcctctggcccaggacgcctgctgcaagcccacccagatggggccagagtctgtgtggacaaccgtccccagccagtctgctcctagtggcactggcttcgtcctcccagggcccagagtgttccccatgctccacctggtggcccaggccacagctgctgcttgtatttcggtacagaagaggtttctttctgcaccaggaggaggcgtgctcaagtatcggtacgagatctagcctgccctgcctgcctgccctgngcgatgaggtacggtggggaaggtgcctatnttagagaacttttgcacagtattaaag

SEQ ID NO: 26550 - DNA, 587 bp, Homo sapiens
  misc_feature (1)...(587): n = A,T,C or G
tgaggtgannnnnnagctcgaanaccanttnanannnnnntttcgaaccactatccatgtggtggaattcgacgcccaaggacatgcctgttacccaggtcctgtaccagcactagctggtcaagggcatgacagtgctggaggccgtcttggagatccaggccatcactggcagcaggctgctctccatggtgccagggcccgccaggccaccaggctcatgctgggacccaacccagtgcacaaggacttggctgctgagccacacacccaggagaaggtggataagtgggctaccaagggcttcctgcaggctaggggaggagccacccccgcttccctattgtgaccaggcctatggggaggagctgtccatatgccaccgtgagacctgggcctggctctcaaggacagacaccgcctggcctggtgctccagaggtgaagcaagccagaatcctgggggagctgctcctggtttgagctgcattcangaagtgcgggacatggtangggaggcaaaaagccttggngcactaccctcctgtggagctgttcggtgtccgtcgagctagccacaccctgaca

SEQ ID NO: 26551 - DNA, 577 bp, Homo sapiens
  misc_feature (1)...(577): n = A,T,C or G
tgtggtgaanaanaactcgatcacagtccatgtggtggatttcgacnactgacacagaagctgtgagggaagctgcccggcaaagcctacagcagtgtggagaagagggacagtctgcccatcgacggctggaggagtccctggacgccctgccccgcatctttgggcctggcagcatggccagcacagcattctaaactattcacccatgggttcctggtgcccctttccccccactttcagggctcaccaggcactggcagggagggtaagggctggctccagatacccctcccccacagattcctagcaatgaaaatctaatatattcttctgttgcccctggggttggagagtcagtgcctgcagtcaagtgcctcccagcctcggctcagcacatcccttgccacaaatcagtgtctggggcttggccaccctgccgctgcccagccacatcccttggtttgtattttatttacagagttttacagaaaataaaaaagcanaatgtctttcctaaaaaaaaaaaannaaaannnnnnnnnannannaaaaaaaaaaaaagagccccgttggt

SEQ ID NO: 26552 - DNA, 458 bp, Homo sapiens
  misc_feature (1)...(458): n = A,T,C or G
naatgtcctnctngantatgcgatcatagaacangccggggattccaccagacaggccaaatcctacatccagtccctgccacagacccccaggaaggatttcactcagctgttcccacgggccagcccccaggctgcggacctgctggagaagatgctggagctagacgtggacaagcgcctgacggccgcgcaggccctcacccatcccttctttgaacccttccgggaccctgaggaagagacggaggcccagcagccgtttgatgattccttagaacacgagaaactcacagtggatgaatggaagcgtaagagctggggcctcgggcttcctcgcctccgcctgcagcctctcttccttgcttcctccatctttgtgcctggcctctgccagccctacctgccacctccttcttggagggcattggctcctgggtgcttctttctccttgagc

SEQ ID NO: 26553 - DNA, 556 bp, Homo sapiens
  misc_feature (1)...(556): n = A,T,C or G
agcgtgtnnaattgatcactctcggagagcgcaanncgggagngggncgaggggcaggctctgctgctggctggaaaccccaccccgccctatccggtaccgccttgttacgtagaagttactcagcagactgacacccaatccccctcgggcgatcatctgccctgtcttcccacctccagggctacagtgggcagcaccgccatccccagtgtgacagggccctgggagcctcagggctgcccggccaggttggtctgctctggttacattctggccaagctgccccttcctgctgacctgcatgtgtattgttgtcaccttcagctctcagcacctcggcccccttgggcagtgaggaagggccctggaggcgaggttgggagaaaggatagctagaacaggatcctgcggngaacaagggtgtgggcagctctcacccggngctgcctcactgagagcaccgccgagtgggggtgggggtggcaactctccagccacanaccgcttcctccttgtctgcangctgtgcaggtctggcctgtgagtaacacan

SEQ ID NO: 26554 - DNA, 575 bp, Homo sapiens
  misc_feature (1)...(575): n = A,T,C or G
gaggtgacnanaaagtcgatcactgtccgtgtggtggatttcgggccttgaggctggtaaggggctgggagggctttaggggcattccagggggcaggcacagaactggaggctctgccgggcacacccacaggagagcaatggctggagggtgacatggactgcagggtgtggccgcggcagcccagctcttaaggggacagcctgggaaaacagacttagggacaatgatcttgagccatgaaatgatgtccaatgccccttgtgccacctgacatcagcctgattaatgaacaaacagaagaggaagcaggggacctgtgtgtccctctctctgcttttctgtctttctctgtgccccctctcttatgtctctcacgctgtctcttgtccttgtttttaactctgacacgccgtgggaacttggctcacttcctagggggaagctgtctggactggcccanagatgggcaccaccatttcccaatanacacaagataaaatcngannnnnnnannnnnnnnnnannnnnnnnnnnnnnnnnnnnnnnnnnnnnnnnnnnnnnncccnccccg

SEQ ID NO: 26555 - DNA, 583 bp, Homo sapiens
  misc_feature (1)...(583): n = A,T,C or G
tgaagcannaaaggtttgancacattcangnggnngattcggtccactatccgtgtggtggaattccagatacttagtggtaacaatttgctgtataactttgtagatttcaaaatatgctgatatgtaaaaatataaatttttaaccaaaactacataaccagttcagtaacatcttttttaaaattttttaatgtttaggggtgcatagcagatacatatatttatgggttacatgagatattttgacacaggcatacaatgcataatagtctctttttcatttaatacataataattgtctttctgtttcagaaataataaaagtatcaaaattttaatggctgcatagtattccattatatggatataccgtgatttccaaatttccgctgttttgaacagtagtgtagtgaactttcctttacacatgtctttgagtataggacagattatctccttggaataaatatctaaggatggaattactgggtcaagggcaatgtatattntacattntgctacgtaacaatacagcagtcatctgagatacattnttcctcacctncgtattattttctgg

SEQ ID NO: 26556 - DNA, 560 bp, Homo sapiens
  misc_feature (1)...(560): n = A,T,C or G
actcgaccacagtcagtgtggggatttgaactgccaccaacaaaattggctgcaaccatcccctaccaggacccggcccctacagggtgaagttcctggtgatgaatgacgaaggacccgtggctgaaaccaagtggtccagcgacactcgcctgcagcaagcccaggcacttcgggctgtccccggcccccagagcccgggcaccgtggtcatcatcgccatcctgtctatcctcctggccgtcctcctcacggtcctcctggctgtgctcatatacacctgcttcaacagctgcaggagcacttccctatcangcccagaggaggcagggagtgtgagaagatacaccacgcacctcgcgttcagcactcctgccgagggggcttcctgaggggttccagaggggcccacgtgtccctccacctcctccctggcccaggctgcagagcctgagctgggacacgcnctgaagcttctggaccctgagagagaaagnttcntttcttactatnttttttttttttttggagacggagctcactctgccgccaggctgcgg

SEQ ID NO: 26557 - DNA, 573 bp, Homo sapiens
  misc_feature (1)...(573): n = A,T,C or G
ngtcgaacactntnannannnnnnttttgaatcactactccgtgtggtggaattccccgacatgtccttccgcnagtggtccggcagagcaaattccggcatgtgttcgggcagccggtcaagaacgaccagtgctatgaggacattcgcgtgtcccgtgttacctgggacagcaccttctgcgccgtcaaccccaagttcctggcggtgattgtggaggccagtggagggggtgcctttctggtgctccccctaagcaagacgggccgcattgacaaggcctacccgacggtgtgtgggcacacgggacctgtcctggacatcgactggtgtcctcacaacgacgaagtcatagccagcggctcggaggactgcacggtcatggtgtggcagatcccagagaacgggctgacctccccgctgacagagccggtggtggtactggaggggcacaccaagcgagtgggcatcatcgcctggcaccccacggnccgaaacgtgctgctcagtgcaggctgcgacaacgtggtattcatctggaatgttggcacagcggangagctgtaccgcctg

SEQ ID NO: 26558 - DNA, 574 bp, Homo sapiens
  misc_feature (1)...(574): n = A,T,C or G
agtgtgaaanaaattgacactatccgtgtggtggatttgtaggactganaagaacgcacaggaagcacttggcactgggctcaccattagagcccaatgactgggtcctgttattatttttagagacgggggctcgctctgttgccttgaaaatatttaggaagtgccagccaggtgttggctcccattgctgccactatgatcgtcagtggtgttggtgtgatttgtgctaggacctcgggccagccatgtcccccagggactcagtttccttatgcagaaactgggcaggattggctgtcctcaagcattggttgtttttagcacccctgaggaacttcgtacaaatccaggcgccctggttcctccccaccctctccctctagacccactgagtcagaatctcccaagacagggcaactccagggacaggcaaactgtctcatgcccaccaaggcctgagtgccatggngaagggcctggngggctctgatgggtcacagttggggccttttcttnactaacccatcatnctctctccttcacctgccagggcctggagattgtgacccan

SEQ ID NO: 26559 - DNA, 491 bp, Homo sapiens
  misc_feature (1)...(491): n = A,T,C or G
tgggatcngnnnaatcgagaatatagtcactgtggnggaattccgaggtggngggatcaatggagcccaggacttttgaggccagcctgggcaacatagcaagatcccatctctacaaaagaatagaaaaattagccccaggagtatagctcaggggtagagcatttgactgcaaaaattagccaggcgtggagatgtgtgcctctagccccagctactcatgaggctgaggcaggaggactgtttgagcctgggaggtggaggctgcagcgaactgtgattgccgtccagcctggatgacacattgagaccctgtctgtaaaaaagaaggaagcccagcgttcccttctctctccacttactgtccccattgctgtccctggagtacagccagcacaggtgaaggcgagggggacagacagacagactgcccctccgtctgccgtggccctgcagaccaccctatctgctccaggttctgaagaaggccn

SEQ ID NO: 26560 - DNA, 482 bp, Homo sapiens
gaaacgaacttgattcgtatccatgtggcggaattctagaagaatgccggatcctccggggacctgatgggctgagtcgagggctgctcttcacctatcgtggtgaagtttgctgacactcagaaggacaaagagcaaaggcgcctccagcagcagctcgctcagcagatgcagcagctcatcactgccacctgggggaacctgacagggctgggcggactgaccccacagtatctggcgctcctgcagcaggccacctcctccagcaacctgggtgcgttcagcggcattcaacaaatggcaggcatgaatgctttacagttgcagaacctggcgacgctggctgctgctgcagctgcggcccacacctcaggcaccatcaccaatgcaaaccctctctctaccacgagcagcgccctgggagccctcacgagtcccgtggctgcttcaacccccaactacactgctggtgcagccatgaa

SEQ ID NO: 26561 - DNA, 457 bp, Homo sapiens
gcggtcctgaggctgtggctacggctgctccggagctggtggcgccgcgataggagagccgatggccaagtggggtgagggagacccacgctggatcgtggaggagcgggcggacgccaccaacgtcaacaactggcactggacggagagagatgcttcaaattggtccacggataagctgaaaacactgttcttggcagtgcaggttcaaaatgaagaaggcaagtgtgaggtgacggaagtgagtaagcttgatggagaggcatccattaacaatcgcaaagggaaacttatcttcttttatgaatggagcgtcaaactaaactggacaggtacttctaagtcaggagtacagtacaaaggacatgtggagatccccaatttgtctgatgaaaacagcgtggatgaagtggagattagtgtgagccttgccaaagatgagcctgacacaaatctc

SEQ ID NO: 26562 - DNA, 566 bp, Homo sapiens
  misc_feature (1)...(566): n = A,T,C or G
cttcgcattcgaatccctatccgngnnggggaattcgaagcttcctgacatgggctgcagtcttcctgagcacagggcacaccaagaagcaagccataggcagatctgtgagtcaaagaatgggcccccttatccccagggagctggccagttagattatgggtccaaagggattccagacacttctgagccagtcagctaccacaactctggagtaaaatatgctgcatccgggcaagaatctttaagactgaaccacaaagaggtaaggctctccaaagagatggagcgaccctgggttaggcagccttctgccccagagaaacactccacagactgctacaaggaggaagaacacctcactcagtcaatcgtcccaccccctaaaccagagaggagtcatagcctcaaactacatcatacccacaacgtggagagggaccccagtgtgctgtaccagtaccaaccacacggcaagcgccagagcagtgtgactggtgtgtcccagtatgataacctggaaattaccactccctgcctcagcaccagcgaggagtcgttggagg

SEQ ID NO: 26563 - DNA, 506 bp, Homo sapiens
  misc_feature (1)...(506): n = A,T,C or G
gggatcccnnnnatcgagaccctatnccattgaggagccatatccacgcgtggtggaattcggaggctcaacttcaacatggccgaagcaagtagcgccaatctaggcagcggctgtgaggaaaaaaggcatgaggggtcgtcttccgaatctgagccacccggcactaccatttcgagggtgaagctcctccacaccatggtggacacttttcttcagaagctggtcgccgccggcagctaccagagattcactgactgctataagtgcttctaccagttgcagcctgcgatgacacagcgaatctatgacaagtttatagctcagttgcagacatctatccgggaggaaatctctgacatcaaagaggaggggaacctagaagctgtcttgaatgccttggataaaattgtggaagaaggcaaagtccgcaaagagccagcctggcgccccagcgggatcccagagaaggatctgcacagtgttatggcaccctacttcctgca

SEQ ID NO: 26564 - DNA, 503 bp, Homo sapiens
  misc_feature (1)...(503): n = A,T,C or G
gatggggggnnnnnnnttttggaccctagtcattgaggtgcaattcgacacgtgtgagagtaccgtacaggtgagcaagttgcaagacctcatccaccgcatcaagatggcccggtgcagaggacggtttgtctgcccagtaatcctgttcaagggcaagaagtggtgacacgcatctttttgataaggtcagaggctatgacatcaagctgcttcgatacctgtcagtcaaatacatctgtgacctgatggtggagaacaagaaggtgaagtttggcatgaatgtaacctcctctgagaaggtggacaaagcccagcgctatgccgacttcactctcctctccatcccgtatccaggctgtgaatttttcaaggaatataaagatcgggattacatggcagaagggctcatatttaactggaagcaggactacgttgatgccccattgagcatccccgacttcctgactcactctctgaacattgactggagccagtatcag

SEQ ID NO: 26565 - DNA, 504 bp, Homo sapiens
  misc_feature (1)...(504): n = A,T,C or G
tgagggcagggggnnatttggaccctannatttgagtccctagtccatgtggtggaattcgtcgaggcggaggctttagaggtcgtggacgaggaggaggtggaggcggcggcggcggtggaggaggaggaagaggtggtggaggcttccattctggtggcaaccggggtcgtggtcggggaggaaaaagaggaaaccagtcggggaagaatgtgatggtggagccgcatcggcatgagggtgtcttcatttgtcgaggaaaggaagatgcactggtcaccaagaacctggtccctggggaatcagtttatggagagaagagagtctcgatttcggaaggagatgacaaaattgagtaccgagcctggaaccccttccgctccaagctagcagcagcaatcctgggtggtgtggaccagatccacatcaaaccgggggctaaggttctctacctcgnggctgcctcgggcaccacggnctcccatgtctctgacatcgntggtc

SEQ ID NO: 26566 - DNA, 487 bp, Homo sapiens
  misc_feature (1)...(487): n = A,T,C or G
nttcgagaccctagtcattgaggtgcaatatcaaagggattgttctggtcttactcataactgggtggtttgagggtgactgaagtcgtgcttttcctgtgtgtgctgccagcacagggctgtaaatgcagatattgcgcctgtgtgcgtgtgtataagtcaagctccaagaggctcctgaatgtgactggcgtgctgagaatgtgtttacgctgtttaatgtctgccaggtgagggttacactgaagatgcacaatccctaaaataaagatcaccacttccccaaagaagcagccctcgggtccatgtgttgttcagacatgtgaagagaagcaagacagagggtctcagatggacgagggctctccaagggaatgcctggggattcacccagtggtccccagaggtgctccatggaggcaacaagtcattccatgaagccccagaggtagaagggacctcaagcaccacgccctccagggcagcc

SEQ ID NO: 26567 - DNA, 460 bp, Homo sapiens
  misc_feature (1)...(460): n = A,T,C or G
tgcggctnnntnnnaacggactgcacncntccgtctggncgaattcgtgcattggagctggaacagggtcaatcctccaatggtaactaagccctcctgtgcaacatcttaagtgactggagggaccagtcggtcttgtgttcacattgaggctagaagctgtctccaggggagtaaaaacggattatttagtcttcaacaggacactgcccctagaggcgttgcagctgtggctgccgtgtcacatctgtgtcattaggtggcagagattagagaggctatgtctacgctcagcgttctgccccgtgaacgtttgaatgtttgatagtctcacactcctgttttgtggacaggcatctgttttccttcgctggtatctgggagagagggtgggccctgtgagtgggctttctaaccctcgcgctgggctaggctggcctctangggtctgaaaggatag

SEQ ID NO: 26568 - DNA, 504 bp, Homo sapiens
  misc_feature (1)...(504): n = A,T,C or G
gatgggncaggcccccttttgaanccctgnnattgagagcatagtccangnggtggaattcctcctatgatgagaagtacctgattgccacctcagagcagcccattgctgccctgcaccgggatgagtggctccggccggaggacctgcccatcaagtatgctggcctgtctacctgcttccgtcaggaggtgggctcccatggccgtgacacccgtggcatcttccgagtccatcagtttgagaagattgaacagtttgtgtactcatcaccccatgacaacaagtcatgggagatgtttgaagagatgattaccaccgcagaggagttccaccagtccctggggattccttaccacattgtgaatattgtctcaggttctttgaatcatgctgccagtaagaagcttgacctggaggcctggtttccgggctcaggagccttccgtgagttggtctcctgttctaattgcacggattaccaggctcgccggcttcgaatcc

SEQ ID NO: 26569 - DNA, 489 bp, Homo sapiens
  misc_feature (1)...(489): n = A,T,C or G
natcgagacccctagtccattgaggagcaattcgcgccgcctctctgctcttccctgcgcccgcagacgtcgctcaggagcgggagggccgctctgcgagagctccgaagccgtgagaacttcctcagcaagctcaaccgggagctgatcgagaccatccaggagatggagaacagcacgaccctgcacgtgcgggccctgctgcagcagcaggacaccttggcgaccatcatcgacatcttggagtactcaaacaagaagaggctgcagcaattgaaatctgagcttcaggagtgggaagaaaagaagaaatgcgagatgagctatcttgagcagcaggcagagcagctgaatgccaagattgagaagacccaggaggaagtgaacttcctgagcacttacatggaccatgagtattccatcaagtctgtccagatctgcactcttatgcgccagctgcagcaggttaaggacagccagcaggatgag

SEQ ID NO: 26570 - DNA, 497 bp, Homo sapiens
  misc_feature (1)...(497): n = A,T,C or G
agggcaanatttgganccctannnattgagagccatatccangaggnggaattcgcagcggttgggctcgcggcgagcggacggggtcgagtcagtgcgttcgcgcgagttggaatcgaagcctcttaaaatggcagatgacttggacttcgagacaggagatgcaggggcctcagccaccttcccaatgcagtgctcagcattacgtaagaatggctttgtggtgctcaaaggccggccatgtaagatcgtcgagatgtctacttcgaagactggcaagcacggccacgccaaggtccatctggttggtattgacatctttactgggaagaaatatgaagatatctgcccgtcaactcataatatggatgtccccaacatcaaaaggaatgacttccagctgattggcatccaggatgggtacctatcactgctccaggacagcggggaggtacgagaggaccttcgtctccctgagggagaccttggcaaggaga

SEQ ID NO: 26571 - DNA, 474 bp, Homo sapiens
  misc_feature (1)...(474): n = A,T,C or G
ttggccggggggcnnncctcgagaacatggagancagtnggaannnccggngacatggtaccactcagcagggctgtcactgtaagcatggactcccaggagacagtgtgggaaacgctcctgctttaattccccgagaaacggctcttgctgactggatgcaggagggcaggggccaccacagattaaagctgttactgcacacgcagaggccggcttcttcctccaggggggccacagggtggggtgggagtcttctgggcctggcccagcttccctcaaggcgtgcgaggccatcagttgtctgagctcagaacccagcagacctgcctggctctgcagcttggtcagactaagacccttccaaggccgtaggattgcacctccaggcccagtggagcctggcagctttccagccaggttctggatcctgacgagctgctgagacagcatcaaggtggggcaggtggggcg

SEQ ID NO: 26572 - DNA, 501 bp, Homo sapiens
  misc_feature (1)...(501): n = A,T,C or G
ggcgcgggagcccccaattgagaccctagtcattgtggngcaattccggnttcggtagcgacggtagctctagccgggcctgagctgtgctagcacctcccccaggagaccgttgcagtcggccagcccccttctccacggtaaccatgtgcgaccgaaaggccgtgatcaaaaatgcggacatgtcggaagagatgcaacaggactcggtggagtgcgctactcaggcgctggagaaatacaacatagagaaggacattgcggctcatatcaagaaggaatttgacaagaagtacaatcccacctggcattgcatcgtggggaggaacttcggtagttatgtgacacatgaaaccaaacacttcatctacttctacctgggccaagtggccattcttctgttcaaatctggttaaaagcatggactgtgccacacacccagtgatccatccaaaaacaaggactgcagcctanattccaaataccagagactgaaatttt

SEQ ID NO: 26573 - DNA, 505 bp, Homo sapiens
  misc_feature (1)...(505): n = A,T,C or G
tgtagggnacgccgcnttttggaaccctannnatcgaagaccctantccatgtggnggaattccacagatggggccaacaaaccgcctggacttctggagcccacgtccactctggtccgtgtgaagaaaagtgcggccaccctgggcatcgccatcgagggtggcgccaacacccgccagcccctgcctaggattgtcactattcagagaggcggctcagctcacaactgtgggcagctcaaggtgggccacgtgattctggaagtgaatgggctgacgcttcggggcaaggagcaccgggaggccgcccgcattatcgccgaggccttcaagactaaggaccgtgactacattgactttctggtcactgagttcaatgtgatgctctagaggccaaggcctgagggcctcccaccactgcccagcccctggtcccagtccctttccaccgttggcttcatcaagctccttgcggggttggggctgcatggccagggtggcagg

SEQ ID NO: 26574 - DNA, 500 bp, Homo sapiens
  misc_feature (1)...(500): n = A,T,C or G
gggggagnccnnnttttggganccctannnatcgagatccactgtccatgtggnggaattcggtgaatgagttccttatatattttggatattaaccttttatttgatacatggtttggaaatattttctccctttctgtaggttgcctttttgttcgctgtgcagaagctttttagtttgatatagtcccacttgtttatatcacatcttaatgtgactgtggtcagttctacccttaatggttgggtgggctacactagtagacccaagtggactgaggtttaaatgcagtagcagttaagttttgcttatgtcctggcactgtcccagtgggtcagcaggctgtccctctcggtgcggtctttcggatcctatctcatgggcctgtgtcatcttcagcacctggcttccgaggttgcactgggaactcattcctatcaacctgaaaagggaagagatcgtggatgagttcttcctgggagtcaggtgtatgtgggcc

SEQ ID NO: 26575 - DNA, 497 bp, Homo sapiens
  misc_feature (1)...(497): n = A,T,C or G
gggggatnnnnnaattgagtccctagtccatcgtggtgcaattcaatagtcagcacgcccagttatggatgctatgtgatcaaaaaatacagtttgacagagcaatgaatgatggcaaatatcatttggctgattcacttgttacaggaatcacagctctcaatagcatagagggtgtttataggaaagcggttgtattacaagctcagaaccaaatgtcagaggcacataagcttttacaaaaattgttggttcattgtcagaaactgaagaacacagaaatggtgatcaggtaaggggtctcttgtacatctcacggagatgtggnggtggatcttctcatcctgtgttttcctctttacggncagtgtcctactgtccgtggcagagctgtactggcgatcttcctcccctaccatcgcgctgcccatgctcctgcaggctctggccctctccaaggagtaccggntacagtacttggcctctgaaacagtgct

SEQ ID NO: 26576 - DNA, 471 bp, Homo sapiens
  misc_feature (1)...(471): n = A,T,C or G
agagcgaggggccccaatgaggccacctcagtggccctcggaancgccngcagcaattccatcgataaccggcggggagcacagaatttctgcccatccagctgcctggctttacaggcgggggtgccaccaccctctaaccccagggcagccccggaggacaggcaagggcctgagaccactgccgactcaaagccaaagcgagctcctgcttagggcaggtcagcaggcactgtgcccaggaagagcctgcggcctcggcgtcccccagtctccaggagcctctccctccgagatacccacccagctttgtcaatcacccaagcactttatgcatatagagacagaacctggacctcaccagggactgctgggcagcgattcctggcagtggcctggtgtttgtacatacacatatgcagacacatgccagggccccccaagcccgagcaccggaccacgttgctggcc

SEQ ID NO: 26577 - DNA, 450 bp, Homo sapiens
  misc_feature (1)...(450): n = A,T,C or G
attgatgactcttagncttggtggccgtattccaggcccgtggcagagacctgctggccagggaggcggtgcgtggctgtgagatatatctgaaggagcacggacagctcttgcatcgagaccccttcactgtcatctgtggccgaaagaagtgccttcgccatgtctttctcttcgagcatctcctcctgttcagcaagctcaagggccctgaaggggggtcagagatgtttgtttacaagcaggcctttaagactgctgatatggggctgacagaaaacatcggggacagcggactctgctttgagttgtggtttcggcggcggcgtgcacgagaggcatacactctgcaggcaacctcaccagagatcaaactcaagtggacaagttctattgcccagctgctgtggagacaggcagcccacaacaaggagctccgagtgcagcagn

SEQ ID NO: 26578 - DNA, 463 bp, Homo sapiens
  misc_feature (1)...(463): n = A,T,C or G
nactttagacancagtaagaagcgncgnggaattctcagctgctggctcccagagcgcagcccaggcgtcctcaacggggagccccaaatgtccacgcccagaacaacagttggcaggacaggtgtgacacagccacagcagaggcaaggggtgccaggagtccccagcggcatcctcggggagatgctggtgaggggtccgtacagggtggggtccccacccctagccccttactgaggggggagtgcagcagttggcctgcttgtctggcggagaaagccagctccctgcaccctcggggctgagtcagatctgggtctgccgcaaaggccttgcctagaccaggtcacactgatgccctggtttccctatctgtaaaatggggccaatgacacctacctcactgggtcaccatcgagatcaatcctcctccctgccccgacacctcgggcacatcgcatg

SEQ ID NO: 26579 - DNA, 485 bp, Homo sapiens
  misc_feature (1)...(485): n = A,T,C or G
gannaaatcgagaccctagnccattgtagagcaattcggcggctatgccgagagcccggagcggccggaggagcagaggggccggcgggagggaggaaacctttctgcgagtacgagccaaccggcagacccgactgaatgctcggattgggaaaatgaaacggaggaagcaagatgaagggcagagggaaggctcctgcatggctgaggatgatgctgtggacatcgagcatgagaacaacaaccgctttgaggagtatgagtggtgtggacagaagcggatacgggccaccactctcctggaaggtggcttccgaggctctggcttcatcatgtgcagcggcaaagagaacccggacagtgatgctgacttggatgtggatggggatgacactctggagtatgggaagccacaatacacagaggctgatgtcatcccctgcacaggcgaggagcctggtgaagccaaggagagagaggcactt

SEQ ID NO: 26580 - DNA, 489 bp, Homo sapiens
  misc_feature (1)...(489): n = A,T,C or G
ggcgaaatcgagaccctnnnatttgagatccatatccatgtggtggaattcgtgaaaccaaagaagcggagaaagagctaccggagcttcttacctgagaagagtggctaccctgacatcggcttccccctcttcccactttccaagggtttcatcaagagcatccggggtgtcctgacgcagttccgggctgccctgctagaggcaggcatgccggagtgcacagaggacaagtagctgccaggcacagaggaaagagcatcaccgtgggagaggccagccgccgcctgctcactcccccccggaatcacccctcttcccatgcccctctgtccccactgcaaacccactgccctcttctccccaaggtgagtttgatgctgaagtgcaagaagtgtgttgagatgctgccgtttctattttgaagcgagctttcaacaggcgggtcccctgtggcaaagaaaatcggaaccctgttgccgattttcn

SEQ ID NO: 26581 - DNA, 473 bp, Homo sapiens
  misc_feature (1)...(473): n = A,T,C or G
aggggaagaagaattgtagnccntnnntttgtagatcattagtccgtgcggtggaattccagggtcctgggtcttcccaccataccccgagatcaggccccacctgccagctctactgggcttggagcacgtccgggcagtggagggagggacacagcctgggacaggaagcctcttgggttggagcaggagaccctcatttgccacccagaccaatgtgagcctgcccccagccccctctcattggaagtggcaaggggcttccctcctgggggcagctacactcgtccccagaggcacattcgtgcacattctcacagacaccatctcacacgttggctttggacaaccaggccccaacttggtccctgccctagggacctccagcctggtgcccagtgctcaggccacctcctggtccagtcaccacctgcagcctcggcagggcaggtacaggggccacctcggatggg

SEQ ID NO: 26582 - DNA, 473 bp, Homo sapiens
  misc_feature (1)...(473): n = A,T,C or G
ggggaaaaaaaattgagacccttnnattgtagaccttagtcagtgcggnggaattcggccactaagggttgccctctggccccctgtgactcttctcatcagcatggcccaggatgcagcatcctggcatccaaggaggtgccactaagtagctacaagatgtggggcctggcgagaggaaccacaaaagaacgcaaaaaaaaaaagcaacaaaaagccagtgacaaacctgcgtggatggcggaaggcgagcaggagtttggtgatgcagtttgaaaaccgggactgaaacccccccactggaggggtacgtggggtgcaaaagcaaaagtggcaccagtgggcttgactgctccagagaggggcattgttcctcagtgcagaaacaaggcgcctttagcccccttgtcgtttttggccccaaaagtgccacagttacacagggtggccctggagcaaagtgagtgctaatg

SEQ ID NO: 26583 - DNA, 565 bp, Homo sapiens
  misc_feature (1)...(565): n = A,T,C or G
catcgacatcgatcacccatccgcgnggngcaattcgctggacagtgacggcgagtttctgcccgtaagggactttgtggcacctcaccttgcccagccaactgggagccagtcaccacctccagggtctaagaggctagcgttcttgcggtgggagttccccaacttcaacagccgaagcaaggacttgctgggtcgctttgttctggcccggcgacacatagtggctgcaggcttcctgatagtggacgtcccattctatgagtggctggaactcaagtctgaatggcagaaaggcgcctacctcaaggacaagatgcgcaaagcggtggctgaggagctggccaagtgacttgggccagcagcatggactgcgtgcctcttcgccggaggtctagctgtgggcggccaagaagggtcacccttgaggacaaacctctgtgcaggaccttggccagagtggggagggtggccagccactctgagggacagaacgtcctcttgtgtataataaacctttaattttggtgttggacccctgggggccttccaggcttgggcaccg

SEQ ID NO: 26584 - DNA, 472 bp, Homo sapiens
  misc_feature (1)...(472): n = A,T,C or G
aggggagaannnnactgtagacactagtcttgtgcggcggaattcccacgggccagtgactttacctctctgatccctgctccttgcctagatagtggggatcacgtcgtagtgtatgtaaagaaccgggtgcgggacttggcacctgggaagtgtcttaatacatgtctgtcgagaaaaggaagggtctcgacgtgcggaaacaagacggatgccaggaaatacgtctgcccacctccacgcccctgacagcggaggctcctggaggtctggtgagaggccccacgtgctccagccccctccgctctgtgctgagctctgcctttaagagactgcagctcctgcctctaaaaagcctttcaaaattctttattaaattttcatggcgcataaagtcaaggttctgttacttggcctcagttgtcttggcaacttcataaaacgcaataataaaacgaagctgagtgttgct

SEQ ID NO: 26585 - DNA, 474 bp, Homo sapiens
  misc_feature (1)...(474): n = A,T,C or G
gggggaaantttgatncccctnnnatcgtagtcattagtccagtgcggtggaattcggctcacagacacccctccaggatggtagccgcaccccacactacggctcacagacgcccctgcatgatggcagccgcactcctgcccagagtggggcctgggaccccaacaaccccaacacgccgtcacgggctgaggaagaatatgagtatgctttcgatgatgagcccaccccgtccccgcaggcctatgggggaacccccaatccccaaacacctggctacccagacccctcgtccccacaggtcaacccacaatacaacccgcagacgccagggacgccggccatgtacaacacagaccagttctctccctatgctgccccctccccacaaggttcctaccagcccagccccagcccccagagctaccaccaggtggcgccaagcccagcaggctaccagaatacccactccn

SEQ ID NO: 26586 - DNA, 487 bp, Homo sapiens
  misc_feature (1)...(487): n = A,T,C or G
gtccnctccntttgagncccctaatagtagaccctagtccacgcggcggaattcccgggattgatcacgcgatagcatatgaacacgaggtgggtgttctgttatgacacgggccgcagccgttcataggcctctcgccctgagagcacagagcagcggaggccacggtacgccccctccctgcctgtactcttacgcttgaaggggaaggggccaggcaagcgaccctgccttagggcctcaattttcttatctatacaatgggcagcaagccaggagtgctggcacaggcctgtggtcgcagctactcgggaggctgaggccggaggatcgcttgagcccaggaggtcaaggctacagtgagccgtgatcatgccactgcactccagcctgggtgacagagcgagaccctgtctcttaacaacaaaacccatgagcggcagccccccagtcctggatggtggtaaagaatcctcaagatcaaacc

SEQ ID NO: 26587 - DNA, 575 bp, Homo sapiens
  misc_feature (1)...(575): n = A,T,C or G
aggagtctgaccacagttcgtgtgtttggaattacggtatccacctgaccaggctccgccacgatgagatcatcaccctgctcaagaatgtgggcgagcgcgtggtgctggagctcctgagaataaccccaggatcatttcagagacagtggacgtctccctctacaaggagggcaatagctttggctttgtccttagaggaggtgcccatgaagatgggcacaagtcccgcccgcttgtcctgacctacgtgcggcccggtggccctgccgacagggagggctccctgaaggtgggcgacaggctgctcagcgtcgatggaatcccgctgcacggngccagccatgccaccgccctggccaccctgcggcagtgcagccacgaggcactctttcaggtggagtatgatgtggccacccctgacacggtggctaatgcttcgggacccttgatggtggaaatagtcaagacgccagggtctgccctggngatctcgctcaccaccacctccctccggnaacagtcagtcattaccatcgaccgcatcaagccagccagcgtggtggacaggagcg

SEQ ID NO: 26588 - DNA, 287 bp, Homo sapiens
gagattcctatgaaaaagaaggacgtgtaccccattgggagagcccgtggcttaccatcctgtgcccggatctcgcctggggaccagcggctggcacagagcgcggagatgtaccactaccagcaccaacggccccacatactccgcctgcaccggccttaagagccacccacggagctggacacggtctcctcggatgaggagaatgaggacggagacttcacggtgtacgagtgcccgggcctggccccgaccggggaaatggaggtgcgcaacccttctgtcag

SEQ ID NO: 26589 - DNA, 569 bp, Homo sapiens
  misc_feature (1)...(569): n = A,T,C or G
nggagtctgaccaccgttcagngngttggaattccatcacttgagccccagagttagaggctgcagtgagctatgatcatgccgcagtactccagcctgggtgacagagcaagactctgtctctaaaaaaagagaaaaggaaatcattcctgggccactgtcctagactgcactgcaggaatgcctcatgccggtcgagctctgccctgctgtgagcagcagccaccacacagcttctaaggctgcgatgagcagcctgggtgcaatagaagccatggggaagccttgacccagacttgggaggagtagggagcttcacaggacaggtgacatcttagctgagacttgaagggccgggagcagtgagtcaggccgagaagtagcanagaagactgttctgcacagaggaacacaggtgtgaaggctggaggacgggaggaaaggaggctggactgccctgggtggngagcgccatggctggaggggcggtngctcaatgccccgcgccccaggattcanggctggctgaggctacnagaatgtgccaccgtgacatcacatgaagaggg

SEQ ID NO: 26590 - DNA, 474 bp, Homo sapiens
  misc_feature (1)...(474): n = A,T,C or G
gagggagaaaanacggatncccctnnnnctgatgaccatagtacatgcggnggaattccggcaacctctgcagcgtcagtgctgctggcgggtgcaagaaactggtggcgacactgcctgagcccgctgctgttgccaagagtctcacttcatcaccatgctggagtgcagtggcactatctgagatcactgcaatctccgcctctcggattcaagctgttctcgtgcctcagcctcccgagtagtagctgggagtacaggcatgtgccaccatgcccagctaatttttgtatttttggtacagacctggtttcgccttgttggccaggctggtctcgagcttctgacctcaagtgatccgcctgcctcggccttccaaagtgctgggattacaggcgtgaaccactgagcctggttagttattggctctttttaaagattgtgttgctttctgcctcaatattaatatgttgg

SEQ ID NO: 26591 - DNA, 454 bp, Homo sapiens
  misc_feature (1)...(454): n = A,T,C or G
cggagaactgaaaccatcgnaaactcgtncccctacgganagnctggnggaattcgaagaacaggagataaagccaggacactgcactgcagacaccgaggagaagaattagcaagcacgaaggcgggcaagcatcacaaaccatgcaagtcctgtgatgacctccaaagctccccaggtgggcggctctgcagtacagcggggtctggttccacccaacccaggggtttccaaaagataatttcctattccccaaatctgacactgctgagtgcctcagccctttccacctcacttcctgaaatgaatcccatatccattggtttcttcatcctgctaccaggactatctgagactaagacatcctggaaggagtttcagagggacccaaagaagaaaatggtcgctactgagccacaaccccacacaatcccagagggtcccaggggcatta

SEQ ID NO: 26592 - DNA, 466 bp, Homo sapiens
  misc_feature (1)...(466): n = A,T,C or G
ggcgcggggnnnnagaactgatacctccgaaggctgaggacatcagcagngcggaggcggagtcagggcgcccgcgcgtgggccccgcccccttatgtagggtataaagccccttccgctcacagtttccctagtcctcgaaggctcggaagcccgtcaccatgtcgtgcgagtcgtctatggttctcgggtactgggatattcgtgggctggcgcacgccatccgcctgctcctggagttcacggatacctcttatgaggagaaacggtacacgtgcggggaagctcctgactatgatcgaagccaatggctggatgtgaaattcaagctagacctggactttcctaatctgccctacctcctggatgggaagaacaagatcacccagagcaatgccatcttgcgctacatcgctcgcaagcacaacatgtgtggtgagactgaagaagaaaagattcgagtggg

SEQ ID NO: 26593 - DNA, 477 bp, Homo sapiens
  misc_feature (1)...(477): n = A,T,C or G
agggcggnnnnnnnnagacctgatagctcccgaannactgatgngctancgnacagncnggnggaattcgaactgaggggtgggcagnacagacctgtctgttggtcctgtgttctgagcattgcagaacctcgactgctgacttgggacccccctgggctctgctgtacctgcaaaccagaggcactgctatccaggcctttgccccagctcctcggccctggatggtgctgaaaggggcatcatctgtggggtcggctggctctcatggctgggccgctcaggcatagaggatgcaggtggctgctcacaatctggaatttgctctgtctttctgtagttgcagcatttgcaagaagaagcagaatagacacttcattgttccagcttctcgcttcaagctcctgaagggagctgagcacataacgacttacacgttcaatactcacaaagcccagcataccttctgtaagagag

SEQ ID NO: 26594 - DNA, 458 bp, Homo sapiens
  misc_feature (1)...(458): n = A,T,C or G
gaaatgatagctccgcaancctgaganctccgnacagngcggnggaattaaagctttcaagcagctttaaagagtgcactgtatttgaataatttactggccgggtgcggtggctcacgcctgtaatcccagcactttgggaggccgaggcgggcggatcacgaggtcaggagatcgagaccatcctggctaacacggtgagaccccgtctctaccaaaaatacagaaaaaatacaaaaaattagccgggcgtgttggtgggcgcctgtagtcccagctactcgggaggctgaggcaggagaatggggtgaacctgggaggtggagcctgcagtgagccgagatcacgccactgcactccagcctgggcgacagagcaagactccgtctcaaaaaaaaagaataatttctttaggtctcacacagtgaaaagaactcgcaagactaaagacccattga

SEQ ID NO: 26595 - DNA, 470 bp, Homo sapiens
  misc_feature (1)...(470): n = A,T,C or G
gagggaaaagnnnctgatnacattagntttgatggcggtattacagacgtggaggagtgtaaccaggaccactggggctgacagagagctgggggtgttatgtttgtgtgttatgtttgaactcaggaaggaggattgagagttggggggaatgacccgagtgccatgtgctgtgcccatgccaaataaatttggtttgaattcatcaggtgaagtattacaacgccgagagttacgaagtggaacgctatcgagaggccatcatcaaatatcagggtttggagtggaagtcgagcgcttcactggttttactaaatcagacccagaacctggtgattgggctcgggctcctcgccggctccctgctttgcgcatactttgtcactgagcagaagctacaggttggggactatgtgctctttggcacctacattatccagctgtacatgcccctcaattggtttggcacn

SEQ ID NO: 26596 - DNA, 455 bp, Homo sapiens
  misc_feature (1)...(455): n = A,T,C or G
aactgagaccctgttgagggcggtaannanngcgnnngagaacgtgcacttcagctatgccgatgggcgggagactctgcaggacgtgtctttcactgtgatgcctggacagacacttgccctggtgggcccatctggggcagggaagagcacaattttgcgcctgctgtttcgcttctacgacatcagctctggctgcatccgaatagatgggcaggacatttcacaggtgacccaggcctctctccggtctcacattggagttgtgccccaagacactgtcctctttaatgacaccatcgccgacaatatccgttacggccgtgtcacagctgggaatgatgaggtggaggctgctgctcaggctgcaggcatccatgatgccattatggctttccctgaagggtacaggacacaggtgggcgagcggggactgaagctgagcggcggngaga

SEQ ID NO: 26597 - DNA, 466 bp, Homo sapiens
  misc_feature (1)...(466): n = A,T,C or G
gggcggnnnnnnnngacctgatacctccgaagnattgagnacctcggaaggacgnnnnntataanacacttggttcctgggtttggactagattaggtgagagtgtccctgaagtctggacccctatagaatctggtctaaggagctgatgaacaataaattaaaaatactttaagatgtcattttcatctattaaaatggaaaaaaatacaaatgtttcacagctcacagtattaacagtatgttcccatattgccatattctgcaaagactggaaatctccatgcccctcattagggacttgggtatatctctatagagcagtaatatgcagccacaagaaataaagaggacactctctatgtattgttacatattgttaagcagagatctccaaaatcagttgtttttttaaaagatgtaaatagtatgctatcatttgcatacaaaagggtgggagaagatt

SEQ ID NO: 26598 - DNA, 461 bp, Homo sapiens
  misc_feature (1)...(461): n = A,T,C or G
gggatgatagcatcgnannnnactgatgacgtccgtanagncnggnggaattcgaaacttcctgaagtactaaatatggaatccctacccacagtccacaatgagggtccctccagtgctgaggggaaggatattgcctttagtcctccagtgtaccctgctggaattctgcttgtgtgcaacaactgtgctgcctaccgtaaactgctggaagcccagactcccagtgtacgcaagtgggctctacgtcgacagaatgagcctttggaagtacggctgcagcggctggaacgagagcgcacggccaagaagagccggcgggacaatgagacccccgaggagcgggaggtgaggcgcatgagggaccgtgaagccaagcgcttgcagcgcatgcaggagacagacgagcagcgggcacgccggctgcagcgggatcgggaggccatgaggctgaagcggcc

SEQ ID NO: 26599 - DNA, 449 bp, Homo sapiens
  misc_feature (1)...(449): n = A,T,C or G
ggactgatacctccgcaagnactgaganctcgaaacccnatctnaggaggactctctgatgaagacccaggcggagctgctgctggagcgtctgcaggatgtggggaaggccgaagcggagcgtcccgccaggtttctcagcagcctgtgggagcgcttgcctcagaacaacttcctgaaggtgatagcggtggcgctgttgcagccgcctttgtctcgtcggccccaagaagagttggaacccggcatccacaaatcacctggagaggggagccaagtgctagtccactggcttctggggaattcggaagtctttgctgccttttgtcgcgccctcccagccgggcttttgactttagtgactagccgccacccagcgctgtctcctgtctatctgggtctgctaacagactggggtcaacgtttgcactatgaccttcagaaaggca

SEQ ID NO: 26600 - DNA, 469 bp, Homo sapiens
  misc_feature (1)...(469): n = A,T,C or G
gggaacggccttttgaaacccttactgagaccataggaagngcgnggaattccgaagcctagcttaggaggtgcccaccccatatgctgtgtggtgcctgtgtcccacatgtgcccccttcggctgcacactcgctgagaggccagtgcctctgcgtccctctgcttgtccatggtgggccaggactgagacccgggtcgactctccttggcctcccagtgtgactgtgtcatgccgtctcaccccgagtcctggcgtgccctgtagaagagggaggacacagcctctcccggatgagtcagatcgtcagatcgtcagatcagggctttgtaacatttgaaagagctaaaaactcggtgtgtcctcatctcctccttacctaaggacgcaaatcacattgtatcagataggcccaccctcatggcctcatttgagctgatttacctctttagaggccctacccccaact

SEQ ID NO: 26601 - DNA, 456 bp, Homo sapiens
  misc_feature (1)...(456): n = A,T,C or G
nttcgtagacactagtccagttcgagggccttcggaagaggggagaaaacagtggcgaaaagaaggtctcctgggaaggagcgccctgggaagctggacgcggtgggtgctcttgaggggcctcaggagtggacttggggaaaccgcccgccctgaaaactgactcagcggcgcgttactgaggccgttcctagttggaagagaattaatagcacttgtttgagaattacaagttagttccagaaatgaatcgagtgacctcacagcccgtatgcaggggtgggagagccagggtgagcccctcacctcaccccgcccccgccccggcagcgctctggaaagcctcaaagcccagcgctgcgcggaaatgttagaggcccaaggcaggtggcctgtctggactcagacccgacccagatgtccccccaggtccctaccactcagtcccacctgcct

SEQ ID NO: 26602 - DNA, 479 bp, Homo sapiens
  misc_feature (1)...(479): n = A,T,C or G
aggcgggnnnnnnnnnagaaactgatacctccgnaannactgatgccctcagnacagncnggnggaattcacctgtgcgatgcgccccaggacagccgcatcttccttgtcagcgtggaaggtatcagtgtacccctcacaccctgtgggctgtggcaccccaaggaccatctgccactttctagggcccccttactcctccacccccgctttgctgcttctggctccaaccagtgcgtgcatgaccatcacttggataggggctcagggctcctctttccagaaaccctcatgttgagagcagcataaaccagtggttaaaagcaggggctctagagtccacccagccaggttccagcctagattctgtgccccagtagctgtgtgacattggccaagttgttcaacctgtctgagccccggctctgaaaagaggggatagtgcttttcttataggcctgttgtgacaagtaaatgcg

SEQ ID NO: 26603 - DNA, 466 bp, Homo sapiens
  misc_feature (1)...(466): n = A,T,C or G
agggcggnnnnnnnagaaactgagcctccgaagnactgagactntaggacaggcnnatgggacatgcggtgctttttgagtgaatgagcgtcataaagggaaaccttctggtttccctttaggctttcgggggcccctcctcttgtgtctttggcgtggcagggagctgaagtccttgcagtcatgagcctgtcccttatggatataactgggagaaaagtctagaaagtgctgcctggggtcccaggataatgtgtccacctacctaaggcaagaatgcaatctatattatcacccttccccacgggtgcaggatttatgtcactctggaagaatgcggactccctaatcagttcacctacaatgaaaccccgggttttcagaatagattaagaccaaagcctttcagtgaaaataaatgttctgggcagaaaaaaaaaattaatgaaagtcctaagattttttt

SEQ ID NO: 26604 - DNA, 577 bp, Homo sapiens
  misc_feature (1)...(577): n = A,T,C or G
agaagtctgancacantcangntttcgatcactgtccgtgtggtggaattcttattaatttatgtatgcctctcttaataactggagaattgagaagtaattagtatcttggaggaagtatttcatgaagtcatctttgaggtgctttttgactagtttaacaaagcttctgttaatgcctccaaatttaggaatctttttaaaacgagaataattgttacaagagtggaaactttcaagtaaatagtgtggaaaaaatataatgtacatcaattttagaagtcatgaatttaggagatgccaagaatgtgcttaatttaaatactttttcctagtaaagacatttctaatgtgttaaaataagaatttttccataaacttcaaagtgcttaaaccaaaagtaagggttatgtttatgtggcaactcatgaaatacatctttcaattaaggagtgaaatgttgcctgcgatcatcaattacatcatangctattgctaatgtcaaagaataggaaagcanaatgaaagttaaatttgggagagagaccannatactcttgtagatgactngctttta

SEQ ID NO: 26605 - DNA, 468 bp, Homo sapiens
  misc_feature (1)...(468): n = A,T,C or G
ggtnaggggggnnccatggagacatattgagagcgtggaaancgccncaggcatggcgctcagcacagaagtgaaaagggaggagaagaggatgtgactttttccaaggcggtcaggaggtctcttcgcccagtgttcttggcatgtgagagaacggttcccagagatgctaccagtggaccctctgcaggactgaggaatcccagtggctcattctcctcacttgggccccctgctgttctcattttggaggactgtctcccctcaatgtggcagcccctgcggggacccctcttcttgctgctgcccagcccagcacctggtgctctgtcctgcacagagcggtgctccacaaggatgtcctattgacacggaagaggaaggcactctcgtacttccccccagggaccatcccagacacatctcttctttgtcctcaaaagactgtcaccaaaatgcccattgagc

SEQ ID NO: 26606 - DNA, 493 bp, Homo sapiens
  misc_feature (1)...(493): n = A,T,C or G
tgggcccnnnnnttcgaaaatagagaccccttgcgggaattccacaatagcctgtgcctcctgaggagagcaggaaaggcagtggtggtcttcactgtgttgtggccaggagcacatgggtgtccagagaagggtaagaaaggaaattgctgaaagccaaataccaaagcccagattatgaggttttggaggttcccaccactgaagctgcactctgaaaactgggcagtttacaaaattagaggaatcaacccattccaacttcaaaggagaccagttacctccatcctggacacaggaagccagctaaaccagcctctttctgaatgcagctcagcccagagccacttgtaattgatgtttagagaaatactataagcagcaggatggtaaacatggaatggctgccctatgctacgtggaatggtagattgctttactgttcacctagtgataacaggagtagtcacttcattttattgatgataaaatg

SEQ ID NO: 26607 - DNA, 473 bp, Homo sapiens
  misc_feature (1)...(473): n = A,T,C or G
nactgaaaccatgagancctcgnncangcggnggaattcccattccatatttgaatgtagagacattccgcttaacctccctgactcccagtaaccacaggaatggaatcttttgtggtgattacatcccaacagagttagctctagcgatgttcagctggtacagaattgtcaaactattaggattcctgaacaatctctcaatgatagagagtaattgttttgtctcacagtaccaccttttctgggtgccaaattaaaagctctcacgtttgcctcagtacttgcttgaagtcaggaatcccatctagaatagctaaatctctcttctggaccttccgctgntcccccagccatgtctgacattaggtagaaggaaaacctattttgtgaagagggtattcgaatgaaaagatcattcctaatttctagagcaacctagactatgtcatatctcttaaacattattgacn

SEQ ID NO: 26608 - DNA, 580 bp, Homo sapiens
  misc_feature (1)...(580): n = A,T,C or G
aggtnnnnnnagnnnnnnnnaggggcnnnnnngttcgaaccaccctcgaatgactagtccatgcggtggaattcagagtgtggtcttggaccagcagtgtcattagcacctgggagtcagaaatgtaaattctcaggttccaacccagatctactgaatcaaacttttaatgagccctccaggtgattgtgatgggggctaacgtttgggaaccactctgctatgcaaactttctacttgcttattaggccatctatgtactgcagattgcaagctggaatcactttggggaattctggaaaagacaggtacccaggcccctaaaaggccaattggaatctcaaggggtgggatcaaggtatgtgttttaggaattccacaggtgactaatgagctggccaggttaagaaacactaatctagactacttatgggtacttgaccaaatttctacctggagcaataaaagatgtaagggttttcccgtagagtttgagtganaaggattctaagctctggcatcaatggaacatgangttatgtcctggctttatcactttatanagtagacttgggtaagn

SEQ ID NO: 26609 - DNA, 487 bp, Homo sapiens
  misc_feature (1)...(487): n = A,T,C or G
ccccccccccngnnnattgagncccctgagatcctcgnaagngcggggaaatctggagaatgttaagagtacagacggtagagcctgcgtggcttcaaatcctagttttgccacttttgccagctgtctatgagcacagctctaacttcatcacacctcagtttgtttgcctgtaaaatggagtcaaagtaatactacttgatagttattgtaaaggttaaatcaagcaatccatgtaaagtgattagcacattatctgctaaagaggaagtgccccaaggtttccagtagctacactaatggggcatggaattttgattgcttttcaagtgatggattttttgtttgttggtgacccaaagtcattgttgcgtaattcttgggacatgagatttggaggtaaggttgtaatgtgtgaccatacaaacaacaaaaccagcaccgtgttttgaagttggaacctgaacccacgactgcgctaacaacc

SEQ ID NO: 26610 - DNA, 484 bp, Homo sapiens
  misc_feature (1)...(484): n = A,T,C or G
ccgcccccccnngnnatttgagacctgagaccntcggggaanccnggagacctttctcactgtcaaggcggngaagcacaggccgcagaggggaggggtttgacctgggggcgctcatcacatgctgtgcctagaatcgaagtccgggctcacaccagacctgcaaggccagaacccgaagactggatcttctgagaacatcagagaaagactgtccttgccatccgcactgcaacaaaacttagggatcttgaaacttgggttcataatctcacaactgagaagggtccatccacactcctggaactgtacacccattggaacctttaaggtaaagccaaggaagtctctccccagaagatggcatccttgatgtgaacggcttttgctaagatcgtggatcaagacttctactgtcatgagactctcttttttttttcttttttggagagggagtcttgctctgtcacccaggctggagtgg

SEQ ID NO: 26611 - DNA, 536 bp, Homo sapiens
  misc_feature (1)...(536): n = A,T,C or G
aggagcacatgaggcgtgcaattcagctnttatctgactagtatctatgaccattcaatatttgaagcctttagtaaggtggtgcagaaactcattccacaactgccgaccttggaaaacctattaaatatctttatatcaaattcaggtattgaaaaagcttttctctttgatgttgtcagcaaaatctacattgcaacagacagttcccctgtggatatgcaatcttatgaactttgctgtgacatgatcgatgttgtaattgatgtgtcttgtatatatgggttaaaggaagatggaagtggaagtgcttatgacaaagaatctatggcaattatcaagctgaataatacaactgtcctttatttaaaggaggtgactaaatttttggcactggtctgcattctaagggaagaaagctttgaaagaaaaggtttaatagactacaacttccactgtttccgaaaagctattcatgaagttttgagggtggtggacttctcacaggagctgtgtcaccagactagtgcctcagn

SEQ ID NO: 26612 - DNA, 459 bp, Homo sapiens
  misc_feature (1)...(459): n = A,T,C or G
catcgacnccntngnnnatgangacccttagtccangcggnggaattcggaactttcatgctaggggtttgggggactcgctggacaatgcccctggaccccccgggggtacgcgttcacgctcacctctgagaggctggaaacgcctggctgtgctttctgaatgctgtgtgcttcctgcctctgtgcctggcctgtgtgcagcacctacttgtgtccgccttcaaaaagcccttctgggtggcgtccttttccccaaaatattaggcaccagccatcaaagatactgcattgttgcctcccccacccctccccccaactgacaacatttgggctcaaatgcagcaggctgggtgcccaacacagtgcctggcgagtggtagcgcttacgtttcttttctgttgaatggatggatagctaatgaaattgtaaccaatgacaagccttgatgtttatan

SEQ ID NO: 26613 - DNA, 457 bp, Homo sapiens
  misc_feature (1)...(457): n = A,T,C or G
catcgacnccattaggcaatggaggacgattgccaaagacttactgaaaaccatttggtttcaggtcttaaccaaataacattccagcttaaaatcctttcttcctgcagtactctcatttcagacacaaatagaaaacccttacctggaggtcaatacctggcatggagcaggagcaaaaaaggcctgtgggcagccataacaaacgtcagcactcagaactccagctcatgcatggcttacagaattcctaaggtacacatgcagaactttttcattcttactttatccatatcttttttttttttttttttaaaacgggctttaattgttttccccagcctgaagggaaggggggaaacaagggttggaataatggaaccctcaccctccaaggttcaagaaatcttccggcccaaccttctggagagccgggaacaatgggggggccctaccg

SEQ ID NO: 26614 - DNA, 479 bp, Homo sapiens
  misc_feature (1)...(479): n = A,T,C or G
naattgaagccctttcgagacattcgnacagngcggnggaattcggagaaagctaaagctggggtcagggatctttaaaaggcaagcacattttgcttaatggattagctccagaggagccctgggatgggtgccagcttagctcagacagaagtcatgttcttagcgttcaggcaagtcagcctttgcataagacaccctgtcgtcgggcaggaatttgccgttacaaatcccaaacccatgacagtaggaatgtcaccccatgcttcacatatgcattatgctctgaacccagggcaactatgaccatgcttccttcaatctttattgagcaaatatatggccaaggttattcccttatctgtgactgggtggagaagaatggtcaggaagggagactgcctcactgttgaccaattccaaaacctaaggataagcccatggggtatgtcaagctagcaggttcttctcggcctagg

SEQ ID NO: 26615 - DNA, 538 bp, Homo sapiens
  misc_feature (1)...(538): n = A,T,C or G
aggagcaactgggactctccagagaggngcaattcgcacacaaagcgtctccgtgccctgccattcacctttcgacacagccgcaacccctcttttcagtgttaaaacctggcgccaaaatgaacatgcgatgtgacgtgttacctctgcgcatgcgccgggcattcccagcaccccgaacctgatgaacgcgcggtggggaccccaggcttccgtgctttcgttttcctggaagctacgtgtcctcagtctacatattgttacctggaaaataaagntttctccttttttcttcctttgttaacaggcagaaggtgtaggctgcaggtttcgggcctaagagagggcatggctggcgacacggagtatactcctagatgacataacggaggcgagtctgcaccggggactcggcattaggaggaggcagaggaaaagcccaccaccgtggccgagggagatctagcaagcagcttgcaggtggtgaagttgtgcaaagangctgagacctgtcagtatcgaacacggcgcggggtca

SEQ ID NO: 26616 - DNA, 544 bp, Homo sapiens
  misc_feature (1)...(544): n = A,T,C or G
nggaagcgactgacaggcgtgtaattcgggatccggctcctccagctaccggcccaaggccatctacctggacatcgatggacgcattcagaaggtaatcttcagcaagtactgcaactccagcgacatcatggacctgttctgcatcgccaccggcctgcctcggaacacgaccatctccctgctgaccaccgacgacgccatggtctccatcgaccccaccatgcccgcgaattcagaacgcactccgtacaaagtgagacctgtggccatcaagcaactctccgttaaacatatacttaaccgtcttccctaagagtggatataagagtctgtagagtgttccccagtctgggtttgtctgacgtttctctcacgaccagcctgggtgtggtgggttttggaaggaatacgtggggcgcatgacagccaggtaggaccacgagcttctccactgcagagttactgttgatctccttccctgctcttctttgaaaagcaagtcacgaagtccagcccacccaaacagaggagaagaaaaaac

SEQ ID NO: 26617 - DNA, 477 bp, Homo sapiens
  misc_feature (1)...(477): n = A,T,C or G
gccgcgcccccngnnnnnnttcgagattcgtagtccgtgtggaggaattcggaggaggatggtgaccttgggagtcgccctgtcagcacgcacatgcttgggacccactccacacactccctgccagctttgttgcagcctcagctggtggtgtctccgtccttatcctagcctagctcgcagggtgagaaccactggagtggctggggctggccagaggtcaccgtttctccttcctgtgtgctccagtggcttttgaagacactgggttgggacctttttcctgaagagagctgggtgtagccagagctactggcacctaccccgagcatctctctctgtaagcagcttcaggggcaagccgtttctctgtgcttctgaaacccccttctcacgtttcaggccccagttttaactcaaggcctggggcaggggcgtttaattgatgatgacagaggacacaggtttttgccagca

SEQ ID NO: 26618 - DNA, 485 bp, Homo sapiens
  misc_feature (1)...(485): n = A,T,C or G
aggacttncagggagnnnnnnnttagatnccatgatgatcttagtccatgcggtggaattcgtaatcccagtcctttgggaggctgaggcaggcgaatcacaaggtcaggagttcgagaccagcctggccaacatggtgaaaccctgtctctactaaaaatacaaaaaaaaaaataaaaaattagccaggcaaggtggcatatgcctgtaatcccagctactggggaggctgaggcaggaaactcctttgaagccgggagacagaggttgcagtgaaccgagatcacgccactgcactccagcctgggcaacaaagcaagactctgtcttaaaaaaataaataaagaaaaattacgaaaaaatgtgcttggatgggcttggcaaactttagccattagctcacgtaccacttcggaagggcataccttcagtcacttcaccctttaatccctttgctcaagactaaagttctgagaggaagtctn

SEQ ID NO: 26619 - DNA, 547 bp, Homo sapiens
  misc_feature (1)...(547): n = A,T,C or G
acgatgcaactagtactctccagagaggagcaattccgcgaggccagagtccaataaactcgtgctcatctgcagcctcctctgtgactcccctttctcttctcgtccctcctccccggagccggcactgcatgttcctggacaccacccagagcaccctctggttgtgggcttggaccacgagcccttagcagggaaggctggtctcccccagcctaacccccagcccctccatgtctatgctccctctgtgttagaattggctgaagtgtttttgtgcagctgacttttctgacccatgttcacgttgttcacatcccatgtagaaaaataaagatgccacggcggagactgggnttgtaaaacaaaaatataaaaaaaaaaaagggggcggtgggttttgaaaggccctattaaacccgcgtgacagcccggtgtggcctctttattctccactgcatagttggtgtgcccctccctgcgtgctctttttctgtagaagaggcaccactccccatgcctttccacaataagagagaaagaacgt

SEQ ID NO: 26620 - DNA, 543 bp, Homo sapiens
  misc_feature (1)...(543): n = A,T,C or G
gggatgccctgaaggcgtgtaattcttttcccanacccgatccgagcccttggaccaaactcgcctgcgccgagagccgtccgcgtagagcgctccgtctccggcgagatgtccgagcgcaaagaaggcagaggcaaagggaagggcaagaagaaggagcgaggctccggcaagaagccggagtccgcggcgggcagccagagcccagccttgcctccccaattgaaagagatgaaaagccaggaatcggctgcaggttccaaactagtccttcggtgtgaaaccagttctgaatactcctctctcagattcaagtggttcaagaatgggaatgaattgaatcgaaaaaacaaaccacaaaatatcaagatacaaaaaaagccagggaagtcagaacttcgcattaacaaagcatcactggctgattctggagagtatatgtgcaaagtgatcagcaaattaggaaatgacagtgcctctggcaatatcaccatcgtggaatcanacgagatcatcactgggtatgccagcctcactgaaagg

SEQ ID NO: 26621 - DNA, 459 bp, Homo sapiens
actgagaccctgaagacgtctgggaattcgataatcataacatgttatcaggatccatagacacttatcaactgcctcgcacctgctggtcaaattacagcctgaagacatgcatggtccctggagcctgttagaaatgcaggctctccctcaccccagcgccacccagagccgctgagtcagggtctgtatttcagcaaggtgaatgatgaaataggtgatgcaggatgccccctgcactgagaagcgctacaggtttgatgaagacacaagcattgaaggatgggctgtgctggccacagtcatacaagttcagcattaagaatagcgtgagcacctgtgaactctgcagagccggagtgaaagttagtgctcgtctcttggaataacatgactgcttttactctaatttctggcaggtgcttgaggatctgctctgtgtaatgcactggaattctc

SEQ ID NO: 26622 - DNA, 316 bp, Homo sapiens
  misc_feature (1)...(316): n = A,T,C or G
gcgnctcctatcccaanctcccaggtttggntgagggctccccaaggcagggcaagatagcggccctgtcactgaccctggcctgtgggggtctgatctggggagggaaggacaccaatgaatcagcttgggacctctataggccttccccttttcctccaccccgaagctctttatangtgatagaagcgtggccacgatctccctcccaggtggtatcagccacctgaaaaaatgctgagaatttcttccatcttggcctcttccagaaaccggccaggcaaggaaagaggccggtcaccagaagccagcangg

SEQ ID NO: 26623 - DNA, 455 bp, Homo sapiens
  misc_feature (1)...(455): n = A,T,C or G
gggccgggccccgcctgatnnccattangatcctcgaccgncnggnggaattcgaattccacctcacccatagccacaggcctctgctcctgctcctgcctgcatgttctctctgttgttggagcctggagccttgctctctgggcacagaggggtccactctcctgcctgctgggacctatggaaggggcttcctggccaaggccccctcttccagaggaggagcagggatctgggtttccttttttttttctgttttgggtgtactctaggggccaggttgggagggggaaggtgagggcttcgggtggtgctataatgtggcactggatcttgagtaataaatttgctgtggtttgtaaaaaaaaaaaaccaaaaaaaaaaaaaaaaaaaaaaaatatnnccgggccccttaatattaaagggccccttaaaacccggtttatttccttttg

SEQ ID NO: 26624 - DNA, 440 bp, Homo sapiens
  misc_feature (1)...(440): n = A,T,C or G
catgatgccnctganaccctgcggaannccnncattntcccaaacttaccaggaatgaagaagctgtttctttacacaatcgttatcccataatgcctgcttctgctgctaccacgggctcacctaaaaggcaaccaaagtaaattcagtcaataagaaccaacaatattgtgtgtggctttgcttatcaccgatgactcatttcctccagtattaactatgggaattcaaagcttctctgttagcccaattttctactctaaaccatgacccctgtccacaatatttgaggagtgtctgacttctacttagaagacctgaacacccctctctccttctggatacatttctgtttacccatactaaagtacagcactgcaactctaatctggctaaaatggactgatcatttccctcattccagaaatcttttttattan

SEQ ID NO: 26625 - DNA, 493 bp, Homo sapiens
  misc_feature (1)...(493): n = A,T,C or G
gggggccggggnaatcgagaatcgtagaccctaggcagngtgggggaattcagctagaaagtatttcagagtcttccctctccctcattcctccatcaaatcaatcactaaacctactaaacagaagtgtaacaaatccacaaaaacctctttagcagctttcctgcctctaaacaaagtactctctctgcttatgaacaaatatggaagttaattatcaaaatatatcaagtgtcaaattatgtggctctgggttagaagtgaagaaaatggttcaaacttactgctgtagccacccagatttttaaacaataggaaatatttcctggcattaaaaaaaattcagtacctcctttgcatgacattagaaggctctgcttgatcttgcctctgtctacctgtctgacctcatttccaggcacttccctccttctagtggatgctcaaacagtgtagcaaagtaatagacatattccctctgctctcagtctgg

SEQ ID NO: 26626 - DNA, 544 bp, Homo sapiens
  misc_feature (1)...(544): n = A,T,C or G
nggaagcactgtgcaggcgtgcaattccgtgagcgcctcgcctggatgtgagtttcagccagacagggtctggctctgtcacccagactggagtgcagttgtgggaacttggctcactgcaacctctgtttcctgggctcaagcaatcctcccacctcagcctcccaagtagctgggactacagacctgtggatatctgggctttgggctgtatgatcattgagatggccactggaaatccctatcttcctagtagttctgatttggatttactccataaaattgttttgaaagtgggaaatagaaaaagagaaaaagcccaaggagatcaaagtcagagttattaaagtcaaaggaggaagaggagatatctcacaaccaaaaaagaaagagtatgaaggtggacttggtcaacaggatgcaaatgaaaatgttcatcctatgtctccagatacaaaacttgtaaccattgaaccaccaaaccctatcaatcccagcactaactggaatggcttgaaagaaaatccacaatgtgcggggtctg

SEQ ID NO: 26627 - DNA, 463 bp, Homo sapiens
  misc_feature (1)...(463): n = A,T,C or G
acagatgaacattaggaanttttgatgtcatctagtcagtgcggnggaattcataagagagagcaaaattatgtaagatttgtaatgagtattaggagacatggatattgaatcatttcatatctacctacatgtaaatgtaggtagatatgaaatgtagtaggaatgatatgaaatgtagtaggtagatatgaaatatagtaggaagagaatactacctacagtaaatgggtgatctcctagtaagatacaattgatcaaaattaatgaaaaactaaaaaaaaaaaataaccatagcttataaatatcatttatagagctatcatttaaaatttaccaagactataggaaaagatttttaaggtagtaccctttcctcaggtgtcccgcgtccgccgattcctcctccctggtcggcgcgtccttggcaggcgtcaaaaaaatggctacaaacttcctagag

SEQ ID NO: 26628 - DNA, 478 bp, Homo sapiens
  misc_feature (1)...(478): n = A,T,C or G
cgcgccgcccagnnnnnnttagannatcgatgaccctagtccagagnggaggaattccggcactttgggaggccgaggcgggcagatcacgaggtcaggagatcgagaccatcctggctaacacggtgaaatcccatctctactaaaaatacgaaaaattggccgggcgtggtggcaggcacctgtagtcccagctactcgggaggctgaggcaggagaatggcatgaacccgggaggcggagcttgcagtgagctgagattgcgccactgcactccagcctgggagacagcaagactccatctcaaaaaaaaaaaaaaaaaaaaacggggggtctaaaaccttttttccaggaaagaagccttccccgggggaaaaaatttccaaacgggggaggggcggccccccggtaaaccaaagggggcccaaacaaatttggggcccagccccctcattggcggtggcggttttttgaacta

SEQ ID NO: 26629 - DNA, 478 bp, Homo sapiens
  misc_feature (1)...(478): n = A,T,C or G
gattgttataagganaagaaaantttgatgacactagtcagtttgatggccttccacgacaagggcgcgggccgtgccgccgtctcagacgagctgcgccagtggtaccatcgttccaccgcctcgcacaaggagcacagccgcctgtcgcacaccagctccacctcctcggacagcggctcgcagtacagcacctcctcccagagcaccttcgtggcgcacagcagggtcaccaggatgccccagatgtgcaaggccacgtcagctgccttacctcaaagccagagaagctcgacaccgtcaagtgaaattggagccacccccccaagcagcccccaccacatcctaacctggcagactgggagctacaatgatagctgtttcctggattcctccctctatccagaactagctgatgtccagtggtacgggcaggaaaaagccaagcccgggaccctcgtgtgagccagcccggcct

SEQ ID NO: 26630 - DNA, 550 bp, Homo sapiens
  misc_feature (1)...(550): n = A,T,C or G
nccttgatcatagtccagcaggggcaanncgngggctcaaacaaaaagttttggattattacaaaagagagattctccagacatacggctatgagcacatattgaccttacacaacctggagaaggccggcctgctgaaaccgcagacggggggcagaaacaattacccaactatacggaaaacattacgcctctggatggatgatgttaatgagcaaaaccccacggacatatcgtatgtgtacagtgggtatgccccgctcagtgtgcggctggcccagctgctttcccggcctggctggcggagcatcgaggaggtcctccgcatcctcccagggccccactttgaggagcggcagccacttgccacaggactgcagaagaaacgtcaaccgggagaaaaccgagtgactctgatatttttncttggnggcgtaaccttcgctgaaattgctgccctgcgatttctctcccagttggaagatgaggtacagaatatgtcatttgcacactaaactaatgaatggaaccagtggatagaggctctgat

SEQ ID NO: 26631 - DNA, 477 bp, Homo sapiens
  misc_feature (1)...(477): n = A,T,C or G
cgccccccccgcccccttagaatactgagatccactgcgcagagncgnggaattcctcaccagaccgtgcacctgcctggccagctgccccagcatgagtacctcaaggagatggaacccttaggttggatccacactcagcccaatgagtccccgcagttatcaccccaggatgtcaccacccatgccaagatcatggctgacaacccatcttgggatggcgagaagaccattatcatcacatgcagcttcacgccaggctcctgtacactgacggcctacaagctgacccccagtggctacgaatggggccgccagaacacagacaagggcaacaaccccaagggctacctgccttcacactatgagagggtgcagatgctgctgtcggaccgtttccttggcttcttcatggtccctgcccagtcctcgtggaactacaacttcatgggtgttcggcatgaccccaacatgaan

SEQ ID NO: 26632 - DNA, 475 bp, Homo sapiens
  misc_feature (1)...(475): n = A,T,C or G
ccgccccgcccagnnnnnnttagagattcgtatgccgtgngcaggaattcgaacacggacttgctaaaactcccctgggatttgaggaggaagcctggcatggaaagagtgggaggggcacatgaacatcagactcagggaagccctgtgaggggcccgcctgcagtagatactcctatagccaggcctctggagatgcgtgggcacctgtgttgcttctgatcagaatccatggaactgacctcatgctgctcaaccagcgaatggtgcaaatacttacagtccttcccgagggggcctggcgtcagacaggtttatcaaagcccagtgaatcctctttgtctcttgccttcccagtagggctgtgctgtgagccctatccatgtgagaccactgacacttaatgtcacgttcagtagaggaggattcagttctctggttgctgcatctcaggtgctcagtagctaggtcagct

SEQ ID NO: 26633 - DNA, 448 bp, Homo sapiens
  misc_feature (1)...(448): n = A,T,C or G
ggtccggcnnccccattatgaccctganaccctgcggaanncanacnnccagcttcttggctcagcctggcttcctctggttcagccccacataatgattatggctatttgctgtcatttctgggctagggctcctttctaacaacctagactggaataaggccctgtcagcatggctccctttatcccagttttccgtctgggaacagtacctctgcccctgattcccaatgtgccatagttttattaactccattaaagaagcctgtatgtgttttggttagttacagttattttacaataatggtgggtaatggccccacctctgttatgagataatgttctaatcaatgtctctgcctttgtatcttttctgagggctttgtctgttctcttcattctaatgaaaggagtattctagtgctgggtgcatatcatccaagataan

SEQ ID NO: 26634 - DNA, 475 bp, Homo sapiens
  misc_feature (1)...(475): n = A,T,C or G
cggcccgcccaggcncnttagantttcgagaccatagtccaagtggtggaattccagcagcaaatgccactctgggcagtcttttgtgtcagtgtcttaaaggggcctgcgcaggcgggactatcaggagtccactgcctccatgatgcaagccagcttcctgtgcagaaggtctggtcggcaaactccctaagtacccgctacaattctgcagaaaaagaatgtgtcttgcgagctgttgtagttacagtaaatacactgtgaagagactttattgcctattataattatttttatctgaagctagaggaataaagctgtgagcaaacagaggaggccagcctcacctcattccaacacctgccatagggaccaacgggagcgagttggtcaccgctcttttcattgaagagttgaggatgtggcacaaagttggtgccaagcttcttgaataaaacgtgtttgatggattagt

SEQ ID NO: 26635 - DNA, 478 bp, Homo sapiens
  misc_feature (1)...(478): n = A,T,C or G
ccccagcccangnnnnnttagaatttcgatgancctagtccagagaggaggaattcggagaaggcggtgaggactcggccaaacaccccgcgctgctgggcgttctgcacctcgtcgcggtagagatggtcaagttgggagcatcggcagccgaacaccaaagtcatgggagtgggctgcagccctgcaagcaaccccgcgcttgggaaggctcttctccggggcacagtgctagtggggcctccccacaggccaccgtcgcccagcctggcagcccagcgttttgggctgaaaccaccattactttggctgtttcatctctaagagagtgtagaatgctttcacagagaccctgcacagccctgatttacagagggaagggaagcgcgggtgaggtggtggcccctggtggagctgcgctagaatgcgcggcttcggactcagaattccatgccctttgcattgtgtgacatcgcag

SEQ ID NO: 26636 - DNA, 474 bp, Homo sapiens
  misc_feature (1)...(474): n = A,T,C or G
gcccgcccagcnnnnttaganttcgatancactatncagagaggtggaattcctgagacgcagggatggaggggagggggtacgcgggagaccgagggtggcagagaccgagacaaagctcccgagaggggagctgaagcgggagagacagagccgaggacgcgcgtttggggaggacgcacaagccgccgaaacaataagggcgaccgacaccttagacagggagagacagagacctcgatcggctgccggccgtcgcgccgagggacgatggagggactgagaaaggcgaggctaagtcgagacgttgttattgaagatgataggattgatgacgtgctgaaaaatatgaccgacaaggcacctcctggtgtctaactcccccaaagacaatgagttaagggagagaataagaacggcggtaacagttattggcaaaaagcatgaaaagagaaagcactttgaaatttattt

SEQ ID NO: 26637 - DNA, 473 bp, Homo sapiens
  misc_feature (1)...(473): n = A,T,C or G
gccccccgcccaggggnttttgatttcgtatgcatgtgcgggaattctggtcatatggaaccccaaggccaccaagatcatctctgccaagacccacaatctgaacgtggagtacaacatcttcgagggagtggagtgccggggagcgcctgccgtggtcataagtcagggccgagtggcgctggaggacgggaagatgtttgtcaccccgggggcgggccgcttcgtccctcggaaaacattcccggactttgtctacaagaggatcaaagctcgcaacagggtagggcggcacccgcaagggtgttgtgcaggtaggcaggtgggcgctgagttctaggcccagaacgcacccctggtcaacctggcccggcctcccgaggggtcaggaagacagagcggggccgctgcttgcccagggccctggtgggtctaagtggagaagagcctgctcccggaagatggcaggggag

SEQ ID NO: 26638 - DNA, 478 bp, Homo sapiens
  misc_feature (1)...(478): n = A,T,C or G
aggagccaggccagcccccatagagatcgtatgncgtgtgcaggaattcaaaacaaaaacaaacaaaaaaacctctcatccacttttcctcaaagcaagtgagactatgctacaccaaaacaaagaaagtaaatgaagatgacatgagatacaagaaacaaagggtctaactcagaaaaaagatgaagggaattctcaaactggtgataaagggaagtcccaagagcacagctgtgtagcaaagaggaagaaaaaccaatctgggttggagaagtcggttagtaagggtattccaggtagacagacaatcaatcaatcaatcaatcaatcaatcaatgttttaagctgaaattgatcggattatgtgaccagtttgaccacatttgagggtttaaagtgctgagtttaagtaaccaagtagtaacacaacatacaagcaaaccaaaaaataaagcaattattcagtccaggaaaaaac

SEQ ID NO: 26639 - DNA, 461 bp, Homo sapiens
ttttgagatcctgagagcagtgagcgaggaaccctcaagacaccttccgagcgtcagctcactccccttccaccctcagctccaccctcagcagatgataatatcaagatacctgctgagcgtctgcggattccgcttccaccatcagccgatgataatctcaagacaccttccgagcgtcagctcactccccttccaccctcagctccaccctcagcagatgataatatcaagacacctgccgagcgtctgcgggggccgcttccaccctgagcggatgataatctcaagacaccttccgagcgtcagctcactccccttccaccctcagctccaccctcagcagatgataatatcaagacacctgccgagcgtctgcggggaccgcttccaccctcagcagatgataatctcaagacaccttccgagcgtgagctcactccccttgcaccctcagctcc

SEQ ID NO: 26640 - DNA, 470 bp, Homo sapiens
  misc_feature (1)...(470): n = A,T,C or G
aggagcagcccaggcccaatagagatcgtatncatggcggaattccaagtgctgggattacaggcgtgagccaccgcacccggcagagttttataatgaaaaattaactaatattctagtatgaagtgaggaggatactgaacaggatgtggctaaagccaacctgggacagccatggcgtggcttggtttcttcactccagtgttgtccctaccatttcgcagcattgatttaggaggctctgggacaaaagagaagccaaagagcagttttcccagttcactcactctggcaaaatcaggaaaaaaaagtctgcttttgacatcaaattccactaatttggggcagcgttgggtgaggaaagtattgtgaagacaggcttcttggagtaggggcagccacaattcagtagacactctatgctcggaggctgccactgtagttgccaagctcaggttgggtggttctgt

SEQ ID NO: 26641 - DNA, 487 bp, Homo sapiens
  misc_feature (1)...(487): n = A,T,C or G
ccccgctcccgcnnnanttagaaattcgatgancactagtccagagaggaggaattcttactgagttgcagctgatagttcacaattgccagatgtggtggctcatgcttgtaatcccaacactttgggagaccaaggaaggaggatcacttgagcccagaagttcaagaccagcctgggcaacatggcaagaccctgtctctaaaaaaaaaaaaaaaaaaaaaaaaaaaaaaaaaaaaaaaatggaaattttccccggggggggggggaaaaccctgtacccccccttttttggaaaaagggggggggagaattttttggggccagggggggggcccccaggaaaaaaaaaaattcccccggggtccccccctggtttaaaaaaaaaaattttttttaaaaaaaaaaaaaaaaatttttttttttttttggaaaaaacccgcgtggggggggggggggcgggggccacacccggggcgggggggga

SEQ ID NO: 26642 - DNA, 470 bp, Homo sapiens
  misc_feature (1)...(470): n = A,T,C or G
ggagcaggggnggnnnaatcgagatcgtantncgtgtggaggaattctccctttccaaaacaagcaaatgaaaaaatagagttttctctatcacacaaatgggaaggtttgtattgaatgttatatttatcctctatccagtcttgtcttggagcacaaagcaaaaaggcccagcatcctccactatcttctgaaaacttgccctcaggcctgagcaagagggctgcccggttgcttccatgtagccagccagcatatgtgcagggccaagtctagagggaggagggggtggcacatggatggtttcgtttaattggaagacagtgggtagattggagctggcatttgaagatgttgagagttgtggatcatgggcaagaaaagcgctgttctgggactgcggggcaggagaaggaaactgatgcttctgagggtgagtctgatgagatacatgcctgtggtgggcctcn

SEQ ID NO: 26643 - DNA, 474 bp, Homo sapiens
  misc_feature (1)...(474): n = A,T,C or G
cccccccccccgnnnnnttaganttcgagancatagtcagagaggtggaattcaacctgtgttccggaagccggagagctggagctttgaatccaccccggtcaaaggatgctgagtccggagcgcctagccctaccggactacgagtatttggctcatcgacatgtcctcacctacatggaggatgcagtgtgccagctgctacaaaacagggaagatattagccaatatggaattgccaggctcttcactgaatattttaacagtgtatgccagggaacacacattctctttcgagaattcagcttcgtccaagccaccccccacaatagggtatcatttttacgggccttctggagatgcttccgaactgcgggcaaaaatggcgatttgctgaccatgacagaatatcactgtgtgctgcaattactgtgtcctgatttcccgctggagctcactcagaaagcagccagg

SEQ ID NO: 26644 - DNA, 472 bp, Homo sapiens
  misc_feature (1)...(472): n = A,T,C or G
cccccccgccnngnnnnttagagatcgtantccatgtggaggaattcgcagcaaatacttgcctaagattcttctggggctcctcagtgccctcaggatcaagttggtgctcctctgtggcatatgaggccctaagaggcctggccccttacctgcttctctaaattgggctcctgcctctcagtcccctcagcccctccagtctggccaggcttagcacttgcacttcccggaatggctatagacattattccgctatgcctcactaattcctacttaactgacagctctgtcaggtcatcaccacttttatgacctttctcggaccccataggctggatcagatgcctcctgaagaattacagacttcttcctctagacttggaggtgagggaccctctctggaatagagaaggtgttgggagtgtttgttgaatgaaagagtgaatgaatgaagtccttcagtaaggat

SEQ ID NO: 26645 - DNA, 453 bp, Homo sapiens
  misc_feature (1)...(453): n = A,T,C or G
gccgggcnnnnaaatgaaactgagtcnttcgacagncnggnggaattcgagcagaggccccaccccagtggaatgttcagtatgtgcaggacggtctgtgctcaacggggccctcgtttctgcaagttcttataacctatttatagaaggtcccatctcagaagcaccttcacctccagagggactcagatttacctcctcagctgtcgtttctgtaaatctaagttaatctgcccctttgaggtaaggatacagctgtgagggagctctagagcccacccatcactttacccaaacaaaatattgtggagtgcctagctcagcctgggactgcagccaggcccatgaggcccttaccttgcatgcaaaacttaaggggaggccaaaaatctcaatcatcaaaataagtaatatttcaatgcaatttttttttttgaaacagtcccactctgg

SEQ ID NO: 26646 - DNA, 456 bp, Homo sapiens
  misc_feature (1)...(456): n = A,T,C or G
gggcgttcnnnnnnnattgaaaactgagtcctctgacagngcggnggaattcggccacttgtggagcccctcgatatgcccgacattaccctgctgcaactggagggcgaggcctccctgtgaggggactccgtggggcactaccttcccgggctgtctttgggtttccgagtgcatgacgcgagggggactgaacggcgcggtgcggcatgcttcacttggacagctgctcttgtgggtcaggcagagagagactccctcgaggaaggatttgtagggtgaaggactttgggagcatcgagaattctttctgcccaactaagcgaattatagcgaactgcggaaaggtgaggctccgggagaggaagcgcccatctctggactcccatccatccctatcctgtcctttcccccttcccagacaacaggagaacccgtgaactgtgtaaataaaat

SEQ ID NO: 26647 - DNA, 432 bp, Homo sapiens
  misc_feature (1)...(432): n = A,T,C or G
cccccctaggaccatagataacgtggcggaanncggnggcgcatgcctgtggtcccagctacttgggaggctgaggcaagaggatcgcttgaggccgggaggcaaaggctgcagagagctgagatcacgccattgcactctggcctgggtgacagagtggagaccctgtctcaaacaaaaaaaagtttctgttcttttctagctcaaaagccaaaagtctctgagaacgactttgaagatctgttgtccaatcaaggcttctcctccaggtctgacaagaaagggccaaagaccattgcagagatgaggaagcaggacctggctaaagacacggacccactcaagctgaagctcctggactggattgagggcaaggagcggaacatccgggccctgctgtccacgctgcacacagtgctgtgggacggggag

SEQ ID NO: 26648 - DNA, 442 bp, Homo sapiens
  misc_feature (1)...(442): n = A,T,C or G
natcgatgactgaagcccttgcggnggcattcctcagttgctatgggatgcccctccagggcaccagctcagggctaagcgaaggtagataggagcagctcagagctgccaggctctgccttcctcacagacctggtggggcaggtcctgttcacagcagcaggagtgaaggcctggccatcggtggagagggcagctgtcagagggctgggggccagggcacaggattgaagagtttcacatatcatcacagcatacactgggaatttggtgggggcagaagaacccagggccactccctcaatatgaagggaaaccaagctgaatgtgaccaccggcacactgctgccatgtcccatgtccacctttctccccgggaataactggccctgagacccctatacccaaggaggcctgtccatgccaagcatccgggaagcat

SEQ ID NO: 26649 - DNA, 565 bp, Homo sapiens
  misc_feature (1)...(565): n = A,T,C or G
catcgaatctgtcacagtgggcgaancgcgaaaccccgtctctactaanaatacaaaaattagcctggcatgtgcgcacacctgtagtcccagctactcgggaggctgaggcaggagaattgcttgaacccaggaggcagcgattgtggtgagccgagatcgcgccactgcactccagcctggcaacaaagcaagactctgtctccaaaaacaaaaaaaaaaagggggggggcctgctaaatccaaaactcacttattgagtcaattaaaggaaaggctgcaaactatgcacacagacacaatatttttaaagcaaatttaaggagggcaaaaaacctctaagattgtatttaggagaacaaaacccccttggggtaagtgtggttcaaaaagcaggccactgctaccctgaggcacagcctgcttaacagtaataaatacagacggtattaaaataccaattccttcaaattcttctcattaattatgtcaaccattttgaatgcatcaagacagaattttaccaccagtacaacaaggtatgtattcacattttattcgcatc

SEQ ID NO: 26650 - DNA, 483 bp, Homo sapiens
  misc_feature (1)...(483): n = A,T,C or G
gggagctccaatcgtagaccataattagaggcagtaattcctctgcagctcctctcttcaagaagggccctttgtctttctccactcccacacacctttcccaccaagccttgaagactgtgctggtgagaagaagtctgggtgggagatggctggcagggtcttccaagtaccttcctcccacactgccaagtatacacaacttcccagtaaatggttgtggggaggaaagaggtggagcctccccagccgtttccctgcagaatcagctctgtctcatgtggaagtggagaatcagccttgcctggcctttaggaacttttgtggggaagagagctttgaagagaggagggggactttagagagggatgaaaatgagccctgggagggaggaagggacgaggaggggtggctgcatgttaccgtcccctacctctccccacgtggagggtggagcagttatgagggaggaagtcaactgcn

SEQ ID NO: 26651 - DNA, 434 bp, Homo sapiens
  misc_feature (1)...(434): n = A,T,C or G
cggtttttccnccctaagacccgtagacgncggcggaancncgcctaaagcaagtcctctccctatctcttcacagaatgaaccttcagaatatcattactacatttatattttttaaaaagtgtcccattatatggtgacaattacagaaatgctttcacctgtggaagagtcattctaacaacaacttctgtgtttcttcttagttctgaatattccttatgccttctcccttctgtctgcttctgaaatacttcattctccaccaccccagttattccttgagtctgggggactatccattgacagcattttatccttgtattcaccaaccagtcccacagggcctcaggattcaggcaatcaccctgtggttaacatggcaggtgggggtagaggggagagaggatcagctttctgtctctcctcttcan

SEQ ID NO: 26652 - DNA, 461 bp, Homo sapiens
  misc_feature (1)...(461): n = A,T,C or G
gaggcgtggnnnnnnnaatggagactganagtcattagaccagncnggnggaattcctacgcgcagctggagagcctgatcaacaaatggagcctggagctagatgaccttgagcggcacttcctccagcaggccacccaggtcaacgcctgggaccgcacgctgatcgagaatggagaaaagatcaccagcctgcaccgcgaggtggagaaggtgaagctggaccagaagaggctggaccaggagctcgacttcatcctgtcccagcagaaggagctggaagacctgctgagcccactggaggagttggtcaaggagcagagcgggaccatctacctgcagcacgcggatgaggagcgtgagaaaacctacaagctggctgagaacatcgacgcacagctcaagcgcatggcccaggatctcaaggacatcatcgagcacctgaacacgtccggggcccc

SEQ ID NO: 26653 - DNA, 451 bp, Homo sapiens
  misc_feature (1)...(451): n = A,T,C or G
ggaggtgccaggnggnccncccctgaaaaccaatgangatcatcgcacangcggnggaattcgcggacaccagcatgctctacgtggtggggaagggagatggcaacatccgctactacgaggtgagcgccgacaagcctcacctgagctacctgactgagtaccgctcctataacccacagaaggggatcggtgtcatgccaaagagaggactcgacgtgtcctcctgcgagatcttccgcttctacaagctgatcacaaccaaaagcctcatcgagcccatctccatgattgtgccccggcggtcagaatcctaccaagaggacatataccctccaacagcaggggcccagccctccctgacggcccaggagtggctcagcgggatgaatcgagacccaatcctggtgtcccttaggcctggctctgagctgctgagaccccacccacn

SEQ ID NO: 26654 - DNA, 447 bp, Homo sapiens
  misc_feature (1)...(447): n = A,T,C or G
tggaggtnccaggcgcnccncccctgagnaccactgagaacctccggaanncngaaanngagctgctgggccagcgccgggccttggaagcctttgacctggatcctgcacagaggggagtcaatgtccagccctactccgggtccccagccaacctggccgtctacacagcccttctgcaacctcacgaccggatcatggggctggacctgcccgatgggggccatctcacccacggctacatgtctgacgtcaagcggatatcagccacgtccatcttcttcgagtctatgccctataagctcaacggctttagctgtttgtgtgtctgtccagcccaaaactggcctcattgactacaaccagctggcactgactgctcgacttttccggccacggctcatcatagctggcaccagcgcctatgctcgcctcattgactacgcg

SEQ ID NO: 26655 - DNA, 447 bp, Homo sapiens
  misc_feature (1)...(447): n = A,T,C or G
ggagtgccaggatttcccccctaagantgccatggtatcctcgcacangcggnggaattcgtaccatgtgggtctctccacagcggggctcggagcatggcagctaagttagtgagggaaggtgagatggaggttttggtcttattgggtgtgaggaagcaacgtgtgtgtgtgcgcgcgcccttttgtgcagtgagagagagagagagattgcacacatgtgtctctgtagtcatgtggccaggtgggactatgtaggtaacagattgctcgtgtctgatttggtacaagcatgtttgttttcctctgtgttcgtgtgagtgtttactcaacaaatgtttattggacacactcagagagagggagtgtgcacacgtgcgtgtgtgttgctatccagcacgtggaccgggctcccagaagagctggcattgtgtctgagcagagctg

SEQ ID NO: 26656 - DNA, 503 bp, Homo sapiens
  misc_feature (1)...(503): n = A,T,C or G
gttgcggggnnnnnnnaactggagaccnatcgagagcccgtnggaattcggcggtttgagatccaagcctgtaattctcacgtccggaggtgagaaggagccttcgtgatctaagctcgattcctgccggggtagcaaccggactgacgtctggaggcggggaggctccgcgtgacagagtgataacgcccggggcgtatgttctgcggtccgcgcggctgggcgggaggcccgagataggcaaaccaaagagcacaacctactgccagcctggatggggcgccaaagtccgacccagggggacacaccccaagctggggacggaggcacccacagatggatgactggctggaaggagattaggcgggagcatccaatcaacttcgagagcgtaggccccacctatcgtgggtcgagttgcttggcggtcgtggttccggaggttcctcgggatgtcggtggccttcgtaccggactggctgaggggcaaggcggaagtcaat

SEQ ID NO: 26657 - DNA, 462 bp, Homo sapiens
  misc_feature (1)...(462): n = A,T,C or G
ggaggcggggcngnnnnatctgatattgacagacatnagcacagncnggnggaattcggggaggagaggaagtggagacagcaggctggaccattgtgtgtcactggaacttttgcctgaggaggaagtgggcttgggagagggtttcttttttatgaaggaagcaatcactgcattgctgatgggaatcatcctgatggagaaatccaagggcaagggacagcagctgggctctactcctgagtgagtctagagggcttgggggtgtccatgtggggctgtcccttggcagggtcaaggcagctgctagggtgggaccagcagatgacgtctgcagcgtggagatggtcaagaagctggagcccggctcatcgtcgcatagcctgcctgcacccgccccccgccaccacctgctgatgggttccgccctcatgccccacctctccctgcagcgggacctgg

SEQ ID NO: 26658 - DNA, 442 bp, Homo sapiens
  misc_feature (1)...(442): n = A,T,C or G
natcgatgactgatgcattngcggnggaattcgncgccatgatccgctttatcctcatccagaaccgggcaggcaagacgcgcctgtccaagtggtacatgcagtttgatgatgatgagaaacagaagctgatcgaggaggtgcatgccgtggtcaccgtccgagacgccaaacacaccaactttgtggaggtcctggcaatctccgttgctgacagcctctctgttctgcagttccggaactttaagatcatttaccgccgctatgctggcctctacttctgcatctgtgtggatgtcaatgacaacaacctggcttacctggaggccattcacaacttcgtggaggtcttaaacgaatatttccacaatgtctgtgaactggacctggtgttcaacttctacaaggtttacacggtcgtggacgagatgttcctggctgg

SEQ ID NO: 26659 - DNA, 445 bp, Homo sapiens
  misc_feature (1)...(445): n = A,T,C or G
tttggtacgtacggtcatngcacagncnggnggaattcctagccgggcgtggtggcgggcacctatagtcccagctactcgggagtctgatttatgagaatggcgtgaacccgggaggcggagcttgcagtgagcggagactgcgccactgcactccagcctgggcaacagagtgagactccgtcaaaaaaaaagctctcctccccagatttgtgaaccttgtgactgttcaggggacacctcacatattgctggtgggaaggccacgtggagacagctgggcaaagccttggggcgttaaacacagagtcactcatgacccagcacttcctttcctatgcaccttgtacaccccagatcaatgaaacctacatccacacagaaacgcacacaaatctctcagcagcactgttcacagtagccaaaaactagaaaccacatgtcg

SEQ ID NO: 26660 - DNA, 448 bp, Homo sapiens
  misc_feature (1)...(448): n = A,T,C or G
aggaggggccaggagtgccnccncctgggangccctaagnatctgaggaanncncgcaaggncccagaatgtatgttgtagagaacagtcattagctcaagcccatggtaaccgcctctactgtgcactcgaccagtagaggcgatgatgacggcacttgattctcttgtgtgtaactcagccatcctccctagacccacgtcccaggaggcagggctggtaaagctatgactgggcagtgtttgacccagctgtgcttttactctgtgcctcctctttatattgaggcatttctctcttctcctttatgttctttttctttttatgccaaaattcttgctgttgccaaaacaaaaacaaaaaaacacacccacacccaattacaacctgcagttcaaagaaccactctaggtcggctttaaagtattgtctttctctggtaaccaan

SEQ ID NO: 26661 - DNA, 448 bp, Homo sapiens
  misc_feature (1)...(448): n = A,T,C or G
tggagtacccaggctnnccncccctgatgaccactgagagcctgtggaannccggcagcttctgtcgctggccctggggtccccacagctgcagctctcctgtgaggttgcacggcatcagaaccatcctgaccttcttagggacgtgcctggaaccacctcgtccacgtccacgtccacctgggggcctcgggaggctaggcccctcctcaaaggcccaccagcccggcgctcatgctgagccccaggcacgcagggccggccacctctctcctgaagccattggccgctcctccacccagtgcttctgcccatgcctgccccagcagcccctctgcacggtcaccatcgcctgggcctgcccacagcactggtgctcacctctacctcctgtcctcaggccgtgcggcacgacatggtcagcacgcagaaggagccctcccgggat

SEQ ID NO: 26662 - DNA, 444 bp, Homo sapiens
  misc_feature (1)...(444): n = A,T,C or G
nattgatgatcgattgcactngcggnggaattccgaggccgcgggctgcgggagtgccctgctctggcctcgcttgttgctcttcggggactccatcacccagttttccttccagcagggtggatggggagcatcgctggctgacaggctggtcagaaaatgtgatgttctgaatcgtggattttcaggttacaataccaggtgggccaaaattatccttccaagattaatcaggaaaggaaacagtttggacatcccagtagcagttacaattttctttggggccaatgacagtgcactaaaagatgagaatcccaagcagcacattcccctggaggagtacgctgcgaacctaaagagcatggtgcagtacctgaagtccgtggacatccctgagaatcgagtcattctcatcacgccgaccccactttgtgaaacagcctg

SEQ ID NO: 26663 - DNA, 451 bp, Homo sapiens
  misc_feature (1)...(451): n = A,T,C or G
ggagtnccccaggagggccggcatagatnccnccagcgaaccctagnacaagcggaggaattccaacgaggcgctctacgacatctgcttccgcaccctcaagctggccacgcccacctacggggacctcaaccacctggtatcggccaccatgagcggagtcaccacctccttgcgcttcccgggccagctcaacgctgacctgcgcaagctggccgtcaacatggtgcccttcccgcgcctgcacttcttcatgcccggcttcgcccccctcacagcccggggcagccagcagtaccgggccctgaccgtgcccgagctcacccagcagatgttcgatgccaagaacatgatggccgcctgcgacccgcgccacggccgctacctgacggtggccaccgtgttccggggccgcatgtccatgaaggaggtggacgagcagatgctggcc

SEQ ID NO: 26664 - DNA, 550 bp, Homo sapiens
  misc_feature (1)...(550): n = A,T,C or G
caatcggaccactgtcagagaggggaatcgatagtagaacaaaatacctgctcagctccagagacacgtaaagggacagagattgggggacagaaggaagtgcattaattccttccacgacccctgaagagcagcggtgggtctgagcatcctatctccaggaagcaggccagcaggcaagccagctgccacctcgtcctgtgcaaagcacaggcgccgtccccaaaagatttccaaagatgatgttaaacccagccacggttctgatctccaggaaagcaattgctgtggtacaaaaggacaagggttaaaagagaacagtgggagctctctttcccagctaactcacgcagtgtgacgcagaggctttcagcacagcccagggtgcccgggactgaaaactccttcaccagccccctccacaggatatagaagacttagatcactacgagatgaaagcagagcccattagtgggaaaaagttggaggatgaaggaattgaaaaagaaaatttggcaatattagagaaattatgaagactgaaagacan

SEQ ID NO: 26665 - DNA, 450 bp, Homo sapiens
  misc_feature (1)...(450): n = A,T,C or G
agtagttccccaggagggccccccctgatncccnccttgtaccctcggaaanncagnggaacttggctgggagatacagttatgaacttgcaacaccgtatgcaattacagtgtgattggaatacttctgattattgcatagcgccttatgcttataatcaagatcaacatagctgggaaaatgtctcaagacatttaaaagcctgggatgataacttaaccttggatatttcacaacttagagagcaaatctttgaggcttcacaagcccatttatccacagttcctggctcacacatttttgaaggcataactaaacaattacctgattttaatcccttcaaatggctcaaacccgtgacgaggatcattgctgttactggcattattaatactgggatgcttatggcgtctccttttagactgcagatgactctaaggagtccgacn

SEQ ID NO: 26666 - DNA, 446 bp, Homo sapiens
  misc_feature (1)...(446): n = A,T,C or G
nattgaaactgangactcttcgaccgnctggtggaattcgtgcaacctccgcctactgggttcaagtgattctcctgcctcagccttccaagttgctgggactacaggtgctcaccaccacaccaagctaatttttatatttttagtagagacagggtttcaccatgttggccaggatggtctcgatctcttgacctcatgatccacccgcctcggcctccaaaagtgctgggattacaggcgtgagccaccgcgccctgctaggccagccagcttttctgaaagacctcatgctcttacacattacaagcggttgtgagaatcaaatgagatagggtgcatctcagaatctgaaaaatactatgcacacggaaagtattatttggtctctaaggcccatcaacttggtcctaactcacttttatcagtttgtagaacttaatctt

SEQ ID NO: 26667 - DNA, 474 bp, Homo sapiens
  misc_feature (1)...(474): n = A,T,C or G
gcggtnccnnnntttgatgtccctacttagtgtggtggaattctagactcttttggccaatctgcattgggcagagcaggaacaagacataattttttaatatatatttttaaagctgtttaatcttggtaaaaacatagaagataaaatttaccatcttgaccagttgtttagtgcacaatatgttgttttaaacctctggaaccctgcctgctgctcctgtaataaaacctagcccgggccaggcgcggtggctaacgcctgtaatcccagcactttgggaggccgagacgggtggatcacctaaggtcatgagtttgagaccagcctggccaacaagatgaaaccccatctctaccaaaaatacaaacaattcgccgggcgtggtggagggcgtctgtaatcccagctactccggaagctgaggccagagaatcccttgaacccgggaagcggcgattgcggtgagccgag

SEQ ID NO: 26668 - DNA, 443 bp, Homo sapiens
  misc_feature (1)...(443): n = A,T,C or G
natgatgactgnagcactngcggnggcattcatcaatgagaaggtgggaggaaacagcaaaggaaccctgaaggtccttcgcacttacaatgtcctggacatgaagaacacgacctggcaggacctacatatagaagtgacaggcaaaggccacgtccagtacacgatggaagcaaacgaggactatgaggactatgagtaccatgagcttccagccaaggatgacccatatgcccctctgcagcccgtgacacccctgcagctgtttgaagggcggaggaaccgccgcaggagggaggcgcccacggtgggggaggagcaagagtccagggtgcactacaccgtgtgcatctggcggaacggcaaggaggggctgtctggcatggccatcgcggacgtcaccctcctgagtggagtccacgccctgcgtgctgacctggagg

SEQ ID NO: 26669 - DNA, 446 bp, Homo sapiens
  misc_feature (1)...(446): n = A,T,C or G
gangtccccaggcggcccccctgaaaccccctggtaccatagnacanccgaggaattcggaaagatccttcaagcctttcctgacatgcacaactccaacatcagcaagatattgggatctcgctggaaagctatgacaaacctagagaaacagccatattatgaggagcaagcccgtctcagcaagcagcacctggagaagtaccctgactataagtacaagcccaggccaaagcgcacctgcctggtggatggcaaaaagctgcgcattggtgaatacaaggcaatcatgcgcaacaggcggcaggaaatgcggcagtacttcaatgttgggcaacaagcacagatccccattgccactgctggtgttgtgtaccctggagccatcgccatggctgggatgccctcccctcacctgccctcggagcactcaagcgtgtctagca

SEQ ID NO: 26670 - DNA, 442 bp, Homo sapiens
  misc_feature (1)...(442): n = A,T,C or G
natgatgactggagcactngcggnggcattctgaaaactctaagtgactatatgaatatgacaatatgtgcacatttaaaattcttagcttttcattgtgatactgatgcagaagctagtagattggttaaaagtctggacttctgtggcatttttttcgtgacgtgataatctatcataagcagacctaagcacagttttatgaacacaattttgcccatgacattgcctacaggatttccagatgtgacttgcactcagaagatcagtggtcaacttcagaagttcttccacgcttagatcatgtcttcagaacttagatgtgaaaatctacacactgggagatgctgtgagccccaaggttttgatggagtttgcttggaatcctcttgacttcatgccacattgacgtgaactttgatgtataataagcagcagcaac

SEQ ID NO: 26671 - DNA, 566 bp, Homo sapiens
  misc_feature (1)...(566): n = A,T,C or G
caatgagatcnccccctccgnnnnnnnncnnnnnnnatggtatcactactctagagaggagcgaattccggagcaagagcaaagaanaatccctttggttccagaaaatctcctgaaaaagaggaaggcttatcaagccctcaaagccacccaggcaaagcaggcacttttggcaaagaaggaggtaatggtggggaaccaagagaaagtaattagaatttttatttggtgagttttatcccgcatgtgttggactacatttggtattgacgagctccccccaacggtttgacagaccagcagaagaaaggaaaagggctcaggtttaagcgactggaatcattcctacatgattcctggcggcagaaacgtgacaaggtgcgtctcagacgactagaagtgaaacctcatgccttggaattgccagataaacattccttggcctttgttgtacgcatcgaaaggattgacggcgtgagtttactggtgcagagaaccattgcaagacttcgcctaaagaaaatttttagtggtgtctttgtaaaagtcaccccccagaatctaaa

SEQ ID NO: 26672 - DNA, 416 bp, Homo sapiens
aaatacttgatggatgcatgaatgaatggattgattaattgggttgatcttaactgacatcctttcaaatttatttcaagtaaaggtaaattttttgctctgatgtagcgtttatagttcccttttatttctcaaatgtgattgatctgatataacttgaacattttcatgctctgagagtcattcctgctctggtaactttctctaaaaatctgagacctgttgttagactgtacagtggaagatgctgtcgtcagaatatacagtggaaaatgctgtcagagatacaaataattatagctcatgcctttggctattgtttagttgagatgaggccaagatgtatgtatgaggactgaataacaacacaggggaataagcaattgaatgcctgagttagtacacaacaattgctt

SEQ ID NO: 26673 - DNA, 470 bp, Homo sapiens
  misc_feature (1)...(470): n = A,T,C or G
agcagatnnnnnnnaatcgtagactcgtagtacgtgcggnggaattcccggcctcctctcgctgtccgcgctgggttcccaggcccacctctccaaggaagacaagaacgggcacgatggtgacacccaccaggaggatgatggcgagaagtcggattagcagggggccgggacggggaggttgggaggggggacagaggggagacagaggcacggagagaaaggaatgtttagcacaagacacagcggagctcgggattggctaaactcccatagtatttatggtggccgccggcgggggccccagcccagcttgcaggccacctctagctttcttcctaccccattcccggcttccctcctcctcccctgcagcctggttaggtggatacctgccctgacatgtgaggcaagctaaggcctggagggtcagatgggagaccaggtcccaagggagcaagacctcgcga

SEQ ID NO: 26674 - DNA, 443 bp, Homo sapiens
  misc_feature (1)...(443): n = A,T,C or G
ggagtgcccagggttcccccctaagtatccatganacccttgcaanncgggacccgttaactctcagggctgtttgaagtctcttggttgtacgccctcgccactgagtggcccaggtgtgagaggtagtctagagccctctgcggcctttgtggaggtccgttttcagcatgtggcctggtgtggctccctaggcctgaggcctcccactctcagtgccccctgcccccttgggaacccacactccaccccagctaagcacaacactgtggaccaccaccaatggcacctgagccaccttgaccaccattagtgtccccaccctcattactctgccgtcgttgcctgtccccaccacatcatctccctccatggctcccaccatgacgctggcaggtgcaagcggagagcacgagggcagcatggcctggccttccgtgtcc

SEQ ID NO: 26675 - DNA, 466 bp, Homo sapiens
  misc_feature (1)...(466): n = A,T,C or G
catcgtagaacantcggccagngncgnggaattcgttccccctttccacaggtagttgtgaggctaaatgagccagtatagtccacgtgctccgcacggtgcccggagcatggtaaatggctggctaatggtggcagcggccactgtcattcctgccaggggaaaagtgccgttgagcgctgcctgtgcaggtgtcttgggcacggggacccaagtgacagggcttgggtatttcggcaggcctttatcctgcttccccatggcatggagctcctgggcccggcgccccttccctgcctgcccacccgggtggcctttcctcttggcagccaggccccaggggcccgaagccagagtccagggggaggaggacacgtgcctgccccggcccctcgggagtccgtggctgttttgtaggagttggtgcccttgtgctaccgctgctccaccaacaacccgctgctca

SEQ ID NO: 26676 - DNA, 549 bp, Homo sapiens
  misc_feature (1)...(549): n = A,T,C or G
ctttagaccacagtccgagaggngcaattcgttggtcctgcatcatagtcaacaatagttaacactgagacctcacctcttcccagtgcctttacacgtaatgaaagaatgaaatcacttcatcctcacaggtgaggactatcccattacctcatcattcccatattacagatgaggaaactgaggctcagctcatgagtggcagagccatatttgaacacaggggatcttgctcccatatccacacagtccagcgctctgcacaactgccaaaagcacaggctttgctgataggctgagggtatggaggaggatttcacaagattctgggttagaacggaaaaattgtcgtagaacccttaagggcccagaaagacaaagaaagggacctgggatggcgctgtgaccccagtgaagcccggatgaatgcagcacagtggtcaagagctccaactcgggggctgcaccccttcttagctgtgcgactccacctcccactggcccctgcctgtttccctccacccgccttgtacagnggggcgggtggct

SEQ ID NO: 26677 - DNA, 446 bp, Homo sapiens
  misc_feature (1)...(446): n = A,T,C or G
ggggaaactgatacctatcganaatgagggcatcgganggncncgccatgggccgccgccccgcccgttgttaccggtattgtaagaacaatccgtacccaaagtctcgcttctgccgaggtgtccctgatgccaagattcgcatttttgacctggggcggaaaaaggcaaaagtggatgagtttccgctttgtggccacatggtgtcagatgaatatgagcagctgtcctctgaagccctggaggctgcccgaatttgtgccaataagtacatggtaaaaagttgtggcaaagatggcttccatatccgggtgcggctccaccccttccacgtcatccgcatcaacaagatgttgtcctgtgctggggctgacaggctccaaacaggcatgcgaggtgcctttggaaagccccagggcactgtggccagggttcacattggccaa

SEQ ID NO: 26678 - DNA, 469 bp, Homo sapiens
  misc_feature (1)...(469): n = A,T,C or G
ntttgtcgaccatctctaagccagcgncgnggaattcagttggaccagaggaagccccttactatgatctcaggagcttgcaagaagcaggaaggggaatggaataggttaagtttaggcctatcaacctaagcaacagaaataatctgacactaccttatcaggcaaattggggaggggagggtgtatctagctctagatcaaattatttggaagtgttccctgagaaacccaccagcctaagaagctctggccccaggcttgtcactagcagctgcagtcaacagttcaaagaagtcatggcccaaatccagtgtgcacccctccccattcacagagcctttttcacaattccatttccagttcatctatggcagnccagccagctcctgggcagcttgagagggcaaacccaaaacctcatgacagccagagcctgtctttcagcattcagtccgcctggccggct

SEQ ID NO: 26679 - DNA, 560 bp, Homo sapiens
  misc_feature (1)...(560): n = A,T,C or G
cattagatccccagttcagngaggnggaattcctcggccgaaaatgcataaatcagccgggtgtggtggcacatgcctgtgatcccagctactcaggaggctgaggcaggagaatcacttgaaccagaggcggaggttgcagtgagccgagattgcacccctgtattccagcccaggtgactgagcgagagtcctataagctacacagctctggcagcctcatgtcataccctctcctgtcctacctacaagaggggagggaattcagagcacatatcctgataggcaaaatgcagtgattcccacccctgtcacccctgaagcagcgagggtgtgcatttgaaatgcttgcaggtgaggactctggcatctcaccccccagctgggagccagccaagctacattccctgcagacagtcctgctgtctccctgggagcagagcgatccttggggctgggcttattgtccccgaaggtgggctgtccagatgaacgtggagacgatgcccaccaccttgggtatttccgaatgtgggagcccatgagagcagcaggcaccn

SEQ ID NO: 26680 - DNA, 437 bp, Homo sapiens
  misc_feature (1)...(437): n = A,T,C or G
nacttaaaccttcganactgaggcatcganagnncgnngantatgnggatgcagaaccgtcagatagagagggccaactgctttatttaaaatgtgttacttagaaatgtaaatgccattcttggctcatgggccgcacacaaacaggtggtggactggatttggccagcaggccatatgtttgccaacccttctccagacagtgctaccatcattaattaaaagaaaccctgctttcttttctctcttacagccccatggctgggggttatggagtgatgggtgacgatggttctattgattatactgttcacgaagcctggaatgaagccaccaatgtttacttgatagttatccttgttagcttcggtctcttcatgtatgccaaaaggaacaaaaggagaattatgaggatattcagtgtgccacctacagag

SEQ ID NO: 26681 - DNA, 493 bp, Homo sapiens
  misc_feature (1)...(493): n = A,T,C or G
gcgcccnnnnnaattgagnattgtagaccctagtccgngtgcnggaattcgcaggtatacgttagaaattttattctctggaggttggggcggactgagagcaggtctggggtcatcccttctccggctcctcctggttgccttctcggatcggactctcctgcttccgaatctggtctggttgcctcttgcttggccgcgaggagccccgacgaccgaacgtggatagtcgccgccacagcacggtaatcagaaggctttcgttcgacttgtgattcggatggtccggggagttcaagtcgatatcttcggcgcctgaggggacgacgaggcctctgagctcacccctaccctcgggaagccccctctcacactccctgggccctctttgtgtgtctgtggtctcatcttccctgccgtcctcagactcttcctccttggactgctcatcagacatctcanagtccttgtcttggcagcagcccatggcccc

SEQ ID NO: 26682 - DNA, 560 bp, Homo sapiens
  misc_feature (1)...(560): n = A,T,C or G
gatagatcnccnntnnnnnnnnnnatcgaaccacagtcagagaggtggaattcgcaacaagaaggatcgcccagcggcgcggggccgtcaagggagaaattacacatttactctgcctttttcttactgcgacggcgcccatacatcaccgctggggctggggcgggacatgccggccaatttccagcatgaattatggaactgagaagcatcgagaccaggcttcctgccggcccagcatcacccagaccaacctgaagctaggaatgctgccaccaggggatgggaccaccctctctaaagcctgtgtctcctgaatctgaccctgcttcccacccccacccttgtaagagcacctgtgggcatggaggggaaggatctggggctgatctaaatgtcttctctcctttttagacgactgcaagaacattgccaacatcatgaagacactcgcctatcgaggcttcatcttcaagcagacatcgaagccgttctgattggccgaggacaggatggggcaggacaggggtactgtttggccagcccagaatcctcctctt

SEQ ID NO: 26683 - DNA, 468 bp, Homo sapiens
  misc_feature (1)...(468): n = A,T,C or G
nctcgatgaccantcngccagngncgnggaattcgtcagtattgaccttaatatttgtagtattgggagtatcatgatagcagaaaggactttggaaaatctattattagagggcttcacatgggtgcttctgtaataaaatgaatggtgaaaagagacttaaccatttatagttgttggcttcggataaatctcccagaaaataagtggattggagtccattaacccaagcttcccaaagcataatgggagttgagcttagggcctgtttcctagtgagtgacctactgaggcttaggggctagatcaaaaggatctggtagtactgagtttcttagtaccaaattgaaaatggatttcttttttttaaaaaaggcctttgttacaatcttattgcctgagatgatgtaacatgttaatgggttatccattttgtattggttttttttgtgtgtgtatgtgtgtggn

SEQ ID NO: 26684 - DNA, 579 bp, Homo sapiens
  misc_feature (1)...(579): n = A,T,C or G
aacgacgaattcggacacantnananggngnaaatttgatccactatccgtgtggtggaattcctggtggcagtgctcaggcgcccgccgcccttgaccttcggccccgcgagctctaaccctacagcgcaggaagatcggccgccgcggccaggctctgatgctggtgtctggtagaagaaggttactcacagttctgctgcaggctcagaagtggccctttcaaccctccagagacatgagactagtgcagttccgggcaccccacctggtggggcctcacttgggcctggagacagggaatggtggaggggttatcaacctcaatgcctttgaccccacactcccaaagacgatgacgcagttcctagagcagggagaggccaccctctcagtggcaagaagagccctggctgcccagttgccagtcctaccacggtcggaggtaaccttcctggctccagtcacacgaccagataaggtggtgtgtgtgggcatgaattatgtggaccactgcaaagaacagaacgtgcccgtgcccaaggagcccatcatcttcagcaaggttgccagctccan

SEQ ID NO: 26685 - DNA, 445 bp, Homo sapiens
  misc_feature (1)...(445): n = A,T,C or G
gcagtaagagacctacgaaactganaccttacgaagncngnggaattcatgtggtgctctgtgggcagctgggactggcccgccgtaagcacatggattattgtctgaggctgtaatgggaaagtcggttcctgggctgctgtctcatagacatcagcttgcagggaagctgggggctctccgaattgccctgctccggggcccctcctgctgcgtgactcacaggcacattgcagagagaagctgccgctcccagtaagtaatgaaaagagacatgaagaattggtatttcaaatgaccaccatgttgcaaaagtctgacagcaatgcaagcttcctccgtgctgccagagcaggcaacctggacaaagttgtggaatatctgaaggggggcatagacatcaatacctgcaatcagaatggactcaacgctctccatctggctg

SEQ ID NO: 26686 - DNA, 467 bp, Homo sapiens
  misc_feature (1)...(467): n = A,T,C or G
cattgatggacantcggcagngngcgggaattccgcctcggcccgcagagcttgccccctccccacccgcagacatgtccgagtccaagagcggccccgagtatgcttcgtttttcgccgtcatgggcgcctcggccgccatggtcttcagcgccctgggcgctgcctatggcacagccaagagcggtaccggcattgcggccatgtctgtcatgcggccggagcagatcatgaagtccatcatcccagtggtcatggctggcatcatcgccatctacggcctggtggtggcagtcctcatcgccaactccctgaatgacgacatcagcctctacaagagcttcctccagctgggcgccggcctgagcgtgggcctgagcggcctggcagccggctttgccatcggcatcgtgggggacgctggcgtgcggngcaccgcccagcagccccgactattcgtgggcatg

SEQ ID NO: 26687 - DNA, 469 bp, Homo sapiens
  misc_feature (1)...(469): n = A,T,C or G
ggaagcaggccngnnnncctgagaactangtcntctgcgacagncnggnggaattcgcacagacagctcagataccagctgcctgggccaggatcttccccctttagttttctgcttaagcaaatagaatttctcaaggggcagctcccataagcaccggtgattggaaagcagacaccgtcactgccaccttccctcccaggactccggccaaggtttccagtactacttgcctccagtaccagaggcaggcaagtggacatcaggggtgtccccaggggcgtgcatctcggaagtcaggggctccagagagggttccagcatccttcaccacgtggcaggagtctgccacagagaggtgttgattgcctttcctcacatttccaggaactgagtatctaccaagatcaggaacaaaggatcttaaagttcctggaagagcttggggaagggaaggccaccacagcac

SEQ ID NO: 26688 - DNA, 466 bp, Homo sapiens
  misc_feature (1)...(466): n = A,T,C or G
nattgtcgacatcactagnccangnggnggaattcttggggagcagaaatcatacttttggctttcaataccacttatagtgaggctacttctccatggaaacaagtctctgaggcacaacctttatgaaaggaaggagcattcgttggtgagaagaacagtatcgctgacttcctgtgctcctctggccacaggtaactgttggtcacttcagatttggcttggggtctctcagtgaggagctgctgctgtgctgtttaatgcttacctgatggcaacttctggctctggaaccgctactctgccctgttcccagccacttcccaacctgattcaagcagggcccctccttcctcctgtctttatttatttatttattgagacagagtctcactctgtcgcccaggctggagtgcagtagcgcgatctcggctcactgcgagctctgccacctgggttcaagcgn

SEQ ID NO: 26689 - DNA, 470 bp, Homo sapiens
  misc_feature (1)...(470): n = A,T,C or G
gagatgnnnnaattgagatcgtaagacatngcggnggaattcggaactcaaatgccaatggttacgtgcgcttacaactaggaggggaggaccggggtgggctctgacaccccctgcctgagctcgcggatgaactgagacgcaaactgcagcaacgccagccactgcccgactccaaccccgaggagtcatcactatgaggggaacccccaccgcgtccgcgggaagcgtgggaggtgtaactcctacttttgcacaggcaccacctacctcatggacatggcacgggcacctgctctgtctgggacagatactgcccagcacccacccggccatgaggacctgctctgctcagcacgggcactgccacttggtgtggctcaccaaggcaccagcctcgcagaaggcatcttcctcctctctgtgaatcacagacacgcgggaccccagccgccaaaacttttcaaggg

SEQ ID NO: 26690 - DNA, 471 bp, Homo sapiens
  misc_feature (1)...(471): n = A,T,C or G
gggaatgcagggncnnnnnnaattgatgactgaggtctattgcggaggacttngacggngaggccatctatcagaaagtccactctgctgccttggccatagccgatcagcactagcgcttgctacagagtgtgaaaaactcgatgctccagatgaagatgagtgagcgggccgcctcgctgagcaccatggtgcccctgcctcgcagcgcctactggcagcacatcacacggcagcacagcacgggacagctctaccgcttgcaagatgtttccagccctctgaagcttcatcgaacagagacttttccagcctacagatctgagcactgacagtaactgccaagaattgttaacacacttgtgatgtgtcagccacagattcacccaggaggtcacagaatgacagcaagggaaatgacgaccaagagaagaagcttaaagtcctggctaattgtgtggtcattggaaa

SEQ ID NO: 26691 - DNA, 478 bp, Homo sapiens
  misc_feature (1)...(478): n = A,T,C or G
natcgagnccatgatgacattagnccagngcggnggaattcggaagactctgaggagggcgaaacgccgacagatcccagtgctgcgcacgatgggatcgtgattaagatcgaggtacagaccaacgacgagggctcagaaagtttggagacacctgagcccctgatgggacaggtggaagagcacggcttccaggactcagagctgggtgacccctgtggggaacagccagacctggacatgcaggagccagagaacacgctggaggagtccacggaaggctccagcgagttcagcgaactgaagcagatgctggtgcagcagaggaactgcacggaggggatcgtgatcaagacagaggaacaagacgaggaggaagaagaggaggaggaggatgagctgccgcagcacttgcaatcccttgggcagctgtccgggagatatgaggccagtatgtaccagaccccgctgcccggng

SEQ ID NO: 26692 - DNA, 471 bp, Homo sapiens
  misc_feature (1)...(471): n = A,T,C or G
gggagagcaggggcngnnnnaattgagactgaagacatctacacagtctggnggaattccgtccccctgcccaagtgactgaaacctactgagctatattcactgtgctgtcctagggggagggagagcagagctcgcccctgcactgcagccttgtgggggagggcaaggctctcctcccagccagggacgccaggacatagctgctcctggtcagtggaggtcagccgggtatcaaaagccatgaaactgtgtctctgtagcaatgagtgatactgtgacaaaaccatccttgcattcttcctagaagagttcctctgctccttccattccatttttgtgtttgttttgttcttttctgtcactgatccgtattaccacttttggaaaaaaataaataaataaataaataaaaggcagcttgagtttccaaacgtgtgattcacttgtgaacaaaagtcattctaacan

SEQ ID NO: 26693 - DNA, 462 bp, Homo sapiens
  misc_feature (1)...(462): n = A,T,C or G
ggagtgcaggccnccnnaaatgagactgacgacattcaaagacattaanaataaggggaggagagacagtgactcctatgacccatgattacataagattttgttttacattgtaaagaatttatttttatgttaagccgaataggaattcattcaagggtagaatggagagtgatattatctgacatgttttttaaaaatcctggctgcagaaaatacgctgaaaggaggcacgtaagaaaccaggaagaccaactaccaggctactgtaataatccacgctagaaattagagtgacttagaccacaaatgtagctctgaaaatggtttaaattgattttaatgttgagttttcaatattcttcttaacgaaagaacacataggttgctgatggattaaatatggagtgtgagaaagcactcaaaaaatgactccccatgttatttagcaagagcagccag

SEQ ID NO: 26694 - DNA, 466 bp, Homo sapiens
  misc_feature (1)...(466): n = A,T,C or G
gggagtgccggccnnnnncctgataactangaccttcgacagngnggnggaattcggcgcccagaggcgcacaggagacctcaggcccagactccactccccagctgtgaaaggactgctggccagacccccaagctagcccgccaggcctccatagagctgcccagcatggctgcatccagtaccaagagttggtgggagacgggtgaggtataggctcagtctgcggccaagactccgtcctgcaagactctttggcagttgcactgggtactggctgagttctggaaaacaggaatgtgagcagagtgctgcagatctccttgtcaggagcacctaagaactggcatgactctacaccctctctccttctgcaatgacctcgtgtcaagatggcagacccgcagagatgaatgtgcctggatacctgagtcaccaggtggaggaaactcccattgacatgcat

SEQ ID NO: 26695 - DNA, 460 bp, Homo sapiens
  misc_feature (1)...(460): n = A,T,C or G
agcagctcnnnnnaaactgagacctaagacatngcggnggacnnccagngaggacataggtgtggcagacccgtctgcgttaacacaagcggntgctttctaccttggctgtcattttataggcatgcctgaatgtgaggtgcttctggcccagtgtgtggtctactttgccagagccccaaagtccattgaggtgtacagcgcctacaacaacgtcaaagcctgcctgaggaaccaccaggggccactgccccccgtgcccctgcacctgaggaacgcgcccactatgctgatgaaggatttgggctatggcaaaggctacaagtacaaccccatgtacagcgagcctgtggatcaggagtacctgcctgaagagttgaggggggtagatttcttcaagcagaggaggtgctgactactcagggcacgacagcagaaggatgttgcttttttaagggag

SEQ ID NO: 26696 - DNA, 501 bp, Homo sapiens
  misc_feature (1)...(501): n = A,T,C or G
aggagtcnagggngnnnnnnaatcgagaccttgtagacactagtcagtgcggnggaattcgggtcctgaaggtggtggcactgtggccttaggagctggggtagtactcaaagctatccccaagtaggcacgggggctgggcctttatgcctgtcaccagtctatgattggacgtgttctgccctccaggggtcatatccttgggccacaccactcacttctctgcccaagtgcagtctctggcatggggactcagcctagagtgatcagccacctgcactcccagcagccaggtactgaaggctttacccctgaacagagggacaggctggtgcccaccacagtcatgcgaaggcattgcggaaagctctcattaaaagagcattaagccaggcctggtggctcacggctgtagtcctaggtactcgaagctgcggcgggaggatcacgagctcaggagttcgagtgcagcctgggcaacatagtgaggcctcgtctcca

SEQ ID NO: 26697 - DNA, 442 bp, Homo sapiens
  misc_feature (1)...(442): n = A,T,C or G
gaaacactgggacctacganactgagggcatcgaaaagcccngccttttataattgaaaaggcccctctattttatttttcttgaattcattcccttttttttgaaccaaatgatatttgagtttttgttattccttttgcagattgggatgtgttttgggggcaggggttagttcttcaggtcggcagacccagagcacttgataaagaactgtatttaatcggtagtgttggggccgggacgggcttggctccctctctgccatactgagcctgaggtatttcatatctcctgctgttccatcccagcttgaattggtgccacaagcttccaagttggcattttttctagaacctgatcgtccactagcccagagtgtgtgtgttcaacccccacaccaggtggtggtaggcggtgtgactgcacagcgaggtgccggan

SEQ ID NO: 26698 - DNA, 469 bp, Homo sapiens
  misc_feature (1)...(469): n = A,T,C or G
cccccgcccgcgnggnnnttttgaaaactgangacaattcgacagncnggnggaattccaagaatggcggcctgggcgtagtctccgacgccatctttgaactgttcaagtttctctctgcctttaacctggatgacacggaagtggctctgctgcaggctgtgctgctaatgtcaacagaccgctcgggcctgctgtgtgtggacaagatcgagaagagtcaggaggcgtacctgctggcgttcgagcactacgtcaaccaccgcaaacacaacattccgcacttctggcccaagctgctgatgaaggagagagaagtgcagagttcgattctgtacaagggggcagcggcagaaggccggccgggcgggtcactgggcgtccacccggaaggacagcagcttctcggaatgcatgttgttcagggtccgcaggtccggcagcttgagcagcagcttggggaagcggn

SEQ ID NO: 26699 - DNA, 462 bp, Homo sapiens
  misc_feature (1)...(462): n = A,T,C or G
agggccgggcccccgccctgaaaatcattgangccccttcgaccgncnggnggaattcgaggaaacgatattaatgtgattcctatttcatctaggcactgtagcataatccttcaacaaattaccacatttgattctcatataattctctaaaatgtgaataccatattacagatgaggagagtgagactcagagaagttagtaactttccaaggttggagagctaagtgacagagctgggattcaaacctttctttgtctaactccaaaactccatgcttgtgaaactaatagcacggaggactgatttataccttcaactgaaaaaaaatgccacaagccttaggtatttgttaccttagaagatgagactcttgctctgagtgtttgtgctctgtgacactgcctctaaataaatgacagtgattttttagtgtctaataggataccttatattttcn

SEQ ID NO: 26700 - DNA, 466 bp, Homo sapiens
  misc_feature (1)...(466): n = A,T,C or G
naagagccggggnnnnnaactgagactgcagacattgcggnggaattccaacgacagccgagacatgtacatggagtctgagggcggcgacggctacctggctccggagaatgggtatttgatggaggctgcgccggagtgaagaggtcgtcctctccatctgctgtgtttggacgcgttcctgcccagccccttgctgtcatcccctcccccaaccttggccacttgagtttgtcctgcaagggtaggtgtctcatttgttctggccccttggatttaaaaataaaattaatttcctgttgatagtgggcgnaaaaaaaaactactaaaacaaaaaaaaccgcatggacaaacaaaaactgactgtaaaaaatnnngggccccccctataaaagactatgcccagacaaaccctgtatatcacccgtcgccggtttttttaaccaaaaaactactgggccccccc

SEQ ID NO: 26701 - DNA, 461 bp, Homo sapiens
  misc_feature (1)...(461): n = A,T,C or G
gcagagccnnnnaaatgagcctgangaccttacacagngnggtggaattcgccctgacagcggagcattttgcagcactccagagcctgctcaagctgctccatgctctgcaccgcctcactaggctggtggcattccgtgacctgtcctctgccgaggcaattctggctctctttccagaaaatttccaccaaaacctcaaaaacctgctgacaaagatcatcctagaacatgtgtctacttggagaaccgaagcccaggcaaatcagatctctctgccacgcctggtcgatctggactggagagtggatatcaaaacctcctcagacagcatcagccgcatggccgtccccacctgcctgctccagatgaagatccaagaagatcccagcctatgcggagacaaaccctccatctcagctgtcaccgtggagctgagcaaagaaacactggacaccatg

SEQ ID NO: 26702 - DNA, 475 bp, Homo sapiens
  misc_feature (1)...(475): n = A,T,C or G
gacggaaaattgnctcgagtaccctagtccgtgtggtggaattccccggcaagtaacatgactaaaaagaagcgggagaatctgggcgtcgctctagagatcgatgggctagaggagaagctgtcccagtgtcggagagacctggaggccgtgaactccagactccacagccgggagctgagcccagaggccaggaggtccctggagaaggagaaaaacagcctaatgaacaaagcctccaactacgagaaggaactgaagtttcttcggcaagagaaccggaagaacatgctgctctctgtggccatctttatcctcctgacgctcgtctatgcctactggaccatgtgagcctggcacttccccacaaccagcacaggcttccacttggccccttggtcaggatcaagcaggcacttcaagcctcaataggaccaaggtgctggggtgttcccctcccaacctagtgttcaag

SEQ ID NO: 26703 - DNA, 450 bp, Homo sapiens
  misc_feature (1)...(450): n = A,T,C or G
nattgatgattgtatagacnattgnggnggaattcctcagtgaaaaaagggggaaaaaaagaaaaaagaaggtgggtgctggggcaagggtgggtcctactttggctagggtgatcagggaaggctcccctgaggaagtgacttacattttttgtgttaaatatattattcatacctaaaagtgtttaaattgtctctgtacactaccatgtcatgaagatacggtaaaataaatagtccatgtacagtagaaagactaacaataaagatccctccctgcctaggaaacagatcattaccaaaattctagaagcttcatgtgcagcctgttcttgcctcccctcctcaccagccactcttcagaattttgtatcaaacatctccttgcagccggcatggtggctcacccctgtggtcccagcactttggcaggctgagctcaggagttcc

SEQ ID NO: 26704 - DNA, 450 bp, Homo sapiens
  misc_feature (1)...(450): n = A,T,C or G
nattgaggactgatgacntccagaccagncnggnggaattcaaaataaaaaatacataggctgggcgcggtgactcacacctgtaatttcagcactttaggaggccgaggtgatcagatcacttggggtccgtcgggagttaaagaccagcctggcaaacatagtaaaacaccatatctactaaaaaatacaaacattagctaggtgtggtggtacatgtctgtagtcccagccactcgggaggctgaggcaggagaatcgcttgagcctgggaggtggaggttgcagtgagccgagatcacaccactgcactccagcctgggtgacagaatgagactccgtttcaaagaaaaaaaaaatacataaacacattaaaaataaaatagaaatgtatatactgttttgccagaactctctgatgctccttaaggagccccgaggagcctagat

SEQ ID NO: 26705 - DNA, 447 bp, Homo sapiens
  misc_feature (1)...(447): n = A,T,C or G
nattgaagactgatgacatncnggnggacttctggaaaaccagagccagcttccgttcctcagcctttcttctctaaacaccaagttccaccattgacagaacactgagtcctgcacagtcacatggacacgagtaaggagagctcacaggctgcagtggagttccacacgaagcacaggaggtgaaacccctttttcctggctcctcaggagacatgtgaagacaacgcgattagaggtccttcacgcacggatagggtttgtatctgctgaatcccaatccatctcacatctccatctctaaatgcgcactttcggatatctgtgaataccccctgtgaagttcctggttggcagcgggcggggtgtgcagctctgtgtccaagtatgaaatgccccaatgccagttgcaattgttttgattttggtgttagagtctaatgttag

SEQ ID NO: 26706 - DNA, 463 bp, Homo sapiens
  misc_feature (1)...(463): n = A,T,C or G
gccagtgccnnnnnnaattgaaactgangacntccgacagncnggnggaattcggaggagctttacgacttcccgtcctgcgggaagtggcgggcacgattgcattgtagcgcagaagcttctcaatggccagcgccagctgcagccccggcggcgcactcgcctcacctgagcctgggaggaaaattcttccaaggatgatctcccactcagagctgaggaagcttttctactcagcagatgctgtgtgttttgatgttgacagcacggtcatcagtgaagaaggaatcggacggagtctcgctctgtcaccaggctggagtgcaatggtgcaatctcggctcactgcaacctccgcctcctgggttcaagcaattctcctgcctccacctcctgagtagctgaaactacaggatgctttcattggatttggaggaaatgtgatcaggcaacaagtcaaggg

SEQ ID NO: 26707 - DNA, 466 bp, Homo sapiens
  misc_feature (1)...(466): n = A,T,C or G
ncctagatgacccctgataaacnntcgcacagagcggaggaaatcagcttttaccctttaatcttgccatttaaattacagtagaaagacaaaatcaagtaatataaagtgttagataatagaaagagtgttaagaccagcccacttttctcatgtttatgttctttcatttggaccaagaatctccgcatggaggttgatttgccactggggactttggctaaaactattaggtttgctttcaactagatgttcctgagacaagcagagggacactgcgattccccttgcatgcctgctgttctcccccatgtaagtcttctttgaaattaacggatgtgtctcctttggaacagccccataacaaaagagaactactgatctgagcataggaaagtagaggctctaccacttttcagttgaaaaagcaagactttctctgtgtttctgaaacaaggcataatgt

SEQ ID NO: 26708 - DNA, 562 bp, Homo sapiens
  misc_feature (1)...(562): n = A,T,C or G
nnattcgagtactactnccagaggngcaanncctttactgccttctatttgggtgagacttaataaaatattttattccatcttctctacttactttttagctatgcctccttatattttnggntgctggagagttacaatatgcattcttcaatatccagtctactgtccaataatattacaccacttcatgtataacgtaagaactttacaaaaatataatgccagggctgggcgcagtggctcacgcctgtaatcccagcactttgggaggtcgaggcgggcagctcacctgaggtcaggagttcgagaccagcctgaccaacatggaggaaccccatctctactaaaaatacaaaattagccgggcatggtggctcatgcctgtaatcccagctactcangaggctgaggcaggagagttgcttgaaccggggaggtggaagttgcaatgagccaagaatgcgccgttgcaccccacactgngcaacaagagcgaaactccgtctcaataaataaataaattaaataaacacatatattatatatatgtaatgccatn

SEQ ID NO: 26709 - DNA, 469 bp, Homo sapiens
  misc_feature (1)...(469): n = A,T,C or G
aggggncaggagnnccaggggnccnnncaactgattatctattacagngcggnggaattcccgccactcgcaacatggagaagatccaggtcatcaaggatttcccctggatcctggcggatgagcaggatgtccacatgcatgacccccggctgataccactaaaaaccatgacgtcggacattttaaagatgcagctttacgtggaagagcgcgctcataaaggcagctgagggggcacctgccaccccactgatgcccaaactgtcagactttgggggatccccgcctagggcagtgctgcatggctgccctgattccaagtgctcttatcgcctctgtgtgtggatcgcccgccccagcccggggccgctcaggtctgcttggaggatgcctcccccaggagggcagtgagggatgccgcaacctcgacttctcagcctcctggggttccgccggccaacactgt

SEQ ID NO: 26710 - DNA, 481 bp, Homo sapiens
  misc_feature (1)...(481): n = A,T,C or G
tggcnaggggnnnnnnnnaatcgaganccnatcgagagccactcggaanncacactgctgtcctgtgaagtgtttcccatgacctttttcttcccctttgaatccctctgtctggagtagtccttgcctcttcctgctccagtagggccttttccctaccccagcccctgtgccaggctaagctggtacaagagctgccaacctcacagagtgtttgctaggcgagagaggtgcagggaagaggcagaggtatgcaccttcccccttgaagagaggggaaaggcctacagtggcccacataattgcctgactcacacttcagctacctcttaatgcctgtggagggactggagctgctggatcccagtgtggtggtgtaggaggccacagtgagcaggtggccccagctgggtttcccaggtcaggaatgtgggccccaggcaaggtgcagcctttgctcacagctccatccatgtctaga

SEQ ID NO: 26711 - DNA, 466 bp, Homo sapiens
  misc_feature (1)...(466): n = A,T,C or G
gagcgagggccccaatgaggccactacnatgnctttcggancgncnggnggaatacgttggctgcgaccagggtcatagcagtataggtggggagaattaattagattttgtatatttattaaaggcaaagccagcatgatgccttgactctaacttaaaggttggagttgtcatttactgagatgagagagaccatggggggaaggtaaagggctcggttttggatgtgttaggcttgtgctgccattggacatccgtgtggaggtgtcagagaagctggcctggagaaataaattggggaatcatcagcatactgaaggcattggaaggcacaagctggcataagatcagaaagagatggagcgtagatggagaatgaaagagacctttagagattaggaagaaaattactgactgagaccaacaaagtagattgatacggagcagccagtgatatcagagcan

SEQ ID NO: 26712 - DNA, 447 bp, Homo sapiens
  misc_feature (1)...(447): n = A,T,C or G
ntttgacgaccactagaacagcgcggnggaattcggngatggaaggaggaacatggagtgttggcccaggaggaaagatgtgaccaagtgggagatttctgtttggctgggttaggcgatgtctcctcagtggtaactcctcacctctacttccctctgtttttttcagggcctgacacatttagggaagggcacccttaccctctgcccctaccacagcgaccggcagcttatgagccaggtggccgtggctggactgctcactgtgcttgtctctttcctggatgttcgaaacattattctaggcaaatcacactatgtattgtatgggctggtggctgccatgcagccccgaatgctggttacgtttgatgaggagctgcggccattgccagtgtctgtccgtgtgggccaggtgagaggctgagtagaggggagggctcaggn

SEQ ID NO: 26713 - DNA, 447 bp, Homo sapiens
  misc_feature (1)...(447): n = A,T,C or G
nttgaagcccatagtagaccttagaccangcggnggaattcggggattgggtgaggtcatcctgaggactcgtccaccccaaaggtacctgtaattaccaacatttagctacaaaacaggtgacctgggaatggaagagtgaaacatgcaggaccacagggctcgcactgctggctggcagcagtcacagctgccgtgtactgggtgcctgcgtgtacccaggacagcccaggaccgtgtattactcattagtgcacaagtattacttagtgcacaatatacagtctctagaagatgacttcttgccttcagtcgccgctccctttgatggctgtggttaggggtgtgctcgttcctctgccctggtttagacaggtacctgatagcacactgtggtgcttctcagtgggggtctgggggtcaaccagatcagaaacacttggatgg

SEQ ID NO: 26714 - DNA, 459 bp, Homo sapiens
  misc_feature (1)...(459): n = A,T,C or G
nattgcgtacgttacnccgngcggnggaattcccagaaaagattctcccagatgcttcaggacaagcccctgcgcacatcgtggcagcggaagatgaaggaacgacaggagaggaagctggccaaggactttgcccgtcacctggaggaggagaaggagaggcgccgccaggagaagaaacagcgccgggctgagaacctgaaacgccgcctggagaatgagcggaaggcagaggtcgtccaagtgatccgaaaccccgccaagctcaagcgggcaaagaacaagcagctgcgctccattgagaagcgggacaccctggccctgctgcagaagcagccgccccagcagccggcagccaagatctgagctcaggacggcccgaggccttccatggccaacaaacatgtcagacacagcacctcaggccgctgctcagatgcctctgctggagctggcact

SEQ ID NO: 26715 - DNA, 459 bp, Homo sapiens
  misc_feature (1)...(459): n = A,T,C or G
ctcgacttcgatacccttagaccagngcggtggaattcctggcgacagactgtgtcctctttcccaccttcatagcaggaatcacccgtaccctactggctgggcttcgtgctagcgagggttctgggggtgggtcttggtgatcttgtcctatggggagtctgcagtggtctcagccacatcctatgtattttggctctggaggagcaaagctgtatcctggagttggtctgtgatttgccgacagccttgcaggctgggctcagggacaaagtcccccccaaaacccgcaggtcctcatgtccagacgctgcccagtcctgtcctgaaaacagcacgccccaggcccacagaaccccccaccctacatttgccttgggtggagctgggggtggtcctaggactgcgggtgcccttagctgaagggggtggggagaagcgtggactgggcagcctgtg

SEQ ID NO: 26716 - DNA, 442 bp, Homo sapiens
attgacgaccatagaccacgcggggaattccaggtgtatgcggagaggatcttcttccctgggcaccgcgagtcgcccttgcaccgggacctgggtgtgcctgagagcagacggcccactgtggagcaagggctggggcagctctctaacctgctcaacagcaagctcttcctcaccaagttcatccacacgctggagagccagcgcaccttttcagctcgggaccgtgcctacgtggcatctctgctcaccgtggcactgcatgggaagcttgagtatttcactgacatcctccgcactctgctcagtgacctggttgcccagtatgtggccaagaaccccaagctgatgctgcgcaggacagagactgtggtggagaagctgctcaccaactggatgtccatctgtctgtataccttcgtgagggactccgtaggggagc

SEQ ID NO: 26717 - DNA, 447 bp, Homo sapiens
  misc_feature (1)...(447): n = A,T,C or G
nttgagnccatagtagaccttagtccatgcggtggaattccccaggctggagtgcagttgtgtgatctcagctcactgcaacctccgccacctgggttcaagcaattctctgcctcagcctcccaagtagctgggacacaggcacccaccacaacgcccggctaatttttgtattttttgtagagacgggtttttgctatgttggccaggttggtctcaaactcctgacttcaagtgatccacccccatcggccacccaaagtgctgggattacaggcatgagccatggcatctggccaaagccacctttttgaggcatcacttatcaagaaatatttaaggaaatgaatgtgttaattatgtcttaataaaacaaccataaagttaatctatatgaatggtaccaatcaaattagaagaaaatttacattttaaataagagtaatt

SEQ ID NO: 26718 - DNA, 444 bp, Homo sapiens
  misc_feature (1)...(444): n = A,T,C or G
nttgtagacactagaccagcgcggnggaattcgcttgccaagaagctcctgaacatctttattcagcccagtgcttcctcgtcttaaccaagagccacacagagacaacagtgaactcacaagttcataggattccaaaatgattgactccccaagtgtctgcctgtgttggcaaagtgctctttcctttcccactgtctgcacagactgtactctggggaaactcccagcacttgtgggtgcctggttaccgaggatgtgcttggctgccatggtaactcccagcctctcagtgtggaccactctcccgcaggctcgaggagacctggcagaggccccatggggcggaggctccctatggctgctccacctgcagacagccttgggagaacccaaggtaatgtggagtaggacccagcacacaggagctccctccgcacgcca

SEQ ID NO: 26719 - DNA, 449 bp, Homo sapiens
  misc_feature (1)...(449): n = A,T,C or G
attgaacccccattgatgaccatctgaccangcggaggaattcgttgacaaatattcctgcggcagcgtgggctgcgagctgctgagcctgtctggctcccaagaccatggtgtgggggcctgaggcgggtcctctcctctgccctgctcaatgtggctctgtccacttagcaaacatttactgggtaccaagagatgccacataccccaaagtctccatgaagcatgaaggtcatgcttcccattaaaagagcgaaactcaagctcacggactgggagtgagggcagtgacttgacccacgcctcccaggtacaaagtacagggcggagcatgagggagcctgatatgaggcccccaacgagaacctgcacctcctggaccttagctttctggtctgtacaatggatggggctttcattctgctcgcccagggaaggcagagctagag

SEQ ID NO: 26720 - DNA, 448 bp, Homo sapiens
  misc_feature (1)...(448): n = A,T,C or G
ntttcgagatcactagaccagcgcggnggaattcgaaaatcgttgtgaaagtgttgaaggcacaagcacagagtcagaaagctaaataaaaaaatgaaacttttttgagtaataaaaatgaaaagacgctgtccaatagaaaaagttggtgtgctggagctacctcacctcagcttgagagagccagttgtgtgcatctctttccagttttgcatccagtgacgtctgcttggcatcttgagattgttatggtgagagtatttacacctcagcaaatgctgcaaaatcctgttttcccccagagagctggaggttaaatactaccagcacatccctagatactactcaagttacagtatatgatcactaatatagtatgctcttggtaccaggagctctgatatatatctggtacatgtttgataatgacttgattgttattataagn

SEQ ID NO: 26721 - DNA, 445 bp, Homo sapiens
  misc_feature (1)...(445): n = A,T,C or G
atcgagaccatagtagaccttagtccatgcggnggaattcatattctagtcggaggaacagaatgtgccaacgcgccgaacaggaaggatagttttacgatacggagatgtgtatgatagggaataagtgggagcccagtttggactaattggaagaagtcattattagaagtactgtatttaattctagtttgttataaaatgagactccaagatcactgagccatttcactgagactccaagatcaccccaatgctaggctaatctccatggcgcctagatctatgcccactccattccccatgttggtccccatagtttcaggcaccaggctccaacaccaggttgggccctacagccccagtctccaggttggcaccagtggatataggctttaggtccactgactgctggtccctacagccccaggttccagtgaaccca

SEQ ID NO: 26722 - DNA, 569 bp, Homo sapiens
  misc_feature (1)...(569): n = A,T,C or G
nattcgaacctctagtccaccgnggngcaattcggagcccggccacacccatcgtgctggtcaagcagggccatgagcctcccaccttcattggatggttcttcacttgggacccctacaagtggactagccacccgtcccacaaggaagtggtggatggcagcccggcagcagcatcaaccatctctgagataacagcacctgaggctcctctctggacaggaagtcaacaacttgcggctatccagatggccgggcaatggcagggcaggtgccgtggccctgcaggccctcaagggctcccaggacagctcagagaatgatctggtgcgaagccccaagtcggctggcagcagaaccagcagctccgtcagcagcaccagcgccacgatcaacgggggcctgcgccgggaacaactgatgcaccaggctgttgaggacctgccagagggcgtggaccctgcccgcagggagttctatctctcagactctgacttccaagatatctttgggaaatccaaggaggaattctacagcatggccacgtggaggcagcggcaggagaaaaa

SEQ ID NO: 26723 - DNA, 563 bp, Homo sapiens
  misc_feature (1)...(563): n = A,T,C or G
ctcgacatcgatcactatccagcgngggcaatncgngacgtctagtgggttgcccgggaggggtggcgggagcggtcctggaaataatctgtcctctgtcgccgttaactggcgaggtagttccttcgcggtggagagacctggaatggccaaatatcaaggtgaagttcaaagtttgaaactggatgatgattcagttatagaaggagtaagcgaccaagtacttgtggcagttgtggtcagtttcgctttgattgctaccctggtatatgcacttttcagaaatgtacatcaaaacattcacccagaaaaccaggagctagtaagggtacttcgagaacagcttcaaacagaacaggatgcacctgctgccactcgacagcagttctacactgacatgtactgtcccatctgcctgcaccaagcctccttcccggtggagaccaactgtggacatcttttttgtggtgcctgcattattgcttactggcgatatggttcatggcttgangcaatcagttgtccaatctgtagacaaacggtaaccttactcctaacagtag

SEQ ID NO: 26724 - DNA, 442 bp, Homo sapiens
  misc_feature (1)...(442): n = A,T,C or G
natcgagaccatagagagcgcggggaattcgagggactggtgagtcaactcacagattctgcagcagctgctccacccacaataaagcaaacgccgacaggctagaccccagattgcaggggctgccacctacaaggtgggaccacaggctgcctcaccgggattgtctgccactaaatagctggagtcacagattgagataaatgccaccttcaaggttgcagtgaaaagcataatcctatgtgatgaatttatatgtgttattttttaaaaagctattttattactgcatgttcccgtcccgtcttgtgaatgtgagtccccgccaccacgtgaggtgcagtcgttgcagcggctggtgcaggagtgcagctggcgcgtgtgtgatagcatctcgtaggtgttgctgcacaagagttaaccagagtcaatgccaaacaca

SEQ ID NO: 26725 - DNA, 447 bp, Homo sapiens
  misc_feature (1)...(447): n = A,T,C or G
nttgaacnccaatagatgacccctagtcagtgcggtggaattccaagttagtggagagccctgaaaggagcctcacttgaatccagctcagtgctctgggtggccccctgcaggtggcccctgaccctgcgttgcagcagggtccacctgtgagcaggcccgccctggggcctcttcctggatgtgccctctctgagttctgtgctgtctcttggaggcagggcccaggagaacaaagtgtggaggcctcggggagtggcttttccagctctcatgccccgcagtgtggaacaaggcagaaaaggatcctaggaaataagtctcttggcggtccctgagagtcctgctgaaatccagccagtgttttttgtggtatgagaacaggcaaaaagagatgccccgagatagaaggggagccttgtgtttctttcctgcagacgtgagatg

SEQ ID NO: 26726 - DNA, 446 bp, Homo sapiens
  misc_feature (1)...(446): n = A,T,C or G
aattgaacgacactagaccagcgtggnggaattccggngcctgagcactaagcggcggcggctggcgtggggctgcttagatgcgccacggtttcggtagcgacggtagctctagccgggcctgagctgtgctagcacctcccccaggagaccgttgcagtcggccagcccccttctccacggtgagaaactcggggggccagggggtgtcctcgctgccttatttcgccccactccggacttagccctccgcgtagcccgcgcttcctgagaagtggggtggggggcgtcgtcccgtggtggcgccggccggggtgggggcagttagtgcctggggggcgcggcccaactcaaccccttaccccaggccttgcccactaggtaaccatgtgcgaccgaaaggccgtgatcaaaaatgcggacatgtcggaagagatgcaacaggg

SEQ ID NO: 26727 - DNA, 443 bp, Homo sapiens
  misc_feature (1)...(443): n = A,T,C or G
nattgatggacattcgcnagngcggnggaattccgtgatcccagctgactccggtcggcctcaacccaggggtggcgcaggcaccttgcaagcctcgagctgtagccaccctcaggcctgggaagaggcctgggccgacctcacacctcagcccttgcacccggccgggctcagttcaggcctgggcaccgagcttcaccctgggtgggtctcctcaggtggagtctgcagagtggacccagccaagggtcagggtcagcactgggtcagcgactccaatcttccagtggccagcacaccctagacaccccgaggagggagggctcctttctagcctgcccccccacccccacttcacccctccccagcttcccaaacttctgtctgcccaaatgggctctgaccgtgctctgtcggcccgagacatttggaagtcctggggg

SEQ ID NO: 26728 - DNA, 450 bp, Homo sapiens
  misc_feature (1)...(450): n = A,T,C or G
nattgacncccattcgatgacccctagtccagtgcggtggaattcgttaaaagacagttggtgtcggttcggcttctcgggtcggattccgcggtcccaacccttccccatggccgaccctgaggagttgcaggtttcttcgccgcccccgccgcctccctcttctccctcctcttcagacgcctctgcagcatcttccccgggcggcccagtgagtttgggctggccagttccgagcaggagcagcggcccaacggtggaccagctggaggaagtggagctgcagatcggagacgcagccttttcattaaccaaacttcttgaagccacatctgcagtatcagctcaagtggaagaacttgccttcaaatgtacagaaaatgcacgtttccttaaaacgtggcgggacctcttgaaagaaggctatgattctttgaaacctgatgactg

SEQ ID NO: 26729 - DNA, 457 bp, Homo sapiens
  misc_feature (1)...(457): n = A,T,C or G
attgtagcccttagaacangcgattgtatgtctttagtccagtgcggnggaattcatttagctttattctttgtggggtcggggagttgggatgaaaacactgcttactcactgacatcattccttgggatctggatcaacacgaatttcaggaatttttaacctgaaatgactccttgggattatctaatttaaccttcccatttcacatgttagtaaactgagattcagagaagtagagttgtttatgctcatgagtgacttagtagcagagccaggataaaaacacagttctcctaatatgattattatgactgagagttattgttcactaattaggtaccaaggaagggtcttatgtcatggtcacaacccagtagagtcttctaaaaacagatttttccttatggcatttttatgtctcatacattttagatgaatctgaattgtctctagc

SEQ ID NO: 26730 - DNA, 448 bp, Homo sapiens
  misc_feature (1)...(448): n = A,T,C or G
ggtttgagacattatccgnggttggatttcctagatggcagaaacacattgtcatgttagtttggaggagcaaacagatataagtatgtgttgtaatgttatagtgagctgttatgtatcccccagcaatgtccaaagtgatcagagctactagatgacttattacaatgttcagatcccactccttcattcctcctctctcagtgacctgtctacccccaagctttagaactgagctctctccaacttagaactcattagagtttgttgcattagtgattggatctcctcatgaaagttttttgaccaatgacagtagagcccctttaagctagccaggcccaagatagggaagcactgctggtttacatttctgctctttctaattcagttgtctattgcatgcagacatcccctgcccgacttctccattatggaaggctaaggc

SEQ ID NO: 26731 - DNA, 442 bp, Homo sapiens
  misc_feature (1)...(442): n = A,T,C or G
cttcgattgacgaccactagnccangcggtggaattcattgtctaatgtcaatttgttttctggcactgcctcttttatgtcttcttcctcgtcatctggcactaattcagaaacactcgtctccaccaagttgttttctgttaactcctttggtgtggagtctattagctcttgaatttctctaagatccatatcttgaaacccttcatcctcctccccctgcacccttccttcccttccctgtcctgggtcatgttgttgccaccctgtgtgacttttgaagctgtaaaatgagcttccagggcttgggtggcgtcggggcagggccgccgaggctgggaggaagcccttctgccttttgctggtgtttctggaatttgctttccctcacctctcacttccttctagaaggagcttcctgactggaaccagagaatgcat

SEQ ID NO: 26732 - DNA, 460 bp, Homo sapiens
  misc_feature (1)...(460): n = A,T,C or G
ctggttnnaatccgttacctttgatggacgncnaannnnnnggacctactgggctccatcctgagctccatggagaagccacccagcctcggtgaccaggagactcgtcgcaaggcccgagaacaggccgcccgcctgaagaaactacacgagcaagagaaacaacagaaagtggagtttcgtaaaaggatggagaaggaggtgtcagatttcattcaagacagcgggcagatcaagaaaaagtttcagccaatgaacaagatcgagaggagcatactacatgatgtggtggaagtggctggcctgacatccttctcctttggggaagatgatgactgtcgctatgtcatgatctttataaaggagtttgcaccctcagatgaagagctagactcttaccgtcgtggagaggaatgggacccccagaaggctgaagagaagcggaagctgaaggagctgg

SEQ ID NO: 26733 - DNA, 503 bp, Homo sapiens
  misc_feature (1)...(503): n = A,T,C or G
tggatgtnacggggnnnnaaggggtttcgtagaccttagtcacngtcggggaattcgaanaaaactaaagatgagaacaaactggctttaaaaaaacatcattgcttgagagtgtccaatatgcctatttgctaatgactgtgtgtgaatgctagggtgcctttgaagagtcctgacaccctcttctactgctccattgatcaggagagggtcagatgacttctaatgttgagaacggaattatgaagttcattttatacacaggcaactgaggcctcaaagatcacatgcctactctcacacagctagtgtcagccactgcaagaacccaagtctctgtaagaggttttccttttaaaaggtggaaacaacagttactgacccttaggactcttatttgttctttgcctcactgacaaccttgtcctaccaggtgtgcacaggtctccatttttagagctgccataatccctcctaccacttgtgactctggcctcaacttn

SEQ ID NO: 26734 - DNA, 424 bp, Homo sapiens
ttctgctgctggagaagatgcaggacagccggcagaaagcagtgcggcccctggagctggcctactgcctgcagaagtgcaacgtgcccttgtttgtccaacatgatgctgcccaactgtacctcaaactctggaacctgattaaggaccagatcactgatgtgcacttggtggagagactgcaggccctgtatacgatccgggtgaaggactccttgatttgcgttgactgtgccatggagagtagcagaaacagcagcatgctcaccctcccactttctctttttgatgtggactcaaagcccctgaagacactggaggacgccctgcactgcttcttccagcccagggagttatcaagcaaaagcaagtgcttctgtgagaactgtgggaagaagacccgtgggaaacaggtcttgaagct

SEQ ID NO: 26735 - DNA, 443 bp, Homo sapiens
  misc_feature (1)...(443): n = A,T,C or G
nattgattgcattcgccagngcggngcaattcgagctgcctgggctgatagctctgccctaagtgcgcgatgattccttcattcatttgtacatttgggtactgatgtaacaagtattcattaaatccgcagcacgtgcctggcactgtgctacatactggggacaaaaaagatgaacaaacacatcctgccctccagggtcctgactacagctaagaggccacatcaagataaatgcaacaagcctgcatcagggggcttcacctgagccaaggctgttgtccccaaagcgtctgacatgggggcctttaagagttagtgtttcaggaatacacacaccggtcttttcagactcatctgtgtgaaactcacattctgatgctctgagattctgatgcaatcggtctatgaagctcccggaagccaggtgtgtagcccctttg

SEQ ID NO: 26736 - DNA, 562 bp, Homo sapiens
  misc_feature (1)...(562): n = A,T,C or G
cgcattagatcccccctnngngngtttcggtccacagtccatgtggtggaattccccgcgaagaggagatggcggagtcgttgaggtctccgcgccgctccctgtacaaactggtgggctcgccgccttggaaagaggctttccggcagagatgcctggagagaatgagaaacagccgggacaggctcctaaacaggtaccgccaggctggaagcagtgggccagggaattctcagaacagctttctagttcaagaggtgatggaagaagagtggaatgctttgcagtcagtggagaattgtccagaagacttggctcagttggaggagctgatagacatggctgtgctggaggaaattcaacaggagctgatcaagcaaggtaacccctagtagtagtccttccttacttgtatttagctactggaatactgtgacctttcctccaatcaggattagtttataagtcccctttgtctacctccatcagtcagtgtccaaaagactcnctttgtactctgacatctttgctgtctagcttctcaataaatagggtcctccaa

SEQ ID NO: 26737 - DNA, 555 bp, Homo sapiens
  misc_feature (1)...(555): n = A,T,C or G
cgcaatcgatncactgttcagngaggatcgattcacagttctggggatgcccttccctggacacccatctgcccctcacccgtcatccagggacccagaccctgcaccttccatgtgggcccacagatccttggcaggtacctgaggtgcaccattgagtgtcggatttggggttagcatccagaaagaagaatgcgcatgacgctctgtgaaggctggaactcatgtcttcagggagagaaaggaagactggattgcaccttgatgcctcctgaggaggcggcccccctcttgaggtgggcgtgggcccggcccagccttatccaagtcgctctgtccacctgccccttactggcccccaccccactcctgtgcctcccaggagccctccctgtgctccacctgccttcgcagaaagaagcctctttctctgtttccctgggtgaggnggctggcaggtggctaaccccatttatcatctccaggccctgccatggngactcatcttgctggtatctctagctctttccctcctcccattactttagtagtgag

SEQ ID NO: 26738 - DNA, 443 bp, Homo sapiens
  misc_feature (1)...(443): n = A,T,C or G
actggaggaactactaagacccttgganagncnggnggaattcgaggagntgtgcagggtatggggaaaggaaggctggcttggctttatggcaggtttgcgggctttcgcccccttttccaaagaccaacaaaaagtccttccccaactcccaactcaaccccttttggaactatgtgtggtggttgggaccctgtggcgcatccttgtcgctcgtgtccttctcatgcccggcgacgcgtctttgtggtaacgccctgctgccatctcttttcttctctatgcgaggatttggactggcagtgagaataagagacaacgattcacgtctactttctaggatgacttccatgtgctccatctcgcgcgtccctgagcatgttgaatttccaaatcctaaataagccgcgcggngtagtttgtattatgttgcgtttctcttg

SEQ ID NO: 26739 - DNA, 487 bp, Homo sapiens
gaaacgtactcgaatcatagtccgtgtggtggaattcgcgggagaacttccccctgtgcggtcgcgacgtggcgcgctggttcccgggccacatggccaaggggctgaagaagatgcacagcattctgaagctggtggactgtatcatcgaggtacacgatgcccggataccactttcaggccgcaaccctctgtttcaggaaacccttgggcttaagcctcacttgctggtcctcaacaagatggacttggcggatcttacagagcagcagaaaattatgctacacttagaaggagaaggcctaaaaaatgtcattcttaccaactgtgtataggatgaaaatgtcaagcacatcatcccgatggtcactgaactgattgggagaagccaccgctaccaccgacaagagaacctggagtactgcatcatggtcatttgggtccccgacgtgggcaaagtctccctcatcaactcactccgaggcag

SEQ ID NO: 26740 - DNA, 498 bp, Homo sapiens
  misc_feature (1)...(498): n = A,T,C or G
tgggaaananaatttgaaacctgagntacactatcccagngtcgnggaattcccggccccggtttgcggagattgtcaacaccctagataagatgatccggaacttggcttgtctcaagactgtggcaaccatcaccgccgtgccttcccagcccctgctcgaccgctccatcccagacttcacggcctttaccaccgtggatgactggctcagcgccatcaaaatggtccagtacagggacagcttcctcactgctggcttcacctccctccagctggtcacccagatgacatcagaagacctcctgagaataggcatcaccttggcaggccatcagaagaagatcctgaacagcattcattctatgagggtccagataagtcagtcaccaacggcaatggcatgagaactcttgtttcttggggaaggagaggagggaaaaggaccagggtcaagggggaccaaaggttgaccactgtggaatgtactggagagac

SEQ ID NO: 26741 - DNA, 445 bp, Homo sapiens
gcggccctcaaggctctggtgtccggctgtgggcggcttctccgtgggctactagcgggcccggcagcgaccagctggtctcggcttccagctcgcgggttcagggaagtggtggagacccaagaagggaagacaactataattgaaggccgtatcacagcgactcccaaggagagtccaaatcctcctaacccctctggccagtgccccatctgccgttggaacctgaagcacaagtataactatgacgatgttctgctgcttagccagttcatccggcctcatggaggcatgctgccccgaaagatcacaggcctatgccaggaagaacaccgcaagatcgaggagtgtgtgaagatggcccaccgagcaggtctattaccaaatcacaggcctcggcttcctgaaggagttgttccgaagagcaaaccccaactcaacccgt

SEQ ID NO: 26742 - DNA, 481 bp, Homo sapiens
  misc_feature (1)...(481): n = A,T,C or G
agaagcgcttgattcgttccatgtgcgtagggttaatacagacgatcccacattcttgtaaaaggaaaacactggatacgaacgccgggtgacgcgtgttcaccactcaccttacccgtagaccctggtgaccgccgggcgctgacaccaaacttgggttttagactgaacttcggtgttttcttgagacttttgtacagtatttatcacctacggaggaagcggaaagcgttttctttgctcgaggggacaaaaaagtcaaaacgaggcgagaggcgaagcccacttttgtataccggccggcgcgctcactttcctccgcgttgcttccggacggcgccgaccgccggagcccaagtgacgcggagctcgtcgcatttgttataaatgtagtaaggcaggtccaagcacttacaagttttttgtagttggtaccgctcttttgggttggtttggtaatttatacaaagagattaccacn

SEQ ID NO: 26743 - DNA, 437 bp, Homo sapiens
  misc_feature (1)...(437): n = A,T,C or G
tctgagaccctgagaccctcggaaaancnaggncagcaaccacagaaggccccccagaccacgcatggcagaccaggctgcattggcagccttgaggtgccccccgccgagtcccagggccctgcaggggcctcgacaggagccgggcctatctctaaagcagagggaatggctgggcatgaacttcgacattccaaaaccccaagccaggaaaaagggcagggcctggtcctagggatgcttactggcagcaagagcagtgcccagtcagggtgggaggtagcaccaggctctgtgaccctcacccaagtgggggggtggtcagtggaagctggggaggcttcactcagctcaaccctgcagaccccccatatgagaacccccctcctcccaccagctgggggagatgacatcactgctctctccatggggagggg

SEQ ID NO: 26744 - DNA, 482 bp, Homo sapiens
agaacggactccgatcatatccgtgtggtggaattcttgagagaatgggatatgattttatttgaagtcccaagcctggggtatgatgaatgtgggctttcgagtgagagttgggttcagtcctagttctactacctactagggatgtgatcttaggtaggtcacttctctctctggggaactgattgattacatcatcaatgcaacggggatggtaatgcctccctcatggggtttttgggaagatacaaatagataatataagtgcctggcatgatgtctggcatgtagtaaatgctcgatacatgtggatttctttcccttgttgaggggtggggaccacacgggagtaggaagcagttggggaggggtcagcagcctgtccctgcccctgccctcagctgagctcgggctcacgtgagagccctctgcccaatggggctgcgtctccaggtacagggcccttgcagtcccatgctggc

SEQ ID NO: 26745 - DNA, 446 bp, Homo sapiens
  misc_feature (1)...(446): n = A,T,C or G
gggattcgatgcccctggnnnnnattgacgactcttagtccgtgtggtggaattcggcgtcccctttccggccggtccccatggaggcgctggggaagctgaagcagttcgatgcctaccccaagactttggaggacttccgggtcaagacctgcgggggcgccaccgtgaccattgtcagtggccttctcatgctgctactgttcctgtccgagctgcagtattacctcaccacggaggtgcatcctgagctctacgtggacaagtcgcggggagataaactgaagatcaacatcgatgtactttttccgcacatgccttgtgcctatctgagtattgatgccatggatgtggccggagaacagcagctggatgtggaacacaacctgttcaagcaacgactagataaagatggcatccccgtgagctcagaggctgagcggcat

SEQ ID NO: 26746 - DNA, 438 bp, Homo sapiens
  misc_feature (1)...(438): n = A,T,C or G
natcgatgacttctgnacancttgaggaccctccagcccgccccgccaggccatccgcgtcaagagggtgtccactttctccggtcggtccccgccagcaccttccccatacaaagccccccggctggatgaagatggagaggcctcagaggatacccctcaggttccagggcttggcagtggcgggcccctccaggaacggtcccctttgctgccactttcggaagatggtcctccccaggtccccgatggtcccccagacctgctgcttgagtcccagtggcaccactattcaggtgaggcttcgagctctgaggaagagcctccatccccagatgataaagagaaccaggccccaaaacggactggcccacatctgcgcttcgagatcagcagtgaggatgggttcaacgttgaggcacagagcttggagggggg

SEQ ID NO: 26747 - DNA, 491 bp, Homo sapiens
  misc_feature (1)...(491): n = A,T,C or G
cgcgccnnnnnaatgagaactgagaccntagcgggaattccagcggtggcagcaggactccggcactatgagcggcttcagcaccgaggagcgcgccgcgcccttctccctggagtaccgagtcttcctcaaaaatgagaaaggacaatatatatctccatttcatgatattccaatttatgcagataaggatgtgtttcacatggtagttgaagtaccacgctggtctaatgcaaaaatggagattgctacaaaggaccctttaaaccctattaaacaagatgtgaaaaaaggaaaacttcgctatgttgcgaatttgttcccgtataaaggatatatctggaactatggtgccatccctcagacttgggaagacccagggcacaatgataaacatactggctgttgtggtgacaatgacccaattgatgtgtgtgaaattggaagcaaggtatgtgcaagaggtgaaataattggcgtgaaagttctan

SEQ ID NO: 26748 - DNA, 478 bp, Homo sapiens
  misc_feature (1)...(478): n = A,T,C or G
aggatgatccnnnnaggccgccccctgatnaccntaggactgatcgccgtaggacangcggngccgggttgcatgcgctcaagagcgctagggtttgaggcctgctttctgctcgcgccagcatagcactacctgaggcagcgaggcgcagcgagcctatcctccccgcgccctgggcagtgtggccatggagaatcaggtgttgacgccgcatgtctactgggctcagcgacaccgcgagctatatctgcgcgtggagctgagtgacgtacagaaccctgccatcagcatcactgaaaacgtgctgcatttcaaagctcaaggacatggtgccaaaggagacaatgtctatgaatttcacctggagttcttagaccttgtgaaaccagagcctgtttacaaactgacccagaggcaggtaaacattacagtacagaagaaagtgagtcagtggtgggagagactcacaaagcaggaa

SEQ ID NO: 26749 - DNA, 442 bp, Homo sapiens
  misc_feature (1)...(442): n = A,T,C or G
gggtcgagcccatngnnnnntttgacgtctcctagtccatgtggtggaattcgagatgtttgctcttcctgatggatgggaactctctaaagcacagcaacttctcctatgccttgtgtgcaaataactgtcttgcagtttgcagtttgcacgtggaagtttttctcgtgttgtgaaatccacgtgtcctttcctcagggcctggcttgctggagtgcgtagagagcagtcccttgctgggcttatgtatgcaagggtagcctttgcccagattctcaccaccgttttaatgaattactgcttaacctgtaattgtataaccaatctagcattaatttttgtgtaaggtttgagagccagctatctagatctatccccaaacaatgggcgtgatcgagtaatccatttcttttccctggtgggcatatgcctgcctcttagt

SEQ ID NO: 26750 - DNA, 443 bp, Homo sapiens
  misc_feature (1)...(443): n = A,T,C or G
ngggattgatgacccttagtccagcgtggaggaactccagagataagaggtcagggtgcggaaataagggattggggcacagagataagaggttggggcgtggaaataagcgattggggtgcagagataagaggttggggtgcggaaataagcggttggggggttcttgccccctaggaaagcgggacttgccgctgagggtgaaggagaaggggttgaggggtacttgcccctgccccaggaaagcgggacttgccgctgaaggtgaagaaggggttgaggggtacttgcccctgccccaggaaagcgggacttgccgctaagggtgaaggaccaaggcaggtgtccctgcgtggtctgacacccttgaaacgtgaatgtataatcagagaggcgtccctgcaatgattaaacaccaagggaaggctgccttccgtgaccgg

SEQ ID NO: 26751 - DNA, 482 bp, Homo sapiens
gaacgtatttgattcgtagtccatgtggtggaattccgcagaggccagggcagagtggctcctcacagcctgaagctcatccttctgcacgggccagccaggccagcacagaggcaccagggcagcagtgcacacaggtccccggggaccccaccatgtggagcggatggtggctgtggccccttgtggccgtctgcactgcagacttctttcgggacgaggcagagaggatcatgagggactcccctgtcattgatgggcacaatgacctcccctggcagctgctggatatgttcaacaaccggctgcaggacgagagggccaacctgaccaccttggccggcacacacaccaacatccccaagctgagggccggctttgtgggaggccagttctggtccgtgtacacgccctgcgacacccagaacaaagacgccgtgcggaggacgctggagcagatggacgtggtccaccgcatgtgc

SEQ ID NO: 26752 - DNA, 440 bp, Homo sapiens
  misc_feature (1)...(440): n = A,T,C or G
nattgatgactatctgaccagncttgaggaaccctcgagatctccataaagcacaggctgctgaagaaccgttgcccaaggaagagattaagaaacgagagggaatcttccagcgggcttccaagtcccgcagaagtgccagtcctcccacaagcctgccatccaccggtggggaggccagcagcccaccctccctgccactgtcaagtgccctgggcatcctctccacaccttctttctccacaaagtgcctgctgcagatggacagtgaagatccactggtggacagtgcacctgtcacttgtgactctgagatgctcactccggatttttgtcccactgccccaggaagtggtcgtgagccagccctcatgccaagacttgacactgattgtagtgtatcaagaaacttgccgtcttccttcctacagcagacatgg

SEQ ID NO: 26753 - DNA, 453 bp, Homo sapiens
  misc_feature (1)...(453): n = A,T,C or G
gggcagggnncccccctgagnatcatgagaccctgcggaannccactacgaaggagctggggtagttaaaggctcccggggcttctagaaagaagccaagcagctgccttccttttccctggggagaggtaggaaggaaccaggccctcacttaggtttggaggggcagataagagcactgctgaccatctgctttcctccaagggttgctgtgtctagggtgaagtaggcaaaacgttgcccttaaaactgggccctgaagacggttccagccttgtccttcctgtgtgctccctgagagccattcctgtcccttacacattccagggcagggtgggggtgggtagccctgggggttcccctccctcttgtgcaccattaggactttgctgctgctattgcacttcaccagaggttggctctggcctcagtaccctcagtctcctctccccn

SEQ ID NO: 26754 - DNA, 553 bp, Homo sapiens
  misc_feature (1)...(553): n = A,T,C or G
naaagattncccctcgcnnnnnncnattgaganccctattgagagnggcggaattcctattactatgattaaaaaccctcctagtgaaagctgtgttcttctgtgacctggatttaaatgtatcttggcactcgagcttaatgatgactgttttttttgattgcttgaagcaatgtgaaaaacacatttcaccggctctgaaagctcttgagttgccatttgaaagaaatcttagaatactttacagttacttaaagtcagaattttaaaggaaggggaaatgctggtatataacattggtttctttaatagggaatgggtactgttcaaaaaggaatgccccacaagtgttaccatggcaaaactggaagagtctacaatgttacccagcatgctgttggcattgttgtaaacaaacaagttaagtaagtagtgttgtagttctttgtggctaaccagnattccctcatatacccccttttcactttgccagctggacttatgtctttattgtcatntcagtggggcaagaaatatccttttaaactcagcn

SEQ ID NO: 26755 - DNA, 556 bp, Homo sapiens
  misc_feature (1)...(556): n = A,T,C or G
nattgatatnccntgtccagngnggcgttagtatcgcctgtgtgctggaaccacacttgcctcangaccctgggcttgctcctggggaaagagtggggtcaggcaaaggggtggggttgcgctgcagcgagacccaggcccatcactcaccataccttcttcctccccatgcagcagccaagagtttactcaacaagaaagcagatggagtcaagccccagacgaatagcaccaaaaacagtgcagccgccaccagccccaaagggacgcttcctcctgccgccctggagcctcaaaccaccgtcatccataacccagtggacgggattaaggagtcttctgacagtgccaataccaccatagaggatgaagacgctaaagcccggaagcaggagatcattaagaccacggagcagctcatcgaggccgtcaacaacggtgactntgaggcctacgcgaaaatctgtgacccagggctgacctcgtttgagcctgaagcactggggcacctggttgaagggatggacttccacagaatctacttcgagaacctgtg

SEQ ID NO: 26756 - DNA, 547 bp, Homo sapiens
  misc_feature (1)...(547): n = A,T,C or G
ctagatcccccctnnnnnnnncnattgagatccctattcagagnggcggaattcctggagatccagcgggtggtggaaaaggctgacagctgggtggagaaggaggagccggcacctatcaactgacggcctcgcacggaactgccatcctgtgagggcagcggtggcgcccggcaaagttggagcccttgcggtaccagaaagcagcgagagcgagacctgggagccagggcaggggtggctgaccccatgctcagcctctaggggacggcaggccatcaggctgggggctgtgctatgtgggatggatgtgtgaggaaccccggttccacttaacaactaaatacaacatcttttgcacccctagaatgtcattttgccctcaaccttggtatttctcctggggcccttttagtcttgtgctgactntctcctgtcctcttccagnttagaataagacaggggagaaaaaggctttcgagtgtgggacaagtctgatgtcagtgaacgaactgagagcaagacatgagctggctgggctaacagc

SEQ ID NO: 26757 - DNA, 446 bp, Homo sapiens
  misc_feature (1)...(446): n = A,T,C or G
ggggttcgagcccatnagnnnnnnattgacgactcctagtccatgtggtggaattcaattgccacaggtccatcagcaattcagctttcagaagggaggcccacccttatgggtagatgccttttgaaatctctttattgtggttgaagtggggcttacagaggggacgctattgaatgggtgtgtgtttagtttgccatcttaacccgaggcttttgtggctattttagaaagactgtgtccattcttaggtctaggcccgataccacacacagtgtccacacacaggggctctgaccccacagggttctttgggtcctgatcaatgatctttcaagagcctcccccttgacctgcttctggccacagaaacagctgataaatgaaatttgttagtttcctacaatggagtgttgcatcggcagtgaacatagtgacaagagtgc

SEQ ID NO: 26758 - DNA, 463 bp, Homo sapiens
  misc_feature (1)...(463): n = A,T,C or G
agggcgaggcgggcccgcactgatncccactgangatctctagaccgtctggnggaattccttcggcctcccaaagtgctgggattacaggcgtgagccaccacacccagcctcatgcatacattaagtatttcttgccctcctgctggatataaagccctgtgtcagatgctgggggcatgggaatgaatacgatagacatgtcccctactcttttgttgaggatagggttttagcctttcagaaacaaaatctggcccggtgcatgaggtcgtttgtgtgttctggtgacaggtcatccctgtgggtgctccctgggcagatatgtcctactcaaattagtcagactctctttcaaagtgtgccccttaggaagccatgagaagcccagtgtgccaagaacactcttttgtgattctaaaaccatccccggngattaggactagacacaaactatgaagac

SEQ ID NO: 26759 - DNA, 451 bp, Homo sapiens
  misc_feature (1)...(451): n = A,T,C or G
gggcagggnnccccaactagnaccttganatctgggaaanccggggnncaccgattaggctgggctcgagctcctgacctcgtgatccacatgcctcgacctcccaaagtgctgagattacaggcgtgagccaccgcgcccggcctaatgggcgttttaacagttcatacagtttggtattattattcccgctctacaagtgaagaaattctgagaggtgatgtcgtcgatgcagggtcggcccgaaataggcggagttgggattcgaactcatttcacaggcagagggaggagagcagccatagccacctccactggttccgactccagctcccgggctcgcaggagtaaacgcgcatgctcagggagctcggtcgcgcatgctcagcgcaacggcggggaagactccagccgccagggggagcgcgtgccgttcttgcctctctggccn

SEQ ID NO: 26760 - DNA, 462 bp, Homo sapiens
  misc_feature (1)...(462): n = A,T,C or G
ngggcagggggccngcactgatnccaactgagaacatcagaccgnctggnggaattcgccatattctgaggtaggtcagcagaaaaacaaaggtgtgacttcccctagtcggtaattacttatgtgctgaacacccaggtctgctaaatcagaatctccaggttttagcagaaaagctcctaagataattctgctgggcagttagaaaaaaaagaaggaaatgaaaaaggaaaagtgagaagacaaggaaagttaaccctgcattgtcttctgtggctagatggtcagcaagacagatggcctccagaatgagcaatgggccatcagcagacctgccggaagtagggttcagccacatgccatttatggcatggctgccctggtgttggtcaggggcttgattctttctgccagacaacaaaccagcccgtccactggctaacttagtgagaaggagctgtg

SEQ ID NO: 26761 - DNA, 547 bp, Homo sapiens
  misc_feature (1)...(547): n = A,T,C or G
gcgatgccctgnagacgtgcaattcggcgttgggaactgatagccgcaaggggcaagacgggttcagttcgtcatggggctgtttggaaagacccaggagaagccgcccaaagaactggtcaatgagtggtcattgaagataagaaaggaaatgagagttgttgacaggcaaataagggatatccaaagagaagaagaaaaagtgaaacgatctgtgaaagatgctgccaagaagggccagaaggatgtctgcatagttctggccaaggagatgatcaggtcaaggaaggctgtgagcaagctgtatgcatccaaagcacacatgaactcagtgctcatggggatgaagaaccagctcgcggtcttgcgagtggctggttccctgcagaagagcacagaagtgatgaaggccatgcaaagtcttgtgaagattccagagattcaggccaccattgaggagttgtccaaagaaatgatgaaggctgggatcatagaggagatgttagaggacacttttgaaagcatggacgatcangaagaaatggag

SEQ ID NO: 26762 - DNA, 441 bp, Homo sapiens
  misc_feature (1)...(441): n = A,T,C or G
gggttgagaccattgnnnnnattgacgactcctagtccatgtggtggaattcggtactgtggaaacagagaacagggagtgtgcgttactattggggtgggcctgtggggactggacagactcagcagaggaggggatacctgcagatgagtaggagcgggccgggagggaacgctgccctgagcagcgtgagttaatgcccgatgttgatttagcatgacttgaacaggatctacgatgctgctgagagaaacctctctgatgcctcatatccctggcctcccggctctcctcagcatgttattcgcaccggtgatagagttaaggattgatcagaatggcaagtactatactggagtcctttgtggtttggggtggaatccagctacaggggcttccatactgcccgagcacgacatggagcttgcgtttgacgttcaa

SEQ ID NO: 26763 - DNA, 452 bp, Homo sapiens
  misc_feature (1)...(452): n = A,T,C or G
gagcagggnncccccctgagatcatgagatctggggannccncnngnantgnnnaaaatctggaagtcccgctcgtgcgccggaatttcaaggaagagccaagtcctgtttgctgtggtgttcactgcccgatatgtggacctcttcaccaactacatctcactctacaacacgtgtatgaaggtggtctacatagcctgctccttcaccacggtctggttgatttatagcaagttcaaagctacttacgatgggaaccatgacacgttcagagtggagttcctggtcgatcccacagccattctggcgttcctggtcaatcatgacttcacccctctggagatcctctggaccttctccatctacctggagtcagtggccatcttgccgcagctgttcatggtgagcaagaccggcgaggcggagaccatcaccagccactactttgttgg

SEQ ID NO: 26764 - DNA, 441 bp, Homo sapiens
  misc_feature (1)...(441): n = A,T,C or G
gggatcgcgaccatctgtccagngtggaggaactctgcccgcggccgtcgggtgtgagctgcgccgaccgctctgagggttcgtggcccaccgctccttcgcggtccctgccgccaccgtgcacgctcagcgttgtagagaagatggtgggtcggaacagcgccatcgccgccggtgtatgcggggcccttttcattgggtactgcatctacttcgaccgcaaaagacgaagtgaccccaacttcaagaacaggcttcgagaacgaagaaagaaacagaagcttgccaaggagagagctgggctttccaagttacctgaccttaaagatgctgaagctgttcagaagttcttccttgaagaaatacagcttggtgaagagttactagctcaaggtgaatatgagaagggcgtagaccatctgacaaatgcaattgctgtgt

SEQ ID NO: 26765 - DNA, 442 bp, Homo sapiens
  misc_feature (1)...(442): n = A,T,C or G
gggttgtagacattgnnannattgacgacccttagtccatgtggtggaattcgggactcgaggccctggaaggtactaggcagacctcataggaaaagctgcttccatttcagtggtaagcattgtgggagagagcaagggggcctctcagcctggggagacactccatgacagcatgatcaggatctgcccacctgtaggcaccacctgtcccaaaaggcatgcctggtccaggcctgccaggagggcccagtttgaatggagcagccagtatactgtggtgggggcacttccccactcttttctgccctttcttgccagtcacccttcccaagacctttctgatctgaccgttctctgttatttacggattgttggaggcagtcagaggtgaagggtacggctttgggaatcagaagccctggccttggggcccagctct

SEQ ID NO: 26766 - DNA, 442 bp, Homo sapiens
  misc_feature (1)...(442): n = A,T,C or G
ngggattgatgaccattagtccagcgtggaggaactcgccgggagctgcctggccacactgggtacctgtcgtgttgccgcttcctggatgacaaccaaatcatcaccagctctggggataccacctgtgccctgtgggacattgagacaggccagcagacagtgggttttgctggacacagtggggatgtgatgtccctgtccctggcccccgatggccgcacgtttgtgtcaggcgcctgtgatgcctctatcaagctgtgggacgtgcgggattccatgtgccgacagaccttcatcggccatgaatccgacatcaatgcagtggctttcttccccaacggctacgccttcaccaccggctctgacgacgccacgtgccgcctcttcgacctgcgggccgatcaggagctcctcatgtactcccatgacaacatcatct

SEQ ID NO: 26767 - DNA, 464 bp, Homo sapiens
  misc_feature (1)...(464): n = A,T,C or G
tggggagggcnncccgcactgatncccactgangatcatcggaccgncnggnggaattccctccccagaagggccacactccaggaggagtgttgagagtcatttgaggtagtcttgccacctgttttccttgatgggcctggaagttgttgacaaggggaaagatctttcttgccaataaaaagaagggatatcgttgggtgccatggctcacacctgtaatcttaacactgtgggaggccaaggcaaggggatcacttgagcccaggagtctaggaccagcctggacaacatggtgagacctcgtctctacaaaaaatgcaaaaattagccagatgtggcggcatgtccctgtggtcccagctactcaggaggctgaggtgggaggatcatttgagcctaggaggtcaaggctgcagtgagccatgattcacagcactgcactgcagcctgggtgacaaagc

SEQ ID NO: 26768 - DNA, 447 bp, Homo sapiens
  misc_feature (1)...(447): n = A,T,C or G
gggattcgatgccccntagnannnnattgangacccctagaccagtgtggtggaattaacagctccgagtacgagggcccgctcagccccccgctctgtctcaatggcaacttctcactcaagcaggactcctcgcccgaccacgagaaaagctaccactactctatgcactactcggcgctgcccggttcgcggcccacgggccacgggctagtcttcggctcgtcggctgtgcgcgggggcgtccactcggagaatctcttgtcttacgatatgcaccttcaccacgaccggggccccatgtacgaggagctcaatgcgttttttcataactgagacttcgcgccggctcccttctttttcttttgcctttgcccgcccccctgtccccagcccccagagcgcagggacacccccatcctaccccggcgccgggcgcggggagcg

SEQ ID NO: 26769 - DNA, 479 bp, Homo sapiens
  misc_feature (1)...(479): n = A,T,C or G
gaggccgggcnncnnccccctggggaccccatganagactgggggaanncnccgggccacctggccttgaagagatganccaagcgagaaacgtgcctggcttcgccattcggggggccttgagcggggagtgagagcaaagtcgcgagttctggcaggatggttggcagctgagcacactctcggctagccgaaggacanagccccgatatctgatgggggttggctatgccactgatctggtagtctgcgtggctcttggatgtgacatgttcgactgcgtcttccccacacggacagcgcgctttggctctgccctggtgcccactgggaacctgcagttgaggaagaaggtgtttgagaaggacttcggccccatagacccggagtgcacctgccccacgtgccaaaagcacagccgcgccttcctgcacgcactgctgcacagtgacaacacggccgcgctgcaccacctgacg

SEQ ID NO: 26770 - DNA, 580 bp, Homo sapiens
  misc_feature (1)...(580): n = A,T,C or G
ccgccatcgacccccctnggnatagaatctctatcgcgagnggncgaantcgagatgtttgcccaagaccatcctgaagtcaactccctggaggaggtggtgaggctggtgaagcccacagccatcataggtgttgctgccatcgcaggagccttcacggagcagattctgagggacatggcctccttccacgagcgccctatcatctttgccctgagcaaccccaccagcaaggccgagtgcacggctgagaagtgctaccgggtcaccgagggccgagggatttttgccagtggaagtccttttaagagtgtgactctggaagatggcaagaccttcattcctgggcagggaaacaatgcttacgtgttccccggngtggcactgggagtcatcgccggcgggatccggcacatcccagatgagatcttcctcctgacagcagagcanattggcccaggaagtctctgagcagcatctggtcccagggagactctacccacactcagcacatccgagacgtgctttgagaattgcatcannagtctcgatacgcgacaacacacctggcttctatacn

SEQ ID NO: 26771 - DNA, 459 bp, Homo sapiens
  misc_feature (1)...(459): n = A,T,C or G
gtccagggnnccnccactgaaaaccattangaccctcgcacancnggnggaattcgaaaggagtggatgcccgtcaccaagttgggccgcttggtcaaggacatgaagatcaagtccctggaggagatctatctcttctccctgcccattaaggaatcagagatcattgatttcttcctgggggcctctctcaaggatgaggttttgaagattatgccagtgcagaagcagacccgtgccggccagcgcaccaggttcaaggcatttgttgctatcggggactacaatggccacgtcggtctgggtgttaagtgctccaaggaggtggccaccgccatccgtggggccatcatcctggccaagctctccatcgtccccgtgcgcagaggctactgggggaacaagatcggcaagccccacactgtcccttgcaaggtgacaggccgctgcggctctgtg

SEQ ID NO: 26772 - DNA, 475 bp, Homo sapiens
  misc_feature (1)...(475): n = A,T,C or G
gaatgtaanctcgagttcgtagtccgtgtggtggaattcgcggtttcctttcgccgtttccgaaccgagggattgctactcgcctttggcttggcggtctctgtgctcgggggtccgaaaactgctggaaggcccccggtctctggaggggagcaggcggtagcgagtttagtgacgtggagcaggcgcagaacagtcggagtctcgctgtgatgcccaggctggagtgcaatggcgtgattttggctcactgcaacctctcccacccaggttcaagtgattctcctgcctcagcctcccgagcagctgggattacaggatgactgcagtcaaaaagatggaaaattacaagtgctgttgaggatgtgaaacaattggaagcttcatacactactggttggaaagtaaaatggtgcagtcactttgggaaagtttggcagttcttcaaatggttaaacgtagagctactatatgg

SEQ ID NO: 26773 - DNA, 462 bp, Homo sapiens
  misc_feature (1)...(462): n = A,T,C or G
attcgatgacatctgannatttcgatgacccttagtacagngcggaggaattcgttacctcaaaacttagtggctgaaaacaacaacatgcatttactgtctcacagtttctgtgggccaggaatttggcaaccgcttagcttagtggttctgccttatggtctcttgaagttgcatttaagatgttacctggggctacatcatcctaaggcttgactgatgctggaggatctgcttccagggtaccttctctcactcatgctgctggcaggaggcctcggtccttcaccatgtggccctctccacagggctgctggtgtgtcctcacaacatgatgggggctggctttctccagagtaagtgatccaagaaagagccaggtggatatcttttatgccctacacttggagtcatatgccaccatttctgcgctatgttattgactacgccgtaagcaggagg

SEQ ID NO: 26774 - DNA, 454 bp, Homo sapiens
  misc_feature (1)...(454): n = A,T,C or G
aagacgggnnccnccaactagnatcttgngatctgggaaanncaaagacgatgntaatattaacttttgaatataagatcttaatttatttttgaagcatatttttcctgttactttatagcaatgccatatttatggttgtttaaaaattttgattgaacagcaaacattcccagttttcccagtttctagacattgcctaacacaaatataggattatataagttagaactaaagtgaactacctcaagtgtggcataaccatgcatcctcttattgaatattgaattgcaaagaaataactatttaccatgatttaaaaacatataaccatttaatagcagtcacttctattaattgcctaatcagattataatagtttgttttctttgcaatgaaatttccccacaattttaatggctgtgaggtacatgaagtcacacagcatgacatt

SEQ ID NO: 26775 - DNA, 458 bp, Homo sapiens
  misc_feature (1)...(458): n = A,T,C or G
aggacgggnnccnccaactatantcatgagaccctcggaaanncagacgacngagccttnctgcctccagcctggcttctagctggaagccagcccagcgtttctctaccaccaccaccatgcctccacctgactttggctaggagactgatcctctctgtgtaaattctgcccggtgctgtgaaggctggacggtggaggacctgctggggtctcctgggacccgcctgttgcttctgccctcccctgtggaaaggtctatatgacgggccgcctgaggccccagaactcgtctgtgaaccaccttttccagccagagttcccaaagctggaacgctagctgcctgctcttccttaagatggcctccccccgacccgccacggccctcagttgccagggatggggccaccactgtcacactgtggaatacaagacagtgaactctgtctgcctgaan

SEQ ID NO: 26776 - DNA, 465 bp, Homo sapiens
  misc_feature (1)...(465): n = A,T,C or G
agggccnagagnnccgnnnnncccncactgataccactgatagccatgnggaanncccggattcataagagaagatacattgtaacatccacagcacacaggcactaggatgggagccttttccagcactcagatcaaggttcaaaccctaactgtgcccttcaggagctgtgtgacttgggcattccttcattttttattcaagcacacagctggcatctacatgcctgctgtgtgtcagggagatagaaatagaggggtgagcccctgtgatattaggcaggcagctttcccttccagggtctcatttttctcactggtgaaatgagggcaggggctcctcccctggggttactttgaggggtcagtaaggtgaacagttacagtctcttgcacagcccctgaacgttgtttagaagtcaatactctgttccatcccatcagcttcctcttcccttgttttga

SEQ ID NO: 26777 - DNA, 469 bp, Homo sapiens
  misc_feature (1)...(469): n = A,T,C or G
aggggcncagnagnnccggnnnnccccccctgattaccactgatagcntcgggaannccggaggaactggaaaatttaatggtacctttgtttctccataatcattcagaaacagaacactggtccactcttgttaacctacatcataggttgaagagaacattgtcaggaggccttcatccttccagatgggcaccatttgttgggtctttttccgtggtatgaagaaaatgaagcaatgattagaaattggtccctcggccgggcacaatggctcatgcctgtaatcccatcactttggcaggccgaggcgggtggatcacctgaggtcaggagtttgagaccagcctgaccaatgtggtgaaaccccatctctactaaaaatacaaaaattagctgggtgtgatggtgcacacctgtaatccagctactcgggaggctgagacaagagaattgcttgaacctggga

SEQ ID NO: 26778 - DNA, 472 bp, Homo sapiens
gacggaaactgatcgtatccgtgtggtggaattcgcgaccgtcgccggcagcgccgcgaaggcggtgctcgggccagcccttctctgccgtccctgggaggttctaggcgcccacgaggtcccctcgaggaacatcttttcagaacaaacaattcctccgtccgctaagtatggcgggcggcacacggtgaccatgatcccaggggatggcatcgggccagagctcatgctgcatgtcaagtccgtcttcaggcacgcatgtgtaccagtggactttgaagaggtgcacgtgagttccaatgctgatgaagaggacattcgcaatgccatcatggccatccgccggaaccgcgtggccctgaagggcaacatcgaaaccaaccataacctgccaccgtcgcacaaatctcgaaacaacatccttcgcaccagcctggacctctatgccaacgtcatccactgtaagagcctt

SEQ ID NO: 26779 - DNA, 476 bp, Homo sapiens
gacggaaatttgattcgattacctagtcagtgtggtggaattccagcaccccctcactctgctgctcccagcctcagcagaccctcaccctcaccatgcagccttaccacccaccctctgacacaccccgtcttacatgttggtctccctgcctgggcagacatgtcttcctggctttgctgagttaactcccacctacctctccttgtccttcagaccgcagctgggtcctgacgtccctgttgggcggcgccccctgttggaagagcctggaactcccgttgcctctgtttggaaaacctttcagaatcctaatttaactcccgttcatgactattgaatgatggcttctgcctctctggactggaagccccacacaggcagagaccgtttctggctttgccgtctatatttttgaattgaaagaatcagtaataagtgaaatcctaactgggcaggaaattactgatagcgtg

SEQ ID NO: 26780 - DNA, 480 bp, Homo sapiens
  misc_feature (1)...(480): n = A,T,C or G
gagcacgngnnnnnnaatcgagnccaatcgagaacactcggaagngncgcggaattcgtcagactttagattttaccctaagtgcaactatagctcttggaggcttggatcggggagaaatgtgatctggtttacacggtaaaggatcactctgctttccatgttgagaacaggttatcgagaattctgacagccacaaatcctaacccacaccaaactctcctccagatgcacctcaccctgctgtacttctaggtccttgcgcctgcaaaaccctctgccaggtatgcctttctgcttactttctagaacattcctattcatcttcaggacccagcccccaggcactttcctgatgggccctccccctcgcccacagtaagggttaagttcatgttctcattgccattacccaattccagccataagcagactcagcctgtttctgggtccctcccccgactggaccaggagctcctc

SEQ ID NO: 26781 - DNA, 448 bp, Homo sapiens
  misc_feature (1)...(448): n = A,T,C or G
agcggccnnnnnnnnaacggagccttgngcacggaccancnggnggaattccccgcccagagaagcacagcatgcgtgcctgcacttgcccccacgctgctaccctgctctgggtaccaaggacacaggcacagcagagcccccaccctcgaggcacctgtcatcttgtgacagggacaggctgaggggcaaatgaccagaaagggtggcaagtgccatgtcagacatatggtcttcatacaggggatgtcccaggactgctgggccagagacccctccatgtgggtcagcatcacccaagccaaaggccaaggaggtctcttggggggtgtggccgtcagaacaaagctgccaatgcgcgtacttttaaaggtgcggtcagctagtgaggctgtggctggccctggctgcatccagaccctggagtgtcctgcagccaggggcggat

SEQ ID NO: 26782 - DNA, 472 bp, Homo sapiens
ggcggaaactcgagatcgtatccatgtggtggaattcgttaaggtgcccagctcagagcttttttcagttaacgtgccctttgccaaatctctcccttctttgtaaatgacttttgaaatcctatctctactcttgggaaaggtatcaaatttcacctgccccagttgtatttaaacccatccctctctcttactcagcagttacccttttacttgttcatgtttttatttggtttattatgtagctatctggtgatgtggtatttatccagattcttttgtataatcttatccttgtctttcttaggttgtgagggagctgggagtctctcatccgcacttagtaaagcggagcctaagtggctgttcatttggtgctttaaatagtagttgtgctggttcaatctaagaagaagggggcccagctttagctcttttccttacttgggcacctcattcagttttgatgccc

SEQ ID NO: 26783 - DNA, 473 bp, Homo sapiens
  misc_feature (1)...(473): n = A,T,C or G
ggggtaaancnncgntnnnnnnaaatgatnnccttcgatgacgaccattagnccgngcggnggaattctcttcaccaagctgggtatcacgcaactccgcttcaagccagcctacaacccatacacagagcccagcatggaggtgttcagctaccaccaaggcctgaagaagtgggtggaggtcggaaactcgggggtcttccgtccagagatgctgctgcccatggggcttcccgagaacgtgtcggtcattgcctggggcctctccctggagcgtgccagttgccagctgacggtcctggaagggaagtcgggactctacttctcctctctggactcaagcattgacatcctgcagaagagagcccaggagctgatcgaaaacatcaacaagagccggcaaaaggaccatgcactcatgaccaacttcaggaacagcctgaagaccaaggtttcggatctgacagaaaatt

SEQ ID NO: 26784 - DNA, 474 bp, Homo sapiens
  misc_feature (1)...(474): n = A,T,C or G
gaggaaatttgtttcagtacatagtccgtgtggtggaattcctaaggctgacaggcactgaaacgagggcacagtgacatttctctctgtacgcagagtactttgaaactacaagaccacggtgaggaggcctgtgtgaagaggaaacaggaagtgtggtgtttctgttattctggtaggaatcaagttaaacagataatgactacttataattgagttattccagcggagagagcttaaccttaatttgactagtgaagcttcacagagtgtgccatgctcctctgattaggccatgagctatcagcgactgctgcgtggctccttctctttgcctgaggcagctcacagcagccccaaacatacagattccagcatgagcgatttgttacacggtaattaacttgtttatgataaatggatggaagaaatgtcgcggcattttcgtttatgtctaaactgacagcatttgcn

SEQ ID NO: 26785 - DNA, 472 bp, Homo sapiens
  misc_feature (1)...(472): n = A,T,C or G
agagagtaattgagtcgtatccatgtggtggaattcggctgctgccccgtgggcatggcctgggcagcggcgatgttttgttgcaggagatgccgctgaccttccaggatgtggccgtgtacttctctcaggcggaggggcggcagctgggcccccagcagcgggcgctctaccgggatgtgatgctggagaactatgggaacgtggcctctctgggattccctgtccctaagccggagttgatctcccagctggagcaggggaaggaactttgggtcctgaatcttctgggagctgaggaaccagatatcttgaaaagctgccagaaaggtgagaatggatgggatgctaatcctgggagcagcctcccaatcctgccttaagaggctccaagcgagggacagctggggcatggcgttcatattaatggcctcccccaggggcagtctcacagatacagcccctctacaan

SEQ ID NO: 26786 - DNA, 478 bp, Homo sapiens
  misc_feature (1)...(478): n = A,T,C or G
cgaggccnnnnnaatcgagttcattagtccgtgcggcggaattcccaacactttgggaggctgaagcggtcggatcacctgaggttgggagctcgagaccagcctgaccaatgtgaagaaaccccgtctctactaaaataaatacaaaattagcctggtgtggtggcgcatgcctgtaatcccggctactcaggaggcggaggcaggagaatcacttgaacccgggaggcaggttgcggtgagaccagatcacaccattgcactccagcctgggcaaaaagagctaaaaactccatctcacaaaaaaaagaaaaaaggaaaaacgttttttaattcaacccaaagtctgaatttcttgaggaaaaggccaatgccttttcatctctgtattggtccccacctgtcaacacagtgcctggctcatactaggtgctcaataaatgtctgttgaatagaattattaataatttangagttg

SEQ ID NO: 26787 - DNA, 450 bp, Homo sapiens
  misc_feature (1)...(450): n = A,T,C or G
cactgtaccntcgactgagaccattagnccgngcggnggaattccctgaggagctttattgttactgtcaacatagtagtatgttccaggccagcccagagtgggcgtggcagggaggctgaggccccgccctctgggaaggagctgtggaggagaagcagccccatgctgggcacgggccagactgggtccaagatcctgatgccacccagatgtgcctccagggctctggccaaagggcgggctggagcctggagcccctgtcagcagccagccagggtgaccatcagctccccatggtggtccaataggactttacagtccagatgcaactgacagcttcttcccaactgcaatccccgcttttccacacttgagctcgtcctggcctgttgggccaggcttctggggtcttctgggggtggcttgtgatagaaacaatgctgaagc

SEQ ID NO: 26788 - DNA, 474 bp, Homo sapiens
gaggaaattgactcgatatccatatccatgtggtggaattcgcttttaatcactgctcaaaccttactacgtaagaatttttactaaagagaaatcctacaaatgtaaagaatgtggcaaattccataaatcttgctcaaggcattgaaatcacaagataattcatactggagagaaacactacaaatgtgaagaatgtggggaaagtcttcaaccattgctgacagcttattgcacagaagaaaattcatgctgagaaaaattctgattttaaagaatgtggcaaagcatttaataactactatgaacttactcatcagaggttttgtgctagataaaagcaatgtaagtgtaatgatacacattacatttatctgtggaaagatgtcaccaaataaaagccttagagtacacaaggtgtaatgatagtgatacattacatttgtacatggaaagacttcaaaaatataagcc

SEQ ID NO: 26789 - DNA, 461 bp, Homo sapiens
  misc_feature (1)...(461): n = A,T,C or G
ctcgatttcatgacccctagtccagngtggtggaattcggtgagtgaaggagggaaaggagggcctcagacgttgtgtctgggattcatgagagaagatgactgaggaggaggtggagaccgttctggcaggacacgaggacagcaacggctgcatcaactacgaggccttcttgaaacacatcctaagcgtctgagtgctgcaggtagggccctcccaccccttcgccgcgccttacgaggcaagtctcccgcccttctctcagccaacatagaaaagcagcggagttcattctgctgtccggttgctgcacgggctccagcgcttcgcaactttggtttttttccacagatccagtggggtccggacactgggccccgcaggcgaaagcacgttccagccaccaggaggccacctattgtttcaaaataaagactgggttcctctaaaaaaaaaaaaan

SEQ ID NO: 26790 - DNA, 449 bp, Homo sapiens
  misc_feature (1)...(449): n = A,T,C or G
ctaaaggaccttcgatgagccctnagaaagngcggnggaaatcgggctggggtggggcctgtgctgagctcagctgggatgagctggagggtcaggcctggttctctgaagatcagtgtcccaatgggcagacacctccctctgccccactagtgcagaaggcccagtggactgagcacctccgactctggggtggccagatcagcggcccctttcggttccccggatcaggctgagcagacagtgagctgggcccgggagagagtaggggctggaactggacagaggagggagacgtgtacaacactgcggcagtcccttcccaagaactccttcaacactgactgtatttaggatctgccttgcattgaaccctgtgctatgcactggggtgatagcgaccctaatttcagggaatctgtaggacacaaccaaaaataaaggggctg

SEQ ID NO: 26791 - DNA, 445 bp, Homo sapiens
  misc_feature (1)...(445): n = A,T,C or G
caatcgcaccatcgatganggcntgagaaccggcagggccctgcagagaacactcatgttccttctgggacacctgcctgggaactttcccctgtcaggactcagcctgaaggaagctgctcctgaggcaggtatgaggtcagtgcctaaggcacgtgggactgatggaggacatattagagtggcagagctgtgggctctgctgttctctcctgcatcctgtagactcacttttctgagttccatgcactgccctgagggtagccatgcccttgctttgcccaactttttattgggccatccctgagtgggtggagacctgctgtcatgagctggccaagagaacctgctataaaaaaatcaaggatttgtttctttgaacttactcttgtttgatgccaaattggagaccattttcttgtctccttcccccactcatactggc

SEQ ID NO: 26792 - DNA, 473 bp, Homo sapiens
  misc_feature (1)...(473): n = A,T,C or G
gaggaaaattgagtcgtatccagtgtggtggaattcgcgaggggctcagtggggcttctcttccctccatgagcctggagaccccaggggaggatccatttgggatgagccccctccccccaatgcacaagccagcccccaagaccctgggggtggacaccactcagggaaacctggggtgggggtgggctttggtcttagcactttccttctccagatcccccctacccaccccagtcccaaatccagtcctctggcccttgcctagccctgaattgcttctctaagctggtgttcccatgcacagggccattcacgaagggctgggggagtgtgtgtggcaataaagcttgaaggcaccgtgccntaaaaaaaaaaaaaaaaaaaaaaaaaaaaaaaaaaaaaaaaaataaaatttttnnnnnnnntnnnnnttntttttaaggggccnnttttatccctttttcttttct

SEQ ID NO: 26793 - DNA, 454 bp, Homo sapiens
  misc_feature (1)...(454): n = A,T,C or G
caatgacaccctcgattgagaccatcagnacgngcggnggaattccccaatgcaaagaagttatgaacattgatgaaaggttacaggagctgctgactagaataaccagtttagataggaacattaaagacctgatggagctgaaaaacacagcatgagaacttcgtgaagcatacacaagtatcaatggctgaatcgatcaagcagaagaaaggatttcagagtttgaagaccatcttgtggaaataaggcatgcagacaagattagagaaaaaagaaaaaaggaatgcacaaaacctccaagaaatatggtactatgtataaagactgaacctacgattgataggattacctgaaagagatggggagaatggaaccaagttgggaaaaacacttcaggatattatccaggagaccttccccacctagcaagacaggccgacattcaaattca

SEQ ID NO: 26794 - DNA, 441 bp, Homo sapiens
  misc_feature (1)...(441): n = A,T,C or G
tacgaaccttcantgncncgtggaacggccanggcactccggggaagcagaaaggtgccgacttcctggtgacggaggttgaaaatggttgctccttgggcagcaagaagggtgtgaaccttcctggggctgctgtggacttgcctgctgggtcggagaaggacatccaggatctgaagtttggggtcgagcaggatgttgatatggtgtttgcgtcattcatccgcaaggcatctgatgtccatgaagttaggaaggtcctgggagagaagggaaagaacatctagattatcagcaaaatctagaatcatgagggggttcggaggtttgatgaaatcctggaggccagtgatgggatcatggtggctcgtggtgatctaggcattgagattcctgcagagaaagtcttccttgctcagaagatgatgattggacggtgct

SEQ ID NO: 26795 - DNA, 487 bp, Homo sapiens
  misc_feature (1)...(487): n = A,T,C or G
agatgtccaggggnnnnnacctgagaccttaggaagngcggnggaattccaggaacagacaaactcaaccagaactcccagctgagccacagttatcaggagaggagtccagctcagaagatgattctgacctgtttgttaacacaaaccgcagacagtatcatgagagtgaggaggagagtgaagaggaggaggcagcctgagactccaggacccaattctccacttgctcagggactggcccctggctcttctgggcttggacattcccagggtgctctgcacatcttcacccctgcatgaggacaaagcagggctcctctctgaactgatcttttgattcagagaattaaacccctggatcttgctctgtcgcccaggctggagtgcagtggccccatctcggctcactgcaacctccgcctcccgggttcaagtgattctcctgcctcagcctcccgaatagctgggattacagagcctcact

SEQ ID NO: 26796 - DNA, 482 bp, Homo sapiens
  misc_feature (1)...(482): n = A,T,C or G
cccgcgcccnnnnnnttttgaaatcgtatgacattagtcagtgtggtggaattcgcttgaagccctgaggtggaggttgcagtgagccgggatggcgccactgcactccagcctgggtgacggagtgagactttgtttcaaacaaacattctgttagtaattcccctagagattacaatgtgaaccttgacttattagagtataaataagtagtttacctcttcacaggcaatgcaagaacttaaatcacttgaattttatgtacttctctcctgacttatatgtttttgtttttattattttcttttttaaatttaattttatttttaaagacaacatctcattttgtcacccaggttggagtgcagtggtgaggtagaccaccagaggcactagcaatcccaaattcccttgatgtctctctaaaataataattggttgcagttggccccagggaacaggtgtctaccactagacacaan

SEQ ID NO: 26797 - DNA, 565 bp, Homo sapiens
  misc_feature (1)...(565): n = A,T,C or G
natcgaacttctatcagcgtggngcaattcgnggagggcaagggggaaagcaccagcctgctctggggagacagtggcagagggaagtgtttgcttttaaatacactcagcaggttcagacaggagaggatccgaggggaaatgtttagagccctcaggaggaggaagagaccgagttttaggaaaaacatcaaagctggataggttgggcagaagagctggggatagcatttagagaggctgagagtcctgggttctgggttatcaaggtgagagaaaccagaggttgccagttgtaggtgggcgtcaggactagagtgatgcttccagaagtttctgcaagtgggccgagtctaaggtagggcagggtacgccagaagttgaggggcactaggtagacaggccgagctggtggctgggtgctcccctcaccctccatgctgctaggagcccgtgagcagggacttgctctcctctccctccctcctggggcctgcctgtctgtctgtgaactcttgtcggccagcgaggccgggagcaggtggccttcatctgcaactgtgtn

SEQ ID NO: 26798 - DNA, 482 bp, Homo sapiens
  misc_feature (1)...(482): n = A,T,C or G
gggtccaggngngnnngaactgagatnatcgcaggcctggaaaggcgagccacggcctgttcctttatagataatgatgtaactgccaggacacttttgtgtttgcccattactcctagtaagaattgaatcttgagggagtaatgataacaaaaggtttcttgtgactggtaacatcaggacagacagagtttttggtgagaagaaaatactatatgcctgcttgatagcatgtagagatcatcacatgtatggaaaccttaaaaagtaaacttattttttctaactagaaggctctcataagtttctgttatgattgccatttcaataaatgacattaaaaatctaaaggatattattgtttgaatttttgggttattttttaaaacttcattgctgtttttgacagcatttgtgactgtcattgccactaaattattgagctagaagatgctgcagggaaaattgttttgaagctggcn

SEQ ID NO: 26799 - DNA, 444 bp, Homo sapiens
  misc_feature (1)...(444): n = A,T,C or G
nattgaagatcgattgccattgcggnggaattcgtcggggtttcctgcttaacagtgcttggacggaacccggcgctcgttccccaccccggccggccgcccatagccagccctccgtcacctcttcaccgcaccctcggactgccccaaggcccccgccgccgctccagcgccgcgcagccaccgccgccgccgccgcctctccttagtcgccgccatgacgaccgcgtccacctcgcaggtgcgccagaactaccaccaggactcagaggccgccatcaaccgccagatcaacctggagctctacgcctcctacgtttacctgtccatgtcttactactttgaccgcgatgatgtggctttgaagaactttgccaaatactttcttcaccaatctcatgaggagagggaacatgctgagaaactgatgaagctgcagaacca

SEQ ID NO: 26800 - DNA, 449 bp, Homo sapiens
  misc_feature (1)...(449): n = A,T,C or G
taagacaccctctantgagcccatgagaacggccgagaagctgaacctcggcactgactcggacagctcacctcagaagagcttgcgggatcctccttccagcccatcgagcctgagctcccccatccaggaatccactgctcccgagctgccttcggagacccaggagaccccaggccccgccctgtgcagccctctgaggaagtcacctctgaccctcgaagatttcaagttcctggcggtgctgggccggggtcattttgggaaggtgctcctctccgaattccggcccagtggggagctgttcgccatcaaggctctgaagaaaggggacattgtggcccgagacgaggtggagagcctgatgtgtgagaagcggatattggcggcagtgaccagtgcgggacaccccttcctggtgaacctcttcggctgtttccagacaccgg

SEQ ID NO: 26801 - DNA, 489 bp, Homo sapiens
  misc_feature (1)...(489): n = A,T,C or G
agangnnncnnnnnnaattcgagnacttgtatgaccatnacgacagagcggcggaattcccgccgaggattcagcagccttccgcttgagccccctcgcttaccgacgttccgttcccccctgcccgccttctcccgccaccgccgccgccgccttccgcaggccgcttccaccgaggaaaaggaatcgtatcgtatgtccgctatccagaacctccactctttcgacccctttgctgatgcaagtaagggtgatgacctgcttgctgctggcactgaggattatatccatataagaattcaacagagacacggcaggaagacccttactactgtccaagggatcgctgatgattacgataaagagaaactagtgaaggcgcttaagaaaaagtttgcctgctatggtactgtaattgagcatccggaatatggagaagtaattcagctacagggtgaccaacgcacgaacatatgccagttcctcgan

SEQ ID NO: 26802 - DNA, 472 bp, Homo sapiens
  misc_feature (1)...(472): n = A,T,C or G
ggtgtccaggggnccnncctgagacacttgaggcgctggaangcntaaggaaatggaggattttagagaggttgaataaaactcaggcgccgtggtactttgtctaagcctggtctccaaccccagactgtccccggttgtctgaagcagacccctcaggttggtgagcagggtgctctgtggccgagggctgggtgggctggcctttgcagtcatctcaccatcttcacgagcttctctctcttcagtcacgccgatgatggagctgaagcccaacgcaggtagcgaccgtgcctgggtctggaacacccacgctgacttcgccgacgagtgccccaagccagagctgctggccatccgcttcctgaatgctgagaatgcacagaaattcaaaacaaagtttgaagaatgcaggaaagagatcgaagagagagaaaagaaagcaggatcaggcaaaaatgatcatgccgaa

SEQ ID NO: 26803 - DNA, 489 bp, Homo sapiens
  misc_feature (1)...(489): n = A,T,C or G
agaggttccggggngnnccnnaattgaaaccaattgagagcatccgaagngcgnggaantcaantgctgggaggaaggagcgatttatgtggatcggagcttgaggtttccgaatcatatttccgactaaggctgataaaataagaattgctactgagccatgttacaccgggtgttcactgtcgctgaaggagtgaaataaccctagagacagtgaaatgggacgatagggactcccgcgtagttcacatgacgtttgccaacgagatggacagaaattgagagaagttgcatgatgcttgtactgaaaggcttggcctttttgttgctgttttttacatttttgattcagtagtgaaatagattagaaatgagagtctttgttctgtaggttagcgctcttttcctcatcagcactggccaatcacctagtcgctctgatttttccctaaagctgtctgactttcgcttctagttaaaatattattn

SEQ ID NO: 26804 - DNA, 443 bp, Homo sapiens
  misc_feature (1)...(443): n = A,T,C or G
aaagaagatcgtatganattcgncagngcggtggaattcgtgaggacctggagttggcctccctgctgatcaagattgacattttccctgccaagggccccaagaaggactcgggtcaatggagacaaccgcctctagttgtaccccagcctcgttggagagcagcaggtgctgtgcgccttgtagaatgccgcgaactgggttctttggaagcagccccctgtggcggccttccgggtctcgcagcctgaagcctggattccagcagtgaatgctagacagaaaccaagccattaatgagatgttattactgttttgggcctccatgccccagctctggatgaaggcaaaaactgtactgtgtttcgcattaagcacacacatctggccctgacttctggagatggatccttccatcttgtggggccaggaccatggccgag

SEQ ID NO: 26805 - DNA, 481 bp, Homo sapiens
  misc_feature (1)...(481): n = A,T,C or G
agggnnnnnnnnaattgaaattgttgtaccttacgcagngtggcggaattcccgccgaggattcagcagcctgccccttgagccccctcgcttcccgacgttccgttcccccctgcccgccttctcccgccaccgccgccgccgccttccgcaggccgtttccaccgaggaaaaggaatcgtatcgtatgtccgctatccagaacctccactctttcgacccctttgctgatgcaagtaagggtgatgacctgcttcctgctggcactgaggattatatccatataagaattcaacagagaaacggcaggaagacccttactactgtccaagggatcgctgatgattacgataaaaagaaactagtgaaggcgtttaagaaaaagtttgcctgcaatggtactgtaattgagcatccggaatatggagaagtaattcagctacagggtgaccaacgcaagaacatatgccagctcctcgan

SEQ ID NO: 26806 - DNA, 567 bp, Homo sapiens
  misc_feature (1)...(567): n = A,T,C or G
cttcgaccatcgatcncctatccagcgnggngcaantcggntatggagccgcggtggttcatggagccaccgtggtggcctggacaggtggtggctgtggaggtggataggaaggcgtggatccaaggcggtggcatcaccaaacacccaccaaacacgggtggctgtgggccaggcctgtgccggccacctctgtcccctgtccctctgcaggcccacacaggaccatgaaggtgcttctcctcacagggctgggggccctgttcttcgcctattattgggatgacaacttcgacccaggtgagcacctggggttgagggagggagaaaccgggccagctgtcctgtcctccgcccagagtgaccaccccggctatggccagccagcctccaaggagcgcgagtgctgctgacaggggccaacgctggtgttggtgaggagctggcctatcactacgcgcgtctgggctcccaactggtgctcactgcccacactgaggctctcctgcagaaggtgagccaccccatgtctacatgaatggtgggggtgctcatgaggggtgagaa

SEQ ID NO: 26807 - DNA, 440 bp, Homo sapiens
agactgaggcctggagaagtggaatcactggcctgaggtcacatgactagcacatggcaaggtcaggattcaagctaggtagtcagtatctcagccaggctgtctcctggctccctgaacattatggtgctgaccacaaactttcctgtccacttatacaaacttctagtgagtgtgtgtgattactagcttcatgaatacctgacccctccactctgaaggaggaacaggcctgtctggatcacttctctgtccctaactgagcccatctcatttagggaaactacagagcactgttgctttttttttttaaatggagtctcgttctgtcgtccaggctggagtgcggtggcgtgatctcagttcactccagcctccacttcccaggttcaagtgattctcctgcctcagccccccaagtaactgggattacaggcatg

SEQ ID NO: 26808 - DNA, 489 bp, Homo sapiens
  misc_feature (1)...(489): n = A,T,C or G
agtgtctcaggggnnccnaattgaaaccatttcgagactctcgnacagngcggnggaanncccgaacccgaacctgaacctgcgctggacctcgcggcgctgcgtgcggtcgcctgcgactgcctgctgcaggagcacttctacctgcggcgcaggcggcgcgtgcaccgttacgaggagagcgaggtcatatctttgcccttcctggatcagctggtgtcaaccctcgtgggcctcctcagcccacacaacccggccctggccgctgccgccctcgattatagatgcccagttcatttttactgggtgcgtggtgaagaaattattcctcgtggtcatcgaagaggtcgaattgatgacttgcgataccagatagatgataaaccaaacaaccagattcgaatatccaagcaactcgcagagtttgtgccattggattattctgttcctatagaaatccccactataaaatgtaaaccagacaaactt

SEQ ID NO: 26809 - DNA, 453 bp, Homo sapiens
  misc_feature (1)...(453): n = A,T,C or G
gggagactgagacctcccgaaaactganaccctacggacagncnggnggaattctcaggctgatgtcactggcccaaagtcccaactctctaatcacacagttggtctttctggtgtggctggccaccatcccgagtcaccttgttagcataaactcaggcaatcccatcactcaggaaattccaagaattagaagcttcctcctaggaaccagaaacaagggtcagacaaatgatttattacaggacacacatatgtacaacaggtaggactgaaattaatgaagtatcctctctctcctcctgtgaataaaaatcttctgtcactggtcagttttctagctcataaaaagaagggattcttgcttgctgggatcaaatttatgggacagatggggaagaggggagaggaggctgagagcaggggcttgggaaggggagcaagaagtgaggg

SEQ ID NO: 26810 - DNA, 444 bp, Homo sapiens
  misc_feature (1)...(444): n = A,T,C or G
nggaaaactggacctccgannatgagggctatcgaagngccgccctgtcctattgctcagnggtctgcgtgcaaggcagttacttcctggaccgtgtgtgattagcaaatggcaacagcttggccttgcctctgcaggagccaccgtcacagacctggggtggacccggaagccaggaggtatagtgactcttgctgtgctccttgcctgcccataggtcctggtccagtggcgggaagctgtgtcagtgcagatgtattaccgacagcaggaggactgtgccatctgggaggcccagaaggtgctggacaggggctgtctgcggacctggtttcagcgctggtgggactgcagccggaggtcagcccagcagagactgcagctggagagggcagtgcaacaccaccaccggcagctgctgctggaggggctggcccggtggan

SEQ ID NO: 26811 - DNA, 487 bp, Homo sapiens
  misc_feature (1)...(487): n = A,T,C or G
agagttccnaggggnnnnnaactgagacccattgacgngcgtcggaanncgcactttaaaaagctgtgtcatgcgtaacttgcacatcttctgattctgacctgaaactgcatcccaggtcggcacagacgcaacccagtctcctcccacctccgagagtgcagtgtcctgaatggagaaccccagcacccagaagcatccactgaaggacgcaaacgtccgtggttgacagaaattacactggccagaatccccagtccccatgaggcttgtccagacgcagtgaaccagtcgcagctgataacacacagaccattcccgatcccagaggtgcatttcaggattcattctatttcatcagagacggggtcttcctgtgttgcccaggctggtctcgaactcctgggctgaagcaatcttcctgccttggcctcccagagggttggaattgcagatgtgaggtacttctttgatagtgcctccatgc

SEQ ID NO: 26812 - DNA, 409 bp, Homo sapiens
actagtgtacctactgcctgtgccctaaatggacagaaccttccggtctacagtctgaatatatcattctacccattataaactgagctgcctgacacacggagggtgtgctgtgtaaggggcctaggcagccacggctgaattatggttcctggagaaaggttgcacacacaggaagagtagtcacctttctgtggagccctgctgcttaccacacagcaccttctgcagagactagctctgagggtggcaggggaccccacaggccatggccactccctctctgcacctgtccgtgcctgctgtggaagcctggactgggggaggagattgctaccctgtgagcctgagggagccacgtccagctgtgacctctacctgggctttacagagagttgtttatgggtaa

SEQ ID NO: 26813 - DNA, 486 bp, Homo sapiens
  misc_feature (1)...(486): n = A,T,C or G
agatggtccaggngncncnaattgagnccnaactgagacataggaagngcgtggaattcctagtttcatcaggactcggcatggaaaaagatgtctagtatccatgagagaaggatcagtggttaccagggttacagtgattacgatgggaatgattgactatgcttgctactgaacagctggcattatatatgaaactgctatatacaggactgtataaagacagtagaagattttagtaagcctacattaaataggagcagatcttgtggtataaaaaataaccttgtagttctccagatactaagcttgtatatgattatggtgggtgatttcagatatataagcagataagcacagattattgtcctttcaagttaagagtatataatctggacagaaaatttcacaaaattcaataaaattacaactgttgtctaaataagtgaaacacaaattcacttaatagcatcaagatttgaaata

SEQ ID NO: 26814 - DNA, 487 bp, Homo sapiens
  misc_feature (1)...(487): n = A,T,C or G
agaggtcccaggnngnnnnacctcgagaccctttgaagncggtnggaancaccaccagaggtcaggagtttgagaccagcctggccaacacggtgaaacctcgtctctactaaaaatacaaaaattagccaggcatggtggtgcttgcctgtggtcccagtgactggggaggctgaggcaagagaatcacttggacccgggaggcggaggttgcagtgagctgagatcgtgccattgcactgcagcctgggcaacagagcaagactccatctcaaaaactaaaaaacgaacaaacaaacaaaacacacctgtcttaaacgatttgcgttcagatgcccaaaccgtataaatatccttccctaactttctctttttgagtcactgcgaagactttgttaaaatagtctcctttggaataaatttaataaactcagctttgtttggtcaacagctttttctgggatctccaaccaaattcttctggttg

SEQ ID NO: 26815 - DNA, 487 bp, Homo sapiens
  misc_feature (1)...(487): n = A,T,C or G
gaggtccnggncggccnngctgagnccttttgtagactctaggaagngcggnggaattcaaaccaccttggcagcacagctaagagaatagaggagttcctggcccagtttcagagcctcgatgaaaccaaagaggaagaagatgcttctgggtcacagccaaaggggcttcagaagacagacctctatcatcttcagaagtccttattggaaatgaaggagttaagaagaagtaagaagcaaaccaaatttgaagtactcagagaaaatgttgtgaacttcattgactgtctagtgagagaataccttctgcctcctgagacacagcctctccatgaggtggtgtacttcagtgctgcccatgcccttcgtgagcatttaaatgctgctccgcgaattgccctccatactgcactcaacaatccttactattatctcaagaatgaagcactgaaaagcgaagaaggctgcattccgaatatcgccc

SEQ ID NO: 26816 - DNA, 466 bp, Homo sapiens
  misc_feature (1)...(466): n = A,T,C or G
agggcaggggnnaattgaaaccatgagacatcagcccagncnggnggaattcaaagcggtcaacccagccacgatgcgagccaaaggattcttggctccaagcctggtcctggctgttagtttggaactcatgcacccagatgctaactcgccctcagaatgcagaggggatgaaacactgaccggacaattcaatctgtatatgggtgagtccagggctcagtctgcattgcgcggaaaatgaaggtgaaggtggaggtgggacctgatggtctcgtcccggatagggttgaagaagtgggagaaaaggaatcaaaatcgtggatgggataagattgtgcgcgaatgctctctgggagcggatcgtggccgacgagggcccgaagatgctgccttgtgatcgcaggtgtgagtggaagctgtgagataaactggaggggaagacgaatggcaggagggtgaagag

SEQ ID NO: 26817 - DNA, 561 bp, Homo sapiens
  misc_feature (1)...(561): n = A,T,C or G
cgcatagatnccccctcgnnnnatcgaaccacactccgagaggnggaattcgaanagccatctttgcattgttcctcatccgcctccttgctcgccgcagccgcctccgccgcgcgcctccttcgccgccgcggactccggcagctttatcgccagagtccctgaactctcgctttctttttaatcccctgcatcggatcaccggcgtgccccaccatgtcagacgcagccgtagacaccagctccgaaatcaccaccaaggacttaaaggagaagaaggaagttgtggaagaggcagaaaatggaagagacgcccctgctaacgggaatgctaatgaggaaaatggggagcaggaggctgacaatgaggtagacgaagaagaggaagaaggtggggaggaagaggaggaggaagaagaaggtgatggtgaggaagaggatgtgagatgagatgaggagctgagtcagctacgggcaagcgggcagctgaagatgatgaggatgacgatgtcgataccaagaagcagaagaccgacgaggatgactagacagcanaaaagg

SEQ ID NO: 26818 - DNA, 443 bp, Homo sapiens
  misc_feature (1)...(443): n = A,T,C or G
attgaagacactagatagcgctgnggaanncgancggggtgatccgcgtctattctcaacaatgccagtacctcgtggaggacatccagcacatcttggagcgcctccaccgtgcccagctgcagatccgaatagatatggagactgagctacccagcctgctgcttcctaaccacctggccatgatggagaccctagaagatgctccagatcccttttttgggatgatgtctgtggatcccagacttcctagtcctttcgatatccctcagattcgacacctcttagaggctgcaatcccagagagagttgaagagatccctcctgaagttcctacagagcccagggagccagagaggattccggtcactgtgctgccacctgaggccatcacgatcctggaggcagagcccatacggatgctggagattgagggtgaacgg

SEQ ID NO: 26819 - DNA, 465 bp, Homo sapiens
  misc_feature (1)...(465): n = A,T,C or G
acgccggnnnnttaatgatacgttggcatccgcccagngcggnggaattcgtttgctggaggtcccctcctgaccctgttttcctgggtatcaccagtggaggctgcaaagcagcaaagattgctgcttgttctttcctctggaagcttcgacccagcagggaacctgccagatgccagccagagctcttctgtatgaggtgtctgtcagccccaactgggaggtgtctcccagtcagtatacacaggggtcagggatccacttgaggaggcagtctggcccttagcaggctcgcatgctgtgttgggagatccgctgctgtcttcagagccatcaggcagggacgtttaagtctgctacaagcctgactgggctgctgccttttttacagagatgccctgtccagggaggagcaatctcgcagtctgaacacggcagccttgctgagctgcaatgggctccacc

SEQ ID NO: 26820 - DNA, 454 bp, Homo sapiens
  misc_feature (1)...(454): n = A,T,C or G
agcggtgcnnctaagagactacagcatcgcggggcancgagaagggcttttctttccctctgtgaggactctcaggatgtagggacttgtaaatatttactgtctgtccaccacggcctggaggagggaggttgtggttggatggaggagatgatcttgtctggaagtctagagtctttgttggttagaggactgcctgtgatcctggccactaggccaagaggccctatgaaggtggcgggaactcagcttcaacctcgatgtcttcagggtcttgtccagaatgtagatgggttccgtaagaggcctggtgctctcttactctttcatccacgtgcacttgtgcggcatctgcagtttacaggaacggctccttccctaaaatgagaagtccaaggtcatctctggcccagtgaccacagagagatctgcacctcccggacttcaggcctgc

SEQ ID NO: 26821 - DNA, 418 bp, Homo sapiens
  misc_feature (1)...(418): n = A,T,C or G
gaagtactttgaaggtggagccaatgggatttcctgatgacctgactatggggtatcaaagaaagaggcatcagggatgactgcaaggttttctggtgaatgcaactaaaagaatggagttacaactgagaaggagaaggctgtggtagaggcagagagatgaggagctcaactatgggtatggtgatttattagatatccaagtggtgatgttgagaaggcagagggatgcagagtctggaggtctggagaaaggtctagatggacatttgagagttctcagcagacaggttacatgaccaagagagcgagagcagacagagaaaaaaagaggacaaaagaagacacacagcccagaaatgtgatattggagtggactggagacttagtattactaaagtaagatttcattataatn

SEQ ID NO: 26822 - DNA, 471 bp, Homo sapiens
  misc_feature (1)...(471): n = A,T,C or G
agagcgcnnncccccaactgagccactacnatgngcttcggaacncccacctgcagcaagaacttacagtgaggattgctgaccgaatccagggctnttttctgccttacttttgttacctcttacactccagagacccaacgccgcgagaggggattcctgctgccggcctgagcctcccctgggatgcctcccagacgggggtgaagaggcctgacagagctgcctgtcttgtgtctgctgatgagggatgggggaagaagctgtgaagtgggcgggcatggctgggactaagccaccagtattccccgagttcctgtggggggggctggccccacccctaggccagggcaagggttcccagagctcccttgtccccggccctttaccctggttctgagtttacaaagtctcttcctcattcccgttgagttctttcccacctctgacattccctccctccctcccgca

SEQ ID NO: 26823 - DNA, 464 bp, Homo sapiens
  misc_feature (1)...(464): n = A,T,C or G
agcgccggggnaattgatccgatggctccgcccgngcggnggaattcgagcgccgccgcctcagagtgcatcgacccctcggaggtcttcccctaccctcttaacgacagcagctcgcccaagtcctgcgcctcgcaagactccagcgccttctctccgtcctcggattctctgctctcctcgacggagtcctccccgcagggcagccccgagcccctggtgctccatgaggagacaccgcccaccaccagcagcgactctgaggaggaacaagaagatgaggaagaaatcgatgttgtttctgtggaaaagaggcaggctcctggcaaaaggtcagagtctggatcaccttctgctggaggccacagcaaacctcctcacagcccactggtcctcaagaggtgccacgtctccacacatcagcacaactacgcagcgcctccctccactcggaaggactatcg

SEQ ID NO: 26824 - DNA, 441 bp, Homo sapiens
atgagaccttgcttggggcgatttcgaagtccctggatcatattcacagaaatggaatatttcacagagatgtaaaaccagaaaatatactaataaaggatgtcctgaaattaggggactttggctcctgccggagtgtctattccaagcagccgtacacggaatacatctccacccgctggtaccgggccccggagtgtctcctcactgatgggttctacacgtacaagatggacctgtggagcgccggctgtgtgttctacgagatcgccagtctgcagcccctctttcctggagtaaatgaactggaccaaatctcaaaaatccacgatgtcatcggcacacccgctcagaagatcctcaccaagttcaaacagtcgagagctatgaattttgattttccttttaaaaagggatcaggaatacctctactaacaaccc

SEQ ID NO: 26825 - DNA, 466 bp, Homo sapiens
  misc_feature (1)...(466): n = A,T,C or G
agcgccgcnnnttaatgatacgtgggcctccgcancgngcggnggaattcgncaggagcaagggcctttccagatagggacaacccaagagtgcacatgtgcctacgccacacaacacaggcacacacgacacgtgcacgctcataagcactgcacacacacatgcacaggtgctcatgcatatgtatgagcttcatctacacacattcacatgccgtcctgcttatgtgcatgtttccatacatgcacatgaatgcacaatcacgtgtacacacatgcatgtgatcacatacatgaacatgtgtgcaccccactcctcaggtgccatcgggctcctcctgctgtcactgtgcagcaggggacatgaggccccagagcagacaggtgcagcacaggcgttcccaggcagtgccccacacacatgcatgagcacacccgggcatgtggcgcctcctttgtggactca

SEQ ID NO: 26826 - DNA, 464 bp, Homo sapiens
  misc_feature (1)...(464): n = A,T,C or G
agcggtgnnnnttaatagtacgtgagccntgngcggnggcannccacagactcagagagaacccaccatggtgctgtctcctgccgacaagaccaatttcaatgccgcctggggtaaggtcggcgcgcacgctggcgagtatggtgcggaggccctggagaggatgttcctgtccttccccaccaccaagacctacttcccgcacttcgacctgagccacggctctgcccaggttaagggccacggcaagaaggtggccgacgcgctgaccaacgccgtggcgcacgtggacgacatgcccaacgcgctgtccgccctgagcgacctgcacgcgcacaagcttcgggtggacccggtcaacttcaagctcctaagccactgcctgctggtgaccctggccagccacctccccgccgagttcacccctgcggtgcacgcctccctggacaagttcctggcttctg

SEQ ID NO: 26827 - DNA, 559 bp, Homo sapiens
  misc_feature (1)...(559): n = A,T,C or G
cgcgcgcccccggccccnaattgaaaccccatcgaacactctccgngngggcgaatcgcagtggactaaggcatgggttagatagtgcctctaacagccaagaatagaggtttctatcagtttggtccaaagcactttggtctccctgggctgaatgggattgagggcatctttctgtcttctgctctgggctgtgaggttgccgtcactggaaagctgtggaaggaacattggcctgggagtccagaatttttaattctcatctagattctgtcatttttagttaaaacttgggtaactaatttttccacatgggacatctgtgtatatattttttaaataaatggagctaagtttggtgacctctaagagacttttcagctttgagggggttgcagtgtagcaatcactgtgctgtaggatggagataagtgatgaggacagaccctgccatctatgactatggcattctatgggaagaggcacaacatctatgacaggacaatctcacattgtggtatttgtccaaaagaaatgacagagtcgtgtataaaatgaa

SEQ ID NO: 26828 - DNA, 461 bp, Homo sapiens
  misc_feature (1)...(461): n = A,T,C or G
agagcgcnnnnttgatacgatggcatccgcacgngcggnggaattcgagatatgcaagttgctgcttctcctctttgtaccaagtacggcggcttcatttgggttaaagccatgagcccctgccaagtctgaccatccacgcctacatttaccccaagctcctcctttgtggccaagaaccatcactttcttggaccccaccctttctcttcccttccagctgcattggtaggtatcttttggagtctttgctttgggagtggctgcacttgccacagtgtgatgtgggcactaggggcctgtggtacctgctgggcttcttttctcaccaagagcttccctcttgctccccactctaaggggggttctgattcacgctcctgcctcaacaaaatgacaggagactcacagatctctcttgaaatcaaagccataaatgtccagagctgccaccttgccag

SEQ ID NO: 26829 - DNA, 592 bp, Homo sapiens
  misc_feature (1)...(592): n = A,T,C or G
cgatgcggannanaaagttcgaacaccanttcgngnnggggtttcgatncacctagtccagtgtggggaattcgatcctccaacccgccttagcctctcccggtctgacgagcggcgtgggaccctgagtggggcaccagctctcccaactcgccatgatttttcctttgaccgggtattcccaccaggaagtggacaggatgaagtgtttgaagagattgccatgcttgtccagtcagccctggatggctatccagtggatgccctgcttcatctggcccgccagaatcgggctgtggcccgcacagcccagaatgaacggtcatcacgcagccacagtgtattccagctacagatttctggggagcactccagccgaggcctgcagtgtggggcccccctcagtcttgtggacctggccgggagtgagcgacttgaccccggcttatccctcggccccggngagcgggaacgccttcgggaaacacaggccattaacagcagcctgtccacgctggggctggttatcatggccctgagcaacaaggagtcccacgtgcctttaccggacagcanactgacctacctgctg

SEQ ID NO: 26830 - DNA, 469 bp, Homo sapiens
  misc_feature (1)...(469): n = A,T,C or G
gaggaaaaanttctgagaccataggcctgacggcgtattaggagccccagggaccgtcgagggaggggcgtcatccccgccatggggctcgccgcttttgcccagagctttttccaaagacccctgagggctcctcctccttgagagcatgcacgtcgcaaatgctcaatgactgtttggaggaatgaataaatgaattgtgaacaaatggtctgaagattccagaggcacaccagaagactacatttactagccccccacccccttgcagtgtctgggaccatgtgactccttaattaggtcacttctctctcctgggaggccctctctgccctctctaagtctaactagtggcaaaggatctaagggaagaaacctggcagagttactagttccaagatgcctgggtccctgaatcaccacatggaagtctacgcgcccaccaactgaatggactaatgaagctgcg

SEQ ID NO: 26831 - DNA, 457 bp, Homo sapiens
  misc_feature (1)...(457): n = A,T,C or G
gccgcccactgagaccctggctgagcgcgtcgnagaagcagctgcagaggtcctcgctgtcgctgctgctgctgtgccccagctcagctgtcaataagaacattggcaagtatatcctgaccccgagccccatcacctacggggaggagcagctgctgcacttcctggggcagctgctggggattgcaattcgggcagacgtcccgctgcccctggacctcctgccctccttctggaagacgctggtgggcgagcccttggaccctgagcaagacctgcaggaagcggatatcctcacctacaattacgtcaagaagtttgagagcatcaatgatgagaccgagctggaggccctgtgcgctgagatcgcctcccagcacctggccacggagagccctgacagccccaacaagccctgctgcaggttcacctacctgaccatgacgggcgaggaggt

SEQ ID NO: 26832 - DNA, 574 bp, Homo sapiens
  misc_feature (1)...(574): n = A,T,C or G
gactgaaaaaanaattcgatccacagtccagngtggnggatttgatgatctatagaccctgaggggcgagctgcgcttcgacatcaggaaggcggngaccctgcacggcttcacggcctggtttagcgtccacttccagagcctgcaggaggggcagccgccgcaggtgctcagcaccgggcccttccaccccaccacacactggaagcagacgctgttcatgatggacgacccagtccctgtccatacaggagacgtggtcacgggttcagttgtgttgcagagaaacccagtgtggagaaggcacatgtctgtggctctgagctgggctgtcacttccagacaagaccccacatctcaaaaagttggagaaaaagtcttccccatctggagatgacagttgatgctttatttggaaagcagtgtgcatatcttgaggggtgatgaacacaagcaaaccaagttgcacctggcttctgcacactcctgcgaaagtcgtgaacatcactccacattgaccctcctagcctgcangtgacgtagggtcctcacagacaacacgctgggctcgagg

SEQ ID NO: 26833 - DNA, 461 bp, Homo sapiens
  misc_feature (1)...(461): n = A,T,C or G
agcgtagnnnntattgatnctaagtctcgcagnggcnnnnnnancntncaaggatttgagagtggaaagaaaatgacctgtgagttttggatttagtgtttggaatatatgctcacaaaataaattttcagcatattttagatgtttctcacaaaacactgttgaagctaaggagaccagcaactcttaacagtgttgatgcagtttttattactgtatgtcaagaaaaatatatcggaaaaggaactaaggtggtcaagagaacaatagacttgctgtctaggaacagaaagtaagttagttctggtctgaaaagaagctaggttaggtaacttaaatttattccttgccatagcagaaaagagatttaaggcacttcctggaagtggcacagctgagaatatgaatagattcacatatatttaggaaaaaataaatgaatgctccttccaaaaaacccg

SEQ ID NO: 26834 - DNA, 466 bp, Homo sapiens
  misc_feature (1)...(466): n = A,T,C or G
agaggcggggnttaatgatatgtgggcctccgcaccgngcggnggaattcgccatgcaaaagaaattggacaaaggcttcctccacctgtttctttttttcttttgaacttgnaaacgaccttaaaagcatttggagttagttaagaacagataatgtatcttttggccagagcgtcacccaggattcttttgcacggcaggtctgagcagagggcggggtgcaggcgtaatggccctcgtgccctatgaggagaccacggaatttgggttgcagaaattccacaagcctcttgcaactttttcctttgcaaaccacacgatccagatccggcaggactggagacacctgggagtcgcagcggtggtttgggatgcggccatcgttctttccacatacctggagatgggagctgtggagctcaagggccgctctgccgtggagctgggtgctggcacggggctggt

SEQ ID NO: 26835 - DNA, 461 bp, Homo sapiens
  misc_feature (1)...(461): n = A,T,C or G
gcgccccccttattgagactagagcnctngcggnggcattctncagagcaaggctggatctgggctaggtgacccctggggcctcagacctctgtttggttcccagagcccagctgaggaagccacacagcctccaggacgtggcacggttcccctccacttggctgcaagtcgcctgccatggggcgaggaggcctgcaccccagtataagggcctccccagctgagtaagaagctgcttcccctcctctcataggccaagcctattgtgtgaaaccgtctcatggtcttggtgacgtaaaccatttttgaaaccgtctcatggtcttggtgacgtagaccgtttgcttctttaactccagccgcggaatgacattagtggaaccgggctggggaactgctggaagttcaggatgccaccaccttgaacacctaggccagggatccccaccatgtcccgg

SEQ ID NO: 26836 - DNA, 563 bp, Homo sapiens
  misc_feature (1)...(563): n = A,T,C or G
caaatgagatntactncgngnggngcaanncgctccacaccacgaagccgttgccaggcagccccagcagcgccgccagcagcaggaaggctgtgcctgnggtctgcgaagtcttccagctcagcagtgtctcgttccctgggggacggtagcagaccgacatccttgtgggcctacaggacacagaaaaaaagtggggaagctgggggaccctacaaggatccttggcaggaaagcagggattgtgttcatttgagggtttcactgtcagtgagagtctcagcttccatgcaactgtccatcacggctgcaactgaaatcagagctgggacacagcgcaccagaagctaaagtcttgatgccatcaaaggacatccctgccccattcacatctctgtcacgtccactaatcggcanaaggagaaaagtgagagaagatgacctaagtgtgactgcagcaggcagctcttggaaattgaagccagagcagtgagccagccccttctccgaccaaggaggaagggaagagcaggccagtatcttatataagctccgagtttggg

SEQ ID NO: 26837 - DNA, 562 bp, Homo sapiens
  misc_feature (1)...(562): n = A,T,C or G
cattcgatttcgaaccacagtccagngaggnggaattcgcggggggttcatcttctcctttctgcttctcctttcctgacccctccgacagcttccatgttggccatgggtcaggtgaatggatggagctccaagcggggctcagcccattgacccgagcgaggcgcacacacctgcagcgtggatcaagcgcactctctccagcatcgccctgaccattccatgtgctttgtcctagcatgttcattcttgactttctccacttcattttattaaaaagttaaatgctttaggaatctgtggcgtgtggccactgaccgccccccacctcctgccgctcctccaagtttgagctgagatggttctgtgagtccttggcaggggtcaaagggcacatctccttgaacctagaaagccccctacactctcagaggacacctctcctgtggattcagcgctggggcagngaaggtgtcgggagccagcaaagcatggggcgtgctgccagctgccgggccagccggatagaggagatgccactgggccctcgtgccccagccct

SEQ ID NO: 26838 - DNA, 441 bp, Homo sapiens
  misc_feature (1)...(441): n = A,T,C or G
aggaaaaaannttttgtagtccttattccgtgcggtggaattcggcagcaagaattattgccaagttagcagcttggggaaaagaactgatggaaggctgtgacttaaattactatttcaattggataaaaactcagctgagttcacagagttcgcagtatgtgcagtgcgtggccgggtgtttgcagctgatgctccgggtcaatgagtaccgctttgcttgggtggaagcagatggggtaaattgcataatgggagtgttgagtaacaagtgtggctttcagctccagtatcaaatgattttttcaatatggctcctggcattcagtcctcaaatgtgtgaacacctgcggcgctataatatcattccagttctgtctgatatccttcaggagtctgtcaaagagaaagtaacaagaatcattcttgcagcatttcgtg

SEQ ID NO: 26839 - DNA, 447 bp, Homo sapiens
  misc_feature (1)...(447): n = A,T,C or G
ggacatannnnntttgatgacctctttgatgtcctttagnacagcgnggnggaattcctggccaggagatgatcaggtcaaggaaggctgtgagcaagttgtatgcatcttaagcacacatgaactcagtgctcatggggatgaagaaccagctcgcggtcttgcgagtggctggttccctgcagaagagcacagaagtgatgaaggccatgcaaagtcttgtgaagattccagagattcaggccaccatgagggagttgtccaaagaaatgatgaaggctgggatcatagaggagatgttagaggacacttttgaaagcatggacgatcaggaagaaatggaggaagaagcagaaatggaaattgacagaattctctttgaaattacagcaggggccttgggcaaagcacccagtaaagtgactgatgcccttccggagccagaan

SEQ ID NO: 26840 - DNA, 453 bp, Homo sapiens
  misc_feature (1)...(453): n = A,T,C or G
tgatagtttaaagannaannnntttgatgacctcattgaagtgcggtggaatacccccaacaaggcgacaggtagtcggggctggggccggaactgactgagtgggccgcaactgactgagtgggccgcggctcccgcctgaggaggctaggaaggactgaacagcatccgacttcccaggctctaaaaatcgtgcctctgagttagagctacctcaaaagcaagaccaagcatgagaaatggagtcttttggccagtattggggtgttcggaattcaagcgtatgagagagtggacggtagcgttgagaattttcatttgaagatctcgtcttaaccaccccaagtgtagtcagaggcggcgttttccctgcgagagtgccctggaacaaagcaaggatagcgtgggttagacatacctgaaatgaaagcgtcttactttatctaggtacat

SEQ ID NO: 26841 - DNA, 566 bp, Homo sapiens
  misc_feature (1)...(566): n = A,T,C or G
ccatcgacattcaatcacagtccagcgnggnggaanncgaagagaggtgggaaatgccttgaatgagacagtcctgaagggctgcctgcttttagaaaacaagaagcaatctggtttggctcacagtgaaccccagttgcagggatggtagagaaagttgagggctgaacaggatatcatagacagcagagggtctggatgggctctggggcactcgggagcaggagacagtacaaaagcagttgagatttggatttcccaccccactgtctcctgtctccaaccctccgtctgagctcccattacacacacacatgcaaacacacacacacacacgcacaagcaccactagccctgagccttctttggcaccctttctcccctttacatccatcaaaacaaactgtgcctcagaaaggaaatgatatcagccattgacatgggagcataaatataagaccctaggtggcctctctcaaggatgttttatttaagtctttattaacaaagcaatgaaaatattgtgcacagtcagactgggcaggtcccacgtagggctggggtgt

SEQ ID NO: 26842 - DNA, 437 bp, Homo sapiens
  misc_feature (1)...(437): n = A,T,C or G
attgaagaccctnctgacagacgctctagacagncnggnggaattcggctaatacctttcccaaaggaaggtagctacatccctatgacctgtgttactggatatatcaaaagggagtttgcaaatgtggtctagataaggatctttagatagacatcctgaattatatggtcaaagcgatagaatcacaaggttcaatatcagaagggtgcaggtggatgcgaagggacagagacagtggtgatgtgttgaaaatagagggataaagagatttttttctcacctttaaagatggaggaagtggaccatgagtcaaaggatgtaagtggcctctggaacctacaaagggtaaggaaacaaattctcccctggagattaatgaagaatcacagaactatggacccatattagatatgtgacttacagaattataaaag

SEQ ID NO: 26843 - DNA, 562 bp, Homo sapiens
  misc_feature (1)...(562): n = A,T,C or G
cattgaaattgatncacagtccagcgnngggcaannccaggggggccagcggcagagccagcagacacagcatttctccttgagcgggtctccatctctgtttccttctctgacaaacccctaatcaaggatctgagcctaaagatctccgagggacagagcctgctcatcacaggcaacacgggcactggcaagacctccttgctccgggttctgggtggcctctggacgagtacacggggctcagtgcagatgctgacggactttgggccccatggggtgctattcctgccacaaaagccattcttcactgacgggacccttcgggagcaggtgatatatcccctgaaggaggtctaccccgactcaggttctgccgatgatgagaggatcttgaggttcttggaattggcaggcctgtccaacttggtggcaaggacagagggcctggaccagcaggtggactggaactggtatgatgttctgtccccgggggagatgcaacggctctcctttgcccgactcttctacctgcagccgaagtacgcagtgcttgatgaan

SEQ ID NO: 26844 - DNA, 562 bp, Homo sapiens
  misc_feature (1)...(562): n = A,T,C or G
ccatcgatttcgatnacagtggngcaanncacgaaccttangacccatttcttcacatgaggaggaatcagggtgctgccccctggacacttgaagaaccttatgattcttttcttcacataaggaggaatcagggtcttgacccctggacactttaagaaccttaggacccatttcttcacacgaggaatcatggtgctgacccctggacatctggtgcccctgacagtgcccccacagtagcaacaatagcagatgacagtcagttatttagaaatgggcaggagcagccctggttttggccatctgcttgctttgcacccagcagctacttgcatgcatctgaaagcaccagagtgagggtgtgtgtgcctcccaggcagtcttcctgaggcagctgttctcaacatccatcctcctggcccctgatctgcaggaacctccccaaccgcctggcttgtctaggcctgtagctgggaaggaagagacgaagacacagggagaacacaccgggactccacacctgtaaccacattctgtttgttcgccctatgaaagatgn

SEQ ID NO: 26845 - DNA, 565 bp, Homo sapiens
  misc_feature (1)...(565): n = A,T,C or G
ccttcgacacccgatcncctgtccagcgnggngcaanncancanagatggctgtagctgcagctgttcctttcaacaatggtaccacctgccatgccgacacattttggttctgctgcacaccagccancagccggttggtgaagccatggtgtgccgccggtggcagaagaagtaccagtacctccttgggcccaatggggagctccaggatcgtggtatggtcccaaacacaggccagcctgagaagcaaggacggaacgacatgattcaggacctaagcagggagttagcaaacctgctcatgcagaccgaggggccagagctggaggaacgctactccaccctgcgcaagattgtggatatctgggctggcccctcccagccatctgagctctttcagcagccaggagactttaaggacgtgggccgcctccctttcctctggggaaagcaagaagaaggggagggattccctcctgctacagctgtgatgcattattgaagcactttagctgaagcattggaccacaaacacttctcctttgaagtgtngagagttaagg

SEQ ID NO: 26846 - DNA, 509 bp, Homo sapiens
  misc_feature (1)...(509): n = A,T,C or G
cgcccccccnngnnnnnnttttgcctcgcagtccactaggccangncgnggaattcgaagaanaaggagatggaagagagaatgtcattagaggagaccaaggaacaaattctgaagttggaggagaagcttttggctctacaggaagagaagcaccagcttttcctgcagctcaagaaagttttacatgaggaagaaaaacggaggcgaaaggaacagagtgacctgaccaccctaacatcagctgcataccagcagagcctgactgttcacacaggaactcatctcctcagcatgcaggggagccctggaggacacaatcgcccaggcaccctcatggcagctgacagagccaaacaaatgtttggaccccaagtgcttacggtgagagtaggattggatgcctagcccctagtacttccacccatgcatccttgccaccagtattcaagtcacaaacatatcaagcacttaagtttagggggaaacggngcatacagatacacaca

SEQ ID NO: 26847 - DNA, 433 bp, Homo sapiens
  misc_feature (1)...(433): n = A,T,C or G
ncttgatgacccttattgcagtgcggtggaattcgcaggagctggatccggcttccggaaggagctggtgagcaggctgctgcacctgcacttcaaggatgacaagaccaaagaagcagcagtccgcggcgtgcggcaggcccaggcagaagacgcgctccgtgtggacgtggaccagctggagaaggtgcttccgcagctgctcctggacttctagggatctcagccgtggctgaggccacccccagaggagcccctggtccacagaagcaggccttgtgtttccagcggcctctgataagaggcagggaaggacctgaaggatttggagttgattcaaacaagatctctgggagtctccagcctgtgcagaagaggcaggactgcagtgcactgcgggccttggagtgtccagtggggacactggtgtggg

SEQ ID NO: 26848 - DNA, 457 bp, Homo sapiens
  misc_feature (1)...(457): n = A,T,C or G
gatagtcanaaggaagaaaaaatttgannacctntttgacgacccctagaccatgtggtggaattcggaaaccacttggatgactgcagttggtctttcagagatggcagcagaagctgcatatcaaactggcgcagatcaggcctctataaccgccaggaatcacattcagctggtgaaactgcaggtggaagaggtgcaccagctctcccggaaagcagaaaccaagctggcagaagcacagatagaagagctccgtcagaaaacacaggaggaaggggaggagcgggctgagtcggagcaggaggcctacctgcgtgaggattgagggcctgagcacactgccctgtctccccactcagtggggaaagcaggggcagacgccaccctgcccagggttggcatgactgtctgtgcaccgagaagaggcggcaggtcctgccctggccaatcaggc

SEQ ID NO: 26849 - DNA, 452 bp, Homo sapiens
  misc_feature (1)...(452): n = A,T,C or G
tgcagctanaaganaannnnntttgangacctctttngcatgcggtggaattcgtattcacttcctaatgcacccactctggcagacctggaggacgatacacatgaagccagtgatgatcagccagagaagcctcactttgactctcgcagtgtgatatttgagctggattcatgcaatggcagtgggaaagtttgccttgtctacaaaagtgggaaaccagcattagcagaagacactgagatctggttcctggacagagcgttatactggcattttctcacagacacctttactgcctattaccgcctgctcatcacccacctgggcctgccccagtggcaatatgccttcaccagctatggcattagcccacaggccaagcaatggttcagcatgtataaacctatcacctacaacacaaacctgctcacagaagagaccgactcctt

SEQ ID NO: 26850 - DNA, 492 bp, Homo sapiens
  misc_feature (1)...(492): n = A,T,C or G
gcggctccggnnaatcgagaatcgaganccctaggcagngngcnggaattcggctgacacctgtaattcaagcactttgggaggccaaggcgggcaaatcacctgaggtcaggagttcaagaccagcctggcaaacacagtgaaaccctgtctctactaaaatacaaaattacccaggcgtggtggcacacaccagtaatcccagctactcgggaggctgaggcaggagaaccgcttgaacccggggggtggaggttgcagtgagccgagatcgcgccattgcactccagcctgggcaacaagagcgaaactccatctcaaaaatgaaaaagaaaaaagaagtataaacaagtagtttgtgtttgtatttttaccaaatatgctgacttcaggactgataatcattgatttttcagatatgattgtaaaccgaaatacaggaagagtttcacttaggtctgaattcaattcaagtcagtgaacatttattaa

SEQ ID NO: 26851 - DNA, 569 bp, Homo sapiens
  misc_feature (1)...(569): n = A,T,C or G
nattcgaattttctagtccaccgtggngcaattcgcgccctgcagtgactctggggcctcctgcaatggggctcctcatgcccaggccctcgctgaggatggtgggaggcttgaagggagtgagggtctatgggacaacaactgcatcttccagctggtggggctctactctcctctgagcctgggacttgcctgggcctgatggccttctgggcttctattccaggccaaatacctcaccaagaaaacccaggcagccagcgtggaggctgttaagatgctggatgagatcctcctgcagctgagcgtgagcgagctgggggctggaggggtgatggggattgcagtcttcaaagctgccactgggcaacagaaggcaggcaggagggcagggggagtggccggagttggtgtagggggctccttcggngccctgtgagctctccctgccctgtgccttccaggcctcagtgcccgtggacgtgatgccaagcgagtttgatcccaccaattacacgctcccccagcagcccctccaccccttgcatgttccgcttgccactgcctan

SEQ ID NO: 26852 - DNA, 458 bp, Homo sapiens
  misc_feature (1)...(458): n = A,T,C or G
tgtacgttacacnggggnnnnnnnnggttgatgacccttattgaagtgcggtggaataccgnggagnagcaccaacagccccgcgccgtcctcctccgtgtgctccaattccacctccccctacagctgcactttatcgcccgccagcccggccgggtcagacatggactattggcagcccccacctcccgacaagcaccgctatgcacctcacctccccatagccagggattgtatctagagctgccatgtctgctacccacgccaggccttagtgggttccctttcctgtccccagacgagccctcctcccttcccctgcccctcctttccacgccctggaaaccatctcacttcacagggcaggtgtagcctttctgattcctcggttgtttcttgcatttcttggctttgggtatccttcattcagacgggctctgatttactgaaggtgtgag

SEQ ID NO: 26853 - DNA, 392 bp, Homo sapiens
  misc_feature (1)...(392): n = A,T,C or G
atccgccatccccagcccgtggtcaggtagagagtgagccgtcccctgtaagatgcgggaagtgtcagctcccggcgtggcgggcaggctcaggggaggggcgcgcatggtccgccagggctgtgggccgtggcgcattttccgactgtttgtccagctctcactgccttccttggttcccggtcccccagcccatccgccatccccagcccgtggtcaggtagagagtgagccccacgccgccccagggaggaggcgccagagcgcggggcagacgcaaagtgaaataaacactattttgacggcnnannaaaaaaaaaaaaaaaaattaaaaaaaaaaaaaaaaaaaaaaaannnnngccccccttttattaaaggggcccctttaaccc

SEQ ID NO: 26854 - DNA, 484 bp, Homo sapiens
  misc_feature (1)...(484): n = A,T,C or G
aggggcgccngnncccnnnattgtggacatcngtagngncgnggaattcatcaagggtgtttggtgatgaagtgtgagggatggagcttgcacacacagttcagcatgagtgggtgtggcaggagcggtgggagctgccactttgctgattggtttgctgcggttcagccctcccttcaaactgtccaattttggcaccagagggatataagcatccagggaacccatgagtcttttggctgcagccgcagcccccacacaagggcccagggtgagtgtggctgtcctttgctttcccaggaggaagcacaagctcagaagtcaacaggtccgagcttcaaatcccggctcccgctaccgacttacagggctgggaccagggtgaggtgacagaggcatgtcgggtataacatttagggaggctctcattctcagctgctgaccttgcacttgcacaaccccaagagtgagcacctcattcagn

SEQ ID NO: 26855 - DNA, 493 bp, Homo sapiens
  misc_feature (1)...(493): n = A,T,C or G
tggggccccgcgggnnctnnnnaattgatagacnttctctagtccagngnggtggaattcggcatagagaacgacgagggcttcggggcacctgccggcagccatgcggcccccgcgcagccgggccccacgagtggggctggttctgaggacatggggaccacagtcaatggagatgtgtttcaggaggccaacggtcctgctgatggctacgcagccattgcccaggctgacaggctgacccaggagcctgagagcatccgcaagtggcgagaggagcagaggaaacggctgcaagagctggatgctgcatctaaggtcacggaacaggaatggcgggagaaggccaagaaggacctggaggagtggaaccagcgccagagtgaacaagtagagaagaacaagatcaacaaccggatcgctgacaaagcattctaccagcagccagatgctgatatcatcggctacgtggcatccgaggaggctttcgtgn

SEQ ID NO: 26856 - DNA, 477 bp, Homo sapiens
  misc_feature (1)...(477): n = A,T,C or G
ctcgacacccttnatcgagancatagtccatgtggtggaattccaccactcctgaccctggtgactctgccaggtgagccagggctgctggtggccccggtaagccagcagtccccattcctgggctatgctggcgggccagagctggcccaggggaagttgctaaaggatgtcttccggcctggggatgttttcttcaacactggggacctgctggtctgcgatgaccaaggttttctccgcttccatgatcgtactggagacaccttcaggtatctgtccataactggtttttcatcctggacatctgatctctgtgatccaaagcttctgaacctcaactctctaatctgccacctcaacctgggtcctaagctaatctctcattctcagatctcaccatttcatccctgtgacactgacctctgacctcatctccccaccaagcccataaggccctgacccctgactcccagt

SEQ ID NO: 26857 - DNA, 463 bp, Homo sapiens
  misc_feature (1)...(463): n = A,T,C or G
atcgctgaacatcctcggagcggccgnaannactgacacggcatgcggaggggtgaacccgcagcagtgcctccctgtgctgctggacgttggcaccaacaatgaggagctgctcagagaccctgtgtacatcggcctgaaacaccagcgcgtgcacgggaaggcatacgatgacttgctggatgagttcatgcaggctgtgacagacaagtttggaataaattgcctcatccaatttgaagacttcgccaatgccaatgccttccgcctgctcaacaaataccgtaacaagtactgcatgttcaatgatgacatccaaggcacagcctccgttgctgtggcagggatcttggctgctctgcgaatcaccaagaacaagctttccaatcacgtgtttgttttccaaggtgcaggcgaggcagctatgggcattgcccacctccttgtcatggccctagagaag

SEQ ID NO: 26858 - DNA, 489 bp, Homo sapiens
  misc_feature (1)...(489): n = A,T,C or G
cgcggttcnnnnnaattgagaccctttgacagccntcnggaannncgcggaantacatggctgctcgctacaaatacttcccggaagatacgacaaagggcatggcggctgtgcctaaactggtcctcttcacctcagaagagagtcactattccataaagaaagctggggctgcacttggctttggaactgacaatgtgattttgataaagtgcaatgaaagggggaaaataattccagctgattttgaggcaaaaattcttgaagccaaacagaagggatatgttcccttttatgtcaatgcaactgctggcacgactgtttatggagcttttgatccgatacaagagattgcagatatatgtgagaaatataacctttggttgcatgtcgatgtaagtgctatataactcaggccagtccatgtggggggtggaggcacctcttttttatgacttgcctcaagcttctccccacgccccagccagn

SEQ ID NO: 26859 - DNA, 458 bp, Homo sapiens
  misc_feature (1)...(458): n = A,T,C or G
ncctgatgacatttnatagagcggcggaattcggccctgaaaggaaataaaagggaagcaggtccctgtagggcacagtgggggtggtcattccggtgcaccaggaagcccgagcagtacggccctcctgcagcgaggacactcagcaggcttgaccacgcgcacgttctctctgacccatcaattccatttccagcaacctaggacagctgcatcctcagacacaaaacccctgacggcccgtgtgtaccacagagggtgacggtatgtccagcgagtccctgttacaataaccagactgacaaccagtaagatcaaagatgctggacacatagccccgggcactccatgctggctgttgacagcaccactctgcaagcccacacaagaggacccagatggcacgcgagatgacaaacacatcgggcagaggacacgctacagcgcaaacaacaatg

SEQ ID NO: 26860 - DNA, 435 bp, Homo sapiens
ccagattccgtgggtgtgtccccagatgacctggatgacactgggcagccagtccttgagcgaggccagctcaatgggaagcgggacaccctgtggctggcgctgagggagacagcgtatgacccatcattgcccgcttcccatcacagcagcttgtcctggaagggccgaggggggccaggggatggcagccctgtggtgctgcccaatagccagccagacctgccagatgtttggctgcgcaggcccagcactcacacgtcaggctatagcagctgagggggacccggggaggctggacagggcgcggaaccctgtcatggatgacaaggcacgggcagcaataggctggagcccgaaggtatttctccagatccacagggagaggtctcaccctccagctgtggatgttaaaccctgccagatgtcccagcc

SEQ ID NO: 26861 - DNA, 486 bp, Homo sapiens
  misc_feature (1)...(486): n = A,T,C or G
nggacgggaaatgaagaccctagnctgtgaggngcaattcagcagtggcacggacatctcggcccaacacccggagctgcggactcatgcccaggccaagggctggtgggatgggcagggtgcctttgactttgctcagatcttctccctgacccagcagcctgtgcgcatggaggctgccaaggcccgcttccaggcagggcgggagctgctgcggcaacggcaagggggcatcacggcagaggtgatgatgggcatcctcagagacaaggagagtggtatctgtatggactcgggaggctttcgcaccacggccagcatggtgtctgtcctgccccaggatcccacgcagccctgcgtgcactttcttaccgccacgccagacccatccaggtctgtgttcaaacctttcatcttcggggtgggggtggaccaagccccccaggtgctgtcccccacttttggagcacacgaccctgttcggac

SEQ ID NO: 26862 - DNA, 485 bp, Homo sapiens
  misc_feature (1)...(485): n = A,T,C or G
agcggtncnnnnaatcgagaccatagagagccntcnggagngncccggaantccagcagcgtggcttcacggagtgttcccaaggagcctctgcaggcccattattctccacctcaaagggctggacttgaagatctgaggggccctctggaggccgcctgccacactgctgagcctggctttgtctggctgtgggtcagagatactttgaaccttatgctcctgggcggacagaccctaatactcacgtgggcgtagctcctcacactgtccctaggggtgccttcaggccactgggcatgtatggaggtcagacctttcttctctgccactccaagcccttcctagctggtgccccttgagcctgtttacatcagtttaagggaagggggattgggtgaggtcatcctgaggactccgccaccccaaaggtacctgtaattaccaacatttagctacaaaacaggtgacctgggaatggaaga

SEQ ID NO: 26863 - DNA, 484 bp, Homo sapiens
  misc_feature (1)...(484): n = A,T,C or G
gacggtgcnnnnacttgagaacatagcagaccntcnggaangcgcgggcgctcgagggtaataactggccccttcgaggaagaaaatggagcctgtgggaaggaggcgtcctaggggtgggctttgtggcaagcccggtgctgaagcagaagggcgtgaagaaccgggagctcatccacatctctgactggctgccaacactcgtgaagctggccaggggacacaccaatggcacaaagcctctggatggcttcgacgtgtggaaaaccatcagtgaaggaagcccatcccccagaattgagctgctgcataatattgacccgaacttcgtggactcttcaccgtgtcccaggaacagcatggctccagcaaaggatgactcttctcttccagaatattcagcctttaacacatctgtccatgctgcaattagacatggaaattggaaactcctcacgggctacccaggctgtggttactggtn

SEQ ID NO: 26864 - DNA, 489 bp, Homo sapiens
  misc_feature (1)...(489): n = A,T,C or G
ggccggcaatggagaccccannnatcgtagaccatagtcagtgtggtggaattcaatcagtccagagtgagagggctctccctctgccacagcctgtcccaggcaggctccgctgtcctgctggaatgagccatcccacccttgaggctgagcctggcacgcccggcccacagagcagtgaccggctgggagtggccatgatgccagaggattcctggtgaccccagtcttcagggtcttacgggctggcggcttggcacctgtttttgaagccacagaactatttttccatgagatccaagaggactcatatcctagatatgtgaaacagagaaagatgatgaacgggttcccggaacacggaccctggagggccagcagggttgtctgtgcttgagctctgcgggcaggtgagctggggcctgcaggcaggtgcactcgcctctctgaccgtttcctctggtgaaatggagaggggaaggcctgtgt

SEQ ID NO: 26865 - DNA, 460 bp, Homo sapiens
  misc_feature (1)...(460): n = A,T,C or G
cttcgacatcgatacactaggccagngcggnggaantcgagccgggtcccatctgcccctcacctcgtcatccagggacccagaccctgcacctttcatgtgggcccacagatccttggcaggtacctgaggtgcaccattgagtgtcggatttggggttagcatccagaaagaagaatgcgcatgacgctctgtgaaggctggaactcaggtcttcagggagagaaaggaagactggattgcaccttgatgcctcctgaggaggcggcccccctcttgaggtgggcgtgggcccggcccagccttatccaagtcgctctgtccacctcccccttcctggcccccaccccactcctgtgcctcccaggagccctccctgtgctccacctgcctccgcagaaggaagcctctttctctgtttccctgggtgagggggctggcaggtggctaaccccatttn

SEQ ID NO: 26866 - DNA, 563 bp, Homo sapiens
  misc_feature (1)...(563): n = A,T,C or G
cagccccgccccaatgatcnccntcccnnnnattgattnccntcgcagagnggcggaattcctcgaggggcacctgngatccaggacgcttctagggggctctggctgcccgtgttaatgaaggacagcgcttctgcgagcaccctgggaactgggtcttgggtagcaaagccctcccagagaaaagatgggcacaactaaggctttcctgagcaggaagggggtgaagaccaatcccttcctttggtcctttggtacgcaccccctcagagctgagatggaagacatggctagttcttttcagccttgtggagcctgtcagtcgccatcatacctcgagtgaggcccagctagataatgacttgtccaagatggcacacgtggaaagttgatctgcaccagaacccggatgactgtcaccttgaagcgtcctgttctccttctgtgctgtcccaggaagtgtctggcgggcgtgggcagcacagctctacactgtacgattcactagggcatnctgcgagcctcactagccttctgggtcatgcctttgacaagcattnntg

SEQ ID NO: 26867 - DNA, 484 bp, Homo sapiens
  misc_feature (1)...(484): n = A,T,C or G
aggaggaatcganaccnannnaatcgtagtccctagtcagtgtggtggaattccacacctagtcaggtctgtttgggtctgaggtgcatggaacattctgggtaggcctccagcaaacggaagctcttcaccgtgtttccagcctgggaccaagggcagcatactggcaaagttgccaaagcaagggactccagcctcttaggagttaatgactccctctccccagctgtcctccccttggtgctcctcttcctccctcctcctgctcacagcaggcagggcctagacccgggagccatgctgctgtgctgttgccaggggagcacggaggcagatctgagctatgcagggaaaaggcccagcctgtcaaagtgtctgagatgaaccgccgccgtccctgtgcagctgggctcagacgtgtctcagctcttgttctgtgctgagatggcgaaaccagtggggtcaaggcaaactcgtattcatn

SEQ ID NO: 26868 - DNA, 478 bp, Homo sapiens
  misc_feature (1)...(478): n = A,T,C or G
aggcggaaaaannnaatcgagnaccactagncttgtagacctctgtccangcggnggaattcgtagcaagtgaccaccatattggacatttccatcactgtgactggctctgttggacaacactggctctcgccatggcagatactgatcactctggacaaggcactgatgtttctagctcttgatagtttcactagttgaggcaggcaacccaggtctccctaggtccccctgagcaagttacctgtccaagcccagagtcatcgtggaaggcacaaccctaaggcgtggacgtagggaagtgtgactcattggggtctttcactacaagggcctcccgcaggggatcaaggctctcctcattaccacttccccttttagagcctcagtttccttgtctcttgagcattaaggaagatggggggccaggcacagtggctcatgcctgtaatcctagcattttgggagtccaggatgg

SEQ ID NO: 26869 - DNA, 476 bp, Homo sapiens
  misc_feature (1)...(476): n = A,T,C or G
aggcgaaaaannnnttcgtagaccactagnctagagtggcgtaagtcgggatggcccccccacctgctcagagccagcctgggtgctggaaccacacttgcctcaggaccctgggcttgctcctggggaaagagtggggtcaggcaaaggggtggggttgcgctgcagcgagacccaggcccatcactcaccataccttcttcctccccatgcagcagccaagagtttactcaacaagaaagcagatggagtcaagccccagacgaatagcaccaaaaacagtgcagccgccaccagccccaaagggacgcttcctcctgccgccctggagcctcaaaccaccgtcatccataacccagtggacgggattaaggagtcttctgacagtgccaataccaccatagaggatgaagacgctaaagcccggaagcaggagatcattaagaccacggagcagctcatcgaggccgtcaaca

SEQ ID NO: 26870 - DNA, 476 bp, Homo sapiens
  misc_feature (1)...(476): n = A,T,C or G
taagggcnnnnnattgagaccattgtcagngcggnnggttgatgacatctgaggctgngactcaacggacgctcgtccagcagcagcgcggagctccgaagtaaaggcgcccgtgaccgagtgctttgtccttacaagcgtggtgttcttgaatgcttccaggcgccttatgaggcccccgatgtacaatctgtgcttaactaaaccccactgtcttccagggtcaggttggccatccgcaggcgtagttgctaggaaggtttgacagatgtccgcctgttgattcagacgttcccaggatttggagcaagaagagcaaggaaggccaggcgcggtggctcacgtttgtaatcccagcactttgggaggccgaggcgggcggatcacgaggtcaggagttcgagaccaccctggccagcatggtgaaaccccgtctctactaaaaatacaaaagaaaattagccgggtgtggtggg

SEQ ID NO: 26871 - DNA, 483 bp, Homo sapiens
  misc_feature (1)...(483): n = A,T,C or G
gatggcannnnnattgatgatttagacanngcgggattgtagaccttagtccatgcggtggaattcgtctggacaagggtcttagatgtggcacagtcagccagccggtctgtgtgtgcgtccctcttcagagggggccccagcttctgcacggtccgctcacgtgcccttccgcagcctgggcactgcaggcagggggagggggtgccacctaggcaaggccagcttggcagtctgaaggaacggctgggcagccacctctgaccacacgtgtgtccgtgccggcgtggttatctgggctgcctacacagttcacgctaacatcgtggctcacgctaacatcgtggctgttgatgccacgtgttgtgaggcctttgtcagctcttctcctgtattccagggcaactccaacaacattgccaccgtggacatctccgcaggcttcgtgggcttagacacctacgtggaaatcccagccgtgcc

SEQ ID NO: 26872 - DNA, 488 bp, Homo sapiens
  misc_feature (1)...(488): n = A,T,C or G
ggcggggcccnnanatcgatgacatctgnaagngcggngnattgaggacccttatgcagcgtggtggaagtcgtnaagcggcggcgggcgggtgcagcgagtttgtccccttgcccgcacactgcttggcctctgtacttaagtgcggaggccgcctgcctcgctggagcttctctgccgcaaccatccgtgctgcttgggacgggccggggcgcgaaggcggacgcatccatcgctctgccctcctgggaagtttctgctctccttccccgctcctacccttaggaaaccccctcaccacctgccccagaccaggttcctctgaaccctaaattcaatctttagggcccactttcccaaccccctgacctttttccatcggcacctaccgagacgacttcgtcgcgtgctcccatacccatttctttcactttcctgtggcgagcatctcctttctcagggaaagggaagcatggggccagcacctt

SEQ ID NO: 26873 - DNA, 478 bp, Homo sapiens
  misc_feature (1)...(478): n = A,T,C or G
tgatggtcnnnnnaatcgatgacattagtccangcggngaattgaatgccttcaggcgctggggagtggtgtgaccaaaccagcacatgcagcggcttttgggaggcgaacatctcatgacaggcaatccggactataaatacacataggtcacctgtctagtgagggccgctcaggaggagggccagggggtgtgaggcttctgtcctgcacagggctggggacagggcactatgtctgaaggggtagggatgtggatgcaggaggagtgtgtattggacccatatccagcaaggacacagggacccagtgtctcttgggcaggggcagccaggctgtatttgtagctccaagagatggactggtggctatgggtaatggtggatgaggacaaggctgggaggcaaaagagtgggctgaaggcctccaagggcaggcgagcagcgggagaattaagttgctggccaagggtggaaag

SEQ ID NO: 26874 - DNA, 489 bp, Homo sapiens
  misc_feature (1)...(489): n = A,T,C or G
tgatggccnnnnnaattgtagacattagtccangtcggggaatgatgacatctagcctagagcggcggtattcgctccagcacaatttaagaaattatctgtaaagatcgagaactaaagaaaaatatttcagttcttagaagggaaacttgagggtggctgaaaaggattgactggaattttttaaaggaaatgtgactccccctgcccactgactggggctttgatgccacatggatgtggaatgaggtgttgggattggcagagggaatctgctagcaattaataaataaataaatattggcagggcgtggtggctcacgcctgtaatcccagcactttgggaagccaaggcagcaggtcacttgaggtcgggagttcaagaccagtctggccaacatggtgaaactccatctctactaaaaatacaaaaattagctgggtgtggtggcacatgcctgtattcccagctacttgggagactgaagg

SEQ ID NO: 26875 - DNA, 498 bp, Homo sapiens
  misc_feature (1)...(498): n = A,T,C or G
tgtacaagaaagaaggcgggggnnnnnnnnnaatcgaagaccttcgagaccattcggacagagcggnggaattcatccttcctgtctcctctctctccctttgctctcctctcttctctctctatcttgttctttctgtgtctctcctcaaaccaaagtgttgcagtgaaggacacgagccattgaaatcagggtggggcctgacagccgtagtgtggcccctgccccttgttgggcaggagcagagagagaggagagccctgagaccgcagggctttggcctgggcagcttccactttctgccggacactctgaggagaggcagatggagctccaggcctcagcgttctcttttttccttgtctcccttctcccacccgggaaatgaaactgttgggctgggcgacggaagcagcagagactcggccattgcaggggcctctgggtgccttgtccgggcagtggtgaagtagccgcccctcccaccccggcacgatg

SEQ ID NO: 26876 - DNA, 490 bp, Homo sapiens
  misc_feature (1)...(490): n = A,T,C or G
agttttaggggnaggaggggannnnnnnaattgacgacctgagtaccgtgtggnggaattctttcatgtgggaccccttccagaatgcggccatggccgtgaccagcctctacaaatagagcggtgatgcccaccaacgaagttttgacttgggtgtccaggttggccaccagcgtcgcatcaaagatgtgctggagtgggtgaaaaagggccggagcaccattcgtcgcgaagacttgattagcttcctgtgtggcaaagtgccccccgctcctcctccacctcgcactcctaggacacccccgaagccacccactggggtcaccagccaggctgtggcaactgagtccagctcatcggtggacgtcgacctgcagcccttccaggaggcgatcgccctgcatggcctcagtggtgctatggccggcatcagcatgcgatcgggcgactcgcctcaagacagcggtgtcgacagcagtgggcgccgaaa

SEQ ID NO: 26877 - DNA, 478 bp, Homo sapiens
  misc_feature (1)...(478): n = A,T,C or G
tgatggtcnnnnnaatcgagacctttgtccgnngcgggatttgatcacatatccctagaggtctcttccgctccaacacagaagaggctctcaaaggaggacctttaatgaaaagtgcaataaatgaggtggagatccttcagggtttggtgagtggaaatctgggaggcacacttgggccgactgtcagcagccccattgagcaagatgtggtcggtcccgtttccctgccccggagagcagagacctttggaggatttgacagccatcagatgaatgcttcaaaaggaggcgagaaggaagagggagatgatggccaagatcttaggagaacggaatcagatagtggcctaaaaaagggtggaaatgctaacctggtatttatgcttaaaagaaacagtgagcaggttgtccagagcgttgttcatctctacgagctcctcagcgctctgcagggtgtggtgctgcaacangacaa

SEQ ID NO: 26878 - DNA, 483 bp, Homo sapiens
  misc_feature (1)...(483): n = A,T,C or G
tgatggannnnnnnttttgagacattagtccgtgcggggaatgatgccattattgacagatggaaaccattgcgagccagcatgggctacatagcaagactccatctctacaaacttgcacataataaccaggcatggtggtatgtacctgtaggcctagctaatcgagaggctcaggtgggaggatcacttgagcccaggagttcaaggttatggtgagctgtgatcacaccagtgcactccagcctgggcaatagagagacaccctgtctctatttaaaacaacaacaacaacaacaacaaaaccaacaactttcaactgtggaggaacagggacagaggccagaggcagatggtgggttgtttcatgatggggaccatcagggcttgttagcatgatttagaagattctccagtggagagggcatggtcagtgatgaggagaagggggaggctgaaagaggagaaagagcctgtgctccn

SEQ ID NO: 26879 - DNA, 448 bp, Homo sapiens
  misc_feature (1)...(448): n = A,T,C or G
nattgatgacccttagaccangcggnggaattcggtcagtggtgatgcctcttgctgctccccagaccccatctctcctgaagacctgccacggcaagtggagctgctggatgcggtaagccaagctgctcagaagtacgaggcactgtatatggggacactgccagtcaccaaggccatgggcatggatgtgctgaacgaggccattggtaccctcaccgccaggggggaccggaatgcctgggtccccaccatgctcagtgtgtctgactctctcatgactgcacatcccattcaggcagaggccagtacagaggaggagccattgtggcagtgccctgtgcgccttgtgacatttattggtgttggccgcgacccacacacctttggcctcatcgctgacctgggccgtcagagcttccagtgcgcagccttctggtgccagccn

SEQ ID NO: 26880 - DNA, 462 bp, Homo sapiens
  misc_feature (1)...(462): n = A,T,C or G
agcgctgnnnnttcagagtccgtgagcntctgcggnggcattcccaaggcggagggtgccggcgcttcgaaagcgcggcggccaacccggccccgttcccggcttcctctccctgcagcgattacaccggggacttgcgcccgccctacccaatcaacctgcgacgcagcatcgaggaggccctctgcagcgaggccctgcttgcgcctggcctcttacagggccctgccttcgaggacgctctgcctgggctcggactctaccgcaccgcctcgctggggaccgggggcagggccagtgagagatcatgggaggcctctggccccgctgcgcccccggagctcccctcccctggggcttggcccgcaggcagcagcgtctcatctggctcgttctgcggactctcgcgggacagctcgtccatgctgctgtgatccagccccgacaggcccccgcgctgcn

SEQ ID NO: 26881 - DNA, 458 bp, Homo sapiens
  misc_feature (1)...(458): n = A,T,C or G
nattgtagacctctaggacagtgcggnggaattcctgggcaacatggtgaaaccctgtctctaccaaaaatacaaaaacattgcccagatgtggtggcatgcacctgtggtcccagctatttgagaagctaaggtgaagcccagggagcaaaaagagggagttgccagattatttctacctccacgccctccctgcctgtcaaggactgagtcccaggaagatgccagctccagtgctttcccgctcttgccgtctcaggccactctggctggccgctgggtccctcaacatcccctgttggttcctttagcccagcctacaccgctggaaataggccctttatgagattctcttctaaatcctagaagagtgtaccctccatttcctgaagaatcctgacaagtatgtaaacattacttaataattgttaggtaaaaatactataaatattaaattn

SEQ ID NO: 26882 - DNA, 551 bp, Homo sapiens
  misc_feature (1)...(551): n = A,T,C or G
nttcggacaatcgantcactagtccagagnggngcaattcctccgccttccgagcaagttcgagctggagaacgaggagttctaccgcaagttcgccgtgcccatgctgcggctgtacgccaaccacaccagcctgcccgcctcggcgcgcgaggccttccgcgctggcctcaaggtgtccttcgccaacttcatccagtacctgctggacccgcacacggagaagctggcgcccttcaacgagcactggcggcaggtgtaccgcctctgccacccgtgccagatcgactacgacttcgtggggaagctggagactctggacgaggacgccgcgcagctgctgcagctactccaggtggaccggcagctccgcttccccccgagctaccggaacaggaccgccagcagctgggaggaggactggttcgccaagatccccctggcctggaggcagcagctgtataaactctacgaggccgacttttgtctcttcngctaccccaagcccgaaaaccctctcgagactganagcttttcgcgtgctttntctc

SEQ ID NO: 26883 - DNA, 472 bp, Homo sapiens
  misc_feature (1)...(472): n = A,T,C or G
aagggaaaaaaatttgatncccctnttttgagacctctgtacangcggnggaattcggaggcccagggaccgtcgagggaggggcatcatccccgccatggggccgccgcatctgcccagagcacaggccaaagacccctgaggcctcctcctccttcagagcatgcacgtcgcaaattctcaatgactgtttggaggaatgaataaatgaattgtgaacaaatggtctgaagattccagaggcacaccagaagactacatttcctagccccccacccccttgcagtgtctgggaccatgtgactccttaattaggtcacttctctctcctgggaggccctctctgccctctctaagtctaactagtggcaaaggatctaagggaagaaacctggcagagttactagttccaagaagcctgggtccctgaatcaccacatggaagtctacgcgcccaccacctgaatggact

SEQ ID NO: 26884 - DNA, 570 bp, Homo sapiens
  misc_feature (1)...(570): n = A,T,C or G
agaggggnattgaaaacccattggaacacctactccgagnggngcaattcgccatgtccaaaagttaaatctactacagggacaagtttcagagctgccactcaggtctctagaagaaactgtcagtgccagtgaagaagaaaacgtgggacaccagcaggctgggaatgtgaagcagcaggaaaaatcgcagccctcagagagtcgctggctgaagtatctagaaaaggactcccaagaactggagctggaaggaacaggagtgtgtttcagcaaacagccttcatccaaaatggaggagccaggcccccgcttcagtcaagacctgcctagaaaaaggaagtggagcgggagcaccgtccagcctccgtgcagccgtggcgtgcaggactcgggtggctctgaggtcgcctggggaccccagaagggacaggctggcctgacatggaaggtgaaacaaggcagcagcccctgcctcaggagaactctgcagaactgcagtgccgggagctgaggggtcctgggaagggagctatgagtcccatccagcangttacagccacatcctcn

SEQ ID NO: 26885 - DNA, 567 bp, Homo sapiens
  misc_feature (1)...(567): n = A,T,C or G
agagcgggaatcgatcactgttcgagngccgctanngcacgcngccgggtcgcggcctttggcccgaccgggcaagaagactgaggagccgccccgcgacttcgatccggcgctgctggagttcctggtgtgcccgctctccaagaagccgctcagatatgaagcatcaacaaacgaattgattaatgaagagttgggaatagcttatccaatcattgatgggatccctaatatgataccacaggcagctaggatgacacgtcaaagtaagaagcaagaagaagtggagcagcgctagttcataatttaaaaaaattaaaaaaacgcaacagccaacttttcttaataccatataccttttaaaacacagtggcaggtaataagtggaagagaagaatgtttctgtctcttcctacgttgactgttcttattccactggtttctttagcaggactgttctactcagcctctgtggaagaaaactcccacagggctggactagcacagccagcctttgcttttacagcctgctcttgccctataccataccaagtgtatgtattctct

SEQ ID NO: 26886 - DNA, 573 bp, Homo sapiens
  misc_feature (1)...(573): n = A,T,C or G
agacgcggggaattgatncccctttcgaacgactactccgagnggngcaantctgtcctagacctccactttcacttccggcatgcagtacagcaccgtcatcgggatggtgtccactgggaccagcatgcacaccgccacctctcacacctgcttctgacccatgtggctgacgcctggggcgtggagctgcccaagcgtggctatccccctgacccgtggattgaggactgggcagagatgaatcatccattccagggaagccataggcagaccccagacttcggggagcacctggccttgctcccacccccaccttcttctttgcctcctcccatgccttttccctacccacttcctcagccctcgccacctcccctcttcccacccctgccccaggataccccttttttcccaggccagcccttcccaccccatgaattcttcaactataatccagtggaggacttctcgatgccaccccacttangatgtggccctggagtgaactttgtgccttgcccntctgcacctncaatccctggcccntatccccatggtcagcactggngc

SEQ ID NO: 26887 - DNA, 470 bp, Homo sapiens
  misc_feature (1)...(470): n = A,T,C or G
ggagttccnnnnagccccccctgagacactgtttgtaggccgtagncgcctccagctggaggagctaaaggaaggcctcatcgcaggccttggacatgggggagacattcgggggacctgctataggcattgtgggcccagattctgagctggtttcaccagtgacagactttgcggcctgatcctaggaaggggggtacgctggcgccgaggtggcactgcagctgcacagccaggggctggaccccgcgcctgcaggccaggctggctccttgacttagcagggaaaggtcgctgctgatgctggctggggaggcccactgccaggcttagttggcatgttggggcacagaccaaatgaagccaaccgcaggggcagagggagatgcccagggcgctcacatttgaggcacacacttcattaaccctttattacaagtcacgctcttatagaagtatatgtggactta

SEQ ID NO: 26888 - DNA, 463 bp, Homo sapiens
  misc_feature (1)...(463): n = A,T,C or G
agccccgaatgaagaccctcgnnnattgatgacccctantccatgtggtggaattcggcagagcacatgagatgtcctcagctgggcttggctgcctggccagggccggtggctcagcagcctcctctagcctctgatgccttccctccacggcccaggtctcctcactcaaagtcccttcgccaacctttcaatgcccagccctgacacctgccctttgtcccccaggcctaggatcagggaccagaggatcctatcttctcagcacccagcccaccccttcctgtagcatatggggagactaaggcctggagagaggggtgatgccccgtcccaggttgcactgcaaccaagtgtcagagtcggggctccggcctcctgccaaggctcttgtccccatacaccatcccacaagggcgctgggggtggaagtgccctggaagcccctcccctctcacactgn

SEQ ID NO: 26889 - DNA, 536 bp, Homo sapiens
aggagtcctagtatacagtccagagtggtgcaattcgctttttaaggtaatgtcatgaaccacttcattcctctgccagggtcttatttaacccttcaaaaacatgggtgggccctatataatgtgacttcattctacattggatccccacaaagctagtcttggcttttcacttggaacatgcccaatgctgatacaaagtaaagattcactatagatcttattgctatccatcgtacgttataaaacttgtctaaatatttaaaggtttaaaacaagcctgcgcagtggatgtcaagagtaaagtacgtttcatagtaaaattaaaatgccattaaaattttgttcttgtggggctgggtgtggtggctcatgcctgtaatcccagcacttgaggaggctgaggcgggcagatcacctgaggtcaggagttcaggaccagcctgcccaacatggtgaaacccctgtctctgctaaaatgcaaaataggcccagcatggtggctgtgcctgtatcccagctctcggaagctgagg

SEQ ID NO: 26890 - DNA, 541 bp, Homo sapiens
  misc_feature (1)...(541): n = A,T,C or G
aggaagacctggaggcgtgcaattcgctctactcctttgccgccgccgttgtggtgccctgcctgtcctccgtggtcgctggctatggctcaccatggcagaagggcacggtcatgggtacactgcgcagcctaggtgctctggccagggccgcggggcccctggtggccgcttcagtgtactggctggccggggcccaggcctgcttcaccacgtggtccgggctctttttgctccccttcttcctcctgcagaagctgagttacccggcacagacgctcaaggctgagtagctgagccactgtgcccaggctgtgggcaccaggcagagtgggagcctatgtcatgcccctgcccactgcctgacccccaccccccgccagtccagggagaccctgtgggtgggggccggcccctaagcaggaagctcaggcagctcctccagacttacttactccttcagtgactccgagctgcagcactccaaggctggtcagggcttctgtttgtntttaaactatgcaacaaggttctgatgagn

SEQ ID NO: 26891 - DNA, 495 bp, Homo sapiens
  misc_feature (1)...(495): n = A,T,C or G
tgatgttagggggngnnnnnnttttgagacctcgataacngtcggggaannctctgccggntttggcctacagtttgaatctttgccaggctgtttcctgtggttggcattttaattaacggtagtaacagtgatttcacatctaggtttaccgctgagaaataaggcaagatgtaacttagtgtactgataaaatcactctcgtcattggtgtctagctgctcactcccaaagcctgacaagttgatgccactgctgtctgagggctcctctggctcaacaatcagctcagtgcttgtgtagttcttccgggcttgtaacaccttcatgaacgctccttctggattccctaccgatgcttcttcagctgtcaaaaaagaagagactgctttgatcatgaaagatgatgggatgggatgcatcagtccatagctgtacaccccagtcacacagagtaggagtcagcanacattcgagtgccattcagagaggaga

SEQ ID NO: 26892 - DNA, 504 bp, Homo sapiens
  misc_feature (1)...(504): n = A,T,C or G
gtctacggctcccagactgcgtccccatgagtaacagagggacacgcagaggggcatactgagtgcctataggggactcacagactgcagatgcacgctgcggatccagaagccggtcaggtaatgaggtgcagaggtgtggggaagacctggatgcctccctgggtgccaaccagcctaaccagccggggccaccaaacagaagtgcttctgacattaacgcgacacacagaaggtgtgtagggtgggtagtggaagtgaccgcacaggcctctggggattgtagctttggagctagagaggcgggcaagcagttggcttcgcccacacggtgtgcctctcacatctgcacagcgcacacaaccaagcttaagagccgactgttaagatgccccagtgacacggacaagtttctcctctggctacccatgagagctgctgaccacgagagcatcgcgggaccgcaaaggattctgaanaatgtggtcccggtggccagtgtgg

SEQ ID NO: 26893 - DNA, 535 bp, Homo sapiens
aggaacgcctgagagcctcaatccaaaggactgaatccaagtcatcctgctgccttttttcttatagacacaatgaacagaccacccacattcttagttctctaaggcatcctgcctgctgccttattgcacagtacatacatttcttagggacacagtacactgaccacatcaccaccctcttcttccagtgctgcgaggaccatctggctgccttttttctccaaaagatgcaatattcagactgactgaccccctgccttatttcaccaaagacacgatgcatagtcaccccggccttgtttctccaatggccgcgatacactagtgatcatgttcagccctgcttccacctgcatagaatcttttcttctcagacagggacagtgcggcctcacatctcctggagtctagaagctggttcctttcccctccttcctcctcttgctctagccttaatactggccttttccctccctgccccaagtgaagacagggcactctgcgcccaccacatgcacagctgtgcatggag

SEQ ID NO: 26894 - DNA, 483 bp, Homo sapiens
  misc_feature (1)...(483): n = A,T,C or G
ggagaaccggggnattgannttcgagaccatagtcagtgtggtggaattcgttagagagacagctacgaacaaaatagatgtgatcatgacccacatggagttttcattctttttgggaataattatttgtagcattgctttgaaaccagacctgttacaaatagttgacaagtagctcctgggggacattggaaatctaggtaactttactgaagaaaggttctagtgaacacccatttctatttatattacccactggtgtctgtgtgggggtactgtgtttactcacatttggcatgtaggtactatttttgagttgctttcttttcacttcacagagtttcatgtttatttacatatgttggtctggattatataattttagtggctacatagtatttcttgctgagttaagatatgtcatgtgcccggtgtgtagtaggcatttgctagatgtttgctttcagtttgcagtaaaagcc

SEQ ID NO: 26895 - DNA, 544 bp, Homo sapiens
  misc_feature (1)...(544): n = A,T,C or G
aggatgcgactgatgactagtccagagaggagcaattcggnttaccgtctccagcttcagcctttccagaaacccttgtggagggcagtgttggctgcaggtttcatcatattgcagtttgaggtcaccactatttggggaacaagcttgcgtcctgctgaggggcaggattttcagcagagcgtcggtggggctgggccgtcgtggaggtggccccaggagtcatatggccatactcagacacaccttgtgtggcctgctcagagctggatgccacctttaggcaatgtttagagtctattttctaaagttttaagtattttaagaggtattgagactaatgaatataatagttcagtaatttaaatgcttatttattttcagtggaaggatttttattaaaaagaagctaattgacatggaaatgtcagtgaaatttcttacctgcaaggaaagtgaacattntgtatttaagtaaactataatgtgcacattntaatanagaaatctgacattcgaaaaaaaaaaaaaaaaaaaaaaaaaa

SEQ ID NO: 26896 - DNA, 543 bp, Homo sapiens
  misc_feature (1)...(543): n = A,T,C or G
aggatgcacatttagagcggtcaattcganagttagccatgnttctgctgaaaccagaatgaaaggggaagttcagagaactggaggtctgaatgatgtactccgatggaagagctggaaggatggcagattgtggtcaaggaacttaaggctgcagtgagatgtcacagttgggcaaaatgcagcccagtgtgtgggaggggagagcagggtggaggtgaaaatctctaaatcaaggaacagtgaggtcaggaagttgaatggggttactatgaaaggaactaatgatgtctaagaggactaagccagctagaaaatgtcatctcttggttgtaatgttttttatacatatttctactgtacctctaagcatataacatgttatgaccatgccttgcctatcttctcactacactggaaactccaggtcacagtcacatcttaaccttaccttctncagtttaacgtagcctgacacacagggcacttctcataaatcaccagcacaccctttaccccgtggntntcttccacaagacanaa

SEQ ID NO: 26897 - DNA, 533 bp, Homo sapiens
  misc_feature (1)...(533): n = A,T,C or G
nggatgccctgagacattcagaggactacnatcaatatagtggaaattaaccacccactaaaattagactacgtgaaaacacagaaacttcatcagtattttaatgttaataaaacagaagcagctcaggacacatcagttaggttcctttctttttcctacaaaaggcatgacaaggaactgcaggggaacgtgcagacatgaagagttgtgttagtgcagtggtatcatgaatgacttgctctcttattcatataataaatattgtttactatgggctaggtctgatgctgggtgctgaggatggagcagtgaatggtaatacatttcctgctctccacccagagtttcaaatttaaggagatattttcttcctaaatagccttcatagctgtcacagcatcatctttgaataaaaaatagttgatgagactgtgcatggtggctggtggctcccaggngaatcccaacacgctgaaaggctggagagcaggattgcttgagcccgggagtttgcatcacgctgggcatgg

SEQ ID NO: 26898 - DNA, 542 bp, Homo sapiens
  misc_feature (1)...(542): n = A,T,C or G
ngggagcacatgcagagcgtgcaattcggaggatatactggtccaccacagaatgggagagcggctggagcagtgtccctgggaagcgttgtttgtttttgagatggagtctcaccctgttgcccgggctggagtgcactgatgtgatctcggctcactgcaacctccgcctctcacgttcaagcaattctcctgcctcagcctcctgagtagctgggattagctgttggggacacgagatgcgccaccacacccagctaattttgtgtttttagtagagacggggtttcaccaagctggccaggctggtctcaaaatcctgacctcaggtgatccacccacctctgcctcccaaagtgttgggattacaggcgtgagccaccgcgcccagcctcgtgagtgttgtttaaatagaagggaaggaaccaggaacaactcgaatgtccagaagactcanggaaccagcgatcccgcgtttatatccaacaggaggacgagatgagctccttgtcccatgcagacggtcccacagctagtcgaan

SEQ ID NO: 26899 - DNA, 429 bp, Homo sapiens
accactacagatgctcccagtgccttctggcacgctgctttcttaccccatcagtgaaggatgcttttcacttcagacatttaaaagtgtgccttagaattgatgaaacatggtcagtgaagtatgacttgtttcaaagattaaccttctgcgcttatgatctaagtgtcagcaggttctgtggtaatgatactgagtacaatgcattttgttgggattcctgtactctatatgtagttaacgtttctctggcagtaactttagaaaagtactacttgtgaggccaggtgcggtggctcacacctgtaatcctagcgctttgggaggccgaggtgggtggattgcctgaggtcgggagtttgagaccagcctggccaagatggggcaacccctgtctctactaaaaatgcaaaattggctgggtgtggg

SEQ ID NO: 26900 - DNA, 533 bp, Homo sapiens
  misc_feature (1)...(533): n = A,T,C or G
ggaggctgacacatcagagtgggaattccgccattgtagtcggtcttctcttgcccaaccagacactggcatccactgtcttctggcagtggctgaaccagagccacaatgcctgtgtcaactatgcaaaccgcaatgcgaccaagccttcacctgcatccaagttcatccagggatacctgggagctgtcatcagcgccgtctccattgctgtgggccttaatgtcctggttcagaaagccaacaagttcaccccagccacccgccttctcatccagaggtttgtgccgttccctgctgtagccagtgccaatatctgcaatgtggtcctgatgcggtacggggagctggaggaagggattgatgtcctggacagcgatggcaacctcgtgggctcctccaagatcgcagcccgacacgccctgctggagacggcgctgacgcgagtggtcctgcccatgcccatcctggtgctacccccgatcgtcatgtccatgctggagaaacgagctctctgangcacgccncgggtg

SEQ ID NO: 26901 - DNA, 563 bp, Homo sapiens
  misc_feature (1)...(563): n = A,T,C or G
catcgacatcgatccccatccgcgnngggcaattcgtgtgttttccttgttacaactttgggacttgtgggagaggcaaagctagagccaagccctttttcttccttccatccttcattcatttctcaaccatttctgagtactcattgtgtgccaggcctggaggaagtgatgattacacctgtaggactttgcgaagaacttttatgccccttgtcttctaatccttctatcagtcaaaaataggtgttactgttcctattttatagaggaagtaggtagtgatatctacagcttataaagaaactgaggcttggagaagagttaagacttgcccagggtcacaccaccagttggaggcggaacaggaatttgaaaccaggtcttgcagtgttcttttctctactccaggccaatgaggaactggaggtatttgaggtgaagtctggagcaatgagaatgggatcatagggcaaggtcttcaaacctctgaagagttgttgagttagagcagcagctctttctaggcagccggatttattcactctcttcacatgcttatt

SEQ ID NO: 26902 - DNA, 543 bp, Homo sapiens
  misc_feature (1)...(543): n = A,T,C or G
ngggagcacatggcaggcgtgcgaattccgtccttgaggacgccgtgccgggtcagtgttagcctccagccctggttgtggaaggcgacagaagtcatggcgatgtttgagcagatgagagccaacgtgggcaagttgctcaagggtatcgacaggtacaatcctgagaacctggccaccctggagcgctatgtagagacgcaggccaaggaaaatgcctatgatctggaagccaacctggctgtcctgaagctgtaccagttcaacccagccttctttcagaccacggtcaccgcccagatcctgctgaaggccctcaccaacttgccgcacacagacttcaccctgtgcaagtgcatgatcgaccaggcacatcaagaagaacggccaatccgacagattttgtacctcggggacctgctggagacctgccatttccaggccttctggcaagccctggatgaaaacatggacctcttggaagggataactggctntgaagactctgtccgaaagttatctgccatggtgtggtatcacttn

SEQ ID NO: 26903 - DNA, 456 bp, Homo sapiens
  misc_feature (1)...(456): n = A,T,C or G
ttaggatgaccattgggacagncnggngttgatcgcctgtgagctacactttctcctttgttctcaggccttccaggtagtcccctttctggacttaagagtgcaaactcttctctgtggttctagccttgggcagaattatatcccagagaccacagagcaactgtcaagctgcttaccccctcacccagggctacagcctgtgcccagccctataatttgtgcctctcttgtgttgggggtggggggggttattcctttccctttcctgctctggcctccttgaaagttcagagtacccagtacaagtcagctttaaagtacagcttttagggtttcctgggttgtttctctggggctttagggagggacctttgccctctggtttttcttgcctgctgggttagggagcatctcacacttgttagtatctggttgttgggccagccgcgcctn

SEQ ID NO: 26904 - DNA, 462 bp, Homo sapiens
  misc_feature (1)...(462): n = A,T,C or G
ttttgatgccttcgaaannncnnntttgtaagtcatcagaccancnggnggaattcgaagccagaaggaatgaaggcctgcagtgttgttggagtggtcggcctgaagttatctctagcaagtggtcaggacgctgattgttctgcgcaggttggaggtaggtggtgagtctgagaaaggggccagaaagactccccagcaactgctggcaaagggtgaagggcacgttcccacaggattcaagccagctgcctttggaggggagacgggcactcagtttaggcgctcctacagcagggtcagcaagacaagcaggttgcggcaagggtctgcgcactgctgtgtaaatgtaggggcatcggggggcagaaagaccaggggagaagtgtgcatcacccttggggttaagggacagttgtctgctaggtgttgctttctggagatggctgaaaagccagtcca

SEQ ID NO: 26905 - DNA, 454 bp, Homo sapiens
  misc_feature (1)...(454): n = A,T,C or G
ttggatgacatagnacagncnggnttatatcgccgtcgaccgcgcgncgggtccggtttccagggggttcctggtgctcgaggttgtcggcgaggaaggaccagattgcctttgaggatgtggctgtgtacttctcccaggaggagtgggggctcctggacacagcccagagggccctgtaccgccgcgtgatgctagacaacttcgcacttgtggcctcgctgggactctccacctctcgacctcgtgtggtcatccaactggagcgtggcgaggagccctgggttcccagtggaacggacacaaccctgtccaggaccacctacaggaggcgcaaccctggttcctggagtttgacagaggatagagatgtttctggagaatggccacgagctttcccagataccccacctgggatgactactagcgtcttccctgttgccggtgcctgcca

SEQ ID NO: 26906 - DNA, 453 bp, Homo sapiens
  misc_feature (1)...(453): n = A,T,C or G
ntaagatgccttcgacagccggntntgatgacatcgagcngccccaggcccgagatgagaataagaggacccacaatgacattatccacaacgagaacatgatgcaaggccgggacaagtacaagacgctgcggcagatccggcagggcaacaccaagcagcgcatcgacgagttcgaggccctgtaacagccaggccaggaccaagggcagaggggtgctcatagcgggcgctgccagccccgccacgcttgtgtctttagtgctccaagtctaggaactccctcagatcccagttcctttagaaagcagttacccaacagaaacattctgggctgggaaccagggaggcgccctggtttgttttccccagttgtaatagtgccaagcaggcctgattctcgcgattattctcgaatcacctcctgtgttgtgctgggagcangactgattg

SEQ ID NO: 26907 - DNA, 460 bp, Homo sapiens
  misc_feature (1)...(460): n = A,T,C or G
actgatgnacactagnctgagcacactagtnagngcggtggaattccccatttctccccaccctggggctcttctgtgtctgccaccatttccatatcatccgtatagaaagaggctggggatatttcaagctgtttggctgtccctgtaccccagtcctgaagcccctgcagtggcgggactcaagctcctgacctttgcccggcctggctgggcctctcttgcagtcagcgagatgatccgccacccgtatgagacccagtctgacagcttctacttcgtggatgaccggctggtgatgcacaataaagcagactattcctacagcgggacaccctgaccccacggctgccctgaccccaggaggctccagttctgggctgggagctgtgacctacccaacgctcacccctcaaccccaagtcctctgcttggggagttctccaagagctccggaccn

SEQ ID NO: 26908 - DNA, 458 bp, Homo sapiens
  misc_feature (1)...(458): n = A,T,C or G
nttagatgaccactaggctcgagcgccgttattcgnnttagaatatatgacatttatctcattttaaccttcacaacgacccagcaaaatttatactaactttacttaaaagattaaactgaggcttagagaggctaaataacgtgtccaaagtcacacagctaatctgtgtgagagctgggattcaaattcatgtctctctgcttctggagcacaaaacactcctcctccccagcacacctgtccacgcagctgcctgggatgcctggtgtctataataccctcagcctgggtgcagctacctttctggacctaatcgggagcattggaactccctagggtgaaagagctcttgcccactccccttgcccactcttgtgtccagctgatataagatctccaaggtcattgtggcggcggacctgtcggtggggaagacttgcctcattaataggcan

SEQ ID NO: 26909 - DNA, 462 bp, Homo sapiens
  misc_feature (1)...(462): n = A,T,C or G
tctggagnacctcgcannnncncatcggaagctctccgnacanccnggnggaattncctagccctttgtcttgctcattctaagtttttccacgtggttcttggcgtgtttgccccggagggctgtgagaaacggctctgggctctggcctggcctgtgtcctccctgcttcttcttgatcccaggtcctcccagcctccccaagcgcagggtgctctagagggcgctggaggcccctcggggctgcctctttcagggtctgaagggtcatgtgtccccgtccctggaggccccatttcctcccccctgcggaccgaagagaacgcttgtgctcggagatgttcaacccatttgtgatgggcaacttggtcatgcagacatccagctagaagcatctgtagctgaaagaaagccttttgaaattgttaagagccagaatatttgattggtttttaaaaatag

SEQ ID NO: 26910 - DNA, 558 bp, Homo sapiens
  misc_feature (1)...(558): n = A,T,C or G
natcggactactantnccagtggnggaantcgntcctgattagcctggtgccgtactcctacgtggagcccgggacccacgggcgcctctggaccggggcccaccgcctgtttggtgccgtggagcacctacagctggccaactcctacggcctcttccgccgcatgactgggcttggtggacggcctgaggtggtgctggagggcagttacgacggccaccactggacggagatcgagttcatgtacaagcctgggaacctgagccggccgcccccggttgtggtgccccaccagccacgcctggactggcagatgtggtttgcagccctgggcccacacacgcacagcccgtggttcacaagcctggtcttgcgcctgctgcagggcaaggagccagagccaagtggccaggtatcccttccacaagcagccgcccacctacgttcgagcccagcgctacaagtactgggtctcccagcctggggagcacagccagtggtggcggcgccagtgggtgggagagttcttnccatccgtgtccctggnggaccccacg

SEQ ID NO: 26911 - DNA, 561 bp, Homo sapiens
  misc_feature (1)...(561): n = A,T,C or G
cttcgatttcgatnaccagtccagngnggnggaattcgccagggcttccactgcccaccagtgtggccttgagcagtgtccatccagcatccacgtttccagccatccaaggtgcctcactgcctgccctgaccacacagcccagccctctggtgagcggaggttttccaccgcccgaggaggagacacacagtcagccagtcaatccccacagcctgcaccacctgcatgctgcctaccgtgtcggaatgctggcactggagatgctgggtcgccgggcacacaacgatcaccccaacaacttctcccgctcccccccctacactgatgatgtcaaatggttgctggggctggcagcaaagctgggagtgaactacgtgcaccagttctgtgtgggggcagccaagggggtgctgagcccgtttgtgctgcaggagatcgtcatggagacgctgcagcggctgagtcccgctcatgcccacaaccacctgcgtgccccggccttccaccaactggtgcagcgctgccagcaggcatacatgcagtacatccaccaccgcn

SEQ ID NO: 26912 - DNA, 557 bp, Homo sapiens
  misc_feature (1)...(557): n = A,T,C or G
nattcgactactagtcccagtggnggaattcctttccagtaagctaaggcatccatccagtgtgccaggcctcctgtgttcgaggccctgagctgcccaaggctgggacccagggagcttcagatcttgccctgacaactccaccaccataggactagtgagctggaaggcacagatatgcctttctgaaaattaagttttggtaggaatgcaggaagtattttgccacagagaaaactctttaagataaatgaagggtaaaaataaatagcccttgtttagatgtggacataggaaatacagttccagcagaatctctgggaggcgcaacttctttaaatacgggtatgaaagttataagtggctgggtcctgttttatattggcaacctcacagccacacttgaggaaacagttatcatctccatagaggagcctgtggctcagtgggcaagggtcaggaagtgggctggacagaggacgtttcttcctcatagcctgtgggttcgaacactgtcacttncttgagattgtggnagggagttgtgaacagctgtn

SEQ ID NO: 26913 - DNA, 453 bp, Homo sapiens
  misc_feature (1)...(453): n = A,T,C or G
ntccgagaccctcgaaggcggntttgagnccatctcatcatcaactacaagctcaagtctgtggcccaccttccctggcgcatgctcacctacaaggccctcatcacattcatcgacgacctgttcgcctttgtcatcaagatgcccgttatgtaccggatcggctgcctgcgggacgatgtggttttcttcatctacctctaccaacggtggatctaccgcgtcgaccccacccgagtcaacgagtttggcatgagtggagaagaccccacagctgccgcccccgtggccgaggttcccacagcagcaggggccctcacgcccacacctgcacccaccacgaccaccgccaccagggaggaggcctccacgtccctgcccaccaagcccacccagggggccagctctgccagcgagccccaggaagcccctccaaagccagcagaggacaaa

SEQ ID NO: 26914 - DNA, 443 bp, Homo sapiens
  misc_feature (1)...(443): n = A,T,C or G
atcgacatcgatgactcttaggccgngcggtggaattccggagaatgttgggaaatgaaatctgtttatgtatagttggtaataaaatttacttttaaaaggagagacatgtttccattcgggaggcagagtcgtatgcagaatctgtgggagcaaaacattatcatacttcagccaaacagaacaaaggaattgaggaactctttcttgacctttgtaaaaggatgatagaaacagcacaagtggatgagagagcaaaaggcaatggctctagtcagccgggaactgcaaggcgaggtgtacagattattgatgatgaacctcacgcccagaccagtggtggagggtgctgttcttctggataactgttcacgcctaagaaattaaaagacagaacaaaactgtggatcattgccctcaacatgaagactgccatattccag

SEQ ID NO: 26915 - DNA, 559 bp, Homo sapiens
  misc_feature (1)...(559): n = A,T,C or G
natcgaactactagtnccagatggggaattcggcaaatttgatagagaactgtacttactaggaattaaaagacggatttcgaaggagattcagaggcagcatgcactacagagtcagaactccagcaccatctgctccgtttcttgaagtttgctgaacgaggactcacagctgcaacgtggggtgattgtattgatcaaaacccactgggaaggacaaagagtttgccgcctttcggggatccgagggactgtggcgaccgtgcctctgtgccagcgtcccaggaaggaagccaaccctgagcgagcctgtcctctgtggcaggtccacacggtgtgggtgggcagggcttggacccccgtctccatggcaggtccatacagcatgggtggcagggtttggacccgcccagcagcaccacggaccccagccactctcgggggcagacgtcagaatccgttcctgagcagctcccgtgccctgggggcagtcacagagccccccaacaccctcgtgctctgcaccagcctctccctccacacccgaagcaggcgtcct

SEQ ID NO: 26916 - DNA, 562 bp, Homo sapiens
  misc_feature (1)...(562): n = A,T,C or G
ctttcgaaattcgnttcactagtccagcgnggnggaattccccgtctgtctctctcagcagctgtctttctcgcgcccactggccggtctctcctcttccccgcagttgcctccttctctgcctgcctgggtggccgccatgggccggaagcggctcatcactgattcctacccggttgtgaagaggagggaggggcccgctgggcacagcaagggggagctggcacccgagctaggggaggagccccagccccgcgacgaggaggaagcggagctggagctgctgaggcagtttgacctggcctggcagtacgggccctgcaccgggatcacacggctgcagcgctggtgtcgggccaagcagatgggcttggagcctcccccagaggtgtggcaggtgctgaagacccaccccggagacccccgcttccagtgcagtctctggcatctctatcccctatgaggcaccacgtaagacctcctgcccttagctctcttgctcaccacccaagaacctcangacagaagcgagagcccattggctctctcagctcagcccggg

SEQ ID NO: 26917 - DNA, 476 bp, Homo sapiens
  misc_feature (1)...(476): n = A,T,C or G
gggagcanaagaaaaaatttgatcccctttttcgtagaccctagtccatgcggtggaattcctcaaagatgagcccttgagcccctgcataaccccgatgttgagtggctcagagatgaaagtggttttattcataagggagaaagaaagatcggttatgcagtagttagccgagaagaaggcattgaggccaaagcttgacctccccagacatctgctcaaaaagtggaattaattggtctaatcagggtcctccaactgagaaaagacttaagagtcaacatatttaccgattccaaatatgggtgcctggtgctccacgctcatgacgccatatggaaagaaaagggagcgctaacagctaaggaatcccccacacagcattgctctgagatcttggaattgtagatgctgtccagctcccaaaggaggtggcagttactcactgcaggggacaccaaaagggggacacctct

SEQ ID NO: 26918 - DNA, 461 bp, Homo sapiens
  misc_feature (1)...(461): n = A,T,C or G
agaggcgnnnncaccgagtacgtgagacntgngcggnggcannccaaccatcgagcatgtgtcaatggcattgcttgggccccacattcatcctgccatatctgcactgcagcggatgaccaccaggctctcatctgggacatccagcaaatgccccgagccattgaggaccctatcctggcctacacagctgaaggagagatcaacaatgtgcagtgggcatcaactcagcccgactggatcgccatctgctacaacaactgcctggagatactcagagtgtagtgttggtggcgctgtgcccacgaggcaggggcttttgtatttcctgcctctgccccacccccaaagacgaagaaggaagatcatgcttgatacttagattggttttcccagggaagagggcggagcagagcaaagtcactgtgaaccctgggccaggccctggctgggccagctcc

SEQ ID NO: 26919 - DNA, 498 bp, Homo sapiens
  misc_feature (1)...(498): n = A,T,C or G
cggtccaggaggnnnnaactgagaccctactgagaccactaggcagngtggnggaattccacttcagaaatgttttaacttaagacttcagtataatgttaacttctcctgatgtccttgttgacatgaatgcgtgtgcgtgaaatctcacacacttccatggtcactaaacagccttcaccccgggccaggccatcgggtactcggcccgcttcacgtactgattacttgacttggcgttttctagatataaacatgtacatgtgtgtcctggctttgtggtgtaaatgtgtagtgcgtgtgcatgtgcgcgcgtgtgtgtgtgtaaggctaggtcctggcatgtttcccctgtctcagcggaccctgtcctcacggagatagcccagaagcccttggacagcacaggccacacctgagggtgctgatggtggtgactccacagagctgtggtcaggggtgagcgtgtgctgcgcaacttggagtcccgcccncagg

SEQ ID NO: 26920 - DNA, 496 bp, Homo sapiens
  misc_feature (1)...(496): n = A,T,C or G
tgggccaggggnnnnnncctgagaccatatcgagtgtcgtggaattcctttaaacaaggggaatgcacaggagtgatggagcccccactggcaagcaaggccctttgtttctctgcagggcctgcctggggccaggccaccgcctccatgccctgagtcccaagggcagtcggtgccgaggtacacctatggctttagctcagtatccgccagggtaggacagagggcacagcttcccagaagtgcccaggctcttggatagcactaggcttctctgagggatgactgccccattttacagctggggacaccgaggctcatagttcccaatgagtgtcagactcaagatggcaacccaggcctgactcctgatcccctgcggaagtgcttctggggcctctgtgctctgagggaaacaacttgttggtggggacagtctgtctaggcaaccaggtgaaggcacttgcagaaccaagaagaggggcagtgacaggtc

SEQ ID NO: 26921 - DNA, 459 bp, Homo sapiens
  misc_feature (1)...(459): n = A,T,C or G
taccgatgacatcgcanagnccggntgtgataacactccgatgggcgcccggaggcggccatggtgtctcgatggacggcagccatgatggagcacccatgggtcttacggccatgcttcagggtcttcaggtcctgcccccggccagtctgccaagaggcacccccttccccagcctctcgcctgcactgatgcagacaaaatctcacctggcaggcccaaccccccccacccctcccccgccgtgtgtggctcctcgccgcatcgttggggttttgttatgtgaaaatatcctggaaataaatacatgtttctgcncttannaaaaaaaaaaaaaaaaaaaaaaaaaaaacaaataaaaaaaaaaaaaaatttattaaaaattaaaaggggggccctttatttatagaggccccaaaacccgcggttattcccccccgggttttttttctccccccn

SEQ ID NO: 26922 - DNA, 557 bp, Homo sapiens
  misc_feature (1)...(557): n = A,T,C or G
nattcgaattccagtnacagtggnggaantcctttataaccctttagcctgcctcttcccatgctcttctacctagattctccagaattgtttctcaactcttatttccttgacccaaggatttaggggtggtcctacttcagttcctagcctataaactatctcctccttgggaggagtaagcaaggcttctagaacaccagcactgatattccttctttcttactgtaggggcagtagtggccacttacaggaagacacatctgtgtgacgtaaagattccagggcaggggcctatgtgtgaaagcaactctaccatgcctgggcccagtcttgagtcacctgtcagcacaccagcaggcaagattggtctagctgtctgctatgacatgcggttccctgaactctctctggcattggctcaagctggagcagagatacttacctatccttcagctnttggatccattacaggcccagcccactgggaggtgttgctgcggcccgtgctatcgaaacccagtgctatgtagtggcagcagcacagtgtgganccn

SEQ ID NO: 26923 - DNA, 480 bp, Homo sapiens
  misc_feature (1)...(480): n = A,T,C or G
tggggttacannaggaaaaaaaatttcgatgacactagttagagtggcgtaattcctcgtcccctgcctcaccaagcatgtgctgcgggaaaaccaggattatgtccctggagagcggaccccaatgctggaggatgtagatgaggggggcatccggccctggcacctggtgaagccaagtgatgagccggagccgcccaggcctcggaggggcagccttcggggcggggagcgtgagcgcgccaaggccatccctgagatctacctgacccgcctgctgtccatgaagggcaccctgcagaagttcgtggatgacctgttccaggtgattctcagcaccagccgccccgtgccgctcgctgtgaagtacttctttgacctgctggatgagcaggcccagcagcatggcatctccgaccaggacaccatccacatctggaagaccaacagcttgcctctgaggttctggatcaatataat

SEQ ID NO: 26924 - DNA, 415 bp, Homo sapiens
gtcactgcctggaaggacaaatccagaacagacaccagtgccttgcgctggccatcatgtagtgtgctgcccacacctccactgccccccacagcaggaagggctgcctcatggagaatagaaaggcaatgagcccctgaagtggcgtggccagaacaaggcacaccccactgcccacgagtcctgccagggcacaccccactgcccacgagtccctgcacaggtgagaagtgtggctgtttggcagcatctcaatctgtgagcatttggaggatgaaatgcgtctgcactccaaggttgctggagggctcggggcagacgggcgctgccccagcctgtgatgggcatggccttgaggatgccagcctcatgcagaagccagtctaggggattatacagggtgtgcacacccact

SEQ ID NO: 26925 - DNA, 456 bp, Homo sapiens
atagatgacactagttagagtggcggaattccagcattcggatagccacggggagtcatcagccgagctggacgagcaggacatcttggctcctcagaccgtgcagtgtccagcccaggccccagcaggcggcagtgaggagaccatcgccaaagccaagcagagtcgcagtgagaagaaggcccgaaaggcaatgtcaaagctgggcttgcggcagattcagggagtcaccaggatcaccatccagaagtccaagaacatcctctttgtcatcgccaagcctgatgtcttcaagagcccagcctcagacacttatgtggtctttggcgaggccaagattgaggacctgtcccagcaagtgcacaaagccgcagctgagaagtttaaggtgccctcagagccctcagccttggtccctgagtcagcacccatgccccgggtgatgctggagtgcat

SEQ ID NO: 26926 - DNA, 464 bp, Homo sapiens
  misc_feature (1)...(464): n = A,T,C or G
atcttaagacctcgaaannnccnntcataaagtcttcggacagncnggnggaattcgacatgcctccaagttcctagttgctcctgttttatacctcatcaagatgaattttaggttctgggtttcttgaggttttcaccactgactggactataaattcttccaggggggagattgtactttattaacctctgtagttttatacagtgtctggcagtaataggtgaacaataaatgattttttgataaatgagtaaatctttttaacatgttattcctctacctaggaacctacagtaacttcatggcactcaaaactttgtagactcaaaagctagtaaacacagtagactatacatcttcacatgtacatgaaaacagtaatgaggatttgattttccctactaattcacctctactctccctaccccaccacctgcccaatatggtaatacatgatgctg

SEQ ID NO: 26927 - DNA, 564 bp, Homo sapiens
  misc_feature (1)...(564): n = A,T,C or G
ccatcgacnattcggttcactagtccagcgaggngcaattcggccgcggagtcggcggggttgtaggtagcggtaccttgagtggcaacagaattcgattaaattacaatggtaaacatttttgaaaagctctttaaaagtctacttgggaaaaaaaagatgcggattcttatattgagtttggatacagctggaaaaaccaccatcttgtataaattgaagctgggggagactgtgcctgccgtccctacagtaggtttctgtgtggagacagtagaatataaaaataacaccttcgctgtctgggatgttggcagccacttcaaaatcagacctctgtggcagcattttttccagaacacaaaaggctggagtgcaatggcgcgatctcggctaaccacaacctccgcctcccgggttcaggtggttctcctgcctcagcctcctgagtagctgggattacaggcatgcaccaccacgcccggctaattttgtatttntagtagagacggngtttctccatgttggtcaggctggtctcgaactcccgacctcaggtgatcn

SEQ ID NO: 26928 - DNA, 559 bp, Homo sapiens
  misc_feature (1)...(559): n = A,T,C or G
natcgaattcgagtcacagtggnggaanncccgccggnagcacagagctgacaggcagcacgaatctgatcacacactacaacttggaacaagcctataataaattctgtgggaagaaggtgaaggagaagctaagtaacttcctgcctgacctgccagggatgattgatctgcctggttcccatgataacagcagcctccgctctctcattgagaagccccctattctcagtagctctttcaatcctatcacagggaccatgctggccggcttccgcctccacactggcccgttgccggagcagtgtcgtctgatgcatattcagcctcccaagaagaagaataagcacaagcacaaacagagccgtacccaggatcctgtccccccagaaacaccatctgattcagatcacaagaagaagagaaggagaaagaagaggatcctgaacggaaaaggaagaagaaagagaagaagaaaaagaagaatcgacatagtccagaccacccaggtatgggcagctcccaggccagcagcagcagcagcctacgctaatatgag

SEQ ID NO: 26929 - DNA, 459 bp, Homo sapiens
  misc_feature (1)...(459): n = A,T,C or G
nttgacgtatatctacccgtgcggnggaattcgtgtaacttcccttttctggattctcaagcagttactttcacggtcagaacacgcagctattatgattgaaaacttaaaagggcaacaatttcagtcttgcttctagggctagacaggaacttggcaaacatctgtggcctgttcagcaaaggatgttaatatttaagaatcttgtcttgggatgggtgtggaggcaagtggatcacaggaggtcaggagtttgagaccaacctggccaacatgatgaaaccccatctctaccaaaaaaaatacaaatcagctgggcgtcgtggtgtgcctgtagtcccaacgcaggaggttgaggggagaattgcttgaacccaggaggtggtggttgcagtgagattgagcaactgcaatccagcctgggcgacggagtgagactgtctcaaaaaaaaaaaaaaa

SEQ ID NO: 26930 - DNA, 497 bp, Homo sapiens
  misc_feature (1)...(497): n = A,T,C or G
agggccaggngnnnnncctgagnccctctgagaccactaggccangnggnggaattcgtggcaggagggtcctggagtcaagggagcagctaaatttcaatgcagtagcttctttttgccagagatccaggttaaaaaaagaaaatgtttcaccttttaaaaaatatcatacttaagacctgcatttgttctatacccagatcatctttttagagccaaaacatcaagaaatatggcctgaaaaaggctcatgaaaatactgttctgagaattaagtgttaatgacattctgaaacctcactgtttaaagagatccactgctagtataacaggacccctgatatatttatgcatttataaatttataaaattcattgttaaaatcgagcaatgctggaagcgtctggcccacggatgatgaggaggcagagttttcataggatgctggaggacagtgcacagctccctgccagtggctgcggctttcaggctgctgg

SEQ ID NO: 26931 - DNA, 556 bp, Homo sapiens
  misc_feature (1)...(556): n = A,T,C or G
catcgaaatcgataactngtgggcaannnccnnnnannaaattctcccaggagtacatcaacctcctgctgtccatgtatttcttcgtgctgggaatcctggccctgtcccacaccatcagccccttcatgaataagttttttccagccagctttccaaatcgacagtgccagctgctcttcacacagggttctggggaaaacaaggaagagatcatcaattatgaatttgacaccaaggacctggtgtgcctgggcctgagcagcatcgttggcgtctggtacctgctgaggaagcactggattgccaacaacctttttggcctggccttctcccttaatggagtagagctcctgcacctcaacaatgtcagcactggctgcatcctgctgggcggactcttcatctacgatgtcttctgggtatttggcaccaatgtgatggtgacagtggccaagtccttcgaggcaccaataaaatggatcttcattgccttgctgctgcgctntgacatcagcttgaagaagaatacccacacctacttctacaccagctt

SEQ ID NO: 26932 - DNA, 558 bp, Homo sapiens
  misc_feature (1)...(558): n = A,T,C or G
cattcgacnatcgattnaccgtggnggaanncccaccnncnggaccctgcacggnggcggatgctgatccagcagttccggtacgacaactaccgactacaccagctggtaaacaattctgtgttcaccctcaccctgcaggccggcctctcagccatcaagacaccacagtgctacaaggaggacggcagctccaagagccctgactgccctgtgtgcagccgctccctgaacaagctggcgcagcccctgcccatggcccactgtgccaactcccgcctggtctgcaagatttctggcgacgtgatgaacgagaacaatccgcccatgatgctgcccaacggctacgtctacggctacaattctctgctttctatccgtcaagatgataaagtcgtgtgcccgagaaccaaagaagtcttccacttctcacaagccgagaaggttacatcatgtaggccccacgtcgtgaagcgcacgcctcggggacgggctgcagtgggcggggaggccacgccttcctcctggccacgctccagcctgccgcggcgttctgtg

SEQ ID NO: 26933 - DNA, 493 bp, Homo sapiens
  misc_feature (1)...(493): n = A,T,C or G
cggtccggggnnnnncctgagaccatattgagtgtcgtggaattccagaaacagatccacacatatttagtcagctagggccactggtagggtatgtaggaccctgggaaaatatgttctgtagggctcctgactatataaataatttgattaaaatgtattacaaaatgtatgggcccaaatgagacttaagaatttttgatgaagagttagaataatgggttgagtgggtctacttccctgtttgtttattatccaatcagtgcctgtgaagattcttcataggtccagacactgtctcttcctgttcagggtcagaaaccatccatctgtgatcattattgtgatctctttgcgatcactattttcaactgtgctattcttggctgatttcagattttctaccacaaagaaaagatagtgactcttttttttttggacagtctctctgttgcccaggctggactacaggggagcgatctcggctcactgt

SEQ ID NO: 26934 - DNA, 560 bp, Homo sapiens
  misc_feature (1)...(560): n = A,T,C or G
nattcgaattctgtcccngtggnggaattcaatcaggatagctttgggaaatgaagcaagcacagtgcaagaggaagaacaagatagaaagggtagccatactgatttggaaagcattaatgaaaatttagttgaaagtgcattgagaagagtaaacagagaagaaaaaggtaataagtcagtccatctgaggaaagccagttcaccaaatcttcatagacgacagtgggagaaaaatgtacccaatacagctcttacagctttggaaaatgcatccatactcacctccagtttaacagcagaggacgatagaggtggttctgtaataaagtacagcaaaaatactactcgtaagcagtggctcaaagagacccctgacactttgttgaacatccttaagaatgctgatctcagcttggcttttcaaacatacacaatatatagaccaggttcagaagggttcttgaaaggccccctgtctgaagaaacagaagcatcggacagtgttgatggaggtcacgattctgtcattttggatacagagcgacttgagcctgggc

SEQ ID NO: 26935 - DNA, 560 bp, Homo sapiens
  misc_feature (1)...(560): n = A,T,C or G
ctcganatcgaatcacagtccagcgnggnggaattcccgcgaactgcatcatggaggtgtcctgtggccaggcggaaagcagtgagaagcccaacgctgaggacatgacatccaaagattactactttgactcctacgcacactttggcatccacgaggagatgctgaaggacgaggtgcgcaccctcacttaccgcaactccatgtttcataaccggcacctcttcaaggacaaggtggtgctggacgtcggctcgggcaccggcatcctctgcatgtttgctgccaaggccggggcccgcaaggtcatcgggatcgagtgttccagtatctctgattatgcggtgaagatcgtcaaagccaacaagttagaccacgtggtgaccatcatcaaggggaaggtggaggaggtggagctcccagtggagaaggtggacatcatcatcagcgagtggatgggctactgcctcttctacgagtccatgctcaacaccgtgctctatgcccgggacaagtggctggcgcccgatggcctcatctttccagaccgggccacgctg

SEQ ID NO: 26936 - DNA, 562 bp, Homo sapiens
  misc_feature (1)...(562): n = A,T,C or G
natcgaacttctagtccacngtggnggaanncgngccagngacctggagctgcacccccccagctatccgtggtctcaccggggcctcctctcttccttggaccacaccagcatccggaggggtttccaggtatataagcaggtgtgcgcctcctgccacagcatggacttcgtggcctaccgccacctggtgggcgtgtgctacacggaggatgaagctaaggagctggctgcggaggtggaggttcaagacggccccaatgaagatggggagatgttcatgcggccagggaagctgttcgactatttcccaaaaccataccccaacagtgaggctgctcgagctgccaacaacggagcattgccccctgacctcagctacatcgtgcgagctatgcatggtggtgaggactacgtcttctccctgctcacgggctactgcgagccacccacacgggtgtcacttgcgggaaggtctctacttcaacccctactttcctggccaggccattgccatggcccctcccatctacacagatgtcttagagtttgacgatggcac

SEQ ID NO: 26937 - DNA, 495 bp, Homo sapiens
  misc_feature (1)...(495): n = A,T,C or G
tggccaggggnccggtctgagaccaacttaaaggcangcagngcgngnaannnnannaccagaacccggatgccgccctgcgtgcgctgcaccagggggactagcctggagtgcacagccatgacagtgcagattctgctgaagctggaccgcctggacctcgcccggaaggagctgaagagaatgcaggacctggacgaggatgccaccctcacccagctcgccactgcctgggtcagcctggccacgggtggtgagaagctgcatgatgcctactacatcttccaggagatggctgacaagtgctcgcccaccctgctgctgctcaatgggcaggcggcctgccacatggcccagggccgttgggaggccgctgaaggcctgctgcaggaggcgctagacaaggatagtggctacccagagacgctggtcaacctcatcgtgctgtcccagcacctgggcaagccccctgaggtgacaaaccgatacctgtcn

SEQ ID NO: 26938 - DNA, 449 bp, Homo sapiens
  misc_feature (1)...(449): n = A,T,C or G
ntttgaatactaagacctcagaccagncnggnggaattcgngagtccttcggtgcaaacccagcagcatcagatgcaattgcagctttagctttagcagcaacaacaacagatgcaacagatgcagcagcagcaactccagcggcaccaaatgcatcagcaaatccagcagcagatgcagcagcagcatttccagcaccacatgcagcagcacctgcagcagcagcagcagcatctccagcagcaaattaatcaacagcagctgcagcagcagctgcagcagcgcctccagctgcagcagctgcaacacatgcagcaccagtctcagccttctcctcggcagcactcccctgtcgcctctcagataacatcccccatccctgccatcgggagcccccagccagcctctcagcagcaccagtcgcaaatacagtctcagacacagactca

SEQ ID NO: 26939 - DNA, 491 bp, Homo sapiens
ggtggccccaactgagaccctatcgtagaccctagtcagtgtggtggaattcattttttcgaatgagaaattgagatccatagaaagtgttgaggtaaagatcacaaaacacttaatgagcggtgttgccagtttgaatatctcaattcttagttatctaagttccctggtaggcttctttaattatctgggtctcttctagacatctggaacaaatagttgattgacataatacagactagccacatattttataagagttacttttgactcatttagatttttaaaatatacagtgtctgtattcttctctattcattttgttaatttttttttacctaataatgattaagcaccaattatgtgacagcactatgctaagcactttgcatgcattcatctcatttaaatctcaactctgtgaaagtttttattctagttactgtattaagtctcaattctgtccatatccatgaagcacagaaggcagc

SEQ ID NO: 26940 - DNA, 458 bp, Homo sapiens
  misc_feature (1)...(458): n = A,T,C or G
gggcgtgnncnccactgagaccatgatgatctgnggaaancagcaagnncagcaccatcgcctccagctacgaagagtgccgggctgagagcgtgggtctctacctctgtctccacccgcaagtgctggagatctttggctttgagggggctgatgcggaggacgtgatctacgtgaactggctcaacatggttcgggccgggctgctcgctctggagttctacacacctgaggccttcaactggcgacaggcccatatgcaggcccggtttgtgatcctgagagtcttgctggaggctggcgagggactcgttaccatcactcccaccacaggctccgatgggcgcccagatgcccgggtccgcctcgaccgcagcaagatccggtctgtgggcaagcctgctctagagcgcttcctgcggagacttcaggtgctgaagtccacaggggatgtggcc

SEQ ID NO: 26941 - DNA, 465 bp, Homo sapiens
  misc_feature (1)...(465): n = A,T,C or G
gggcgagggcccnctttggagaatctngggggtgccagcacangcggcggaannngggaagagagatgggcaggaggaagaaagcgttcgctgagtaacatctgcaggacgggcagtaaacggggcaattttgagttaaatggcatcatcattccgtctttgcagatgaagtaacagaggttatgaactatctgagtatgcacaagtgatgagtaacagtgtgaaccggtgaattcctcaaggacagggattctatcatttgcagtttgtacaaccaggacctgtctgctctggtgcctggcactcagtagggactgatttaaagggggatgtggtgagatggggagcagggcggcttacatcggcttttgttgagcccctgtgaagtatcaggcagagccacccatcccttctgtgtattacctgcgttaattcccaaaacatcgatcccaggtaagcattctt

SEQ ID NO: 26942 - DNA, 477 bp, Homo sapiens
  misc_feature (1)...(477): n = A,T,C or G
ntttgatgaccatacganangcggngttcggtcgacactcggacagncnggnggaattcggcaagtccaccccataataaccctgccagtgccagggtgggctggggactctggcacagtgatgccgggcgccaggacagcagcactcccgctgcacacagacggcctaggggtggcgctcagaccccaccctacgctcatctctggaaggggcagccctgagtggtcactggtcagggcagtggccaagcctgctgtgtccttcctccacaaggtccccccaccgctcagtgtcagcgggtgacgtgtgttcttttgagtccttgtatgaataaaaggctggaaacctatnaaaaaaaaaaaaaaaaaaaaaatttaaagactaataaactgagagtaaaaaaagaaaaagaattgaatattnnnntttctttttttaaattttttaaaaaaacgcgtgggcctctctcccccccc

SEQ ID NO: 26943 - DNA, 468 bp, Homo sapiens
  misc_feature (1)...(468): n = A,T,C or G
aggaggtggcccnccactgagntcccttgagatcctcgcaccgngcggnggaattcgagaacatcttggctaacatggtgaaaccccatctctactaaaaatacaaaaaattagacaggcgtggtggcgggtgcctgtagtcccagctactcgggaggcagaggcaggagaattggtgtgaacccaggaggtgaagtttgcagggagccgagattgtgctactgcactccagcctgggtgacagagcgagactccatctcaaaaaaaaaaaaaaaatgtgaaacccatggagaacggtctcgcacagtaagttacctaacaccccattaaaaattggggcaagggacttaaccgggacccaagaagagaattccccaaatgactaataagcatgtgaaaaatgtttaacttctttcacaattgaagacatgcaaattcaggccgggcctttggctcccaccttgaatt

SEQ ID NO: 26944 - DNA, 462 bp, Homo sapiens
  misc_feature (1)...(462): n = A,T,C or G
agggcgggnnnnnnaaactgatgaccttgataagcctggcggaancccccaatgacttaaatatattgtaactatttccaaactgctgagacttaattatcatgacctctctttacctccacctgcttttctcccctctccccaaacactgctgcagaactttgatcacttttattctttccattggtctgttagtcaatccttggtcagtattacagcttcatatttgtgttgagggtcctttagcttctttgagctgccttgtcttttcttgaccttttactttttcatatcaattttagaaaacagtttttaatttcataaaaaaactgttggatttttatttcaatgcatcaacttaatcaatttataatatttctcattaatattttttacattttttcctgtgtatcctctattttttattgccattttaaatagtacttttacattttgtaagat

SEQ ID NO: 26945 - DNA, 464 bp, Homo sapiens
  misc_feature (1)...(464): n = A,T,C or G
agtgcggatnnnnnaaaactgagaccttagataacgcggnggaantcctagagatatttctggaactactctatatcatgtggacttaaagcggtagctggcacacctccatgggaaagatgccgcactcttgcgttcctcgtgctgtgcggccaatgactcaaccctcttcaccctggctaagatgatgccaggctgtgagatttactctgattctgggaaccatgcctccatgatccaagggattcaaaacagccgagtgccaaagtacatcttccgccacaatgatgtcagccacctcatagaactgctgcagagatctgacccctcaatccccaagattgtggcattcgaaactgtccattcaatggatggggcggagtgcccactggaagagctgtgtgatgtggcccatgagtttggagcaatcaccttcgtggatgatgtccacgcagaggcgcttt

SEQ ID NO: 26946 - DNA, 487 bp, Homo sapiens
  misc_feature (1)...(487): n = A,T,C or G
gcccgtgccaatagaaacccttnattggtagatctaggccagngcggtggaattctgctaactcagtgcccttatatggcccttgtctcttcgaagcatacaactgaaatgcctcttttcctcttaaaacaccaggattttaaatttacccttatgcgaattcttctcaaattagagatcattttgccaatgagatgagtatttattaatcaaagcaataaaaataaagttatgaataggctaaatctgtttatgcatttatgcctttgaagaagaagaattcgaaataaaagaaacggtattgtggggagggatttgagcagaggatcttattagtaccaaattaaaaaaattaaagctattacattatttcaaaatgcactcctccaatcacagtatatccatctgagatatattttggccaatgtaaacttcttcatgaaagaatgaaaagagaatgtttataaaattgaatgttctggcattn

SEQ ID NO: 26947 - DNA, 466 bp, Homo sapiens
  misc_feature (1)...(466): n = A,T,C or G
agtgcgggtnnnnnnaaactgagaccatagataagcctggcggaanccgaaggcacacatttgagaagatgagattaaggttaggagaaaacctcagtcattgcatgctttttagtatgggccaataaaatctcaacacctgtgggagagtaagaactaagggaatgagtttgggcggcccctcataaaggaccttagaggcagggaacagcaatgccaaatttccctctctcgtgagatgggggatcctgtgcaggctgatgaggcacccatgagaaaagccgaaaaagcatgcatcttagaaatagcccctcaattccaggagtcaacatgccaaagaatgaggctggagacaggtagctccgagggaggacttctggcatgagatctcggcacggcaagcccagcatcgcctcagcccagacaggctccaccaggagatcaagcaagggctgcctttcatgag

SEQ ID NO: 26948 - DNA, 449 bp, Homo sapiens
  misc_feature (1)...(449): n = A,T,C or G
nattgagactgaagaccttcgacagngtggtggaattccgaagggtcaggagaagcccaagaggaagaggaccccgaggtggggctatgtggtcagggacttctccaaggggcgtctgcggcgcccagtctttcctctggggggacgcctcgtccgctctgagaccgaggagtcggtggaaggcggacgtgggagctgtttcgccgcgcccgccgagctgcccaggcgagctcgcgacgcgcgagctggtgtgtgcgcccccagacttagcactgcgtcccaccgctgcagcttctgcacacgcgtgctgtcttggtgactagaaaagaaaaagaaaaaactcacggaggaagggctgtccacccgctcaggatattcacgccatttatcacgatgcgcaacttgaatccattcccgccgttccttttacacacaaagcattgtgttgg

SEQ ID NO: 26949 - DNA, 443 bp, Homo sapiens
  misc_feature (1)...(443): n = A,T,C or G
nattcgangactcttaggccagcgcggaggaattcgctgagactagagacttggaatttgtgggagcaaatttcctcttcttgtaaattaaaaaaagaaaaaggccaacaagctgtcaaataaggcttgaagttgttgttattattattattgcaatgagaagatgaaccttgctctgaattgaatctcaaacttccagccctgatagggatcctgggcatctggtaagtcccgacttgcatgggggcattggggacgggagaagagctttctatatccaattcagagaatctttctggcagggtaatcagaggggtggcaataagataacttattttaataacctaaggtgagaggtttcgggattctggatgacaatgcctcggtgccctcaaggccactgattcctcgccacacagtctcagtaactccgcagcctctag

SEQ ID NO: 26950 - DNA, 466 bp, Homo sapiens
  misc_feature (1)...(466): n = A,T,C or G
aggaggtggccnnccctgatgatcatgatgatcctagaacagngcggnggaattcggctctgacagtggtacaacagcggnggtggccctgatacgagggaagcagttgattgtagccaacgcaggagactctcgctgtgtggtatctgaggctggcaaagctttagacatgtcctatgatcacaaaccagaggatgaagtagaactagcacgcatcaagaatgctggtggcaaggtcaccatggatgggcgagtcaacgggggcctcaacctctccagagccattggggaccacttctataagagaaacaagaacctgccacctgaggaacagatgatttcagcccttcctgacatcaaggtgctgactctcactgacgaccatgaattcatggtcattgcctgtgatggcatctggaatgtgatgagcagccangaagttgtagatttcattcaatcaaagatn

SEQ ID NO: 26951 - DNA, 448 bp, Homo sapiens
  misc_feature (1)...(448): n = A,T,C or G
naaagatgatcgttagcactngcggnggaattcgacagcctcagcaagatcctgctggacatcagctttcctggcctggacgaggatccactgggccctgacaacatcaactggtcccagtttattcctgagctacagtagagccctgcccttgcccctgtgctcaagctgtccaccatcccgggcactccaaggctcagtgcaccccaagcctctgagtgaggacagcaggcagggactgttctgctcctcatagctccctgctgcctgattatgcaaaagtagcagtcacaccctagccactgctgggaccttgtgttccccaagagtatctgattcctctgctgtccctgccaggagctgaagggtgggaacaacaaaggcaatggtgaaaagagattangaaccccccagcctgtttccattctctgcccagcagtctcttacn

SEQ ID NO: 26952 - DNA, 562 bp, Homo sapiens
  misc_feature (1)...(562): n = A,T,C or G
catcgactttgatcactatccgcgngggcaannccngaataaagagggatccgaacaagctcagaaagacaatgaatttcaaggggctgaggccatggttctgtagagcgttatgcttgccattctcgcagagaggtcacttgggccaaaactctatggcatctttccccaaggccgactggagcagttcatcccgagccggcgattagatactgaagaattaagtttgccagatatttctgcagaaatcgccgagaaaatggctacatttcatggtatgaaaatgccattcaataaggaaccaaaatggctttttggcacaatggaaaagtatctaaaggaagtgctgagaattaaatttactgaggaatccagaattaaaaagctccacaaattgctcagttacaatctgcccttggaactggaaaacctgagatcattgcttgaatctactccatctccagttgtattttgtcataatgactggcaagaaggtaatatcttgttgctggaaggccgagagaattctgaataacagaaactgatgctcattgatttcgaa

SEQ ID NO: 26953 - DNA, 465 bp, Homo sapiens
  misc_feature (1)...(465): n = A,T,C or G
ggggtgcgggccncnnnaactgagactangaccttcgacagnctggtggaattcgtgctaccaacctgggaaaaatggagaaagcttgctttgggggctggtaggatggggtgtttaaaacatttgctcttctgcagtgcctttcaaaagctctatcaagagcccgaggcaaaagaaaagatgtgtacccctctgtacactgagcaaatgtcctcccatattttgaaccaggtgggaaaagttaatgaaagccctacagtcaggaaatgtgactgcgaagcccccgctgccccagtgtttgcacaccactggcaactctcagaaacaatcagtcccattgcacgggaacacggggttttgaaacaaacagcagcctgtttttatttaaagtcgcgatcccttgcttatcgtagatttttttcataatttgattttggaaaatattgcacacaaatactactcgat

SEQ ID NO: 26954 - DNA, 459 bp, Homo sapiens
  misc_feature (1)...(459): n = A,T,C or G
aggcggtnnnnnaatgagaccttgataactgcggcggaancccgacacacatggcctaatttttattttttatcaaaggaatatatatacatacttaaaaaaataaaacagtgctaagagatgcctaataaaatccaacaatatcctgtcctactccttcccactgcaagtcctgctccctagaggcaactacttccaaatcccttgttccttgccacctcccactcagaggctgaagaaccagatactttcttagcctcccttgcagctaaggatgactacgtgacctggctttggccagtgagatgtttgctgcgggccttctgaaaaagtatttgcttttctgagcagaggcacaaatagctgatgttgtccccttctttctttctgctttgaatatagncaagccgtctggagctgtgacagccatcttgtgaccatgtggggatgagcacgagg

SEQ ID NO: 26955 - DNA, 474 bp, Homo sapiens
  misc_feature (1)...(474): n = A,T,C or G
tgggaccnnnttttgtagcactcttagtgacgnggaattcgtgcttcgtaaattgcaaaagtgttataaagaagttactggtaagagctacgagtgtctcgctgcactctagcatgggcgacagtgcgaggccctgtctcagaaaaaaaaaaagttacttataatgacattttcagacatgagaaatggcataaaattaaaaacagattcaagagaatagtatgttgagattgtacagacagatgtagctaatggaaaaaagctaaataagtctctctacagatgtttattgagtacttattgcatatactatgcttgccaaaaaatgtaaaagtgtacatttagttacaatgaagcagcacaagttattattagggattattgttataattaagtattgatcacacttaggggctgcagtctatttccttccaagagcctggaagttgggttgccctcagaaataaataaaan

SEQ ID NO: 26956 - DNA, 422 bp, Homo sapiens
gtgaagggagtgctctgtatgatccagaaaagtctgacttgtaatatggagtcgcagagcatgaactggtcaaggctgatcagctaaatggagtagcccattcctccctgcctgcctcctgcccctcctcttgcctgccccttgcccctccttctgcctgcccagctgctccccaccttgaagccatggaagacatgcaagttttatgcccggagggaagtttatagttctgtttattcttcaggcttccatgtatgggtaaatggggaagcctctagcacttgagactaaacctaaattattttaaggatagattgattgctgtaatataatggtgagtctttctgttcacatttcagccactccttgaccactctcttgtttggcctattagagctgcttaagtgagtccaggctccctt

SEQ ID NO: 26957 - DNA, 463 bp, Homo sapiens
  misc_feature (1)...(463): n = A,T,C or G
gtgcgggtnnnnnaaactgagaccatcgcaaatctgcggaaanccaggactttttggtcggtcaagacaggtgtgctgatgtaactctggagggccaggtgtaccccgtcaaaggaggaggaagcaaagagaaaaataaaacaaagcaagacaagggcaaaaaaaagaaggaaggagatctgaaatctcggtcttccaaggaagaaaatcgagctgggaataaaagagaagacctgtgatggggcagcagtgacgcgctgtggggggacaggtggacgtggagagctctttgcccagctcctggggtgggagtggtctcaggcaactgcacaccggatgacattctagtgtcctctagaaagggtctgccacatgaccagtttgtggtcaaagaattactgcttaataggcttcaagtaagaagacagatgttttctaattaatactggacactgacaaattn

SEQ ID NO: 26958 - DNA, 461 bp, Homo sapiens
  misc_feature (1)...(461): n = A,T,C or G
nggcgggttttnaaactgagaccatagataacgcggnggaattcggagaaggtgctggaccgcctggactttgtgctgaccagccttgtggcgctgcggcgggaggtggaggagctgagaagcagcctgcgagggcttgcgggggagattgttggggaggtccgatgccacatggaagagaaccagagagtggctcggcggcgaaggtttccgtttgtccgggagaggagtgactccactggctccagctctgtctacttcacggcctcctcgggagccacgttcacagatgctgagagtgaaggggggtgagttgtctctcttggaggcagttatggctacagccaggttgtgttttgtaaaagtattatcaatggaaaattcaaaccaagctgctgcaaatgatttttggaacaggtaagagtataataaatacagaagagttgaaacaaaaaacccat

SEQ ID NO: 26959 - DNA, 564 bp, Homo sapiens
  misc_feature (1)...(564): n = A,T,C or G
natcgacatcgatcacngtggngcaantccatcgctntcagttatgagctctccaagctggagagcacagtcggctccccggagaagccgctgtctgacctgggcaagctcagctaccgcagctactggtcctgggtgctgctggagatcctgcgggacttccggggcacactgtccatcaaggacctcagatcccacaagggcaccaggtctggcatttgctctcatccctttttgcagccagatgaccagtatcacccaaaatgacatcatcagtaccctgcaatccctcaatatggtcaagtactggaagggccagcacgtgatctgtgtcacacccaagctggtggaggagcacctcaaaagtgcccagtataagaaaccacccatcacagtggactccgtctgcctcaagtgggcaccccccaagcacaagcaagtcaagctctccaagaagtgagcagcctggcccctgctgtcggacctgagcctcctggctcccagcctgtaaatatgtatagacctgttntgtcattnttttaatannagcagttctggtggccc

SEQ ID NO: 26960 - DNA, 566 bp, Homo sapiens
  misc_feature (1)...(566): n = A,T,C or G
ccttcgaccatcgatcactagtccagcgnggngcaattcggaagagccggctggacgtcaggcccagccgctggtgcagtggtccgtcccctctgccggggtgggcccctcgggtttcgcgtgtcctcgggaaagagactggcgggcctcgtgggctgtgcggctatcctggagacagatgacagctctcccttggatggctttgctggttccgcaccagccagcgcccccatttttcctgcagcaccctgatctgcactccctgaggggctcccactgtccgcggtgtgaggatgtccctggaaattggtcttctgtgactttcttgatgggggcagatgagatctttgtactgcattaagtggatagcgctcaggtcctttgggcttggcgctttggcaatctccaggcagctcactttggcctctgttcctggatcccctttgctcttttctgcgcctgcattcatagtccactgtgtgcagaggcatgggagttgtcatgttgggaacatgctagacctcagtatccttgagggatgctgcctttgggtctggnactggtag

SEQ ID NO: 26961 - DNA, 447 bp, Homo sapiens
  misc_feature (1)...(447): n = A,T,C or G
natgatgactgatagcctngcggnggcattccatgtgctcacgtctgctcacgtaaactctcaaacacacattcacagcagcattattcatggtagcctaaaggtggtaacaacctcaaatggcctgtcagcaaatgaatgtgtaaactaaatgtggtccatccatatcatggaatattcttcagccctaaaaaggactgaagctctgacacaggccaccacatgagtgaaccttgaaggcaatttgctaagtgatggaagccagtcataaaacgctgtgttctgtatgatcccatgtaaaggataattcaaaacaaggaagtctataaagatggaaagtagatttgtggttgcttatggatgggggcagggggtgttaaggtggttatagctaaagggtacaaagtgtcttaccaaagaaatcaaatgctcggctgggagcggtgg

SEQ ID NO: 26962 - DNA, 453 bp, Homo sapiens
  misc_feature (1)...(453): n = A,T,C or G
catcgacnccntnggatggagaccattagacagngcggnggaattcctggaaaatatgaaactgaaggcaaagagtccattttacacaaagatgtgagagtttgcattaagcaggttaacagggatagagaaaggtcagagtcaaaggtattcaggagctcgaatatatagaaccagggctggctgaatgtgaagcaaaggaagagcgagggatcaaacatgcctcgctggttcttggtaagtagggagtagccccattcaatccgataagtgatgcaggaggcacagcgctgaatttgaggtgcttgtgagacctccaagggaagccaccttgtctggttatactggtctttgaggaggaggtctggtggtagatttggaagttgttggcatctaggtgtgcacaggtctgggggtgacaatgataccaggggaactggggaggagagatgt

SEQ ID NO: 26963 - DNA, 471 bp, Homo sapiens
  misc_feature (1)...(471): n = A,T,C or G
ggcagttnnnnnnnnaattgaaacctggagaccctcggcagngcggtggaattcctggggtgaaggggtctgaatagcaccaggggaggcggcagggcgggcttgtcctacctgcgcccgagcactgctgagacgacatcccttccagcgccgccacgtagtccagccccagccagccgcgatatctccccacaaacctaaacaatttcgagagggacttgtgttctgcaaccagtcacagaatatcaggtgagctgggcgtgtcttcactgacccacccgcccagggatgctgcactcctctccaccctgctcagaatcactagaatgaccgttctgtggctacagccctaaaagagctactaaaaagaccagaagtagtatgagaacttatgaatacgaatataaataaaggacatctggagaacaaaaaaaaaaaaaaaaaaaaaaaaggggcctttcaatttaaagg

SEQ ID NO: 26964 - DNA, 567 bp, Homo sapiens
  misc_feature (1)...(567): n = A,T,C or G
ctcgacattcgatcactactccgagnggngcaattcataatccatatgttaaataaattattcattaattctatttactgaatacctaccagacaccaagcactatctgaggaactggagtcatagcagtaaataaaacagaaaaggtccctgtgttcatggatcttatattttccattatgtggcaatattctagaatactctgcatttgtccaaaataatgaaggggacttacatacactgacacagaaagctatccaaggaatatttgcaagtggaaaatgtaaactgcagtataattccattaatgttcatttttttaaaaaagcacatacgtatatgaatgtaaatattatataaagaaaacaaacttcaaagatatatcccaaattttggctaactctggagagggaaaggaaagtggtgttagagatggcctttctcatttttccctatatgctttgacattcttgaatcttttacaaaaagaaagccatcatctataacttctatacttttaanaataaagtaaaaagtaacaaagagacaaatattttacttcaatag

SEQ ID NO: 26965 - DNA, 448 bp, Homo sapiens
  misc_feature (1)...(448): n = A,T,C or G
attgaagacccttagncttggtgngcgaattccaggagggctcagaggggcagggtgcccagctgagtttgaatgaactgtgtctttccgggtgtgtgaacatgcaggatgacatgttttgttttaaagaaaatgaggtagaggtctgggcttgcaattttccacttgtcttaatcctgggagattctaaacagctttgtttaaaaactggacatgcagattgcaaagacctgagtgaggaagagccattgggtcccccaggaaaacaattaggtttgaagccagagtttggatttgttcgaccattttgagtgctgtctgcagcatgtgggacctggaggcgcttacagcatcacccatggtgtgagtcactccaaattagcagccatttcaaattggcttccactgacttgctgctggggatgggtggggctgggggggaagctcn

SEQ ID NO: 26966 - DNA, 458 bp, Homo sapiens
  misc_feature (1)...(458): n = A,T,C or G
tgcgccccaaatcggaatacgtagcantcggaagagcgnggaantccanatgagatggcaccaggcaggggcctctggttgggaagactatttgttttgcctttgggccccgcagaaaatgagaatggagccctaaagtccaggagaccatctagctggctgcccccgacagtgagtgtgttggctcttgtgaagcggggggcacctcccgagatgccttctcctcaggagcttgaggcctcagcacccaggatggtgcaaacccatagggcagtgcgggctctctgtgatcacactgctgcaagacctgaccagttgagcttccggcgtggggaagtgctgcgtgtcatcaccacagtggatgaggactggctccgctgtgggcgggatggcatggagggtctggtgcctggggggtatacctcccttgttctgtagccctgggacccttttctgcg

SEQ ID NO: 26967 - DNA, 550 bp, Homo sapiens
  misc_feature (1)...(550): n = A,T,C or G
aatcgaactttagtacagcgcggcggaattcgtgaagttccagagatgtgtcagcccttatcaggcatgggagggacacgttcaggagaggagccttatgagtatagagtacgggcaactgtagccatcagtcggccttgagcatgcacaaaaggacacacttaggagagaagtttatgtgtagggactgtgggaaggctttagcaataatcaacatttaccagacatccaatgacagcctcaggggaaagcacccttgtctggggagtgttggggagcatcagtaaaagaatggacactcaggcacagagtggccctcaggaaggaggtctttgtttgtaggatgtatgggcaaagcttttgtgatcacacaccacagggagaatctgcatgtggggacactgtggagctctgcccagatgaccttttcaggggtaacaccccagctgcttgagagacagtgttgctgctggcagagaatgcattcagagatgcacttcgctctggaactcactctcagccacagggagctgcatgcaccacaggggcn

SEQ ID NO: 26968 - DNA, 461 bp, Homo sapiens
  misc_feature (1)...(461): n = A,T,C or G
ctgcgtcananaatccgagntccgtacgtacatgcgaaggaacnncgnccacctacggggacctcaaccacctggtatcggccaccatgagcggagtcaccttctccttgcgcttcccgggccagctcaacgctgacctgcgcaagctggccgtcaacatggtgcccttcccgcgcctgcacttcttcatgcccggcttcgcccccctcacagcccggggcagccagcagtaccgggccctgaccgtgcccgagctcacccagcagatgttcgatgccaagaacatgatggccgcctgcgacccgcgccacggtcgctacctgacggtggccaccgtgttccggggccgcatgtccatgaaaggaggtgacgagcagatgctggccattcagacaaaaaacagagctactttggggagggattcccaacaaacggaaaggtggcgggggtgacatcccgcc

SEQ ID NO: 26969 - DNA, 464 bp, Homo sapiens
  misc_feature (1)...(464): n = A,T,C or G
cgccgcccactgaaaccctggactgagatcataggaagngcggnggaantcgaaaacaccaaatggcggatgacgccggtgcagcgggggggccttgaggccctggtttccctgggatggggaaccgcggtggcttccgcggaggtttgggcagtggcattcggggccggggtcgcggccgtggacggggccggggccgaggccgcggagctcgcggaggcaaggccgaggataaggagtggatgcccgtcaccaagttgggccgcttggtcaaggacatgaagatcaagtccctggaggagatctatctcttctccctgcccattaaggaatcagagatcattgatttcttcctgggggcctctctcaaggatgaggttttgaagattatgccagtgcagaagcagacccgtgccggccagcgcaccaggttcaaggcatttgttgctatcggggactacaat

SEQ ID NO: 26970 - DNA, 463 bp, Homo sapiens
  misc_feature (1)...(463): n = A,T,C or G
gcgacaaaaaatctgaatacagtagcanctacnacagngcggnggaattccgcaggctgagtttaccttccagcaaagcaaaagcaaaaagtttaagtgtggctttttaaaacctaggcaaaagatctctggaagcagggaggtgcctgcccaagagcgattcatcttcatcacttccaaagaccaaccccacacacagcgcaactcgcccgcagcagacatctgaccttcacgttcagggaaatagttgtggaatatttagaaagtcagtgtcacccagcaaaactctttcagtcccagataaagaagtgccaggccacggaaggaatcgttacgatgaaattaaagaagaatttgacaagcttcatcaaaagtattgcctcaaatctcctgggcagatgacagtgcctttatgtattggagtgcctacagaataagcaagtatgggagttcgatatcaacg

SEQ ID NO: 26971 - DNA, 451 bp, Homo sapiens
  misc_feature (1)...(451): n = A,T,C or G
agcgttannatctgtgacctgagtacatgcgaggaacnggaaaacaccggaagacaggccgggacgtggcagttaaggtcattgacaaactgcgtttccctaccaagcaggagagccagctccggaatgaagtggccattctgcagagcctgcggcatcccgggatcgtgaacctggagtgcatgttcgagacgcctgagaaagtgtttgtggtgatggagaagctgcatggggacatgttggagatgatcctgtccagtgagaagggccggctgcctgagcgcctcaccaagttcctcatcacccagatcctggtggctttgagacaccttcacttcaaaaacattgtccactgtgacttgaaaccagaaaacgtgtggctggcatcagcaaacccatttcctcaagtgaagctgtgtgacttttgctttgctcgcatcatcggggaaaa

SEQ ID NO: 26972 - DNA, 455 bp, Homo sapiens
actggagatcactagacagtttgatggccctcggatgaggcggagggctactctgaacactatgttgagtttgtaaaagatgtacggattcgcttcccccagcacaccatcatggcaaggaatgtggcaacaggagagatggtagaagagctcatcctttctggggctgacatcatcaaagcgggaattgggccaggctctgtgtgtactactcggaagaaaactggagtggggtatccacagctcaacgcattgatggagtgtgcagatgctgctcatggcctcaaaggccacatcatttcagatggaggttgcagctgtcctggggatgtggccaaggcttttggggcaggagctgacttcgtgatgctgggtggcatgctggctgggcacagtgagtcaggtggtgagctcatcgagagggatggcaagaagtacaagctcttctatggaag

SEQ ID NO: 26973 - DNA, 520 bp, Homo sapiens
  misc_feature (1)...(520): n = A,T,C or G
gtcaggcaagccctggactcggaggaagaggaagaggatgtggcagctaaggaaaccttgttgcggctctcatcccccctccactttgtgaacacgcacttcaatggggcagggtccccccaagatggagtgaaatgctcccctggaggaccagtggagacactgagccccgagacagtgagtggtggcctcactgctctgcccggcaccctgtcacctccactttgccttgttggaagtgacccagccccctccccttccattctcccacctgttccccaggactcaccccagcccctgcctgcccctgaggaagaagaggcactcaccactgaggactttgagttgctggatcagggggagctggagcagctgaatgcagagctgggcttggagccagagacaccgccaaaaccccctgatgctccacccctggngcccgacatccattctctggacagtcagaccaagaagctcaggccgtggcagagccatgagccagccgttgaggaatgagctg

SEQ ID NO: 26974 - DNA, 465 bp, Homo sapiens
  misc_feature (1)...(465): n = A,T,C or G
cgccccccattgaagacccttanncagtgtggtgcaattctgcgcgtctggntgaggagttctgtgtggctttgtgcatgtgtgtggtgtgcgcgtctggttgtcgagttctgtgtggctttgtccacgtgtgtggcgtgcgtgtctgtggttgtacagtttgtggcttgcatggcgtgagtgtgagtgctgtgcttccatggaaggagcgtctcctggccgtgatgtggtcacgaggggcttccccgctctgtggacctggtgggcgtcacctttgcagggcagcctggggctggggctgtggccacctgtgtcctcggaccccaggtgagtgggtgaccaggccccttgttccagggccacgccatctcctgcctgagactcctccagggtgaggagaggccttgccaggcctccgcttcctgaccgtggccgtcgggctcccaggacagtcccagacctgca

SEQ ID NO: 26975 - DNA, 458 bp, Homo sapiens
  misc_feature (1)...(458): n = A,T,C or G
atggtcannnatccgtttacgtagaacatagcgaagngcggnggaattccattatccggctcaccaaagggtacgcttcagttttcaaaggttgtctgtttctatatactggccgtgggggtgatctgcagaagattggagaattctgtatggtttattctgaggttcctaacttcagtgagccaaacccagagtacagcacccagcaggcacccaacaaggcggtgcagaacgacagcaacccttcagcttcccagcctaccactggaccctctgctgcctctccagcctctgagaaccagaatgggaatggactgagtgccccaccacgtcccggtggtggcccacatccccctcatactccctcccacccacccagcacccgaattactcgaagccagcccaaccacacacctgcaggcccgcctgggcctttcaacaacccttgtagtaacggg

SEQ ID NO: 26976 - DNA, 489 bp, Homo sapiens
  misc_feature (1)...(489): n = A,T,C or G
ggtggcggggnnnnnnnnaatcgagatttttatgcacngtgcnggaattcggagagggaagaagggaggagcggtgcttgcctcatggctttggtttgaaaggtctctggccaaagcatctggccctggaccttctgatttgcacagtgatgttaactgacctggcacttcctcaaaaggtgattttgtccttagacctgccaagcggctgcagggtggtaggatcccagcatcccgaggccttggaaggccggatgccctgtgtcatccagacttcagcctctgagctgtcatggacccactctgatgaggagcttcctcctgattggagtgggaacctagggcatttctctcccttttcttttgcccttcccagngccaggactcacctgtctgaccatagagcttgcaggcaggccaagctcttggttacctgtgccattcatggcccaagtgaaggaaccacattccaggtgggtgctggcagct

SEQ ID NO: 26977 - DNA, 456 bp, Homo sapiens
  misc_feature (1)...(456): n = A,T,C or G
tgcgtcananaatccgtgatcagtagacgtgcggaggaacnccagcagggggtcaccgaggcggcggagaagaccaaggagggcgtcctctacgtcgtatgcattacccgagaaggtgtggtacaaggtgtggcttcagtggctgaaaaaaccaaggaacaggcctcacatctgggaggagctgtgttctctggggcagggaacatcgcatcagccacaggactggtgaagagggaggaattccctactgatctgaagccagaggaagtggcccaggaagctgctgaagaaccactgattgagcccctgatggagccagaaggggagagttatgaagacccaccccaggaagaatatcatgagtatgaaccaaaggccgaagggcccaagagagcccccaccaacaacacaattctgtcccttgtccttgcccgccccccaaaggcatggcttgtc

SEQ ID NO: 26978 - DNA, 583 bp, Homo sapiens
  misc_feature (1)...(583): n = A,T,C or G
cgcgcatagatcactatncagagtggaggaaccncctctcacaggcaaaaccatccctgccagacagaaatgatgctgccaaggactgcccgccagacccagttggaccttctcctcaggaccccagcttagaagcctcaggcccatcccccaagccagcaggagtggacatctctgaagcacctcagacctcttctccctgcccatctgctgacattgacatgaagacaatggagactgcagagaaactggctagatttgttgctcaggtgggaccagagatcgaacaattcagcatagaaaacagcaccgataaccctgacctgtggtttctacatgaccaaaatagttctgctttcaaattctatcgaaagaaagtgtttgaactatgtccatcaatttgtttcacgtcatctccgcacaaccttcacactggtggtggtgacaccacgggttctcaggagagccccgtggacctcatggaaggggaagcagagtttgaagacgagccccctccgcgggaggctgagctggagagcccagaggtgatgcctgaggaggaggacgaggacgatgaggatgg

SEQ ID NO: 26979 - DNA, 452 bp, Homo sapiens
  misc_feature (1)...(452): n = A,T,C or G
tggccannnatctgaatcagtagatttcggaaggccgnggaantccaagcatcctccaaatctgacagtagacttaactttgaaagaaatctgtttcacgttttgagagacttcatttctcccacgccttttggtggacatactattttactcttggtaagacagtcaatctttctgtgtctgttttccaaatgagaaactgcctcaatgtgtttttccctaactcaaagtggcctgcacagagagggaaataatagatataagactgtgttgagctctttggataaaacgtactagatgaagnttatggttataattactgttattgacaatcataattcagactcccttgaattacaaatctgttctggttttctagtaacttatcctgattaccatgattatgattttaaatgttttggacgtgtgggcactctaaatcttctcatttg

SEQ ID NO: 26980 - DNA, 462 bp, Homo sapiens
  misc_feature (1)...(462): n = A,T,C or G
ntttggacctttgagcagcctcgggaatncccatggnggtcttgcgggcggngaagaagacctttctcccccctctctgccgcgccttcgcctgccgtggctgtcaactcgctccggagcgcggcgccgagcgcagggatacagcgcccagcggggtctcaagattctgccctccaagaaagtcttgccatgattggataggacccccagataaatattcaaaccttcgacctgttcacttttacatacctgaaaatgaatctccattggaacaaaagcttagaaaattaagacaagaaacacaagaatggaatcaacagttctgggcaaaccagaatttgacttttagtaaggaaaaagaagaatttattcactcaagactaaaaactaaaggcctgggcctgagaactgaatcaggtcagaaagcaacattgaatgcagaagaaatggcggacttctacn

SEQ ID NO: 26981 - DNA, 458 bp, Homo sapiens
  misc_feature (1)...(458): n = A,T,C or G
nttgatcgacgatcctaggccangncgnggaattcgtggggccttgggaatgtgatgaccagggttgagtaggtgtgcagggcacattcgaaggaaggcatgcagtttcctatgtgtgaacatttcttttcaagcctgggactttttagaaagtttctggtgtgctcattgtccatggttaggaagaactgttccacatacacctgacattggagtcagtttattgatatgtttggagattggcctttcaacagttttcatatttgaagaattagaaatgaagtccgttcagattctccaaagaacctccagccactggtgggggacattcttaattcacattcctatcagttggtatctcctgtccctgaagacactgatgaggcttgggaggagaatcccacctttccctgcagggggttaggctgggcagggcagggaggtgagggcgctggtcc

SEQ ID NO: 26982 - DNA, 461 bp, Homo sapiens
  misc_feature (1)...(461): n = A,T,C or G
natcgatagacatcgctagggacgnggcannccctcgcctggcccccgagtccccacgggctggcgggtggaatcccaggtctccagggggttcctgtgcagctccatctcacttctctactgcctcccagccccacggtttcaggcattcagatgtgagctcatcaacattgaacccaaagtcggtggtatatgactcaccctccttccaagtctcctgcgcgcgtgtttttaaaataaactcacccgaaacgtccgtaacacacggacctccaggagcagtgagaggtggcttanaagcccctggtttggggtgggtggaggaggaantcncatttcccctttctctggagggcgatccctatgccctctcaacactgattagggtagtgatgagaatgcctattttccctgcatgggacgatgttgggcggacaaaagcatgtcaagtcatatgtccc

SEQ ID NO: 26983 - DNA, 459 bp, Homo sapiens
  misc_feature (1)...(459): n = A,T,C or G
nacttggagacantcgtacgaacngncgnggatnntagcaaccggccccttgtggaggacctgggtgggagctcgagcagacacggccccttattcatcgcgtgggatggtgtgggtgggaggggagcccagccctggggtgctccctggactgggcccttctgtccggaccccgaagggagccccccatttgaggccgctcatcatactgacaggctctgggacctaaacaagcacctatggccagcctctcctgtggaggtgcccccagcttccttgaggagctcagtccccccttccaagaggggcaccgtgggtagctgcctgtgggattaaccagcgctggctcccggtccacgagctccgggagtggcagcgcggacacaccagcgaccatgactcttacacatattccaccgatggctggcccagcatcaactgcggcacactgtcccctcn

SEQ ID NO: 26984 - DNA, 474 bp, Homo sapiens
  misc_feature (1)...(474): n = A,T,C or G
tgtgcggnnnnncncncaactgangaccctcgtagngncgngcaattctgtccggctgcctagggtctgggaagctcgggcaccctccctctccggggctcctgctcccacccctccggcccctccaccgtcgcgctcctccaggctgggcctgtggccgcggtgctttttaattttcccccagctcagaatcttgctgctcggcccccaggagagcaacaactcaacgggaacgatgtggaaggtgtcagctctgctcttcgttttgggaagcgcgtcgctctgggtcctggcagaaggagccagcacaggccagccagaagatgacactgagactacaggtttggaaggcggcgttgccatgccaggtgccgaagatgatgtggtgactccaggaaccagcgaagaccgctataagtctggcttgacaactctggtggcaacaagtgtcaacagtgtaacaggcattcgcan

SEQ ID NO: 26985 - DNA, 490 bp, Homo sapiens
  misc_feature (1)...(490): n = A,T,C or G
gggcgcggggnnngnnaatcgagaatctagtcactgtggnggaattcgtgagtcgagattgcgccactgcactgcagcctgggcggcaaagggagaccccgtctcaaaagaaaaaataaagaaagaaacaaacaaacaaatagaataaagtgggcttgtaggaaggtagagctagtggggtctcaggggaagagcttgcagggaggcctgtccttagaaagtggagttaacagttgcagggggcggagccttaggaagggagcatttttttgggctcagctgttcttagagggtggggcttgcaggggatggggtttcagggagtacctgggccttcttgggtgggcatttgggacctgaccaaccctgtgccccagggattgagccatgtacccagaaagggcaatgcccaccgccccctggcctcccctgcccctgcaccggcgtcagtgactgctctgggggaactgacaagaaactgcgcaactgn

SEQ ID NO: 26986 - DNA, 458 bp, Homo sapiens
  misc_feature (1)...(458): n = A,T,C or G
nacttaaggacatctgtangcacngncgnggaattccttgagtataggttttatcattaagttagataaaatttggctgttaaattttccacaaatggccagaaggtgactgtctctcatatgcctgagaagagtctttctccttagtgtttaataagaaagtaaagcttaagtagtttaaagctatcagcaggaagtaacagctcatggcttacatatgattgtatgtaaagccttattaatgaaaaattctttacatatatacttggaaaagaatgaaaacacgaccagaagtcccttttcatcttggcaaatttattttaaatacttgaaagacttatttgggtttccacaatgaattcaattacttgtggatacggattccaaagaatataaacattacagtgttcctctggaattcccatgtagcaactatcagaaagtactgtagatagaat

SEQ ID NO: 26987 - DNA, 455 bp, Homo sapiens
  misc_feature (1)...(455): n = A,T,C or G
nacttcagacctcngtagngacgngcaannnctanaaaaaccaaggagagtaaaaaggaaaggaaactatgaatcgtgcctcatctttcattgtatcctatatttattattctagaaaaaaagaactgacaagatagagaagaactaatagagcatctactttacccctcaggctgtccagtggggataattattaataaacatttaatggaaaattcaaagatcttccaatttaatttttaaaaatagttttataccaaatattataaggatttattaagcagattaaggactttgtgaaataagtgcttaacttagctgagcacgcatatatcaaagtaataaaagaaactaacatcagagtctccactgagctacacatttgtgaaaggtgcccactgcagttacagacacctcaggtacccagaggcggcagcactggacacttaggacgt

SEQ ID NO: 26988 - DNA, 499 bp, Homo sapiens
  misc_feature (1)...(499): n = A,T,C or G
gcacnacaggagggccnnnnnattgaaaaccatgagaccactaggcagngcggnggaattccccatacacggcagaagtgttcatctccaacatgaaagtgaccagctcttatcctcgtctccccaacaccataacgtcctcatcccgcctccaacccacaccaggccgaagccctcagagagtgttttcatcaggaaccactctcgaacctgaaggttgactttagcgtttagcaacccagggcggggtgtgtgtttcccgttttgttttctgagtggtagcagtgatcaccgtaattccatgtagccatgtgctagcagaacccctgtgtcctcaccgtggcccgtgtgaccccagccgacgagtgcccggcggagtccccgctgccttcccatggtccagtgagctgccagggcatcacatgactctcagctgtgctcttgtcgcttctgtggtgtggtgacaccatgcgctccccagggccagacctgcacgcgn

SEQ ID NO: 26989 - DNA, 476 bp, Homo sapiens
  misc_feature (1)...(476): n = A,T,C or G
natcgagaccatgaagaacngtcgnggaantcccatcacctccctcacctcgggacagtagccctccacttctccagcctctcagccctgtgctcctgcatccagagnggaacccaggctggtgtccgcatctgtccctgggccccacccctggacctgccttggttgtgtcatctgttgtaaacattcaggaggaccagggcagcatctggggcctgggatggccacagaaggggcaggccaggtggaaaggagccagggggaagtggtctaagagacctggaactgccagaggatggcggcctgggcttccccaaagccaggcgtgcgggagaggtgaggactggccccggtgggctgaggcaagggccgctgtcgtcaggcctgagccagggtgagctggtgcctgccttgcattttccttctggtgctgtgaagaccatangctggcaggcagctgagatgaactgtctttn

SEQ ID NO: 26990 - DNA, 500 bp, Homo sapiens
  misc_feature (1)...(500): n = A,T,C or G
ggcgtatagaagagccnnnnaattgaaacccatgatgacattaggccagngcggnggaattccaaataaggaataacatgtgaggactctgaaaaggcccaatacatagcatccttctttcctgttcagaatctgaacaaactgagaaaacgacagatgaaggcagaaatctctctgatgaaggctaatttgcatgctgcaccatgtgttatctcatactgagagacaaataggcttcctactatggaaaccccgaattggatagacattctccagttctgcccacttctgggggagtggtaggcaactccatcctaagaagaaaagggcagaattgaacctgaaaggttcaatttatataatcagataaatcactctgcactcaaggggtggtggaagtaaagggacagaaaggggccaggaatgacgttagctgagtgcctttcacttggaaagcacattctctcctaacaaagattgtgcagacattaaaagtagag

SEQ ID NO: 26991 - DNA, 458 bp, Homo sapiens
  misc_feature (1)...(458): n = A,T,C or G
ggggagaattgtncccttcgaaactgagggctattggacagncnggnggaatgcgagaggggttgagagcctcctttttggttcttcattcctgagctcttgcctgctcacaaatctgacctctttgaatggggacgcaggccttcaacagagaagtttctatggcaaagaagtttctatttagctctagatccagcagagtcatccattctaactgccctgaagtctagagcaggggagggaacccagaggctggggatgagactaggcagaccctggttaccatatggacaaggacaggggaaagcacccccttcctcaatttctgaaagttctatctttgggttcgcaggactttgaggatgataaagaacatataggtactagcttgttgttgctggtccaaagcttccacagccctgagaatttggctttcgtggctgctctggcagctgagc

SEQ ID NO: 26992 - DNA, 480 bp, Homo sapiens
  misc_feature (1)...(480): n = A,T,C or G
natcgagaccctanccattggagagccattcgaactttagaccagacaactctgtatttggtcagtctggggcaggtaacaactgggccaaaggccactacacagagggcgccgagctggttgattctgtcctggatgtggtacggaaggaggcagagagctgtgactgcctgcagggcttccagctgacccactcactgggcgggggcacaggctctggaatgggcactctccttatcagcaagatccgagaagaataccctgatcgcatcatgaataccttcagtgtggtgccttcacccaaagtgtctgacaccgtggtcgagccctacaatgccaccctctccgtccatcagttggtagagaatactgatgagacctattgcattgacaacgaggccctctatgatatctgcttccgcactctgaagctgaccacaccaacctacggngatctgaaccaccttgtctcagccaccg

SEQ ID NO: 26993 - DNA, 452 bp, Homo sapiens
tttgagccttgaacggcgttgatgtcccttaatccatgtggtggaattcctgggctgggtgatgcactattgctgcgctgccttaaggcatctgtcctctggtggtgcacccgtgcacacaggtacagtgcatctgggcacagcttttggatccacacctctgcacaagtgtgaatacctctgcacatatgggtgtatctgtgtgtgctcgtgtatatggggtggggaacatgagacttcctgtgaccagtccaccctggctcccagctgtctgtatcctcctgccccgccctggcgagtgcctaccctggcagaacccagggaggagtggaggctgcctctgcctgggcctccacacagcatcctgtacatacgccacctgggctgggggtggggaggcagggccaggagcatcgattaaagatcacatcctggggcttccagggagctca

SEQ ID NO: 26994 - DNA, 492 bp, Homo sapiens
  misc_feature (1)...(492): n = A,T,C or G
ggatgcggnnnnnnnnnaatcgaganatctatacaccgtgcnggaagtcagctcttgtacttttcagtatattttcataatgagttatattgtcatttagactttgaacagctctgggaaatagaagactagggttgtttcttaaatttagctcatgttataataaaaagttgaaatgaagttcttattctaaaagtctgaatgcttagaacaaacttaacatgtttatagaatatggtctctttgtaccaagtactttgcttaagagctcctttgggccactacatattttggtttctagaaaatgtttgtttatgaagaagtcgatggaaaactgcaaacatatgcagaaaaggtagaataataaaaaaggtctaatgaactccattcagctttgaacctatccactcataaccattgactggcctttaaaaaaaagtattggcagaattaatttccacctaggtgatgggaagaaagtgttcgcctgtt

SEQ ID NO: 26995 - DNA, 496 bp, Homo sapiens
  misc_feature (1)...(496): n = A,T,C or G
ggagttaagggnnnnnnnnncctgtagaccttgataacngtcgnggaattcacagatatccttttcctctcatttcttttccctcggttcctagacgttcctcggagctctttgatgcctcagacctttcccttttatccctcttgctcaggtgcttcctttcacaactttttccagagggcaggcgtcctagctccagttgctccatcccttgggccctcccctgctcttcatctagccaaactggtttgagtcagccacaccccttcccagctccctgggctcttcacgtggtggctggccactcaaccccacccctgggcttggcttggagccctgagtcagctccatcaccacccaagccaaaccaaagctgaggcaggagccgaaactcagagtccttcaaggcctatagccaagtgatggaggacgaggagaaagcagtggagatcttgggcaacacggaagctgctcatnctccatcccccatccgctg

SEQ ID NO: 26996 - DNA, 493 bp, Homo sapiens
  misc_feature (1)...(493): n = A,T,C or G
ggagtaaagaaggggnnnnnaattgagaccctgagaccctcggacangcggggaattcaaaaggaaatgagatacagaaatagcctgattggctacagntatgtgtttgccttatttggtcatgttttggcaggctttagcctccaattggctggaggtttcagctgctatgattggctgagactcagctatttgttacacttgtaacctaactcttatgttaagttacagtttgtttatacattaaattaggttacagttcactatctttggaggcagctttaacttaacacctgtttccttaaagatctgtagttctttaatgccattatgtcatgtcatgtggcctcaatgttgttaaggtttcataaaattataattatatttctgcttctgtttgctgttatgagtttttcattcctaggcacactatttattttcctgcacagtttttttgacccttgcttctttatatattcttggtagaaagatt

SEQ ID NO: 26997 - DNA, 494 bp, Homo sapiens
  misc_feature (1)...(494): n = A,T,C or G
agtncatgaanagagcccggggnnnnnnnnaaatcgaagaccattagtccagtgcggtggaattcgcgggcagccggagcgcacccggccggaagccgctgtcggggagccggcggtggggctggacgcaggtgcaactgacatgggtgaaccccagggatccatgcggattctagtgacagggggctctgggctggtaggcaaagccatccagaaggtggtagcagatggagctggacttcctggagaggactgggtgtttgtctcctctaaagacgccgatctcacggatacagcacagacccgcgccctgtttgagaaggtccaacccacacacgtcatccatcttgctgcaatggtggggggcctgttccggaatatcaaatacaatttggacttctggaggaaaaacgtgcacatgaacgacaacgtcctgcactcggcctttgaggtgggcgcccgcaaggtggtgtcctgcctgtccacctgtatct

SEQ ID NO: 26998 - DNA, 495 bp, Homo sapiens
  misc_feature (1)...(495): n = A,T,C or G
ggagccaggggnannnnnaatcgtagacctcggtaaccgtcgnggaattccacgggaggaggtgtaggagagaagcgccgcgaacagcgatcgcccagcaccaagtccgcttccaggctttcggtttctttgcctccatcttgggtgcgccttcccggcgtctaggggagcgaaggctgaggtggcagcggcaggagagtccggccgcgacaggacgaactcccccactggaaaggattctgaaagaaatgaagtcagccctcagaaatgaagttgactgcctgctggctttctgttgactggcccggagctgtactgcaagacccttgtgagcttccctagtctaagagtaggatgtctgctgaagtcatccatcaggttgaagaagcacttgatacagatgagaaggagatgctgctctttttgtgccgggatgttgctatagatgtggntccacctaatgtcagggaccttcttgatattttacgggaaagn

SEQ ID NO: 26999 - DNA, 496 bp, Homo sapiens
  misc_feature (1)...(496): n = A,T,C or G
gaagttacgagnnncnnnnaattgagnccctgacgatcataggcagngcggnggaattctattaataaacaccatctccatcggactgattacaagactatcatcgtcttgcaagcttccacctccttcatggagccttgtataggcctcccttcccagaagccctgcgtctctgctgagggtacaaaaattagctgggcatggtggcgggttcctgtagtcccagctacttgggaggctgaggtgggagaatggcttgaacccaggagatggaggttgcagcgacctgagatcgtgccactgcactccagccttgctgactggggctttgctgtgtcgcccaggctggattcgaactcctgggctcaggcggacctccctcctcggactaccaaagggctgggattacaggcgtgtgccaccgcacctggnctacaggatgcttcatagaaatattaaaaaaatgagagcacggttgagatataaagaacaaggg

SEQ ID NO: 27000 - DNA, 497 bp, Homo sapiens
  misc_feature (1)...(497): n = A,T,C or G
ggatgtaggnnnnnnnnnntttgtagacctgagtcacngtcgnggaattcgntaagatgcataagctgagcaataaccccacttcctgatttccctgaaatatgagcccagaagcagcaggtgacagggagcttcccttaccctggggtggtggcacacagaccacctcctgtcctgtcccctgcaggtagtattcacagtgtggtgttacctgggaggagggaggaaggagctgagatgaaggagattcaggtaaacagtagccacagtggccaggacccccttcctgaagatccctgtccttcctcgcagcaggtgcttagtcctctcctagggagaagcacggaaagattcctcaaggcctcagtcccatgtccaaggcatacctaggttagaaatgtcctttacttgtttctcagntactatttctcctcttcctccctccccctgccttctcttggctgtcatttagctctctggcccacagaaatactccn

SEQ ID NO: 27001 - DNA, 438 bp, Homo sapiens
  misc_feature (1)...(438): n = A,T,C or G
ccagcaaccaaaattgaagaaatcttgaactttgaccgtctttacctaaagattaggttaaaatttgagtgagaacgcattctctctgcatgatttctctgctctacaaatgttttaactgcctctttgaaggtggagaagtcatggtagcgtttgaaatcatcacagacatgttacataccttttccttgagtatacgctccccaaaattgtttcacaaaaagaatgaaaataattttatgtttttggcctgctatttatatcttggctttctgaacatatattaaatttgacaagaaactgtattttatgttccattagccttagtatgtgttttcaaaatatttattttaaaatgttgactcaaaagttaatataaaacaatagatgtgaaaattctttggtagtaagaatatcctgttctgaggtttacattcn

SEQ ID NO: 27002 - DNA, 463 bp, Homo sapiens
  misc_feature (1)...(463): n = A,T,C or G
natcgtagacctcgaggcccgtgtggnggaattcggggagtggaccgcttaccccactaggtgaagatgtcagcccaggagagctgcctcagcctcatcaagtcctcggcagcctgatcttctgcttcggcatctggatcctcatcgacaagaccagcttcgtgtcctttgtgggcttggccttcgtgcctctgcagatctggtccaaagtcctggccatctcaggaatcttcaccatgggcatcgccctcctgggttgtgtgggggccctcaaggagctccgctgcctcctgggcctgtattttgggatgctgctgctcctgtttgccacacagatcaccctgggaatcctcatctccactcagcgggcccagctggagcgaagcttgcgggacgtcgtaaagaaaaccatccaaaagtacggcaccaaccccgaggagaccgcggccgaggagagnctgga

SEQ ID NO: 27003 - DNA, 490 bp, Homo sapiens
  misc_feature (1)...(490): n = A,T,C or G
cgtttcaggganaggcggggnnnnnnnnaatcgagatctcgaggacgtgcggnggaattcggcagctggttccactggagacagtgttggacatgctccgggatgccatggtggccaaagtcaatacttccaaaggcttcctgattgatggctacccgcgggaggtgcagcaaggagaagagtttgagcgacggattggacagcccacactgctgctgtatgtggacgcaggccctgagaccatgacccagcggctcttgaaacgtggagagaccagcgggcgtgtggacgacaatgaggagaccatcaaaaagcggctggagacctattacaaggccacagaacccgtcatcgccttctatgagaaacgtggcattgtgcgcaaggtcaacgctgagggctccgtggacagtgtcttctcccaggtctgcacccacctggacgccctanagtagcaacgctggagccgcttccccagctcagagccccg

SEQ ID NO: 27004 - DNA, 452 bp, Homo sapiens
  misc_feature (1)...(452): n = A,T,C or G
cttgacacattttgagngcgtggaanncgcagacaagatggagacaaattcctctctccccacgaacacctctggagggacacctgctgtatctgctggctatctcttcctggatatcatcacttatctggtatttgcagtcacctttgtcctcggggtcctgggcaacgggcttgtgatctgggtggctggattccggatgacacacacagtcaccaccatcagttacctgaacctggccgtggctgacttctgtttcacctccactttgccattcttcatggtcaggaaggccatgggaggacattggcctttcggctgggtcctgtgcaaattcgtctttaccatagtggacatcaacttgttcggaagtgtcttcctgatcgccctcattgctctggaccgctgtgtttgcgtcctgcatccagtctggacccacaaccaccgcaccg

SEQ ID NO: 27005 - DNA, 480 bp, Homo sapiens
  misc_feature (1)...(480): n = A,T,C or G
ccccccccccccccccccatagancnccntnatagtagaccctctagacagngcggnggaattccagattgagaaggaacgtgatgtgatcctgcgggagatgcaggagaatgatgcatctatgcgagatgtggtctttaactacctgcatgccacagcattccagggcacacctctagcccaggctgtggaggggcccagtgagaatgtcaggaagctgtctcgtgcagacttgaccgagtacctcagcacacattacaaggcccctcgaatggtgctggcagcagctggaggagtggagcaccagcaactgttagacctcgcccagaagcacctcggtggcatcccatggacatatgcagaggacgctgtgcccactcttactccatgccgcttcactggcagtgagatccgccaccgtgatgatgctctaccttttgcccacgtggccattgcagtagagggtccttggctggccaa

SEQ ID NO: 27006 - DNA, 456 bp, Homo sapiens
  misc_feature (1)...(456): n = A,T,C or G
catagaccacattatagaaggcgctggaanccagcgggcatgtctgcatccacatttcccctttttataaggacactagtcatagtggattaggggcccaccttactctagtaggacttcatcttaacatattacttgtgtagtgaccagattttcaaataaggtcactttctgaggtattgggggtttggaattcaacatatgaattttgggaaatacaggtcaacccaacagtaagtacttggtcagcagtttattaaatgaatatatatatatagtaagttcttggtcaagatggtcaacaacttgggtgcagtggctcactcctgtaatcccagcactttgggaggccgaggtgggcgaatcacaaggtcatgacttcaagaccagcctggccaatatggcgaaaccccgtctctactaaaaatacaaaaattagacaggcgtggtggtggg

SEQ ID NO: 27007 - DNA, 474 bp, Homo sapiens
  misc_feature (1)...(474): n = A,T,C or G
ccccccccccccccgttgacnccntatagtagaccctctgacagngcggnggaattcccggctgctatagagccgggtgagagagcgagcgcccgtcggcgggtgtcgagggcgggttgcctcgcgctgacccttcccgccctccgtctcgtcacacaccaggtccccgcggaagccgcggggtcggcgccatggcggagctgacggctcttgagagtctcatcgagatgggcttccccaggggacgcgcggagaaggctctggccctcacagggaaccagggcatcgaggctgcgatggactggctgatggagcacgaagacaaccccgatgtggacgagcctttagagactccccttggacatatcctgggacgggagcccacttcctcatagcaaggcggccttgaaggatctggttctgctgccggagaaggcaaacccgctttgagtgaagaggaaagacaggaacaan

SEQ ID NO: 27008 - DNA, 486 bp, Homo sapiens
  misc_feature (1)...(486): n = A,T,C or G
ggccggaaattgcagaccctannctgtgtggngcaattcctggagaagctgacaatcttggcaaagcgcaagtccctctttgatgataaagcagtggaaattgaagagctaacatatatcatcaaacaggacatcaatagcctcaacaaacaaattgctcagctccaggatttcgtgagagccaagggcagccagagtggccggcacctgcagacccactccaacaccattgtggtctccttgcagtcgaaactggcttctatgtccaatgacttcaaatcggttttagaagtgaggacagagaacctgaagcagcagaggagccggagagagcagttctcccgggcacctgtgtcagccctgccccttgcccctaaccacctgggcggtggtgctgtggttctgggggcagagtcccatgcctccaaggatgtcgccatcgacatgatggactctcggaccagccagcagctgcagctcattgag

SEQ ID NO: 27009 - DNA, 489 bp, Homo sapiens
  misc_feature (1)...(489): n = A,T,C or G
gggcggcaatcgagaccctanntttcgaganccctagtccatgtggtggaattcccaccacaaaaacctgtaaaaagcctgtgctgtggaaaaggactcacttcagaatcaagggcctgggtccacctcgccatttttctgaaggttggaggctctgtccagggacagcggaaattcgaggttcttggcggaggaggagcatttgccaattggggcgggcttttgcccctaccttgagaccttagtgctgtaaatgagccaggaaaggtatttgaggggagagtctaggtttctgggaatggagagagtatgacattgtgtgtttccacgcacatcgtttgggggagaaggggttccccgtcgctttgtgcaacatattagtagggtgtagtaggggtagcaaccaagagacccaaaacagtcctgcttaagaagaagccgcttaacggtggattggggaaaaatactctagtgcgctgcattttgaaa

SEQ ID NO: 27010 - DNA, 442 bp, Homo sapiens
  misc_feature (1)...(442): n = A,T,C or G
gggattgatgactattagaccagngtggaggaacttttgctttgacctcatttcacatgacagaacttaccactttcaagctgaagatgaacaggaatgtcaaatatggatgtctgtgctgcaaaatagcaaagaagaagctttaaacaatgcatttaagggggatgacaatactggagaaaataacatcgtccaagaactgacaaaggagatcatctcagaagtgcagaggatgacgggcaatgacgtctgctgtgactgtggggcgccaggtgacccagggaccccacccgaccctgggctctaggacatttcaatcccattctgattcacagaatccgttcattgattttcactttcatttcaaacacgaaattaagtgcagctcagcctgagttcatcccattacacaaatgcttaatgaactgtgcagaccgcggca

SEQ ID NO: 27011 - DNA, 443 bp, Homo sapiens
  misc_feature (1)...(443): n = A,T,C or G
nttgttgaccccnnnannnnattgacgactcctagtccatgtggtggaattcgggaaaaagcaagtgtcttacagaactgatattgttggtggcgtacccatcattactcccactcagaaagaagaagtaaatgaatgtggtgaaagtattgacagaaataatctgaaacggtcacaaagccatcttccttactttactcctaaaccacctcaagatagtgcggttatcaaagctggatattgtgtaaaacaaggagcagtgatgaaaaactggaagagaagatattttcaattggatgaaaacacaataggctacttcaaatctgaactggaaaaggaacctcttcgcgtaataccacttaaagaggttcataaagtccaggaatgtaagcaaagcgacataatgatgagggacaacctctttgaaattgtaacaacgtctc

SEQ ID NO: 27012 - DNA, 434 bp, Homo sapiens
  misc_feature (1)...(434): n = A,T,C or G
natcgacgacctctanccttgaggngcaattcggatgctcccaccagactaggaggactggagagtagggttggggtcaaagggtagcctcctgcaggtcgcctcctcctgtggctttcccggacgtcgcgctgggacttcctgccgacaccgcacttcttcccagactcccacctgcgccgctgggggcttgggtccagtcttgctctgccacccaaccctggagtgcaatggcgcaatcttggctcactgcaacctctgcttcccaagttgaagtgattctcctacctcagcctcccgagtagctgggattacaggcatgtgccaccacacctggctgatctttcttttagtagagatggggtttcaccatgttgtccaggctggtctcgaactcctgacttcgtgatccacccaccttggcctcccaaagg

SEQ ID NO: 27013 - DNA, 483 bp, Homo sapiens
  misc_feature (1)...(483): n = A,T,C or G
ttttaggccgggccnnnnnnatttgattccttgcaanncnnnttttgagcccttcggacancggngggaanncggagaanaanngggcctcancaagaaggatttggangaaacttacatgaactttgtagagctggagtctcacctggaaaggccgactgtatgaagtggagatccgggagctgcagtcccagatctccaacatgtctgtggtgctgtccatggacagcagccactcctggacatggacagcatcatcactgaggtaaagaggcagtacaaggaggttgccaactgcagccgggctgaggctgagagcacgtaccagatcaagtatgtggagctgcagacgctggctaggaagcacagggatgacctgcggcatacaaagactcagatctccaagatgaaaccgaacatcagccagctccaggctgagattgagggcctccaaggccagggggctttcctgtaggccaccat

SEQ ID NO: 27014 - DNA, 465 bp, Homo sapiens
  misc_feature (1)...(465): n = A,T,C or G
agctctnnnnttcttagacttcgaangcgngtcagtaacctcgaacnacnnnnanannnatatgaagacagtagccccaaaatgatgtcagtcattacaggtgttatattgatataagttataggaatttagaagaaaggaacagtgacattgatttcatgacaaaaatacaatgtggatgtacacaaagaagttttactagaacagaaggctaaattctctgtgttcctcttgctaaggaagaaattgctgccttgcaacttctggaattttgttggcacaagcaaacaaaaatagtgaagagtaaacaaaaaaacacaaaaattttaactgcaagaaaatttactagcgtgagtttagatgctctggatgaattaggaaatgcttttgtgctattaattttcaaacctaaaagacctttctttaattttataatcaatattatcagcagtatctttgacctgg

SEQ ID NO: 27015 - DNA, 463 bp, Homo sapiens
  misc_feature (1)...(463): n = A,T,C or G
cgcccccactgaaaccntggnctgangacgctaggaagngcggaggaantcggacacagccaggaagtgacagagtccagaatggaggcagttttaagtcccagttttgtgtattcttcctccctgagggggcagccaaatgctttcttggggaaaagggacaggagttgggagcccagatctattggtttagaaccactgggcacgtattgagcactacatgcctggagctgtcatcagtgttctcttgtcagttgtcacggcctcctctaattgtggtagtaccatatacactatcttccttttttttcaaatataatgttattgttgtactttaacaattggagcacacggtgccgggcgcagtggctcacgcctgtaatcccagcactttgggaggccaaggcgggcggatcacgaggtcaggagatcgaaatcatcctggctaacacagttgaaaccn

SEQ ID NO: 27016 - DNA, 466 bp, Homo sapiens
  misc_feature (1)...(466): n = A,T,C or G
gacctactccggggcncnnnaaaatgatgtcatcagaaagtccggtggaattcgnggcaagaggggttggcacactgcccagactgttccaaagccagggctggggctgccaaaaaggccacctgtgcttcaccatgctccatcctccctctcttccacctccccaggctgggctccacttgtccagctctctgacttcctggcaaggttgagtaggctccagctaggaaggggccagctgaccttgttggccggagcactaatcccctccagatgggctggtggcttgcactgagggcctggctgcccagacagagctgactctggtcccagtgaccatgtgtggctatgtgtgaccgtgtgaagggagcaattccatccagtctcccggttccttcctgcttcactcctccccactgctgacatcccccacaagcagtggccccatgaaggccttcttgtctct

SEQ ID NO: 27017 - DNA, 559 bp, Homo sapiens
  misc_feature (1)...(559): n = A,T,C or G
nnnttcggaaccactagtccgagcggnggaattcgacttagaaatgtcaaccccattcttaaacattttctgtattactgcaaagccgccccacggctgccttggtagcccgcggcacacccctatgtggatttgccccaggtatgtcactggctggttcagcccctaccaccgccagcggaagctcatccacccggtcatggttcaacacatccagcccgcagcgctcaggtgaggccctgggctcttataggccgtgcagccatgggttccctgagaactgctgctgttgctgacatgtccctcaactagagagcagagggtgagcccctagttgtaaaaggccctctggtctcagatgtgcagctgtcaccgacttgttcctcccgacatgccgatgaggtagggtcagtagccccatttcacaggtgaactgaggcacagggcagtactgaccatggggctgagggcaagtcccaagtgtgcagactgtgcgttcatggcgccctcacctgcagcctcctggcacagtggagcaccctcgtgcacgagctggagg

SEQ ID NO: 27018 - DNA, 435 bp, Homo sapiens
aaacgatgacccttagtccagtgtggaggaactccatcctatgacttagagcttcatccgtgctgttgtgtgtgtccgtagctccttgctgtctgttccttcgtttttaattgtgagcagtgttcttctgtctgaataaactaagacgcagtttgtccatcacctgttagtggactttgctcgcagctgtcggtgattaggaatggaggtgccggtgtgtgcatggcactctatccgttatgcatgtttattttctgcatctgttaatgttctaacatctttcagacccaggactgctcctcctagggccagttagttcccgggggtggacagcttgcctagaacccaccttgccagggctgtgacccccgaccccctatcaaagtctcacactaagccaacgttttcccgccctgtgccaggcaccaggcagcg

SEQ ID NO: 27019 - DNA, 471 bp, Homo sapiens
  misc_feature (1)...(471): n = A,T,C or G
catcgagnactagatggccgtgcggaggaatcccattgatgatggttgtgagagccaggtgttctgttcctgctcctacgatgccaccacattctttgttacaacctgcaacgacatcaaagacatctacaaacgcatggctggcacggcctttgactttgagaacatgaagcgcaaacagaacgacgtctttggagaagctgagcagtgattgtggccgcccccagcccctgctgccccagcctgtgtctgttctcctcgagggctccagcatcctctgcttcccccaccacgttcccatcacccacctcattgatccactgaccaaatccttaaccctagcgatggcttgggagatggggggttggatagcatcctctttcttggcccttccttatcctaggaaaagagggctcctctccttgtgtgtgtctcttccccccacccctaattcttctgctctgtttgaga

SEQ ID NO: 27020 - DNA, 437 bp, Homo sapiens
  misc_feature (1)...(437): n = A,T,C or G
nattgangacccttagtccagcgtggaggacttcgggaaccaggaaggggctcctggcctctctgtgtcctctgcagtgggggttgtggggggcgcagcatccacgccttgctgcccttctttcatgaagtctgttttttaagtgctggttcccccgaatattttatgcagaggagggaaaatttatagtggcaattattttctcacagtctggtgagcaggcaattaattacgagtaagggggcctagtacagcgtggcgtgtggcagaatcgcaccgccccggctccccagcccaccgccatgcagggctcgcgtgcgggaaaactaatatgccggcgtttaagcctgtgcccctctgctgggtgtaactgctctgaaataaatgatctgacattgnngnnccnnngannnanangaaaaaaaaaaaaaaaaaaa

SEQ ID NO: 27021 - DNA, 436 bp, Homo sapiens
  misc_feature (1)...(436): n = A,T,C or G
attgatgacccttagtccagngtggaggaactcgatgaccactcagaaggaggcctggtggagaaccacgtggacagcaccatgaacatgttgggcgggggaggcagtgctggccggaagcccctcaagtcgggtatgaaggagctggccgtgttccgggagaaggtcactgagcagcaccggcagatgggcaagggtggcaagcatcaccttggcctggaggagcccaagaagctgcgaccaccccctgccaggactccctgccaacaggaactggaccaggtcctggagcggatctccaccatgcgccttccggatgagcggggccctctggagcacctctactccctgcacatccccaactgtgacaagcatggcctgtacaacctcaaacagtgcaagatgtctctgaacgggcagcgtggggagtgctggn

SEQ ID NO: 27022 - DNA, 441 bp, Homo sapiens
  misc_feature (1)...(441): n = A,T,C or G
natgagacattatcagcgtggagacttagcagcttctcgctgtcccaggaggttctccggcacctgcggcaggaggaaaaggaagaggttactgtgggcagcttgaagacctcagcggtgcccagtacctccacgatgtcccaagagcctgagctcctcatcagtggaatggaaaagcccctccctctccgcacggatttctcttgagacccagggtcaccaggccagagcctccagtggtctccaagcctctggactgggggctctcttcagtggctgaatgtccagcagagctatttccttccacagggggccttgcagggaagggtccaggacttgacatcttaagatgcgtcttgtccccttgggccagtcatttcccctctctgagcctcggtgtcttcaacctgtgaaatgggatcataatcactgccttacctn

SEQ ID NO: 27023 - DNA, 438 bp, Homo sapiens
  misc_feature (1)...(438): n = A,T,C or G
nattcgacngacccctagtccagtgtggaggaactcgagaaagggagagggagagcaggggcagagacagtcaggggtggctggaagggctcacctagaggggcgtggtccgcgctgtggagggggttaaaacccagctctttcggagcacgcccatcctatcccagtctcttgcttttgccctacctactagcaacgtgagcccgcccggcccccgtccatacttccacctaggaccccgtccctgctcaggctcgtctccaggcgttacccaaaacttctcactctctcgaatgcccaaacctttatcccaggcctccgtgtcgacgcatccccagcgcacatacctggtcttttgctgcctgtcgtcaccgccaccccaacagccgggcaggcatcgctgccgccatcttggaagcgggcgctgcgggggcggng

SEQ ID NO: 27024 - DNA, 433 bp, Homo sapiens
  misc_feature (1)...(433): n = A,T,C or G
ggggntcggatgccctcagacattgaggccactattcgctgaccggggaccacgcgtctcatccatggcttccgcggactcgcgccggctggcagatggcggcgttgccgggggcaccttccagccctacctagacaccttgcggcaggagctgcagcagacggacccaacgctgttgtcagtagtggtggcggttcttgcggtgctgctgacgctagtcttctggaagttaatccggagcagaaggagcagtcagagagctgttcttcttgttggcctttgtgattccgggaaaacgttgctctttgtcaggttgttaacaggcctttatagagacactcagacgtccattactgacagctgtgctgtatacagagtcaacaataacaggngcaatagtctgaccttgattgaccttcccgggcatgagagt

SEQ ID NO: 27025 - DNA, 593 bp, Homo sapiens
  misc_feature (1)...(593): n = A,T,C or G
ccagcgatagatcactgtcagagtggagcaactcctctctctcattcgntaggtcattgagggtttgtttgtgttttcatcaatgtctttgtaaagcacaaattatctgccttaaaggggctctgggtcggggaatcctgagccttgggtcccctccctctcttcttccctccttccccgctccctgtgcagaagggctgatatcaaaccaaaaactagagggggcagggccagggcagggaggcttccagcctgtgttcccctcacttggaggaacccaccactctccatcctttcagaaagtctccaagccaagttcaggctcactgacctggctctgacgaggaccccaggccactctgagaagaccttggagtagggacaaggctgcagggcctctttcgggtttccttggacagtgccatggttccagtgctctggtgcacccaagacacagccactcggagccccgctgccccagctgatccccactcattccacacctcttctcatnctcantgatgtgaaggtgggaagaanagagctnngcattggagcccttcangaagtaccagaaagacccctcagtcttg

SEQ ID NO: 27026 - DNA, 437 bp, Homo sapiens
ctcccctgaagagctacaggagtacctggtatttgccaagaggcacaggctgcatgtgattgtggatgaggtctacatgctgtccgtgtttgagaagtctgttgggtaccgcagtgtcctaagcctggaaaggctccctgacccccagaggacccatgtgatgtgggcaaccagcaaggacttcgggatgtctgggctccgctttggcacgctgtacacagaaaaccaggatgtggccactgccgtggcttccctctgccgctaccacggcctcagtggcttggtccagtaccagatggcacagctgctccgggaccgtgactggatcaaccaggtgtacctgccggaaaaccatgcccggctcaaggctgcccacacctatgtctcacaagagcttagggcattggggatccccttcttgagtcgtggggctggct

SEQ ID NO: 27027 - DNA, 453 bp, Homo sapiens
  misc_feature (1)...(453): n = A,T,C or G
nattgatgacatctgacagnatggaggccttttacgctagtgcggtggaacacaccggaggtgcacgccctggtgcttgatgggcgaggtcatctcctgggccgcctggcggccatcgtggctaaacaggtactgctgggccggaaggtggtggtcgtacgctgtgaaggcatcaacatttctggcaatttctacagaaacaagttgaagtacctggctttcctccgcaagcggatgaacaccaacccttcccgaggcccctaccacttccgggcccccagccgcatcttctggcggaccgtgcgaggtatgctgccccacaaaaccaagcgaggccaggccgctctggaccgtctcaaggtgtttgacggcatcccaccgccctacgacaagaaaaagcggatggtggttcctgctgccctcaaggtcgtgcgtctgaagcctacaagaaag

SEQ ID NO: 27028 - DNA, 449 bp, Homo sapiens
  misc_feature (1)...(449): n = A,T,C or G
nggggttgtagtcatctgnccgngttgaggacttttcgctacgngatgacgcacacgggcaggccaccctggtgaacctactgctgcggaattacctacactacatgttgtacaaccaggctgagaagctggtgtgcaagtctgtgttcccagagcaggccaacaacaatgagtgggccaggtacctctactacacagggcgaatcaaagccatccagctggagtactcagaggcccggagaacgatgaccaacgcccttcgcaaggcccctcagcacacagctgtcggcttcaaacagacggtgcacaagcttctcatcgtggtggagctgttgctgggggagatccctgaccggctgcagttccgccagccctccctcaagcgctcactcatgccctatttccttctgactcaagctgtcaggacaggaaacctagccaagttcaan

SEQ ID NO: 27029 - DNA, 477 bp, Homo sapiens
agacgtaactgatttcgtatccatagtcagtgtggtggaattcgaaggaccctggccccgcagctccctcactggccaagcaggaggccgagtggactgcaggagaggcctgtccggcctccagctccacccagggagcacgggcccagcaggcgccaaataccgagatgtgccaaggaggagacccagggtctgggctgaggcccagggctgagaaggaggacacagcagagcttggggttcatctggtgaactccctcgtggaccacggccgcaactcagacctgtcagacatccaggaggaagaggaagaggaggaggaggaggaggaagaggagctgggttccaggacttgctccttccagaagcaggttgctggcaacagcatcagggagaatggggccaaggcaacagagaccggagaggccagagggcaggacggctctgggcggaggggcccccagaagagaggtgtcc

SEQ ID NO: 27030 - DNA, 480 bp, Homo sapiens
agaactcggctgataacatagtcagtgtggtggaattcgaaatttataatactaaatgatgcttatattagaaaaaaggaaagatctcaaattaataatctaaattaataatctaagttcctgattcaagcgactagaaaaagaaaagcaaatgaaaccaaaggactggacgcaatggcttatgcctgtaatcccagcacttggggaggctgaggcaggaggattgcttgatcccaggagttcaagaccagcccagacaactagtgggaccctatctctactaaaaaaaagttaaaaaataaaccaaagaaagcagaagaaacagtgcaagaagagaaatcactgaggccgagcgtggtggctcatgcctgtaatcccatcactttgggaggccgaggtgggaggatcacttgaggtcgggagtttgagactagcctggcctacatggtgaaacaccgtctctactaaaaatacaaaaag

SEQ ID NO: 27031 - DNA, 479 bp, Homo sapiens
  misc_feature (1)...(479): n = A,T,C or G
ngggtttcggttcatagtccgtgtggtggaattcgaaaccctatgagtgtaagcaatgtggaaaagccttcagatctacctcacacctttgaaaacatggtaggactcacactggagagaaaccctatgaatgtaagcaatgtgggaaagccttcagatctgtcaaaaattgttgaattcatgaaaggacacacactggagagaaaccctgtgaatgtaagaaatgtgggaaagcgttccataatttctcttctttgcaaatacatgaaaggatgcacagaggagagaagctctgtgaatgtaagcattgtgggaaagcattcatacctgccaagatcctttgaatacatgcaagaacacacaatggagagaaaccctatgaatgtaaagaatgcagaaaagcattcagcttgcctacttcctttcatagacatgaaaagacattggaaggaaaccctatgaaggcaagcaatgtggcn

SEQ ID NO: 27032 - DNA, 475 bp, Homo sapiens
agaggaaaatcgatttcgttaccctagtcagtgtggtggaattccgactttagtgagcagagtgctgacagtcatggtccccttctttgggtctgtcttttgagagaggttgagttcagggcaagacagcctgccacacatccaagggtacgaccagtgggaccctggcctgagtctgttctccgaggggcctccagcagcttctgttcctccctgcagctgtgtctttcttgtcctgggtttaggatgcaggtgggccaggcaggtgttgttaggggaggcacccacttcaaaaggagggccacagtggggacacagagtccagcacctgagccctccaccctccccattctggttggttccatcagccacacttagaatctcccaggatcccttggactccgtcccccaacttgtcacagcagcctgagcctacccaccccatgagacaagagctggcaggaacatctgccta

SEQ ID NO: 27033 - DNA, 444 bp, Homo sapiens
  misc_feature (1)...(444): n = A,T,C or G
nattgacncccctttgtagacccctagtcagtgcggtggaattccttgagaaacacatctcactacgttgcccaggctggtctcaaacttctggcctcaagcaatcctcctgagtagctaggattacaggggcacaccactgcacctggcccgtttttttctaagagttttatagttttagcttttacatgtaggtctctgatccattttgagttagttttttgtatatggtatgatgtaagggtccagctttattcttttgcttgtggatatccagttgtctcagcaccaaatgttgaagagactattttttccccattgaatcgtctttgcaaaaaagtccctggcaatagatgtatgggtttactgggtacatttttatgaggcaagttcgtttctgtcaggggatttattttactgtcaagccttttgaaggagggagtg

SEQ ID NO: 27034 - DNA, 439 bp, Homo sapiens
  misc_feature (1)...(439): n = A,T,C or G
nttagacgaccattggacagcgcggtggaattccacccctgccccagggccactggtctccctgggcttgcagtgcagaggcctcagggtgtctgggattgctggggaggcctgtgctgccccctggtggcgcttcctggcgctgcgccctgtccacagtcaccttatgtccctttggaaacattccatttgacttttccctgttggttgaaatcccatgtttccctaaacctctagcctgattgttctttccctaattcattgcacaagctcctttgcttttagtgttaccgctcattgcctctctaatcctgcctgattgtgtttacagaagcttctgatttgcattgaacatgctctaactggcctgtgctacttattaccgggcttgtaatagcggttcttgactccatagcctgttgagtgttcccagatgtgn

SEQ ID NO: 27035 - DNA, 445 bp, Homo sapiens
  misc_feature (1)...(445): n = A,T,C or G
gaggtcaggagttcaagaccatgaaaacctgtctctactaaaaataaaaaatagccaggtgtggtggtgtgtgccagtaatcccagctactcggaggctgaggcaggagaatcacttgagcctgggaggtggaggtggcagtgagcagagatcgtgccactacactccagcctgggcgacagagcgactctgtctcaaaaaaagaaaaagaaaaagaaatcaagtctttaatgacacaaataacacttaagcagtgtgatggtataaaaaaatcccatcttcaatacaaatgaaaagcaaactacccaggagttgatttaacaagttatttataagatgttttaacaagttatatgtaagacataagacaaaccatgaggaaaggcaaactgtgttcttagatgagaaaatgccagtgcttcctaatctgtgaatttaacataan

SEQ ID NO: 27036 - DNA, 424 bp, Homo sapiens
catgtaggacagcgggacctgtgagcgatggcggggtctggtgaaccccacatgcactgtctataggaggagctaggtgaggaaggggggggcacctgcgtgaccgaccggggcaggtagtctaagactatcttggcgaggagtatataaaaaacttataacagaacgatattcctacagaatgtacatatcagactaaagatgctgctacaggaactgcttctataactgtcattaatgaaggccaaaatatcattgtcatagtggctggagcaaacttacttttgaatacggaggatctgagggcagcaaccaatgtcattagcagagccaaagtcatggtctgccagctcgaaataactccagcaacttctttggaagccctaacaatggcccgcaggagtggagtgaaaaccttgttcaa

SEQ ID NO: 27037 - DNA, 472 bp, Homo sapiens
  misc_feature (1)...(472): n = A,T,C or G
agaaaaaaaactttgatnaccctnnnttagatgaccttagtacangcggtggaattcagcatttaatccagaaggccgaggacccaagtcagcccgactcggccggctacactgcgctgcactatgccagccgcaatgggcactacgctgtgtgccagttcctgctggaaagcggagctaagtgtgatgcccagacccacgggggtgccactgctctgcaccgagccagctactgcgggcacactgaaatcgcgcggctcctgctatcacatgggtccaaccccagggtggtggatgacgacggcatgaccagtctgcataaggctgctgagaggggtcacggggacatctgctccctcctcctgcaacacagcccagccctgaaggccatccgggaccgaaaggcacggctagcatgtgacctgctgccttgcaacagtgacctgcgggacctgctatccagctgagccgg

SEQ ID NO: 27038 - DNA, 474 bp, Homo sapiens
  misc_feature (1)...(474): n = A,T,C or G
cgtggaaacttgtctcgantacataggcagngnggtggaattcgcccggcgtgtggggcggagcggactgcgtgtccgcggacgggcagcgaagatgttagccttcgctgccaggaccgtggtgaagcctctgggcttcctgaagcccttctccttgatgaaggcttccagccgcttcaaggcacaccaggatgcactgccacggctgcccgtgccccctctccagcagtccctggaccactacctgaaggcgctgcagcccatcgtgagtgaggaggagtgggcccacaccaatcagctggtggatgagtttcatgcctcaggaggtgtaggggagcgcctgcagaacgggctggatcgtcgggccaggaagacagagaactggctgactgagtggagggtcaagaccgcctacctccagtaccgccagcctgtggtcatttactcgagcccaggcgtgatgctacccaagcn

SEQ ID NO: 27039 - DNA, 478 bp, Homo sapiens
ggacgtgaatcgagtcgtagtccgtgtggtggaattcctaagctggagtacaatggcgcgatctcggctcattgcaacctctgcctcctgagttcaagtgattcttccgcctcagcctcctgagtagctgggattacaggtgcctgccaccacacccagctaatttttgtatttttagtagagacggggtttcaccatgttggccaggctggtctcgagctcctgtcctgagatgatccacccgccttggcctcccaaagtgctgggattacaggcgtgagccaccacgcccagcccactacacataaaattttattagctattgcctattctttataggagctgtcccattttacactctcatgaacaatgtatgaatgtctgtttctctacagccttactaacagtgttttcaagcttttgaatttttgccactctgatatgtgagaagtggcatttcagtgtggttttcatttgc

SEQ ID NO: 27040 - DNA, 490 bp, Homo sapiens
  misc_feature (1)...(490): n = A,T,C or G
cggtcctnaaagggagggaggggggnnnnnnnnnaatcgtagacctgagtaactgcggnggaattcccgggcgccatcatggacgaggactactacgggagcgcggccgagtggggcgacgaggctgacggcggccagcaggaggatgattctggagaaggagaggatgatgcggaggttcagcaagaatgcctgcataaattttccacccgggattatatcatggaaccctccatcttcaacactctgaagaggtattttcaggcaggagggtctccagagaatgttatccagctcttatctgaaaactacaccgctgtggcccagactgtgaacctgctggccgagtggctcattcagacaggtgttgagccagtgcaggttcaggaaactgtggaaaatcacttgaagagtttgctgatcaaacattttgacccccgcaaagcagattctatttttactgaagaaggagagaccccagcgtggctgg

SEQ ID NO: 27041 - DNA, 463 bp, Homo sapiens
  misc_feature (1)...(463): n = A,T,C or G
gcgctcnnnnnaactgatnacttgagatcgtagcgaangcggnggaantcgncggccctgtggccctgtcattgacccgtggtcccggccattcacatgttacccttgcctgggacctggccattcacatagtgaccccagcctgggacccggccattcacgtgggaccccagcctgggtcccggccattcacgtgggaccccagcctgggacccggccattcacaggggccctagcctggaacccgaccattcacatggtgaccgcagcccgggacccggccattcatgtggggccccagccaccagctcctagccatttgcatgggaccccagcctgaccccagcccccggttcctggccatgccttggctccctctgaccccgccgcccctctggcagttccgctcactctccatggtgtctgagtgcctgttctcgctcatcaaaggggacgacatgtt

SEQ ID NO: 27042 - DNA, 552 bp, Homo sapiens
  misc_feature (1)...(552): n = A,T,C or G
aattgtaccctattcagagnggcgatgatcaccgtgctgacccactgctcttcctcttaagaaagtgctccattccttccggcgcccggagctgctggcccaaagggatccggagcgagctagggcagacaccatgaccacccttgatgataagttgctgggggagaaactgcagtactactatagcagcagtgaggatgaggacagtgaccacgaggacaaggaccgaggcagatgtgccccagccagcagttctgtgcctgcagaggctgagctggcaggcgaaggcatctcagttaacacaggcccaaaaggtgtgatcaatgactggcgccgcttcaagcagttggagacagagcagagggaggagcagtgccgggagatggaaaggctgatcaagaagctgtcaatgacttgcaggtcccatctggatgaagaggaggagcaacagaaacagaaagaccttcaggagaagatcagtgggaagatgactctgaaggagntngccatantgantgangaccaagatgatgaagagtttctgcagcagta

SEQ ID NO: 27043 - DNA, 599 bp, Homo sapiens
  misc_feature (1)...(599): n = A,T,C or G
agcgtcgaccactagtcagngtggaggaactcatattaggtgcataattactggtaatactgtattattactattatctttttatactaagcatgtagcatagtgcctagcataaaggtagatgcttaatcctcttatgctccttctgatggttatttacatagtaatactgtattattactatggcttaatccctctatgctccttctgatggttatttttgtttcaggtacaaaagaaggatcccaaggaatgggcagctcagtaccgagaggcgatggaagcggatttgaaggctgcagctgaggctgcagctgaagccaaggctagggccgagattagagctcgaatgggcattgngctcggctcggagaatgctgccgggccctgcaactgggacgaagctgatatcggaccctgggccaaagcccggatccaggcgggagcagaactaaagccanagcccangagagtgcagtgccagcactggntgcagtaccagtacccaataacagtgccagtgccagtgccagcaccagtggtggcttcagtggtggtgccagcctgaccnngcactctcacattgggctcttcgctgn

SEQ ID NO: 27044 - DNA, 488 bp, Homo sapiens
  misc_feature (1)...(488): n = A,T,C or G
aggtttttagggggaagaggggnnngnntttgannccttgtagacattagtccagtgcggtggaattccagcaggcgctgccttcacccacggatctgcccaggctgaaggcacacgctcaatgccccacgtgccttctccaggaggaacgaagcagggtttgagggttgggtggatggagctcagaaggaaaccccagccccaccacggatgacaccatccctcccgtcccatccccagcatgggcaaggccagcctttctggcagaaggagctgtcctcaactcagggccgctgtgagcaaagctgaccccagcccccacccccagttaacactgctgcttctctgaatgcatgtcacgctgcaccccatgctccgggcccacaccctgcaggacaaggagctccagacaggacgtccataagtcaccgaggtgtgccacccagcaggtgctggaggtgcccaatgctccctcctaggacctcgca

SEQ ID NO: 27045 - DNA, 485 bp, Homo sapiens
  misc_feature (1)...(485): n = A,T,C or G
tggattaaagggagnagaggggnnaggggactgagacctgaggaactgtcggnggaattccagagatcgacatcacatgctgggatgcagacccagttccagaagaggaggagggcttcgagggtggtgattaacggtggcgccagccctaggctacccttgccaaggccgcccacctgcatcagcctctggccagacggcccgccgcgcctgcattcgcagaagctccgcctggcacccactccggattccggccctggctggggacttggccgcttccctacccacagggcctgacttttacagcttttctctttttttaaaaagctgataagagacttgtacagttgactggctttcctctcggtggtagaagagacgctgttgcaaattacacccctccttacctggaacagaatgnagctcttagtcctccctgctcagctggccgggttggaggcctcaccctgcttggggcctggcgt

SEQ ID NO: 27046 - DNA, 476 bp, Homo sapiens
  misc_feature (1)...(476): n = A,T,C or G
tgatgganaactcgagttcgtagtccgtgtggtggaattcgccagatcagaaaagggagctcaggtaccttccagagagtgagacccagcgcccttgtctcgcacccagtaggctttcatccccgccatggcggagctgatccagaagaagctacagggagaagtggagaaatatcaacagctacagaaggacttaagtaaatccatgtcggggaggcagaaacttgaagcacaactaacagaaaataatatcgtgaaagaggaactggccctgctggatgggtccaacgtggtctttaaacttctgggtccggtgctagtcaaacaggagctgggggaggctcgggccacagtagggaagaggctggactatatcacagctgaaattaagcgatacgaatcccagcttcgggatcttgagcggcagtcagagcaacagagggagacccttgctcagctgcagcaggagttccagc

SEQ ID NO: 27047 - DNA, 552 bp, Homo sapiens
  misc_feature (1)...(552): n = A,T,C or G
ntttgatacccatccaganggcattgatacccctacgaanacgacgaggacggcgaggagcgtttcgtgcccctcggacccggccacgcagtccccaggggcccggcccgtggcgcgttgaaggtggggagcattaagcgggaaaggaccttcacatttcagtcagaggacttaaaacgtgactgtggtaaaaaaatgtctcatcaacacgtgttttccttggccatggaggaagatgtgaaaacagcagacaccaaaaaagccagccggatccttgaccatgaaaaagaaaacactcgctccatctgtctccttgagcanaaaagaaaagttgtttcctccaacattgatgttcctccagcaaggctggagtgcagaggcacgatctcagcttacttcaacctccacttcccaggttcaagcgattctcctgcttcaaccctcctgagtagctgggactgcaggtgtatgccaccacgcctagctaacttttgtgtttgtagtaggacagggtttcaccgtgttggccaaggtgggctacaactcttgacg

SEQ ID NO: 27048 - DNA, 558 bp, Homo sapiens
  misc_feature (1)...(558): n = A,T,C or G
nattgaaaaccctncnnnnnnncnatagagancccttctcagagnggcggaattcgcagcctctgcctctcctgaaacctctgacaaccccctacacacacacaggcatactcagacccactcaaagctgagaatgatccaactcagccctactttgcggatggacatattaaggccaggaggggagggacttgccccaggtcgcatggcagaggggacttgaacccacgcctcctgaccagccagctccctttcccatggggcagccggcaccaccttctcatctctattcagggcctacacccctccctttttggggggagcctgtccccacacaccttagcacaaccagaatcttgagttgggcagggagggtcagggctacagaggctcttgaggctccgaggccctggggatcaaaggtcaatgagttaggtggagagaaagatccctgggggctcctgtatgcaggactcctgaaggaggtgggagctgagggccctggaggatggggaaggtttgcagagagaagaanaannaaggcaggtggggatgagc

SEQ ID NO: 27049 - DNA, 550 bp, Homo sapiens
  misc_feature (1)...(550): n = A,T,C or G
ngttttgattcaccatnccaanggcgtagatcgccgtcgtgagggacgcgaggacagggacccctggtgactgcccccccgccggcctcagtagtcacacctgcacccgaatctctgaccgagagctgcaggtggctggccgggagggcggtatccacactcagcgacgctatggaagcatctacacattaaggctggaccccagcgcccgcacctattgctacaagcaagaaggctgccacacagcctcacgctcaggtcactgtgcggccctgctccaaactcctggaccccatccaggtcatcagctattgctctttggaggttgcaacttagctgaaccagaagtagctgggcattggagtcatgggaaaaataaggaggaaccacctgttgctcctcattngatggaacagcnntgcaagcttgtgagcagagggcaggggtcccagaaggggccccatggactacggcatcactcatgttctgtggccgggcccttagctgtgctgnttggtggagaaactctgacagagctagagacaccatt

SEQ ID NO: 27050 - DNA, 487 bp, Homo sapiens
  misc_feature (1)...(487): n = A,T,C or G
gttactnagggcggagaggggnnnggggnaattgagnccttgtagacattagtccangcggnggaattcctcaaatctgggcccttagagagctgcaagtaaaggtgcttggtttgtgctatggtgaagccccacaggctgcaaggtttgctgccttgttggtggagggcaggccccctcttttaggtctttttttcttttaatttcaaatttgagctggaagacggtttatatatcctctttcttctcactcacctacatctacgttctgaaaatgggaacatcggctacacaacagaagctgccttgctcctcttgatgaggcgcagtgtttacttgtcactattttattttattggcaacttaaaacctctgcccttgaaggcagttgctcatcctggagtttctttcagaacatcnttttctttctttcttttttttttttttgaaaacccattctcgttgtgccccccaggccgaagggcag

SEQ ID NO: 27051 - DNA, 474 bp, Homo sapiens
  misc_feature (1)...(474): n = A,T,C or G
cgaggaaaattgnctcgagtnccctagtccgtgtggtggaattcgagtttctgatgctgatttgtcgttgcgaagtttctcgtttcttcctctgacctccgaggtccccgctgcaccacggggttgctctgttctcctgtccggcccagactcttctgtgtggcgccgccgaagccaccgttagcgcgagctgctccgttcgccctgcccacggcctgcgtggctggggccgagtcccaggggccgcacggagggcacagtctcctgtcaggctcggagaggtcaggagaccgaccccaccactaactttggagaaaatgtgggtttgctttttaaaggaatcctatatctagtcctatatatcaaacctctaactgacgtttcttttcgaggaagtggcttggtgggtgcagcccccgccggttccgttgacgctggcaccttctgttgattttttaagccacatgctatgat

SEQ ID NO: 27052 - DNA, 488 bp, Homo sapiens
  misc_feature (1)...(488): n = A,T,C or G
ggttcttaagggagaagggggnnnngggggaattgagatctcgagtaccgttcggnggaatccagaaaaagaaaaattttgtgtttcaaaaatttaaaactaatacatagcttatgaaaagaacattcaagtgttatacagtattgaaggcagataatgaacaaatgttctgccctttgttccacttcttaggttctgaggcccattttaatgcttccctctttccagaagcttggacggtaacgtgcagctggaatttatataggcaccaagtacctcacagaccagtgtggtcattgcttcagtgactatctaggggttacccttctttagctgagcttttttcttgaagcagtagttgtatttaaatctgatcagattatttatcaccttctgtttgttaacgacttaacttctgtagtaacttgtgattttccttgctcttaagtgtcaagtccagcaagttgaacaactatccctggaggcan

SEQ ID NO: 27053 - DNA, 475 bp, Homo sapiens
agatggaaacctcgagttcgtatgcagtgtggtggaattcggaaccggttcctggacttgagcggagcgagaaagagcgcgccgcctgcacgactggactggagcggccgggtgccctggaggcccctgggaattgcagtccttgcgcaggtggagagtgagcccttatgagaaaactcaagactcagaaacaataaaggttacagagatgaaattgacagagcctgaatttcagtatgtcaaacttcaatgtgccattatacttttaaatcctacagaacagattgaatcacaacttctacttttacatgagagaagacaatgggtcctatgacttactgtcagtttccttttcctgatttaattagctgcttctgtatctaattttgctaggaatggaggaataaggcaaattccctaaactacatattgacatttatactaatgtgaaaacctcaagtccatttgcagactt

SEQ ID NO: 27054 - DNA, 487 bp, Homo sapiens
  misc_feature (1)...(487): n = A,T,C or G
gggtttttagggaggagggggnnnggggnaactgagacctgaggaccatcggagagagcganaaaantcgtcggctccttggcagaggagttgattgtgttttcggctggatactattttcaatttctatgtaaaaatgtcaatagaagggtggagttttaatgatgcaggcggctccggcggccgggctcggcagcgcggcccgcaccttggctgacgggctggggtaccctggctggtaatgaactctcagagggtccgggagcagggcggctgtgttcccagctggcttcctggggaatgtggagcaggcgccgggcccaccgcttgccaggccgaggtctgtgcgagcagataaagtgaggggctgagggcctggaacagctgtggcgggccagactgactgggagaggctgataagagcccagaaggagcccatgcggtcggcgtggcaccgccagaaatctgacggggtatcacgactggg

SEQ ID NO: 27055 - DNA, 494 bp, Homo sapiens
  misc_feature (1)...(494): n = A,T,C or G
cgggtcaataggggaggaggggggnnnnggggnnaatcgatgacctcgagtaccgtgcggaggaagccaggttgaggataccatgttactagggcagatgattaagacaacttagcaaatgctaaaatggatacctatgtaccaaactacatgaattataaacaaatgagcagacaaaattaaaagctaaagcaggcttataattatataaataggaagtacaaagggggaaaatgagaattattgtaaataataatgtaagaaagaataagtaaaatgtgtattgatatcttacattaaaaagtaattgaactttaagttctggagtaaaaaaggccatcatcaagaggtgattcaaaatacagtctctataaataaaatttgtttaccaagctttctttcttttttttttttttttttttttggaaagggatttaaaacttgcccccaaattggaggggaggggggggaatttggttaaatggaacctttcc

SEQ ID NO: 27056 - DNA, 473 bp, Homo sapiens
  misc_feature (1)...(473): n = A,T,C or G
agcggaaatttgactcgattacatagtcagtgnggtggaattcccagctggtggaaaacacagatgaaacctactccattgataacgaggccctgtatgacatctgcttccgcaccctgaagctgaccacccccacctacggggacctcaaccacctggtgtcggccaccatgagcggggtcaccacctgcctgcgcttcccgggccagctgaacgcagacctgcgcaagctggcggtgaacatggtgcccttccctcgcctgcacttcttcatgcccggcttcgcgcccctgaccagccggggcagccagcagtaccgggcgctcacggtgcccgagctcacccagcagatgttcgactccaagaacatgatggccgcctgcgacccgcgccacggtcgctacctgacggtggctgccatcttccggggccgcatgtccatgaaggaggtggacgagcagatgctcaacgtg

SEQ ID NO: 27057 - DNA, 472 bp, Homo sapiens
agaggaaatttgaatcgtatccatgtggtggaattccagtgtatgacccatcattgcccgcttcccatcacagcagcttgtcctggaagggccgaggggggccaggggatggcagccctgtggtgctgcccaatagccagccagacctgccagatgtttggctgcgcaggcccagcactcacacgtcaggctatagcagctgagggggacccggggaggctggacagggcgcggaaccctgtcatggatgacaaggcaagggcagcaataggctggagcccgaaggtatttctccagatccacagggagaggtctcaccctccagctgtggatgttaaaccctgccagatgtcccagccttgatctgtctgctcctactcctcacatctggaggattccagcaggaggggttttggaggggacctgcttgcgacctgctgagggcttgtctgctcctacagcaccatctaag

SEQ ID NO: 27058 - DNA, 561 bp, Homo sapiens
  misc_feature (1)...(561): n = A,T,C or G
cgggcgccccaattggagcactnnattcgatgaccagtcncgngnggngcaagtccccgccgagccatgctggctgccatctacaacacaacagagctggtgatgatgcaggacttctctccagactttgaggacacttggcgcttcctggaaaaccgggttaatgatgcaatgaacatgggccacactgccaagcaggtaaagtccacaggagaggcactggtgcaaggactcatgggtgcagcagtgacgctcaagaacttgacaggtctaaaccagcgtcggtgagaggaaggggtataagctacaatgcctagaagagaatgagcggacagattgaaagagctttgaaaagtataaggtgccatccacataacctggtgttcaccagaaacaccacttaaggactcctgagncactaccacagccacctggaaaccacaaggcatttgatgctaccgttctcggcagggattgggctgcttcttcagttcctaataccagaaccaagcctcctgatgcctttcttgactgcaactgtgtgaatgaaaaatagatgtt

SEQ ID NO: 27059 - DNA, 485 bp, Homo sapiens
  misc_feature (1)...(485): n = A,T,C or G
cgtntttagggaggagcaggaannggggaactgagacctgatgacatcggaagngcggggaattcccgcgagcgagctgccttcagagtgtggcttctgcctgcgccagtttttccgctctttcctggagaggcaccacaaagaggaatgccaggacagggtaacccagtgcaagtacaaacgcatcggctgcccatggcacggccccttccatgagctgacggtgcacgaggctgcgtgcgcccacccgaccaagacaggcagtgagctgatggagatcctggatgggatggaccagagccaccgcaaggagatgcagctgtacaacagcatcttcagcctgctcagcttcgagaagattggctacacagaggtccagttccggccgtaccgcacagacgacttcatcacgcgcctgtactatgagacgcccaggttcacagtgctgaaccagacgtgggtcctgaaggctcgagtcaacgact

SEQ ID NO: 27060 - DNA, 488 bp, Homo sapiens
  misc_feature (1)...(488): n = A,T,C or G
ggcgtgcnnnnnnaatggagtatctaggcactgtggnggaattctgccacgtcaccttgatcgaccttcgaggatgcaagcagatcactcgaaaagcctgcgagcacttcatctcagacttgtccatcaacagcctctactgcctgtctgacgagaagctgatacagaagatcagctaagacacacccagcccagattcaacaggaaaccgatcttcccctgactccccaccgaggagagcctctcctcgaccctgcacgggctctgaggccagcgtcacactccctctctgctctcctgtcccttgagcccttcctctacaggtggggcagagagggtggtggacaccaggcttatctgcctgctcctctccctcctaaggaaaagggagtagcagattgatctgaggggaaagcacaggctgtgctgtcgaggcgcctgctcgcttactcgcctgccaggaggccgggctctcagtttggggtgtt

SEQ ID NO: 27061 - DNA, 485 bp, Homo sapiens
  misc_feature (1)...(485): n = A,T,C or G
gagtttccnngnngnnnnnaatcgagaccctttgtagngcgtggaanncncgacgaggactactacgggagcgcggccgagtggggcgacgaggctgacggcggccatcaggaggatgattctggagaaggagaggatgatgcggaggttcagcaagaatgcctgcataaattttccacccgggattatatcatggaaccctccatcttcaacactctgaagaggtattttcaggcaggagggtctccagagaatgttatccagctcttatctgaaaactacaccgctgtggcccagactgtgaacctgctggccgagtggctcattcagacaggtgttgagccagtgcaggttcaggaaactgtggaaaatcacttgaagagtttgctgatcaaacattttgacccccgcaaagcagattctatttttactgaagaaggagagaccccagcgtggctggaacagatgattgcacataccacgtg

SEQ ID NO: 27062 - DNA, 487 bp, Homo sapiens
  misc_feature (1)...(487): n = A,T,C or G
agagttgccaggggggcncnaactgagncccactggatgatctaggaagngcggggaattcgggaacttcatcccactgaaattcctttggcatttggggttttgtttttccttttttccttcttcatcctcctccttttttaaaagtcaacgagagccttcgctgactccaccgaagaggtgcgccactgggagccaccccagcgccaggcgcccgtccagggacacacacagtcttcactgtgctgcagccagatgaagtctctcagatgggtggggagggtcagctccttccagcgatcattttattttattttattacttttgtttttaattttaaccatagtgcacatattccaggaaagtgtctttaaaaacaaaaacaaaccctgaaatgtatatttgggattatgataaggcaactaaagacatgaaacctcaggtatcctgctttaagttgataactccctctgggagctggagaatc

SEQ ID NO: 27063 - DNA, 458 bp, Homo sapiens
  misc_feature (1)...(458): n = A,T,C or G
naattgtagaccattagaccgngcggnggtagtcggcggtagtatagaaaaggactctctggaacatggcaacattaatctgaccacaagctgactggcaggtgctttaaccacaagctctgactccaggccctgtcccctgagctctgccctcggatgtccgaccgcccagagcctgcatgcgccgtggggcgccccaggaccaggagctggtgggtccggggccccctgggcgggggtcccggggcgcccctcctcccttgggacccgttgtcccggtcctggtctttcccccggatctagtattcagggcggaccagcggagcggaccccgacagctgctgaccctctataaccccacaggaactgcgcttcgcttccgagtcctgtgcacagcacctgccaaatacacggtgtttgacgcagagggatatgtgaagccccagtcttgcattgan

SEQ ID NO: 27064 - DNA, 484 bp, Homo sapiens
  misc_feature (1)...(484): n = A,T,C or G
gagttcnagggggnnnnnactgagaccttttgaagngcgttggaannccganaactgtctcttcttcctggagttcccacctctccttctccatctgctgaagtttccaccttccctctcccactggagcaggctcacagcgagccaatttgtcccatattcaatattcagctgtcggagaacggccagaagtcagggcagaagaccaccattcctgccagtgcacttgccatcctgtagaggaagccagacagttttagtgaaaaccccagcatgaccctgtgggctcctcctctacccagagcaccagcagtagtggaagagacccagaaaaaaccctggcccagcgacaaccactgcaggaagccagattcctccaaactgggcagccagaggctgtgaagtcagcctcatccacaagaacctggggctgccacagggctgccagaatatgcctttcatttcttctacaaatgtgttgctt

SEQ ID NO: 27065 - DNA, 474 bp, Homo sapiens
  misc_feature (1)...(474): n = A,T,C or G
cgccgccccgnnnnnttaganatcgataccatagtcagngnggtggaattcgcctcagcagcagctccaagaaatgctggccacttcccaggctttactcacagtttccacgtgtgtggaagtaactatagaggccaaatttgcattatcaactggggactcctggaaatgggggtgtctccaagagatatatttgatacacgtccagagaattcctgaaggaaagaatctggggttgtcaggctgatatcatgaaccccacatttaacacattaagtgaagagaggggacaaaggccaggcttgggaaggaaggagggatcaacaaagcccttacccaggacagataaaaatgatagaatggcagtaaccccatttggagcccccatttgtagtcagcaagcaaagtactggtcctttttacaccttatctaaccatcgagacacgcccctgtggttggtatcattatctcag

SEQ ID NO: 27066 - DNA, 488 bp, Homo sapiens
  misc_feature (1)...(488): n = A,T,C or G
gagtncccgggggggccnntttgaaaccctattgtagacattagtcagtgcggtggaattcgtctcaggcctacttggatgattgtcaccggaggtatagctgtgcccactgccgcgctcacctggccaaccacgacgacctcatctccaagtccttccagggcagtcaggggcgtgcctacctcttcaactcagtggtgaacgtgggctgcgggccagccgaggagcgggtgctgctgaccggcctccatgctgtcgccgacatccactgcgagaactgcaagaccactttgggctggaaatatgaacaggcctttgagagcagccagaagtacaaagaggggaagtacatcattgaactcaaccacatgatcaaagacaacggctgggactgacccccgctcccccgacgcatgtggctccagcccggcctggccgccagggagcgccactggcttcccgccacccgaagggagctctggaccctt

SEQ ID NO: 27067 - DNA, 442 bp, Homo sapiens
  misc_feature (1)...(442): n = A,T,C or G
catcgaatgccgtcactagaccgngcggnggaattccgggcgtgatggcgggcacctgtagtcccagctactcaggaggctgaggcttgataatcacttgaacccaggaggcagaggttgcagtgagctgagatcacgccattgcactacagcctgggcaacaagagcgaaactttgtctaaaaaaaaaaaaaaaatcactgggctttttcatgctctgagcacatctctcgtaaaaacttaaactctttccggggtccgggttggccgtgccgaggaattctggggggcctggctggggtctttggaaaaggggctgccgccgagaacaaaaaccctgacatgcagtttttcgtgctgagggggcctaggggagacacaccaaagggccccacaaaaaagaagaggcttccccgggggccggagaaaaaccccgcgttttt

SEQ ID NO: 27068 - DNA, 561 bp, Homo sapiens
  misc_feature (1)...(561): n = A,T,C or G
agcgtgcnnaatcgancactacttcgagnggcgcaattcggngtgggcaagaccacctgcagctgcagcctggcagtccagctctccaaggggcgtgagagtgttctgatcatctccacagacccagcacacaacatctcagatgcttttgaccagaagttctcaaaggtgcctaccaaggtcaaaggctatgacaacctctttgctatggagattgaccccagcctgggcgtggcggagctgcctgacgagttcttcgaggaggacaacatgctgagcatgggcaagaagatgatgcaggaggccatgagcgcatttcccggcatcgatgaggccatgagctatgccgaggtcatgaggctggtgaagggcatgaacttctcggtggtggtatttgacacggcacccacgggccacaccctgaggctgctcaacttccccaccatcgtggagcggngcctgggccggcttatgcagatcaagaaccagatcagccctttcatctcacagatgtgcaacatgctgggcctggnggacatgaacgcagaccagctggcctcn

SEQ ID NO: 27069 - DNA, 442 bp, Homo sapiens
  misc_feature (1)...(442): n = A,T,C or G
nattgatgaccattcgtccagngcggnggaattcctcaaacccaggtcgacccactcttcccgcccactggcccgccgcagctccctccattggctcgcggcacctgtccgtttcctgggagagttcagcacctcccggcaggaagaggctccggcctcattgggtgcgtgagaagggaagggtggatcctaaaaggtaatactgagccttcattcaaactaaaaggctggaagggaggcagctgcctttgtttgccatggatgggtaggggctgcactgagcagcaccggtgttcttcatccggctgcacccccaacagagctctttcttccccagatcccttttacagttggattctccctcttggatctggctctgccttagtccgacctagagggatcagcttcgcccacgcccactctcacccggaacctttcatct

SEQ ID NO: 27070 - DNA, 457 bp, Homo sapiens
  misc_feature (1)...(457): n = A,T,C or G
gcgccgccccttagagaatacgcatggcggggcanncgaagaagggccttttgcctcccgccatgattcggaggcctccccagccatgtttaactatattttctaaaagtaaagactttaaagaaaggcacaggaggctgggagcagtggcttacatttgtaatcccagcactttgcggggctgaggccggaggactgcttgagtccaggagtttgagaccagcctgggcaacacagcttgactgtgcatgactggagacagtgcgaggtcgccgagtccataagcagcaagaagggcacacagaaggagaaaggagaagcttgctgctggaggagacaaacttgactttacagtgttctccggggtgggacctgactttgacctcatgtatacagatgggcctgactgagctaatccatgcttatgtccgggtgcttaagtcttatggtaatgtan

SEQ ID NO: 27071 - DNA, 468 bp, Homo sapiens
  misc_feature (1)...(468): n = A,T,C or G
aggcgcgnnnnnnnagacctgaagctcccgaagnactgaggaccntcggcactcccgagctctgtgctgcaaccttggggcattgggctctgtctttcggcccctcggggtcagacccctgctgtgttgggggatccgaagtgctcccaagctgcctggaaagcattcaggcggggtcgctagcaagaactcaggctgggcagcggaggcggcacagtgcacacactcctgcaggaacaaccagacaggggctttgggaggggctgcgtgcagggggtcccgcagaacatatgcgccccagtcccgcaggaaggaccgccctgctctctcttggctcactggtaagttgaggtcagatggggagccttgggggataggcgcctatagccaccttcctctgcagctgccatgcacacaaaaccccctgggctccctgcaacctggagctctgtctctgcctactccctg

SEQ ID NO: 27072 - DNA, 460 bp, Homo sapiens
  misc_feature (1)...(460): n = A,T,C or G
ttactgggactttcgaagncgnnnnttngttgtcctcgaaagcgggggaaaaggagggcgngcgaaacacgccgacatttttgagtcggggaagagcgccagtttcgacgggacaagtgcctcacacgatgcggagaacaaccagaaaatcatgcagtggatcattgagggggaaaaaggcattagtacgcaccgcacgaccggccacgggtcttcggggacgaggaagccacagccccatgagaactccagacccttgtcccttgagcacgcctgggccggccctcagatccggacctccgtgcaaccctcccacctcttcatacaagaccccaccatgccaccccacccagctcccaaccccctaacccagctggaggaggcgcgccgacgtctggaggaggaagaaaagagagccagccgagcaccctccaagcagaggacaagatcgcagaggatg

SEQ ID NO: 27073 - DNA, 462 bp, Homo sapiens
  misc_feature (1)...(462): n = A,T,C or G
agcgtgcnnncattataactagagcntgngcggnggcattccaagaaaagagctgggctcccacttattttctccctgtggtgttccggagttctgctccatatccaccagaaagctggcggcccacggctttggcgcatccatggcggcaatggtgtccttccctccccagaggtatcactactttttagtgctggactttgaggccacgtgcgacaagccacagattcatcctcaggaaatcatcgagttccccatcctaaagctaaatggccggaccatggagattgagtctacctttcacatgtatgtccagcctgtagtccatccacagcttaccccattctgtacagagctcaccgggattattcaagccatggtggatggtcagccaagcctgcagcaagtgctggagagggtcgatgaatggatggcgaaggaaggcctcttagatccaaacgg

SEQ ID NO: 27074 - DNA, 211 bp, Homo sapiens
  misc_feature (1)...(211): n = A,T,C or G
ccagagagaagtcagagatgcagcgtcactatgtgatgtactacgagatgtcctacggcttgaacatcgagatgcacaaacaggctgagatcgttaaaaggctgaacgggatttgtgcccaggtcctgccctacctctcccaagagcaccagcagcaggtcttgggagccattgagagggccaagcaggtcaccgctcccgaattgaactn

SEQ ID NO: 27075 - DNA, 465 bp, Homo sapiens
  misc_feature (1)...(465): n = A,T,C or G
agcggtgctncaactgatgactanagcatangcggnggaattcgagagataaaagttgaaaaggttttgatttgcaagagaacaaactttttgaattctccatgcagatggtgcaaatctgcctgtaatcatttttcagctcaaccgggagctgatatcctagagaagccccaaagtaaataagcatccctcccaccccccaaagtcacgcctttaaaaggaacaccgtctgcctaattacgtttgaattatgcaaggagctccgcagaggatggaactttagacaaataattgctccattgtgagcggccggcccgcccggcgcggcctccctccccttttcatcactcgcgctcggaaggcggcgggtctctcagccacctgaaaaccgccgttgggggccgagccagagactcctgcctaattaacctacttttcctcccagtggatgtcaagattttaagn

SEQ ID NO: 27076 - DNA, 471 bp, Homo sapiens
  misc_feature (1)...(471): n = A,T,C or G
ttctgaaggacctcgcaaannnccnntacgtatgacctctgnacagncnggnggaattccgncggggaggcccccactgacccacactcttagatggatgacatggacatggttcttatacaaggaatttctccaggacttgaaggagctcaaggtgctagtggctgacaaggaccttctggacctgcacaagagcctggtgtgcactgctctccggggaaagctgggcgtcttctctgagatggaagccaacttcaagaacctgtcccgggggctggtgaacgtggccgccaagctgacccacaataaagatgtcagagacctgtttgtggacctcgtggagaagtttgtggaaccctgccgctccgaccactggccactcagcgacgtgcggttcttcctgaatcagtattcagcgtctgtccactccctcgatggcttccgacaccaggccctctgggaccgctacat

SEQ ID NO: 27077 - DNA, 473 bp, Homo sapiens
  misc_feature (1)...(473): n = A,T,C or G
cgcccgcgccactgatnacccctcggcccttttgagcctcagnaanngcggnggaannagagcagcgccagctggagcggagctctggtagagttggattgtttgtttacagagttctacctcttcagcgtgataggtcctcacgggcatcatctagaggctgtgagacagcctgggggagacaggatagccatgtttcccactacctcccaaccactggctggtgcaccagcctcctggccttatgtcgcagccacagtgacgtgacctcctaccatccctggcaagctggaggagcagccctgcaaccaagcctgctctaagataaggctttctgtttactaacctggagctgctctattctttcacccttggtcccctttcagctgtctcgcagcaagtactaagtttgccattaaatacacattttgttttgcaaaatgagaagagcttatacatacttcacagtgtct

SEQ ID NO: 27078 - DNA, 562 bp, Homo sapiens
  misc_feature (1)...(562): n = A,T,C or G
ccatcgacattcaatcaccnatccgcgnngggcaanncccaggggggcaccgtccaagtgaccttatttaaccccaaccagactgtggtaaagatgttccttgtgacctttgacttctcggacatgcctgctgcccacatgaccttcctgcgccatcgcctctttttggtgcctgtgggtgaggagggaaatgctaaccccacccaccgcctcctctgctacttgctgcacctcaggttccggagctcccgctcaggccgcttaagcctgcatggagatatccgcctgcttttttcccgccggagcctggagctggacacagggctcccctacgaactgcaggctgtgactgaggcccctcataatccacgttattcacctttgccctgattgccagcactctgaacccatgcgggctaatgacctgcccatcctgctccatcttagagaacatatatggagagacagcaagagacccttcaggcttgaattaaagccctcaccatgctcacgcccaaatggattatntggggggttaaagcttctgattcttactacaccn

SEQ ID NO: 27079 - DNA, 479 bp, Homo sapiens
  misc_feature (1)...(479): n = A,T,C or G
ggtncaggnagnnnnnnaattgagaccactcganacccctggccagngccgnggaattctggactttgtggttgaataagacacctggcctggccctcctggagcttattttagtaggtcacacaagcagtcattggtaaatttgggattcaaacaaatctgttaggctcaaacctgtctgttatttgtcctccaagcttcatataaactgaggagccttaaagggtaaaaacttcacgagcagcaaagtttcaaaaaaagatcagcacgaaagctcttttccagattttatcctgaaggcactagctactttaagctattttttattatattttgcccttgcagttggcgtttgatttctcactgaacattcgttgtcataattatagacactatgtgactatcaagggcataatattctttcatgctgcatttttattagatggcacctcaaagttttcccaagtaggtgggtttta

SEQ ID NO: 27080 - DNA, 456 bp, Homo sapiens
  misc_feature (1)...(456): n = A,T,C or G
nttttgatgccttccngaattgangcctttaaacagncnggnggaattcctgtaatcccagctactcgggaggccgaggcaggagaattgcttgaacccggtaggcagaggttgaggtgagccaagattgcaccattgcactccagcctgggcaacaagagcaaaacttcatctaaaaaacagaaaatattaagatgattaccatgtgaaaacctttttaatattcaggatttggaaagtatagttgccccaggcatgtggttgttgccttaggtcctgcgaatattgctgaaaatcggattttccacattcactttcttccctgttttagggaagaaaatgatcatagacattcgattttccaaattggcgctcttattttcaatgctaattggattacttctcttccaaccctcctgcccatccatccatcccagtccccaggcatcttaacct

SEQ ID NO: 27081 - DNA, 466 bp, Homo sapiens
  misc_feature (1)...(466): n = A,T,C or G
agacgtgnnnnntactgagtcgatagctcnncnnngngcggnggaatnctnggncttctcccctttcccactccatctctcatgtcctcctccccctgtgtgtgaaatcagtggagtggcagggtcccagccagtgagtgagaagcagtcggcagctgagctagacctcgtcctgcagcgacatcagaacctccaggaaaagctggcggaagagatgctaggactggcccggagcctcaagaccaataccctggccgcccagagtgtcatcaagaaggacaaccacgtgtggggactgggggagctctccagcctctgccctggggcatcagagaaggcttcccagcacaggagcattgtggctggggctttgcgggatgaataggagtttcgtagaaggcaaaaatggcattcctagcagagggcacagcaccagcaagcgacaagaggtgcaggccagtcccat

SEQ ID NO: 27082 - DNA, 563 bp, Homo sapiens
  misc_feature (1)...(563): n = A,T,C or G
ccattcgaaattcgnatcactagtccagcgnggnggaattccnctgccacccactgtgcaccgagcatgagggaggcaatgaccaatctcttcagtctgtgagtcttctgtgtagaggtgtctggggtcacccagacccgatatggctgtgatttggggtcgtctcacctggggagccatgacggggagtgaacacagtcgattagtccagaaggcagacgtggaagtcagtggcgccgcccactaatattttggcctccttttccagacgcatttaggattatgctttccctctctctccaagttaggcccggccatgtgacctgctttggccaatgaaattctagcctttaaacacgagttcatgatgcttcctgctttggggattgtggatgtgtgttgacacctgggtccctgtcccccagtgatgacaaagagcaaaggcacctgctggcccacgctggacacacatgtgagaaagacatgcatctgtgaagtgctcanctgctgtggtgtggggctgtttttacacnagccagccaagcccagcctgactgatacct

SEQ ID NO: 27083 - DNA, 558 bp, Homo sapiens
  misc_feature (1)...(558): n = A,T,C or G
ccattgatctacagtcccaaaggngcaancgcannaccatagagncagcgnttgacgatccaacttacgagactggagagacgagagaatatgaagtctctatctatgtgggggcagtctagggaagtcaactcagacttgcaccacagtccagcagcaaggctgcgtgcttcctgctgtccctccacctcctgtatataccacctaggaggagatgccaccaagccctcaagaagttgtgcccttccccgcctgcgatgcccaccatggcctattttcttggtgtcattgcccacttggggcccttcattgggcccatgtcagggggcatctacctgtgggaagaacatagctggagcacaagcatcaacagccagcatcctgagcctcctcatgccctggaccagcctggaacacactatcagagcaggagtacctttctccacatgaccaccatcccgccctggcatggcaacctgcagcaggattaacttgaccatggtgggaactgcaccagggtactcctcacagcgccatcaccaatggccaaactcctct

SEQ ID NO: 27084 - DNA, 561 bp, Homo sapiens
  misc_feature (1)...(561): n = A,T,C or G
cattcgaaattcgattcaccagtccagcgnggnggaattccncggacagggacccaaaagcttgacgtcactgaacagggctgggtactggcagaacaggaagatttggtcagaggtgacctcagtgttccctccaggggcatccaggcccctctgacctggggagaagaaggcccatgctcaggcccacctccctcttcccatcagagcccatgcgtcctgggcaccaccacttccactctgcttttcgaggctccggagggctcttcctgctgtgaaaggaaaggagaagaaagcctgtgggcaatggcaacctctgagtctggcattcttgccaatggctggccagcgaggagaatctcccgagccctgacacacaaaggcattttgtggctgcagaggaaatgggttggctctgaacaaagatgcagtttctagggccgtggccccaaatcgcttccccgagagtgagatttaacactgtaacaataaatactactgcacagcnnnnnnnnnnnnnnnnnnnnnnnnnnnnnnnnnnnnnaaaaaaaaaacggggct

SEQ ID NO: 27085 - DNA, 560 bp, Homo sapiens
  misc_feature (1)...(560): n = A,T,C or G
natcggaattctantnccagtggnggaanncggccgntctcgtgcggggagtgtggcaagggcttcaccagacaatccaagctcacggagcacttgcgcgtgcacagtggggagagacccttccagtgcccagagtgcaacaggagcttccgcctgaaggggcagctgctcagccatcagcgcctgcacacgggagagaggcccttccagtgtccggagtgcgacaagcgctatcgcgtgaaggccgacatgaaggcccaccagctgctgcacagcggggagatgcctttctcctgtgagtgcggcaagggctttgtgaaacactcaaagctcatcgagcacatcagaacgcacacgggagagaagccttttcagtgtcccaagtgtgacaagagtttccgcctgaaggcgcagctgctcagccatcagggcctgcacacaggggagaggccttttcactgccctgagtgtgacaagaacttccgggaaaggggacacatgctgaggcaccagcgcatncacaggcccgagaggcccttttgctgtggcgattgtggaag

SEQ ID NO: 27086 - DNA, 523 bp, Homo sapiens
  misc_feature (1)...(523): n = A,T,C or G
gngaggcacggngacatggtgcagctggtccacggcatgaccacccgctccctgaacacgcatgatgttgttgcccccctgagcccccattcacaggaggtctcctgctacattgactataacatctccatgcccgcccagaacctctggagactggaaattgtgaacagaggatctgacacagacgtctggaagaccatcctctcagaggtccgctttgtgcacgtgaacacttccgctgtcttaaagctgagcggggctcacctccctgactgggggtatcggcaactggagatcgtcggggagaagctgtcccggggctaccacgggagcacggtgtggaacgtggaggagcaccgatacggcgcgagccacgagcagagggagcgggaacgggagctgcactcacctgcgcacgtggacgtcagcaggaacctcatcttcatggcgagattctccgagctgcagtggaggatgcttgcgctgagaagtgatgactccgaacacaagtacagctccagct

SEQ ID NO: 27087 - DNA, 435 bp, Homo sapiens
catccgaggtcaggagttcaagaccagcctggtcaacatggtgaaaccccgtctctactaaaaatacaaaaattagctgggcatggtggcgcatgcatgtaatcccggctactcgggaggctgaggcaggagaatcgttggagcccaggaggtggaggttgcagtgagctgagattgtgccactgcactccagcctggacaacaagagtgaaactccatctcaaaagaaaaaaaagaaaattaagacagtcagtacagtctatatcctacggcagtctgttcaactgtaaactgattttttaccttggaaactgttttagtatgctacctcaaacagcctgttcacttttagtaattttgctacaaattttattttactacaaattttgtagttattttactacaaaaagattagaaaacatgtacttaatccct

SEQ ID NO: 27088 - DNA, 563 bp, Homo sapiens
  misc_feature (1)...(563): n = A,T,C or G
catcgaaattcgatcaccagtccagcgaggngcaattcaacttcctctacctcatagagggtatcaacaaaaacccacagctaacatcatacttaatggtgaatgactgataacttacccttaggatcaaaaataagacaaggaagtctgctctcaccgcttatattcaacattgtactggaggctctagccaggcaattaggcaggaaaaagaacaaaacggattcattttagaaaggaagaagtacaactatttctgtattcagatgacatgatcttctatatagaaaatcctaaggaatccactaaaaaacctattaaacccaatatgttaagttcaacaaggctttaggatacaagcccaatgtacaaacatcaattatatttctacaagctagaaataatctgaaaatgaaattagaaaacaattgcatttacaatggtatcaaaaagtttaaaagtactcaggaatacatacaacgaagtgcaaagcttatataaattctgaaatctacaaagcatntgttaaagggtgcagtggttcacacctctaatcccagctg

SEQ ID NO: 27089 - DNA, 586 bp, Homo sapiens
  misc_feature (1)...(586): n = A,T,C or G
cgccatcgacccccctnnnnnataggatcatcactccagagnggngcaattcgaatatttttagatttcaagggaaatacaccggcgtcattagattgctgcattagatcactgcattcctttcagtgatgtcatacctttgggaagctggattttcagtgcttgctctgataaaaagcaagtactgcctgaaaatcagtgtggaacaggaaatgaggctgtcagtgttcaatctgagtccaaagtttgaaaagtatgcagtgcccaacaggcatccagtttttagaacttaaaatacttactaagtgctggctcttactgcttaacggaggcaactacagttgttagatacttcttttggccgaggtttaccctgcaagatcactgagacactaaagattctttgagccaagaaagtttggaaccgttgacataggacttcttcatagaaacttgtctgtggagccaaagagagcctagatgattgngcggtagctaanagaggaacaaaggagcatttattntataataaaagagacagatatgttgtatgttgggggagggagcagctgataaagaaagcacn

SEQ ID NO: 27090 - DNA, 526 bp, Homo sapiens
  misc_feature (1)...(526): n = A,T,C or G
aattcaacatcatttccctcatcgcaatgctccctgcttccctctcatttataagtctggagcacattcttggcattgagactctcatgcttggacccttctcttctcttggttcctggcacggtgaatttggccatttgctgcagtgatgggccattccagggagtgccccatctaaccagcagcaggccagctgtccaaggagccttttcaaaagggaagacaccctgggagggcaagtatttgccaagtaactaagtgtccccttgtttccaggtgcttagtgtatgtttgtgggtgcgcacagcagtgaatacaaggacctattgtgtcctgtactctaaagctggctgagggcctggtagccagggtgggtcacgattcactgcaactcaacacatttttattgagctcctaagttcaacaccctgtgctcagcctgtaggaaatgtaaagataaggtccgcctgagtttcaagagtcttanattctaataggggataggcanagagacagaacaancang

SEQ ID NO: 27091 - DNA, 579 bp, Homo sapiens
  misc_feature (1)...(579): n = A,T,C or G
cgcgcatagatcactatcagagtggtggaactctggacatggcggaatgtaatccgtggccccgaattgtactgtcagagcacagcagccttactaatctacgggcctggatgctgaaacatgtacgcaacagccgaggcctaagcagcactctgaatgtgggtgtcaacaagaagaggggccttcgaactccacccaaaagtcacaatgggttgcctgtctcctgctccgaaaacaccttgagtcgggcacgaagttttagcaccggcacaagtgccggtggtagcagcagcagccaacaaaattctccacagatgaagaattcccccagctttccttttcatggcagtcggcctgcagggctgccaggcctgggctctagtacccaaaaggtcacccaccgggtgctgngccccgtcagaggtaagccagtctgggagcccctgcaacatgtgttcggttgtctggggcattgctgggggaagtangagcttgaagatatactggtggcccangaccaaggggtgaatcaataanaatagttggtagcagaacccaaaaaaaaaaaaaaaaaaaaan

SEQ ID NO: 27092 - DNA, 482 bp, Homo sapiens
  misc_feature (1)...(482): n = A,T,C or G
tggagtgcnngnatcgagaccctagagagcgctgggagngncgnggaannctttntcttctaaaatcagctttgactgctccccactttgtgtgtgcgtgctttggcgttttatctgtaaacttggtcttatgcgggtctccatgctctcagagatactgtgatccacctattaacatctttttttccccctaaaaccttttcgtttccacttcttcatctcttaccagccattcagcttctgtgggctgtacctaagggtactgatggaggtagggtccttgtattctgcatgctactttcctatggcattctctgaagctggattccacctctgttcttccaactgaatggtgggatccaaccatgtatgagtagatctccctgagtgagctgagatctgatgtaagagccccttgtcccgatgtcatggccagtgcctgtgactggctgcctaatagtacttactggcttctcttgcag

SEQ ID NO: 27093 - DNA, 559 bp, Homo sapiens
  misc_feature (1)...(559): n = A,T,C or G
cgcgcatagatcactgtcagagtggtggaactcgtaccctgtagattgggcgccaccaccagatccccctcccaggccttcctccctctcccatcagcagccctgtaacaagtgccttgtgagaaaagctggagaagtgagggcagccaggttattctctggaggttggtggatgaaggggtacccctaggagatgtgaagtgtgggtttggttaaggaaatgcttaccatcccccacccccaaccaagttcttccagactaaagaattaaggtaacatcaatacctaggcctgagaaataaccccatccttgttgggcagctccctgctttgtcctgcatgaacagagttgatgaaagtggngtgtggcaacaagtgctttccttgctactttagcacccagcagagcactggagctggctagccagccagccatggtgatgactcttcatangggatctcaccctccactttatgcaagaggcccaggtgcacagatatacaccattacccaaccactctgacagtctcttcagttcagcgatgctagagactgctc

SEQ ID NO: 27094 - DNA, 484 bp, Homo sapiens
  misc_feature (1)...(484): n = A,T,C or G
ggcccgcttttgagaccctagtctttgtgggcaattcctcaggagaaacagattgagtcaagtgactatgacagctcttccagcaaaggcaaaaagagtgaggagggggcggggctgtgagaggtggggcgaggactgaaagggagaagaagtcagctcttcatctggtggggagtttggcaccaggttggaaagggggagagaagaggacttaacccatctttctgtctccctgccttctggctttctccctcttccctagaaggccggactcaaaaggagaagaaagctgctcgtgctcgttccaaagggaaaaactcggatgaagaagcccccaagactgcccagaagaagttaaagctcgtgcgcacgtgagtgattcagggagccctttgccggatgacatcctcttctctcccggtgccccactcccagcctgcaccgccccctgccgctttctatatgtctgcgccaagaactcttn

SEQ ID NO: 27095 - DNA, 488 bp, Homo sapiens
  misc_feature (1)...(488): n = A,T,C or G
aggagggcatggagaccccanntttcgagaccatagtccatgtggtggaattcatccaccctgatttgatatcccacttcctgacagatcagaggctgtgtctttaggcagtggaggtccaggagcagagcctggggctggttcacagctaaacccctccttagggcagcccagagtagggcctcagctggcaagtccacaagccctgctggggccctgcttgttggcctgacccctccctcaccaggcagccagccaaggtggttcctgcttcacccactcagtcatcagcctcaggctgcccaaaatgcctctgacaccagatttatatcttctgggcggcttctttaaatccagcccttcacccgccccctagagaagcagtgaaaccccttggctagtccagctggaagagctagaccgcaggagccgcgccgtcttcctaacctcgcctcggccttcgctccacagtggagagtgggagccta

SEQ ID NO: 27096 - DNA, 475 bp, Homo sapiens
  misc_feature (1)...(475): n = A,T,C or G
tggaanacnnnnttcgattgacactacttagtgtggnggaattcggtaagaacacctttaattcacaactaaattcagcacacatttgaatgtcatccatgtgccagccactgcattagatgttggaaatacagatcaacaggaattgggccccagtcatcaagaatgttatgacctgcccagatacaagcaactaactatataatactgtgtaaaatgtgaagtcctacacaactattttccagttaacatttcagcatttaaaaaaatatacatcagtttagtagtatatatactttttttctttttttgggtagggggcagtcttgctctgtcatcttaggtggagtgcagnggcgtgatctcggctcactgcaacctccgcctcccaggctcaagcgattcttgtgcctcatcctctcgagtagatgggactacaggtgcataccaccatccccagctaagtttttgtatt

SEQ ID NO: 27097 - DNA, 578 bp, Homo sapiens
  misc_feature (1)...(578): n = A,T,C or G
cgcctcgaccccctnnnaggaacactatccagaggggcgattcctgtctcaagcttccagcctgtaggccagccacctgacacaaggcaagccaacacttactcccctgagctagtggggcccacagagaatattctcactggtcacaaagccaagctttcagtacataaaacaagtaaaagaagaatctcatcttgtttttgcttcacggactcacaacaaaggttgtctaaacagacaccagtctggtgagaagtgtgcactcaccagtccatgaggccagctcgaacacaggactataggccctagagctgggctcccccttgtagcatatgacacagaagataaagacaaaggagaacactgaccatctctgggaagaatgggatcaaatagaaaacaagaatacttgaaacagaagatgccaaagttgccatacccaaagaatgacttcacacaaatattctctcctgctaacgtacgtgtagaaagaaaaaagacaagagactcatcagtcttgcttcaagcagaccctgcaggcagagatctaggacactgaagtggtaagaatgtctact

SEQ ID NO: 27098 - DNA, 426 bp, Homo sapiens
tccttcttcaggttctttcatagaattctgactttgctcccagtgagaaggagtgcatgatgaaggatagctggctaattgagcagtgggctgtgaggtcacatcccactggggagggtgagacatgttaatcaggcctaaaggcgagggagtgtggaatttggccccaccatccagggcagtggatggcctagtggtatggatctgaggcaggctatccagcttttctggctctgtatcttaccgaattcaaccttgggcacattactgtgtgcctcagtttccttacctataaaactatcggcataatagtgtcacaacattatatggaagcaaacatctcttgaattaggtttggggcctctggtctctggagtcaaattgagttattaacaatcatcctgtccccgccaataaaagtttatt

SEQ ID NO: 27099 - DNA, 475 bp, Homo sapiens
  misc_feature (1)...(475): n = A,T,C or G
attggaccctagcattgagggcaattctggggtggtggggccccgggcggcgttgaccatgacccagcagggcgcggcgctgcagaactacaacaacgagctggtcaagcatagaggagctgtgccagaagcgggaggagctgtgccggcagatccaggaggaggaggacgagaagcagcggctgcagaatgagatcctggagagctcccagactttgctcagcgttctcaagagggaagctgggaacctgaccaaggctacagccccagaccagaaaagtagcggcggcagggacagctgaccagaccacgggcagggcctgcctccgtgtgcccctcagctcagccccagcaagtgtgtgctcagagcatctttgttcttcacggcagcagctaccttccctcactgtctcangtgccgagaggggcaggtgccagcctccactggcatcagtgacaagcccagggcacagcc

SEQ ID NO: 27100 - DNA, 479 bp, Homo sapiens
  misc_feature (1)...(479): n = A,T,C or G
attcgagacccctagttctgtgngcngcaattcggcaccctcatcacatgtgtggattctgggattctcagagtctggcatgacaaggacaaggacacatcctctgacccagtgaggctcccctgccctgatggttgggggaggtgggctgggctcctggaactgagagtgggccctggggtgtgtaggatgcgccaagacccagcacacccccatgtggttgccacaggtgggaaagagaatgctttgaagatatgggacctgcagggctctgaggaacctgtgttcagggccaagaacgtgcggaatgactggctggacttgcgggttcccatctgggaccaggacatacagtttcttccaggatcacagaagcttgtcacctgcacagggtaccaccaggtccgtgtttatgatccagcattcccccagcgccggccagtcctagagaccacctatggagagtacccactaacagg

SEQ ID NO: 27101 - DNA, 487 bp, Homo sapiens
  misc_feature (1)...(487): n = A,T,C or G
ggaaaaaaaactggagaccccnnnnttcgtcgtccactatccgtgtggtggaattcgccgcctcccacagttacaaagataactggtggcagttctgtgcctaagctgacatcaccagttacaagcatatctcccattcaggcctctgagaagacagcagtgtctgacattttgaaaatgtctttgatggaagctcagattgatacaaatgtagaacatatgatagtggatcccccaaagaaggctcttgccactagcatgctcactggtgaagcaggatcattaccctccacccacatggtggtggcagggatggcgaattccactccccagcaacagaaatgtagagagtcctgttcgagtccatccactgttggctcttccctaacgacaaggaaaattgatccaccagcagtgcctgcgacaggccagttcatgctattcagaatgtaggccaaaagaaagctgaagagagtccagcagaaat

SEQ ID NO: 27102 - DNA, 474 bp, Homo sapiens
  misc_feature (1)...(474): n = A,T,C or G
tggaggannnnntttgatcgacgtcactagtccgtgcggtggaattccccgactctgcctacatctgccactgcccacccggtttccaaggctccaactgtgagaagagggtggaccggtgcagcctgcagccatgccgcaatggtgaggcctggaggcctgaacggcgagggatggggtgggggtcctggatggctcagacagtccagggttggaatcctggctttgactcttctaaccctagggcctggggacctgaccttccacctgcaagcctgtaaaatgggcaaggagacattccctatctcataactattaatatttactgagaatttactgtgtgccaggccctattctaggcactgaggatacagcagggaatgaaacagacaaagtccctggccctgcctgatagagctgaggtgcctggtgtgctgaggataagcagggaagccagtgtggttatactgagaa

SEQ ID NO: 27103 - DNA, 476 bp, Homo sapiens
  misc_feature (1)...(476): n = A,T,C or G
nttcgaagtccctagtccttgtggtgcaattcctaagatgtgtacatcatggggccacagagatttcctttgaggagcatggtagagtccacagccatggctgaagtcagtggacaccgaggggacaggactgcaggccaccaggggcctctgcccagagggaggcagagaggatggcggccacgggtgctctcctggcatcctcatggggtgatgccaggccgggcacttcaaaacaggctcagccgactgggagatcctttgtactttgcacagttcacacacacaaacacacacaccctatcccaagtgtttttgttagacacaaatgtcagcgtgtgattttggaagacttgtcagtgatgacaaaccatgatgcctgtgtttctgagtctttaaataaaaacgaacatggaaaaaaaaaaacaaaaaaaaaaaaaaaaacaaaaaaaacatgaaaacaacccaccccacgc

SEQ ID NO: 27104 - DNA, 454 bp, Homo sapiens
  misc_feature (1)...(454): n = A,T,C or G
tgcgctcannnaaaactgagnactgacgtacgtgcgaaggaacncgattaatttacagagacattgtcttagtcattaatgaatgtgaaatttaaaattattttagagttgtagcagatgtcagtttagcataccttccactaaatattcagcagttcttctgaatttaaaacaaatggctctttggcaaattgtcttagagctaattctgtgttagtttaaaacatacacatacatttctctaaattataaatgttttctggaaacgattctcctgaaattaaaccagtgtatgctttttatcccaaggtattgtttcctctaagacatactgggaacgcatatgtgggaatgttcctattttactcttccctctttctctgaatggtaatacccgattgtaagattctcctgtgcagtttggtttaaaataacctgcatccgatatggctaa

SEQ ID NO: 27105 - DNA, 477 bp, Homo sapiens
  misc_feature (1)...(477): n = A,T,C or G
tgagggannnnnnnnnattgagatcattgtcagngcggttgaattccgctcaccggcgacctctcgcaggagccacccggtcgcgtgttcagggcgctcctggtcatatccgacggcggccgtcccccgctcaccaccaccgcaactgtcagcttcgtggtaacagcagggggcgggcgtgggccggctgcgcctgccagtgcaggaagcccggagcgttcccgcccgcctggctctcggctcggggtgtccgggtcggtgctgcaatgggacacgccgctgatcgtcatcatcgtgctggccgggagctgcacgctgctgctggccgccatcatcgccatcgccaccacctgcaaccgccgcaagaaggagccctacggtgcctccccgggttttggaaaggagccggcgccccctgtggcggtgtggaaaggacactccttcaacaccatttctggcagagatgcagagaagttc

SEQ ID NO: 27106 - DNA, 238 bp, Homo sapiens
ttgattatgggagcaatggcaatcactctggctggaaatggaacatttaacagggcaaaactgttgaacgttggggtgcgagaggccctgcgtgatgaagagtgggactgcctgttcttgcacgatgtggacctcttgccagaaaatgaccacaatctgtatgtgtgtgacccccggggaccccgccatgttgccgttgctatgaacaagtctggatacagcctcccgtacccccagg

SEQ ID NO: 27107 - DNA, 496 bp, Homo sapiens
  misc_feature (1)...(496): n = A,T,C or G
cgacgcgccccccnnnnnnnnaatttgagnatcattagnccagngcggnggaattgaagtccattagtcagtgtggnggaattccgggaacatgagagagaggtgatccaaaaggccattgaggaaaacaacaacttcatcaagatggctaaggaaaaactggcccagaagatggaatccaacaaggagaacagggaggcccacctcgccgccatgttggaacggctgcaagagaaggaaccgcctgctgcgcggtgactcccgggacctgatcggtggcctcgtcccatggacaagcacgccgaggaggtgcggaaaaacaaggagctgaaggaagaggcctccaggtaaagcctagaggccaaagaactttccaggtcagccggacagctccagcagctccacgttccaggcagcctcgcccgccggctgcgctcccagcactggggtttggggggaggggggtggccaaggggcgtttcctctgcttttggtg

SEQ ID NO: 27108 - DNA, 488 bp, Homo sapiens
  misc_feature (1)...(488): n = A,T,C or G
cccgggaccccnnnnnnaattgagntcctttgtccangcggnggaattgatgactcttagtccagtgaggnggaattccagtggtagccaggatggaaggcacctcccaagggggcttgcagaccgtcatgaagtggaagacgggggttgccatctttgtgggtgtggtggtctaccttgtcactggcggtcttgtcttccgggcattggagcagccctttgagagcagccagaagaataccatcgccttggagaaggcggaattcctgcgggatcatgtctgtgtgagcccccaggagctggagacgttgatccagcatgctcttgatgctgacaatgcgggagtcagtccaataggaaactcttccaacaacagcagccactgggacctcggcagtgcctttttctttgctggaactgtcattacgaccatagggtatgggaatattgctccgagcactgaaggaggcaaaatcttttgtatttta

SEQ ID NO: 27109 - DNA, 480 bp, Homo sapiens
  misc_feature (1)...(480): n = A,T,C or G
ccccccccccccccccccagtcgaccnccntnatagatgaccttagtcagngcggtggaattcgtgcccaccaagcccggcccccaggtcgctgccgcccccacctgcacacgtgtatgctgcatccagtactcaagagatgggcagtggctggcctgtgggttggccaaccatctgttactcgtttttgatgccagcctgactgggacacctgctgtgttttcagatataaacagaagagcaagtccaagctgatttgcaggctctccacgacgggtgcagtagacatgaccagtttatcggcagtcaacgacttttattcccacatcgtactcgcagctggccggaacaggaccgtggaagtgtttgacctcaacgccggctgcagtgcagcggtgatagtggaagcccactcacggcctgtccatcaaatctgccaaaataaaggttcatcatttacaacccaacagcctcaggctt

SEQ ID NO: 27110 - DNA, 521 bp, Homo sapiens
  misc_feature (1)...(521): n = A,T,C or G
agaaaaacaaaaattagaanncccctcgatctactacctccgagnggngcaattccatgggcgagggcacttgtgagaagcgccgggacgccgagtatggcgccagcccggagcaggttgcagactatggcgatgaccactcanatagaggcctggtggagaaccacgtggacagcacccatgaacatgttgggcgggggaggcagtgctggccggaagcccctcaagtcgggtatgaaggagctggccgtgttccgggagaaggtcactgagcagcaccggcagatgggcaagggtggcaagcatcaccttggcctggaggagcccaagaagctgcgaccaccccctgccaggactccctgccaacaggaactggaccaggtcctggagcggatctccaccatgcgccttccggatgagcggngccctctggagcacctctactccctgcacatccccaactgtgacaagcatggcctgtacaacctcaaacagtgcaagatgtctctgaacgggcagcg

SEQ ID NO: 27111 - DNA, 560 bp, Homo sapiens
  misc_feature (1)...(560): n = A,T,C or G
ngcgtgcnnnattgannccctttcgatcactagtccgtgtggtggaattccacggccagagtcagatgacctcatctcacatccagcaggtgaaatgcagtctttgatcccttgaaacccaccctctaggaccaaggtcactgcagtattggataggacctcagggagttagcagggggctcatggttaagagtgtgaactacggcttagacctacagggttccctgcccagctcctccacaaaccagctgtgcaaccctagacaagtgagttaatgtccctgggcctcagtttcttcttagtaaaatgtgtgtagccatagagggctgttatgaggattcagtcaaatgacacatgatgtcttgggcacacctggcgtggattatggcgcctgtaggagcaggagggcttcctggaggagggggctagttgaacagagtctagaaagtatagattgggaagagcactctgggaggcaggatcaccatgtgcaaaggctcagagaaggcccccactaccttctggnaatcanggggattctgtgtgtccaaggcattggn

SEQ ID NO: 27112 - DNA, 477 bp, Homo sapiens
  misc_feature (1)...(477): n = A,T,C or G
gatgggggnnnnnnnnaattgtagtcattagtccgtgcggtggatttgacttcataagctgactgagctcaaggcagtgttggagcgacaggagtcctaccgcttctactcaagctccctgctggtcatttatgatggcaaggagcggcccgaagtggtcctggactcagatgctgaggatttggaggacctgtcagaggaatcagctgatgagtctgctggtgcctatgcctacaaacccatcggcgccagctctgtagatgtgcgcatgatcgactttgcacacaccacctgcaggctgtatggcgaggacaccgtggtgcatgagggccaggatgctggctatatcttcgggctccagagcctgatagacattgtcacagagataagtgaggagagtggggagtgagcttgctagctgctccagtacttgagagcgactctgtgtcccangcacagctgtgctgcgtcagggag

SEQ ID NO: 27113 - DNA, 441 bp, Homo sapiens
  misc_feature (1)...(441): n = A,T,C or G
nttgatgacactcgtcagtgcggtggaattcgattggcaggagctgcgatgctcacacttgcctcgccgaccgccatttcacatccagcagaggaggcgggggcagccgctgagacggtttttcacaaggtgcattttagtggttaccaggttgccacgtatttgaagtggtgtgagagctactcgtttggaaccgttgtggattttcaaataggaaaatcaaaatgcccaaagagacagctcactggaaatgacctcattcttgatggctgctgctaacttacggtgagatgctgggtccctgcccaataccacatggacatccaatcaatttaccgagggacaagtccactcaagagcatcatttagaagagggaaaaggcactggggttatttgtttttggagtatgtgcttaaggaaatctagagtattcccacgag

SEQ ID NO: 27114 - DNA, 528 bp, Homo sapiens
  misc_feature (1)...(528): n = A,T,C or G
agatcacccnnnnttcgaatcactgtcgagtgtgccggaattcctcagctgcaggggtaagatcaacagtgttaagattaaagccttgtgatgtgctagccactacgctgaggatatgccgtgtactaaaattcctcaggactcctcacagctgccctgtaaggaagcggccatggccgggttctagcgatgcgaggccgaggctcggggcgctgagtagcctatcgcgtcgccgaggagagctggcacgtgaaccccttgtcgtttgccgtcagaggtgttatgtggtggccctcattctccatgcatggagcagactctaggatctgcagttactgtatgatgagcccttctgagtattttgcttgggtggacagtttatgtgtcaggtatgtgtatttataattaaaatcaaatattattacataggctttgcacctggcgagggaacattgagagtagttaatctctagactggaatccatctggaagaccactcaataacttgtgattagctggacctggtga

SEQ ID NO: 27115 - DNA, 567 bp, Homo sapiens
  misc_feature (1)...(567): n = A,T,C or G
agcgagctnnnaatcgaatcactagttcagtgtgcngcaattcggngaaggtgtggcttcaggagaacctgctggctgtgggcatctttgggctgtgcacggcgctggtgcagatcctgggcctgaccttcgccatgaccatgtactgccaagtggtcaaggcagacacctactgcgcgtaggccgcccaccgcccgcttctctgccaaaaggacgcccacggggagatggccgcacccacagctgcctttcccaccaccagcctcggtgctctgccccatgctgggaggagggagggagggacaggtgcctggagcccccggaaccctgtttctggaaggccctggctcaggtggcttcagggcctccggaccccccctgggaggggtggccacgtgctggctgcggaacccagggcaggggtgggaggggcctccagcactttntatatttacgtattctccaaagcagtgttcacacgggagccagcctgtggcccccagcctcctggaaaacaggttggcgctggaggaagccggtcttggcatcctggaggttgccccactg

SEQ ID NO: 27116 - DNA, 552 bp, Homo sapiens
  misc_feature (1)...(552): n = A,T,C or G
attcgaacactagtgagacaggtgcaanncgagccacctggccacagtcctcccatggagggcctgccgtgacgctcagtggagagggcagggcctgtgtctccacttatgccacacagtgatgaggaaaccacagatggagcttcttgccgataatactgactctagcccatgattgccttgcccaagccaaagaggaaggttaggttggcttgtcgagcccttgagcgttgggagatggggtgggaaggaggtgagcccctgcagagagttgggtagtgtccttcaggaatgaaaggaggggcaaaggagtcaccagaggtcctgcatttccatcagggtttccacagtcatcagggcttctctcttgagttgctgataggagatgtgagttatgcccagagatgtcttatcgtgaggaaaaagaaaacttcttttgttcacattcangactctcagtgccatatgaagtagcanaaggcagtatcggccagatcagtggtacattgattctaaattacagggtccccatagacaactattttatgtgtg

SEQ ID NO: 27117 - DNA, 454 bp, Homo sapiens
  misc_feature (1)...(454): n = A,T,C or G
attggagactcgatgacatctaggccgngcggnggaattcgatgcacacgcggtggatatacatacaatgaaacactgctcagctgtgataaaggaacaaatctattcgaaatcaatagtccctgcatcaggaggcaggattccggagaatataccatgcatgtccttttataagtgacaaacttgctgtctattattagaactgagagatcttttttgaagatgagcggcatggaattgacatgatttggagtgttatggcacttcctttgaataaaaaaatcgaagttgctaacaagttccatgtacttaaaaatattgggacagagcgctcaaagctatgaaaagttttgggccacccatgaatatgagataagattaacaagagaggagaaggaagtgaaaaatatggctttccatgcatttccaattgtatgaattaccattgaaggcn

SEQ ID NO: 27118 - DNA, 439 bp, Homo sapiens
  misc_feature (1)...(439): n = A,T,C or G
tttgagatcgatgtcattgcggaggactnccctagaatccttagagtctgaattcctttagctgggaacagctgtcatggccacccctggataacatttgccaccaagtataaatgctggatcttgggttccaggcagacatcatccaggtccatctggaactttcagtgatagctgccttcagccagcatgtttgggggactctataatagcagcttgagatcagtgtctagaagactgttctgcaatttgctgccaaatgcatcttaggtttttaaaggcattgtttcttgctcatgggggctcatttattacatagtcccctcaccccactaatggataatgggaggaaaagctgctgctttcttcagcatcaaagcctttacttgagaatctgcctcccttcatggcatgcgtggattctgcagctgcgagtaac

SEQ ID NO: 27119 - DNA, 575 bp, Homo sapiens
  misc_feature (1)...(575): n = A,T,C or G
gtanttgcccnccggcccccnaattgagccccctatggaagcactatccgnnnggggcaattctgctgaccagcgcctgtcttcagactgtgaagaccagatccgaatcattatccaggagtccgccctggactaccgcctggatcctcagctccagctgcactgctcagacgagatctccagtctatgtgctgaagaagcagcagcccaagagcagacaggtcaggtggaggagtgcctcaaggtcaacctgctcaagatcaaaacagaattgtgtaaaaaggaagtgctaaacatgctgaaggaaagcaaagcagacatctttgttgacccggtacttcatactgcttgtgccctggacattaaacaccactgcgcagccatcacccctggccgcgggcgtcaaatgtcctgtctcatggaagcactggaggataagcgggtgaggttacagcccgagtgcaaaaagcgcctcantgaccggattgagatgtggagttacgcagcananggtggccccagcagaatgcttctctgatctgccatgcaagtatgacgtctcatctagaactacn

SEQ ID NO: 27120 - DNA, 562 bp, Homo sapiens
  misc_feature (1)...(562): n = A,T,C or G
agcgtgtnnaattganncccctcgnacactatccatgtggtggaattcatggactgtccagggagtgccatattctgaggtaggtcagcagaaaaacaaaggtgtgacttcccctagtcggtaattacttatgtgctgaacacccaggtctgctaaatcagaatctccaggttttagcagaaaagctcctaagataattctgctgggcagttagaaaaaaaagaaggaaatgaaaaaggaaaagtgagaagacaaggaaagttaaccctgcattgtcttctgtggctagatggtcagcaagacagatggcctccagaatgagcaatgggccatcagcagacctgccggaagtagggttcagccacatgccatttatggcatggctgccctggtgttggtcaggggcttgattctttctgccagacaacaaaccagcccgtccactggctaacttagtgagaaggagctgtggacaccctggaccctgagggtggcgatcaggtcacccctgccctggagagatgtctatgtggngaagtgcccanaggagggaaggtgagca

SEQ ID NO: 27121 - DNA, 468 bp, Homo sapiens
  misc_feature (1)...(468): n = A,T,C or G
ctttgaaatcgatgccatnncannnatacggatgaccttcgcacagncnggnggaattccccggctcgagcgggctgtgctagggccctgggcttggggagggaggttcatttgaggaggactgtggccctcacacctctagggtacacagggagaggaggcccggagcaccctggagggcagagacaagcgggagtgatgtggaggtcgccctgggagcctctggaaggccttgctagtgctccagctgcatggaagagagcggctagcaactgttccctggttgggccctcagtggatgctggccaggccctactcttagccccttcatcatgtcatcttccttatgctggagctgccccgatgtggagtgggcaggaaggggcctggaaaaaataaaggatcttggcagttgataaaacgtaaaaaaaaaaaaaaaaaaagcggccgcctaagtttaaagggccc

SEQ ID NO: 27122 - DNA, 444 bp, Homo sapiens
  misc_feature (1)...(444): n = A,T,C or G
nattgaaatcgtagaccctctagnccgngcggtggaattcctactacgggaactacgactacgggagctactccgggaacacacagggtggcacaagtacacagtagccagtgtgacccagaggctcccggaggcccctgccggcttcctccaccagcgcctgcctcggcccctcctctgcccccgccagatcccgtggtgctggggatggggtcatcccagggctgcctccctccagcccactgcctcccctctgaggggcttccttcccctccatagggccaggcatttttttctggattcaaacaggcaacaatgaccttttattttctgtttgtccccacctccccagccttccacctcctgttcttcctaccttcttcctttttgactaaataatccccacctcccttgatcatacagtgaggctacagtgactgaggg

SEQ ID NO: 27123 - DNA, 537 bp, Homo sapiens
  misc_feature (1)...(537): n = A,T,C or G
aggatgcactgaagactatcagagtggngcaattcgttcctctgcccgccatgccgttcctggagctggacacgaatttgcccgccaaccgagtgcccgcggggctggagaaacgactctgcgccgccgctgcctccatcctgggcaaacctgcggaccgcgtgaacgtgacggtacggccgggcctggccatggcgctgagcgggtccaccgagccctgcgcgcagctgtccatctcctccatcggcgtagtgggcaccgccgaggacaaccgcagccacagcgcccacttctttgagtttctcaccaaggagctagccctgggccaggaccggtgcgtaagggtagtaggggatccatgtgggactgccgcagactggagccactgatcctgcctcagggggaaaaacccatttcttgccctgcccagtaaggacacatcatggtctggagctttggngccctctgacccctaagttcctgctgtaggaccatttcaagtgcgagcaggatgaataaaattctgctctgctaaaa

SEQ ID NO: 27124 - DNA, 448 bp, Homo sapiens
  misc_feature (1)...(448): n = A,T,C or G
nttggcgaccctctgnctttgcaggcgtattcgaaggactgcgggcaggaccggcgggctcctggggttcagccgtgccgcctcgttacgatgaccagtgtggttaagacagtgtatagcctgcagcccccctctgcgctgagcggcggccagccggcagacacacaaactcgggccacttctaagagtctcttacctgttaggtccaaagaagtcgatgtttccaaacagcttcattcaggaggtccagagaatgatgttacaaaaatcaccaaactgagacgagagaatgggcaaatgaaagctactgacactgccaccagaaggaatgtcagaaaaggctacaaaccactgagtaagcaaaaatcagaggaagagctcaaggacaagaaccagctgttagaagccgtcaacaagcagttgcaccagaagttgactgaaactcagg

SEQ ID NO: 27125 - DNA, 460 bp, Homo sapiens
  misc_feature (1)...(460): n = A,T,C or G
nttagaaaacactgatgacnctaggccagngcggnggaattctatgtggctgacaactgtggcctttatgcccaggctgagatgtctaataaagctagtgaccatggctgggtgtgtgatcaacgagtgatgaagtttcacaagtatgaggaagaggaagatgtagaaaccggagccagtcaagattggctgcctcatgttgagaatcagagttacgactcggactggacagaggcgccggcagctgtggtgattggcggggagacctacggcgtgagcctggagtccctgcagctggccgagagcactggtggcaagaggctgctgatccccgttgtgcctggtgtggacagcctcaactcggccatggcggcaagcatcctgcttttcgaagggaaaagacagctgcggnggagggcggaggacttgagcagggacaggagttaccactgaggacgcn

SEQ ID NO: 27126 - DNA, 458 bp, Homo sapiens
  misc_feature (1)...(458): n = A,T,C or G
atttgatgagccttcgganaattgatggccgtttagaccancgnggnggaagtctgtaacagttgccagatcggcagtgggtcacagcgctttagctttggtttctctgccccactcctactgctgccgagctttgtccgtgggttagtaatctgtaatgtattctcaaatgcatcatggtactaaccatataaaaggtattctacagtgaatctttcagcactgaaaaatctactcctcactttggttttcagttacatttttttttttgagttggataaaccagccctgggccttaccaatttgtaatcaataaggaatgtttaagtgagggtgtgtctgtcctatgtttcagtgggcagcggttggggaatatgctcatctgattgactatatctgaactgtttcacaaagcgctctttggggagatgttaataggtgtgctgcaaaaaatggct

SEQ ID NO: 27127 - DNA, 472 bp, Homo sapiens
  misc_feature (1)...(472): n = A,T,C or G
taagagntcccgtnaacctcggaagaanccgcgggcgcctgtagtcccagctactcgggaggctgaggcaggagaatggcgtgaacctgggaggtggagcttgcagggaggcggagcttgcagcgagccgagatagtgccactgcagtggggcctgggccaaagagtgagactccatctcaaaaaaaaaaaaaaaaaaaggaatggggtggtgggtttcaaatttaaaaccaaaaacttttaatttttttaaaggaggccttgacctacctccttgtaaagggacaacttcaacacaaatggccctaaacggaaaaaaggctgaaatcaaaaaaattcccattaggggtaatttttgggggacaaacaggaaatgttaaaaagaaaaaccggaaaacctaagtggttttctttgtccttttgacatggccaaggaaaaagggcttcctgataaaataagaaaattggcctaa

SEQ ID NO: 27128 - DNA, 467 bp, Homo sapiens
  misc_feature (1)...(467): n = A,T,C or G
cgantgacnanaagaaannnnnnttttgagnaccctnatcgaagacgctctgaccagngtggtggaattcgctcgacgtgggtctcagaaccgtcatcccgaaaactagcccacattgcccccttacaactcccaggagggaaatagtcgtgcaagatgtcctcaatggaaccataacgtttttgcctttggaagaagatgatgaggggaacctaaaggttaagatgagcaatgtgtatcaaattcagctcagtcatagcaaagaagaatggttcatatctgttttaattttctgtccagaaagatggcattcagatggaatcgtgtatcccaaacccacgtggcttggagaagagttgctggccaagttggccaagtggtctgtagagaacaagaagagtgactttaaaagcaccctttccctcatctccattatgaagtatagcaaggcttaccaggaacttaan

SEQ ID NO: 27129 - DNA, 565 bp, Homo sapiens
  misc_feature (1)...(565): n = A,T,C or G
cgatagatcacccctcngnannnncncatagatccacagtccgagaggtggaattcagtcagtgtcggccctgggcggcctcctgacccacagaacggtgaggagagcagggggcatggaccacccttccgcctcacctcgggacaggaagcgctgggtggccaagagcagctgaggcgagattgttactttatattcatcatcagacaccttgaacaaggagaactcctccttccgcttcagaggggccatcagagaagcaggcttcctcttcaccacggtgtctcctaagatggaagaagagggcgcgctcaggcatcagccacctgtcagtcaacacgaccacactaaggggctgcatcgcctgctccttcctcctgaggccagggggtcctcgatggagcagcatcggaacgccagggacatgtcctcagcaccgctccctccacggagcctgctcccaccccaaccacacagagagaggggtgactatctgccttggagctggctgaagagaatgctgatatgataacaaagcagcttgtataaaataacaagcatccct

SEQ ID NO: 27130 - DNA, 556 bp, Homo sapiens
  misc_feature (1)...(556): n = A,T,C or G
natcgacttctgtccacagtggngcaantnccggagccgagaggaggcggaggagatggcgtnccagccgccacctccccccaaaccctgggagacccgccgaattccgggagccggaccgggaccaggaccgggccccactttccacgtagactttggtctgtagcagttgagagcggcatttgtccagccacggcatcgacagggagcaaagtctctccttaaaggtgttaacctctcgagaagttgctgaaagccggaaaggttttacgcaacaggaactcaagccccgtacactttgcattcttttccagcataactcagccagtgtttcggatcgagattggagaagcaactttaaagcaggagttctagatctgaggcctatggatggactttgtgtgcaaaatagtgtatttttctgaggcctgtatttttttttgtttggttttaatcagtatcagttggtttctaggactctaaaaaggctaaaacatgcagagtntggagtgtttcgtggcctcgtgtggcttttgtttgtagtgctggacatctn

SEQ ID NO: 27131 - DNA, 568 bp, Homo sapiens
  misc_feature (1)...(568): n = A,T,C or G
cgccgccccccnnnnnaatagatcacantcaggagggcattgatatcagtacgctagtgcactcctggctacccgagcccagaacctgccacagtcccctgagaacaccgactctgcaggttattccaggcagccagaccaggctccttggtgagaagaccaccacagcggcagccttcccagtagacctttccctctttggcacagttggaaactgcagttgataaatgactgtggactagtgcgcgttttttgttttcagagcacacgtaagggtccagccacagcaggcccggcgtcccggtggaaggcagccctgggcggaacccaggcgtttaacggctcactaggcagccccagatctggggaacagatgagcacgtggggagctggaactggagtgcagtggtgtgatcacggcttgctgcagcctcgacctccctggttcaggccatcctgccacctcagcctcctgagtagtagggactacagctggtccagctgctccagcaccgtttgttgaaaggctgtccttccttcattgaantacttttgcaccttanagtca

SEQ ID NO: 27132 - DNA, 461 bp, Homo sapiens
  misc_feature (1)...(461): n = A,T,C or G
aatagatgaccntangaaancttgaggatccttagtccatgcggtggaattcacatgacagaaaagcagctgaacctctatgaccgcctgattaacgagcctagtaatgactgggatatttactactgggccacagaagctaaaccagccccagaaatatttgaaaatgaagtcatggccctgctgagagactttgctaaaaacaaaaacaaagagcagagactgcgtgccccagatcttgagtacctctttgaaaagccacgttgagctgtgctccacggcctggcatgggggttcagtctgtggatggtaactacttatgatggacgttagccttgcttccggcttcttagatgcccagctgccctaccccagaccactggtcctgcctcaagtgatggacataaccctctcctaggacatacatgtaaatgcacaatgtgactcattctcatactttt

SEQ ID NO: 27133 - DNA, 456 bp, Homo sapiens
  misc_feature (1)...(456): n = A,T,C or G
nttagatgatcactagtacagttcggtggcattctttttacttctaggtgttttatgaaaaaactgaggcaaagagcaatacagagagtttcaaaaattcataccgctggtccaggtttgaaccaaacagtctgcacctggagtccttgtttgtaaccatggcaccttgtcttcacacatatctcatcgtggagttccatcttgtgttaggcatggcactgagcagcttcttttaagaacataatttgtagccaggcgcagtggcttatgcctgtaatcccagcactttgggaggccgaggcgggcagatcacgaggtcaggagatccagaccatcctggctaacttggtgaaaccccgtctctaataaaaacacaaaaaattagctgggcatgatgattggcgcctatagtcccagctacttgggaggctgaagcaagagactggcatgaacccg

SEQ ID NO: 27134 - DNA, 479 bp, Homo sapiens
agggccccaattgagaccatagatagagcgccgttaagtcccaagctcaagcgcaaatactggtggaaaaacctcaagatgatgatcatcttgggagtgatttgcgccatcatcctcatcatcatcatagtttacttcagcacttaaatccccgaggagtctgccctgcctagagaagggcctctcccccaaccctcagccgttcctccacctctcagccatatctttcagccccccctcccctggatccgtgtgtgtgtgtgtccgtgtgtgtgtccccctgtaaatagccagctgttatttatacatatataatattatatatatttggtctgtttgtagttttattactagatgatttttccggttgtccttaacaccccttcctgaggttcccttcacccctctctcttgccttccttccctttccctttcttcctgactagccccaagtcccttcatttgcatctgctatgcaa

SEQ ID NO: 27135 - DNA, 482 bp, Homo sapiens
  misc_feature (1)...(482): n = A,T,C or G
ggggcaccatagaaacccctnttagtagaccatagtccatgtggtggaattccccggctcgagccgcgtcagattatgtacatagttttctaaaaagcctttcttctaaaaacgaaaaaagaccccccacccaaaatgtttcgagtcaacaaatttaagagacagagcccattttctccataaatttgtaacatgctatttttatgtgcatgttttatgagttcaaaatgcaatgaggaaatctgacagggaaattatctgtatgaactaaaagtaagggaaccccggggaatgggaggacaggatttttcaaggaacctttttcaatgaaagagaaggaagttaaaacctataggttattttgtagagctgagtgttaatacgggccgagaaataaaagtatcttctgctccggctgtttcactgcggacggctggggctgctgcgcgttaccttgctgcaagcggagcgccttccacctg

SEQ ID NO: 27136 - DNA, 480 bp, Homo sapiens
  misc_feature (1)...(480): n = A,T,C or G
agggcgcccaaatggagaccctagatagagcgccgtaatnccgggcaccngaggccaagcggagcagaggcggacatggggttggattggtttgattatttatagatacacatagacttctcccagctgaccgtcaggatgcccgagggcaggaagaccattaagaataggaggagagggctctgcctcaactttcctaggaaagagcccacctcggagatagctacggtttcctctggtggagatggtgaggatgaaggctggacagtgagggaggaggctctgctggccgcagagaacacagggatgggagggtccctaaccttcgggcacctccagggccagagagcaggctcagagcagctagtgtggagctcatcatccccaccccacccctcctccctgtagagctgatttgaggcctccttctggggctgggctctgcaggccaggtgggtgtggcctgtgttttccattctg

SEQ ID NO: 27137 - DNA, 494 bp, Homo sapiens
  misc_feature (1)...(494): n = A,T,C or G
gggggagttttcctcgagaccactttcgagtgtcgtggaattcggngattagaacttaccccactgggtctcccaaaagccttggtgctcccggctgtgggccatctggggcaggaaagtgagccattcctaggctgaggtccaagcagccctgcccctgaagaccctctaggagcagggcacccagtggccctgctgctgtccagccaggcctgcctgaggccacgctgctatggaggctgcctcctagtctcccaccaggtcccaggctgtggaaagccccagcccagggatggtcagaactcgggggcagattccactgccccttctgccaaacacatccagaacctgccctcagccctggaagctagcatcttctggggccaggggcttgcttcctcgctccatagccctcaactgcccaggcgctcccaccagcagaactgagcctgactnctnnctccagncttgcccgctgaccagaggaccccacg

SEQ ID NO: 27138 - DNA, 565 bp, Homo sapiens
  misc_feature (1)...(565): n = A,T,C or G
nagtagatcacccctncgnannnnccnattgagncacagctccgagaggtgcaatncggntcgcctgcacgtcacggctactcaaacccaagcacgtcccgaaagcgtgtattttctgcgtctgggaggtttttgcatcctcagttcccaccgctggggctggcggcgaccaactcgcatacctgtcgcagccagagagctgtcatttcagtaccgggattcagaattgatccagtccgcagcggagggggcacatcccagctaccgagctgctgagtgtctctggctggaacaatagtatttttttctctgcgaggctgcaattaacatcttatttgttctggctccatacaggctttgtcaggatcgcggtgcggcgaccgacgttgggctcttgcattgctttctgcttggcaatggaatcatggtttcggagtctaaacttttgtttcgttttgtagtcttaatgtatctgattctttttcaagtttccctagtaacaggtttggggacggcgtgggaagaagcgagaaaaggtgtgaagagaacaaaccagattatatag

SEQ ID NO: 27139 - DNA, 505 bp, Homo sapiens
  misc_feature (1)...(505): n = A,T,C or G
tgaagatgcgggnngcngnnnnaattgatgaactgagnaatcctagcccagngncgnggaattcagagaacagagttagagaggaacatttatgaatttcttatcatttgcttcaagagggaaaaataatatttttttcatggcttttcacatattgatttataaactgagcttagtaattgtatcatacttatattgattgatatgtttttaagccatgtagttgtacatatgttttaaaatctagtttgggggaaattgcagattgaaaatatgcaaataggtattattaccactataagattaaccaaacaacccacaacaaactatacctgtaatgaagaggttgaactaacaatttttcattaagaagcaggatcagtagtaactgagaaccacagtcagagtcagtcaacactgatgagggtcatgccccagggccatcctggggtgtgggagtgccggttacctgtgtgtgcccgtgctcagcagtgcatgcacacan

SEQ ID NO: 27140 - DNA, 561 bp, Homo sapiens
  misc_feature (1)...(561): n = A,T,C or G
catagatcccantagnnggggaatagaaccactactcagagaggtggaattccactcctgcacgcaatggtggcctatgatcccgatgagagaatcgccgcccaccaggccctgcagcacccctacttccaagaacagagaaacagtccctaaagcaagaggaggaccgtcccaagagacgaggaccggcctatgtcatggaactgcccaaactaaagctttcgggagtggtcagactgtcgtcttactccagccccacgctgcagtccgtgcttggatctggaacaaatggaagagtgccggtgctgagacccttgaagtgcatccctgcgagcaagaaggtagcgcggaaccagcttctctgacggcgctgctcttcgacccagcccaggccgccactgaattttgtgtctgtaatttttctttgacagacagatccgcagaaggaccttaagcctgccccgcagcagtgtcgcctgcccaccatagtgcggaaaggcggaagataactgagcagcaccgtcgtctcgacttcggaggcaacaccaagcccgaccgggn

SEQ ID NO: 27141 - DNA, 551 bp, Homo sapiens
  misc_feature (1)...(551): n = A,T,C or G
natcgatcacgtccgagtggggattgagacacagtcggacaagctgctcagacctacttccttgggagggggtgacggaaccagcactgtgtggagaccagcttcaaggagcggaaggctggcttgaggccacacagctggggcggggacttctgtctgcctgtgctccatggggggacggctccacccagcctgcgccactgtgttcttctcttaagaggcttccagagaaaacggcacaccaatcaataaagaactgagcccaanaaaaaaaaaaaaaaaaaaaaaaaaaaaaaaaaaaaaaaaaaaaaaaaaaaaaaaaaaaaaaaaagccccccttttaaaaaaaggggccccaaaaacccccgtgaaacccccggggggggcttttttatacccccccctttgtgggtgcccccccccccggctttttttttggccggggggaggcccctcccctttgtttttttaaaaaaaaaagaaaaatccccccccttttggcgaggggggtccttttcttttttatgggggnnnnnncccnntccaaaagt

SEQ ID NO: 27142 - DNA, 477 bp, Homo sapiens
  misc_feature (1)...(477): n = A,T,C or G
ntcgagaatcgtaggccgtgcggnggaatccaaaccactttgcacatgtgccttgctggggtaacccaggacatcctatgcaatctctattgcttgaggggctggagaagggaggcgcctcatgcttccctattccaaaccccttcagcatagccctgtgcctccctccttccccgcagcacttgggcttcactcacctgcttgcccccatgttcttcctggagagaggagtgattcagaccaggccccggcctgacctccacgcagggcgctttccttcctttgttctcagcttctccgcttgagtggcttgagtgcacttctgctccctttccataggcccaggggcagaggaagggcagagaggtgaactggaaaaatctgcaggtggttaaggctagggaaacctaaatgagcctttggagaaagggatactcttgcagactgaagctgagctcctgaagctccctctcttcc

SEQ ID NO: 27143 - DNA, 559 bp, Homo sapiens
  misc_feature (1)...(559): n = A,T,C or G
catcganattgaancactgtccagcgnggngcaantccncggctcgacggctgcatcctggtggtagcagccaatgacggccccatgccccagacccgagagcacttattactggccagacagattggggtggagcatgtggtggtgtatgtgaacaaggctgacgctgtccaggactctgagatggtggaactggtggaactggagatccgggagctgctcaccgagtttggctataaaggggaggagaccccagtcatcgtaggctctgctctctgtgcccttgagggtcgggaccctgagttaggcctgaagtctgtgcagaagctactggatgctgtggacacttacatcccagtgcccgcccgggacctggagaagcctttcctgctgcctgtggaggcggtgtactccgtccctggccgtggcaccgtggagacaggtacactagagcgtggcattntaaagaagggagacgagtgtgagctcctaggacatagcaagaacatccgcactgtggtgacaggcattgagatgttccacaagagcctggagaggg

SEQ ID NO: 27144 - DNA, 507 bp, Homo sapiens
  misc_feature (1)...(507): n = A,T,C or G
cagatggcggatgacgccggtgcagcaggggggcccggaggccctggtggccctgggatggggaaccgcggtggcttccgcggaggtttcggcagtggcattcggggccggggtcgcggccgtggacggggccggggccgaggccgcggagctcgcggaggcaaggccgaggataaggagtggatgcccgtcaccaagttgggccgcttggtcaaggacatgaagatcaagtccctggaggagatctatctcttctccctgcccattaaggaatcagagatcattgatttcttcctgggggcctctctcaaggatgaggttttgaagattatgccagtgcagaagcagacccgtgccggccagcgcaccaggttcaaggcatttgttgctatcggggactacaatggccacgtcggtctgggtgtaagtgctccaaggaggtggccaccgccatccgtggggccatcatcctggccaagctctccattcgtcccgtgcgcagaggcn

SEQ ID NO: 27145 - DNA, 557 bp, Homo sapiens
  misc_feature (1)...(557): n = A,T,C or G
attcgatttctgtccgccgggnggaattcagcagctgtcanagctcngaaaacagcagcagaggaaagaaaagaccagagctaagggaccttctgaatcaagcaaggaaagaaacactccccgaaaagaagaccgcagtgccagcagcggggctgagggcgacgtgtcctctgaacgggagccgtanctcaggaggcagaattcagtgtgttatcattgggcagaactggatcctgaaaaattcaagatgctaagcacctacactactttaagaacttggaactgaaacatgaagaggaagacagaaataagaatttgggaacctgaatagctctgcaaaaaacaccaaaggaccgttttatcgttttctgttgttgctgtggtggagtgatgcantgggcactgccggtgggccagggggcgggtgcgcatgtggtaaaaggtgtgcgctcgtgcctcccccacagaaaggctntgttggtttctaccacatcttggcttgcttttggaacaggctggcccagcatcatttgtcatcaagtccactgtggtgattn

SEQ ID NO: 27146 - DNA, 462 bp, Homo sapiens
  misc_feature (1)...(462): n = A,T,C or G
aaaaaattacgagatcactagtccagttcgatggccttctgccattgccctgcctcagcctcctgagtagctggaactatagacgtccaccatcatacctggtgaatttttgtatttttagtagagacggggttttaccatgttagccaagatggtctccatcttctgacctcgtgatccacccacctcggcctcttagagtgcttgggattacaggcgtaagccaccactcccggccgatatattgctttatgaaaattatactggatctgttacagatgatagtgttgaaccaagtggaacaaagaaagaagatctggatgacagagagaaaaaagatgaaactcctgcacctgtatatggggccaagtcaattctggagagctgggtatggagtaagcaaccagggatgttcacggaataccaggcactaaagggccagaatcatccccctacaggacn

SEQ ID NO: 27147 - DNA, 457 bp, Homo sapiens
  misc_feature (1)...(457): n = A,T,C or G
gaaaattgatcccttnnnnactgagtcactatacatgcggtggaattcgattacctatttctttcttctcaaggaaagagacttaattgtgcattttaatattctgccgtacagtaaagctgcacctgggggattatgttcactgaaccatcattgaaaatgcctttgtacttcagtgttaagatgctgctggcctttggattccagaaaagattgtgtattcagtgtatacttatcttctttttcttgttcaaggccatctctaaaccaaaaacaaggaccggtctcccctgtgaagcctcttacaagatgggaaagaaaagctggtctctggctgagattcaaaggccttgggcttatatctaggcatagttctgaggttagtgaggaactgagattgcttcccagatttttctccctttctgacctccttcttggtaatctgtctctccaaaan

SEQ ID NO: 27148 - DNA, 463 bp, Homo sapiens
  misc_feature (1)...(463): n = A,T,C or G
aaaaaattagatgatcactagtccagctcggtggacttcatgagaagatctggntcaacaagttaaaatgtgacaatgcagaaaggagattcttcttgcagatgaacaaggctgtggccagcacctcccgccaggagaacggcgccagcatgatcctccatgacattgcgagagccagagagcatttccagaaatccctggccagaagctcaggccccggggcctccagcagccccagcggagacaaggctgagctcatctttcagatcaccagtctggaagtggagaaccagagcctgcgcagggttgtgcaggagctgcagcaggccatctccaagctggaggccccactgaacgtgctggagaagagcttgcctggccaccacagccctgcagacccagcatgagtctcctatgtgccaagtggagcccctggccaagaagccagccaaaccagcagagg

SEQ ID NO: 27149 - DNA, 414 bp, Homo sapiens
  misc_feature (1)...(414): n = A,T,C or G
gaaaactagatnacantnnnnnnnctgtatgtccttantcagtgcggtggaattcccagccgtgtgcagcctatcaagctggccagggtcaccaaggtcctgggcaggaccggttctcaaggacagtgcacgcaggtgcgcgtggaattcatggacgacacgagccgatccatcatccgcaatgtaaaaggccccgtgcgcgagggcgacgtgctcacccttttggagtcagagcgagaagcccggaggttgcgctgagcttggctgctcgctgggtcttggatgtcgggttcgaccacttggccgatgggaatggtctgtcacagtctgctccttttttttgtccgccacacgtaactgagatgctcctttaaataaagcgtttgtgtttcaagttaaaaaaaaaaaaaaaaa

SEQ ID NO: 27150 - DNA, 483 bp, Homo sapiens
  misc_feature (1)...(483): n = A,T,C or G
tgccgtcccttagagncccctnatacgtagtctactatcagtgtggtggaattcgagaaagtgtgggcgaggggtgttagtgtgtgtgatgtgtgtaagccatgtgtctatgggtgtgtcaatgtatgagtgtgtgtaagggtgtgtgtgtatgagtgcgtgtgtgtatgagtgtgggagtgagtgcgtgagtgtgggtgtttgagtatgtgtgtgcatgtatgagtacgtgtgtatgagtacgtgtgtgtgtgtgcatgtgtatgagtatgtatgtatatgttcgtgtgtatgtgcatcttcgtgtgtatgtgcataagtatgtgtgtgtgcatgtatgtgtgtgtgtgactgtgtgtatgagtacatgtgtgagtgtgtgggtgtgtgtgtgcacgcctgcccatgtagcacagtcactggggtggcccggcctcacgggtgctctacccncgcccgtctgttctgggcccctgctgctcn

SEQ ID NO: 27151 - DNA, 476 bp, Homo sapiens
  misc_feature (1)...(476): n = A,T,C or G
gggcggcctttgagaccatagatagagagccgtaattctcttcgtcatgtgctgatcctgtactacgccttcctcatggagtacatcgtcctcaacgtgggcctcgtcttcctgcccgaggacatggaccaggcgctcgtggacctcggcgtgctctccgaccccggctcgggcctttacgatgctgactcggagctcgacgtctttgatgcgtacttggagtagggtctcgactgctgttcccctcttccctacacgatccgcaacccatgccctggaccagccgcccagatcatgccgccgcagctggttgggggcaccatctggacggggatggttccccaggaggagaccctcccctgcctccgaggcctacctgctcccctcaaaagcttcgtgccaacagagaggttcctgtttgaacccaggagagtggaagagagattgggactgagtgctgaggttgggaaggcccn

SEQ ID NO: 27152 - DNA, 484 bp, Homo sapiens
  misc_feature (1)...(484): n = A,T,C or G
cgccccccccatcgacccccctnatagtagaccctagtccangtggtggaattcctaataaagtctgaactctcccttccaaaaagtagaagtcatccctgtcgagaaggaccaacactgtgcactggtcagctcacagcaccaagaggcccccttcctgcttttctgtcatgtgttcccccagtaatcattttctgaccaccctgaaagcaaagcctgggtgggtactggcagtgcaaaggccagtaggccaccatccctggccccaagctgcacaaacccacagacgagggtcctgtagaacaaacgctttgatgtgcttctcaggtagcctgcggcccagtccagggcttggggaggatcagctgcatggaagagtgaatgccaggctgaggtcatcagggccctgaggaacttggacgtggggtcttcactctcatggaactgcccttctaactggagacatagacaatataccagtggt

SEQ ID NO: 27153 - DNA, 555 bp, Homo sapiens
  misc_feature (1)...(555): n = A,T,C or G
cggccccacgcccaatcgaacccttcccangnatagaaanccntcgcaggnggcggaattgctatagtaagaggtacgggattacaggtaaaatttatccttttatccctagcaacaagtgacaccttctgaagccattattgatttgtcaggaatagggcaagtatcaggaaaagaaacaccgaaataaactctgtttccatttattgcattctagcactggttctaccaaatatttgttggatgactttaggtaaagcatctagcctctctgtcttgattgccacacccacaatatgagataaatattattctgcatacttcctgggagagctgggaagataaaatcagatcattataccacataaagcaaagcaataacacttccatattttagcttcccacactgcctatctgtcctattttgatttattcatttatactttntaacaaacagttgctagtagcttgcttaatgtaagatatgggatgaatattttcatgatggcccctgcatctaagttatcatttagcagtacctgccttatctcttgt

SEQ ID NO: 27154 - DNA, 560 bp, Homo sapiens
  misc_feature (1)...(560): n = A,T,C or G
ntttcgagtactagtncccgtggnggaanncctgagcacatcagtgatgaatgcaagaggcgtttctataagaattggcataaatctaagaagaaggcctttaccaagtactgcaagaaatggcaggatgaggatggcaagaagcagctggagaaggacttcagcagcatgaagaagtactgccaagtcatccgtgtcattgcccacacccagatgcgcctgcttcctctgcgccagaagaaggcccacctgatggagatccaggtgaacggaggcactgtggccgagaagctggactgggcccgcgagaggcttgagcagcaggtacctgtgaaccaagtgtttgggcaggatgagatgatcgacgtcatcggggtgaccaagggcaaaggctacaaaggggtcaccagtcgttggcacaccaagaagctgccccgcaagacccaccgaggcctgcgcaaggtggcctgtattggggcatggcatcctgctcgtgtagccttctctgtggcacgcgctgggcagaaaggctaccatcaccgcactgagatcaacaagaa

SEQ ID NO: 27155 - DNA, 558 bp, Homo sapiens
  misc_feature (1)...(558): n = A,T,C or G
cattgatttcccatcacagtccagccgggggaattcgttntactcctgannaattntgaagccagcactgactttgtttatattcacttaccttgtatatgaacttatgacattagagtttgtgaaactgtcttaacgtggctcatacacgtgatgtcagagggactggtcagttctttacagggtgaattaatcggcagctggctagtcagagcaactgatgggtggcttttttttctttttttttttgagacggagtctcgctctgtcacccaggctggagtgtaagggcgcgatctcggttcactgcaacctccgcctcccaggttcaagcaattctcctgcctcacccacctgaatagctaggattacaggcgcccgcccccacacccggctaatattttttgtatttttagaaaagacagggtttcaccgtgttgatcaggctggtctcgaactcctgacctcacgatccgcccgcctcggcctcccaaagtgctgggattacaggcgtgagtggnggccctatttttaaaccattcgttacgctgtgtagaa

SEQ ID NO: 27156 - DNA, 474 bp, Homo sapiens
  misc_feature (1)...(474): n = A,T,C or G
cttcgcccccctnnatcgagatcattagtcagngtggtggaattccaccaggttactctcagctcctcatactggtggaccagcaggccacaaaggaggggatacttgatcctgataaacgagtctcactctgttgcccaggctggagtccagtgacactatcacggcttactgcagccttgacctcctgggctcaagcgatccttcagcctcctgagtagctgggactacaggttatgcttgtttgctgatggaaatgatccagaagagaaggacaagttgacgattgagagggttaatgtcaggtaagaaacttgagtggacattgaggaaagagcgaggttcagtggactggaggtttgtggtggtttcatgacacgtggactggagatttgcagtggttttatgacacatggactggaggtttgtggtggtttcatgacacatggactggagatttgcagtggttttatg

SEQ ID NO: 27157 - DNA, 467 bp, Homo sapiens
  misc_feature (1)...(467): n = A,T,C or G
cttgcacccctgatagagcgccgtaattcggacagggacagctggctacagggaatcaaaggctgttctgtacagttttaccagaaactgtgaccttgggtaaggctcctcacttttctgggcctcaacttcctcatctgcaaaatcagagcattagctgctctccccatgattccctcccagttttaattaaaagtctctgatctggagcacatgagggttgcgagcctggtgcacctggttcctgtctccgtgggctggtttccttcagcccctgatgcccaggctgggtgcaggctctcatctggtccatgcccagatgctgcctcagacaagaactctgggaatcctaacagactctgctttcctctcttcgaggnttggcctccctcttttattcttgtgtaatgatgagacataattaagggtcatctacaatggacaattttcaaggtgctgatgtgatg

SEQ ID NO: 27158 - DNA, 471 bp, Homo sapiens
  misc_feature (1)...(471): n = A,T,C or G
natagtagaccctagcnagtgtggcggaattccgggcaagcgggtgtaatcagcagccatccgttcttgggcatggtggcttccgaccgcggggaccccgagagtctcttgtcggccgagtagcagccaggaaggagagactgggatggttttttatctgttgctttcttaaatcaagggccgccgggccggagatggatggagggaccggggatttgggaactcgaaaacgagctgagggaagggagcctgtggaaatagactggagtctgggtagtgtcgtttcctagagaatggtctcgaagtaacttctcggtaaagtcttcacggaatttccagaccacacttgcccactgggaggcttttaggacccgagacgtgtgcaggcttttccagccaaaatgaagtttaatccctttgtgacttccgaccgaagcaagaatcgcanaaggcatttcaatgcaccttccc

SEQ ID NO: 27159 - DNA, 498 bp, Homo sapiens
  misc_feature (1)...(498): n = A,T,C or G
ggagagccggcgcggnnnaatcgagaactganaacactacccangncgnggaattcctataacactgatgcattctgtttgcattttattccatgatttacacaataattatatattgtatccttatgatatgtcagatactgtgttggcactttacatatatctcacttcatccttaataccatctggaaataataaacattttatggatggtgaaacagagacacagagaaatcgaatagcctgctcagggtttccagaatagcaaaattaaaggcctagggtttagctttccactaaagattctcatggctggcttcttcacgtcattcaggtctctgctcaaatgtaatcttagagaagctacattaatccatctgaaatagacacctcactgtgcatccaattgtcctgccttatttttctttgtaacattattatattatttatatttgtattggctgtatctcctcctagactatgatctctgttaggacg

SEQ ID NO: 27160 - DNA, 519 bp, Homo sapiens
  misc_feature (1)...(519): n = A,T,C or G
catgaagttccaattcaaaagatgtttgaaaagctgggtatcactaccattaaagttaacattcgtaatgccaattccctgggaggaggcttccattgctggacctgcgatgtccggcgccgaggcaccctacagtcctacttggactgaacaggcctgatggagcttgtggctggcctcagatacacctaagaagcttaggggcaaggttcattctcctgctttaaaaagtgcatgaactgtagtgctttaaacaatcatctccttaacaggggtcgtaagcctgggttgcttctattacttttctttgacataaagaaaataacttctgctaggtattactctctactcctaaagttatttactatttggcttcaagtataaaattttggtgaatgtgtaccaagaaaaaattagtcacctgagtaacttggccactaataattaaccatctacctctgtttttaattttctttccaaaaggcagcttgaaatgttggtcctaatcttaattntttn

SEQ ID NO: 27161 - DNA, 481 bp, Homo sapiens
  misc_feature (1)...(481): n = A,T,C or G
catcgacacccctgngnnnatcgagnaccattagtccagagcggnggaattcaacccttacagtgaagatgtttactcattgcccccacctctggtccacactagaaagaagctcgccccacctccacctgtgagatccgtgaattctcggaatggcaggggaagccttgcactaggttgcagagaagcatcctccacatcctgtgtcagaaaccctggtctccgtggcacttgtaactcaccgtgctgtcttctggtctgtgtgtgttcttcaagccagctctaggcttcaggccgagccaggttcacactcagaaagatgtctccccatccccattcggggctgacgatggggggctgatggctgcccctgcgtggcctgagtcctggtccctctgaggcagttgacggggcagtcagatttttaaagttttgtacaaagttttcctttgtaatcactcccatttttacttaacaaccn

SEQ ID NO: 27162 - DNA, 477 bp, Homo sapiens
  misc_feature (1)...(477): n = A,T,C or G
nctgagaatcgtggccgtgcggnggaattcacggggtctcgctctgtcgcccaggctggagtgcagtggtgccatctcggctcactgcgacctccgccttctgggttcaagcgactctactgcctcgggctcccgagtggctgggattgcaggagcctggcactatgcctggctaatttttgtatttttattagagacaccatgttggtcgtggctggtctccaactcctgacctcgggtgatccgcgccccgcgggcttccaaagtgctgggattacaagcgtgagccaccgtgcccggcctaaataaaattttgaagaggctagaaccccgcactcgtgccttgagcttactgacctcaacaccctggttccactaaaactttatttacaaaattatgctgccggtctgcaggatgtagnttaacaatttgattattttggatattaaaatattttttaagtcttgaaaatattg

SEQ ID NO: 27163 - DNA, 502 bp, Homo sapiens
  misc_feature (1)...(502): n = A,T,C or G
ggtaagccggngcnggnnnnaactgagnactgagattcactacccangnggnggaattccctgagcacggtccctcggcagatgttcagcgatgcaggtagcggggacgatgccttggatggagacgatgacctggtgatcgacatcccggagtgaccgtgacatcacgccatgcccaccacggccccgcccggcgccctccccgtgccagcacacacgagtccagcttcctcggaggtgtttattgatgcccagctgccatgctccggccactgacacaaccagaaaaggcgtaaacatgcacgggtgtcccccaggagggtggcaggggccctgccttcaaaccccggccccctccaggggacagttatttaaacgagtggccgggagcatctgccacctgctggggaggcagagaccctgcaatggccacctctttaaaagggcagctgtacagggctaggttttttcaatgaagtttctgtattaaaggagtggctcn

SEQ ID NO: 27164 - DNA, 495 bp, Homo sapiens
  misc_feature (1)...(495): n = A,T,C or G
agtgggccgnnnnnnnnaaactgaaaactagtgcatggcgggaacncaggacatgagtcaggggcaccatggacctcacgtgccagggagacttgaatgtggctgtcactcttccggacgccaagggctgcaggaggctgcttttggcactacccaccccgtgtgacagaataggagccagcgactcaggactgctcacgggtcaggagggcaacgcctgaagtcagacctccctataggtcaacagggacaacctggggatctctggagcagggccctcctctctcaggcttggcccactcccccagacacctggacacgtggccacaaatctgggacaaggggcccccgcacagcatgaaataaaaagtgcctgagaaaaacctnttcctcctgatttggatggggtttcaccaaaaccggaaggccctggggcccgctccattttttctctaaagagagccctcgatttataagaggccccttaaaaccccg

SEQ ID NO: 27165 - DNA, 501 bp, Homo sapiens
  misc_feature (1)...(501): n = A,T,C or G
agggagccgggnnngnnnnccttgagnactgagnttcatcacccangncgnggaatttgagaagatctcagcaactgtggtggagattgctggctactccatgtctgaggatgttcgacagcgtcacagatatctctctcacttgccactcacctgtgagttcagcatctgtgaactggctttgcaacctcctgtggtctctaaggaaaccctagagatgttctcagatgacattgagaagaggaaacgtcagcgccaaaagaaggctcgggaggaacgccgccgagagcgcaggattgagatagaggagaacaagaaacagggcaagtacccagaagtccacattcccctcgagaatctacagcagtttcctgccttcaattcttatacctgctcctctgattctgctttgggtcccaccagcaccgagggccatggggccctctccatttctcctctcagcagaagtccaggttcccatgcagactttctgctgacccn

SEQ ID NO: 27166 - DNA, 482 bp, Homo sapiens
  misc_feature (1)...(482): n = A,T,C or G
natcgagaactgaaggccgtgtcgnggaattccggagctaaaaataaaaaatgaaaaaacagaaataagaataaaaggtcttatcctcataattaggaaattttaatcgaaaacaacacacatgtacacaaaggtgtatctaataagcaatatataaggcagtgttaagattacagtgctagcctgggcatcatggcaaaacaccaactctacaaaaaaatgcaaaagttagcagtgcatggtggcatgtgcctgtagtgacagctgcttggaaggctgaggtgggaggatcacttgagcccaggaggtcgaggctgcagtaagccgtgattgtgccactgcactccagcctgggaaacacagcaagaccctgtctcaaaaaaaaaccaaaacccatcactttgggaggccaaggcaggcggatcacctgaggttagaagttcgagaccagcctggccaacatggtgaagctccgtctctac

SEQ ID NO: 27167 - DNA, 501 bp, Homo sapiens
  misc_feature (1)...(501): n = A,T,C or G
ggttagcagggccngnnnnaattgaaaactgattncactaggcagngtcgnggaattcctccatctgtgaggtggagaaggttggactttggtgtttctgagccctccccccgatgtccaccttccagctgggctatacttgggtaatatcccgaaactaccttaaaattaccttcgactcagtctgagtaaactgtccacgaagctgttcgtgggtggggggggcctgggtgtaggtgcttttacatgaaagcaatttcaagcattccctcaggggccgggtgcggtggctcacgcctgcaatcccagcactttgggaggccgaggcgggtggatcacctgaggtcaggagtttgagaccagcctggccaacatggtgaaaccccgtctctactaaaaatacaaaaattagccaggcatgatggccactcaggaggctgagtcacaagaatggcttgaacccgggaggcagaggttgcagtgagctgagatcatgccatn

SEQ ID NO: 27168 - DNA, 460 bp, Homo sapiens
  misc_feature (1)...(460): n = A,T,C or G
tggccncanaattggactaccggatctgtcgnacaancnnngnaantnnncaaacaangccgtcacaaaagacagtacaaaaaccaaagggcccattttgaagttcagcgaacttgcccaaaacagaaaagctctgggtagaactttagtatatacaaaaaccactcggtagagttttagaagtttcttccatgtaagtgaagcatcttgagtcactcaggacttggctgtcctcgcacccgtggcaggctggggacggcacgaacctccaactgtttcccctattccccggggcatcggaggctgggttcccacatgggagaggaatgaagactcactcaaagggaagggtcaggttaagataagttttcagtgaactccttcttccaccccggaaggggtcttttcagcctttcacagtctccagacaattgactgaagccccatgcatttgttactt

SEQ ID NO: 27169 - DNA, 457 bp, Homo sapiens
  misc_feature (1)...(457): n = A,T,C or G
nttcgagattcgtantccgtgtggaggaattccagaacctggcattcactggactgaatctggttgcccggaatgagtgctcacgtgatggagacccagcagagggaggcagaagggccttcccactctgccagcttcctggagccgtgcatttcctcccccttgtacagttcttcatcggcttacactgccaggccctgcaggacttggcagctgctaagagaagcggagcacctggggactcaccgacacattcctcctgcgtgagctctggggtagagaccaaccctgaggactcagtgtgcatcctggaaggcttctctgtgactgcacttagcattcttcagcacctggtgtgccacagcggagcagtcgtctccctattactgtcaggagtgggggcagattctgctgctggggaaggaaacaggagcctggttcacaggcttagtgatgg

SEQ ID NO: 27170 - DNA, 485 bp, Homo sapiens
  misc_feature (1)...(485): n = A,T,C or G
gcgcgcccacnnnnnnaattgatgaccctagacagngcggngnaattgatgacccttagtccgtgtggtggaattcgcggtggtctggggtttgcggaactacggagaagacgaaggaggtttttccacctgcaacaggaaacttcttcgggcgcttctccctgcttttgggctaagtccttgacggcccaagagctcaagacctctacagcctcttgtaccctgggaagacgcccaaatagtctcaggcccgttccacagaaggttggaagagccccccaaagaccgcggtgtctcggggacatggaattccgtggtcctggggcgctgctaagatccgggtgtctggaccctggggtgggacggagtgaccgtgaagatagaaaaaaaaaaatgggaaaggtgagagatttctttatctagaaagacagtctgcgaaaaaatggatagcttcagtgtttaggaaaactcgtccaaggtaggca

SEQ ID NO: 27171 - DNA, 572 bp, Homo sapiens
  misc_feature (1)...(572): n = A,T,C or G
cgcgatagatcactatccagattggagcaactctcagctaattggctgggaagctccagagtcctttgcagggagaggctgtgagatccaggctggagctcctgggctgggagtgcctggaccctcagtggttgttggcgatgaagacaggatttggtgcccacaagaccccagccctggatgggatggacgtgcagaagcgccaccactccgagtctcactggagggtttatcttgccccacctcactgctcttcctgtgggctctcgcagtctctcccacccggggctgcgtctgcagccgggcaggcatagagcaggggagcagcagagaaggcgcgagaagaaagggctgaggccaggttcgacattgagcctacagctaagttagtgatctcagtcagttcagcanaactcaggagagggaggagaggggccgcacgtccctgccgtnccatagctgggaatcgcaagccctttctgggtgagttcacgcattacacgtgccagcactatacagcgctggncacgtgaggcagagtgctggaaagcttcactgcattgtactcagan

SEQ ID NO: 27172 - DNA, 557 bp, Homo sapiens
  misc_feature (1)...(557): n = A,T,C or G
gcgcgcnnaatcgacactgttcgagtggcgcaattcctgggggagagaagatcttaccccagatcttaagatctgctccctcttcaggaaggatcctccccttgcagccgtgaccactgctgtccaggaactgctgcgtctggctcaggcccacccagccggacctcccaccctcgaccctgtcaatgacctgcagctcaaagatatgtcagttgtagagggtgggctccgggcccggaagctggaggagctgatccagggggctcagtgtgtacacagcccccgttttcctgcccagtacctgaagctgcgggagcgaatgcagatacagaaggagatggagcggctgcgcttcctactgtcggatcagtcattgctgctgcttcctgagtaccatcagcgagtagaggtgctccgaaccctgggttacgtggacgaggcgggcactgtgaagctggcagggcgggtggcttgtgccatgagcagccatgagttgctcctcactgagctcatgtntgacaatgcactgagcaccctgcggcctgangagaatgctg

SEQ ID NO: 27173 - DNA, 591 bp, Homo sapiens
  misc_feature (1)...(591): n = A,T,C or G
agcgatagatcactactcagagtggagcaaccnctagaggaaggcaggaaccaggactggcaggcagccagaaccctcttggacagagatataattacttattatgacctctagcccatgcattgagcaaaatggccctgtaggctggcaccaaccctgtctagcaaataaacgcggccatggtggggatgggagggcaggtaagtgggccttgtaggaaatggcagaggcctgtgagcccctggggcctatatattccctcagcaacacaaccctacagactcccaggttatattttcactcactgcatcccatttgctcatttgctcgcctctctgcatctctgttcttcatttcaatggtatgaatattgatgatgagaacaggaatgcccatgtgcatgcgcgtgcgtgcgcgcacgcacatacacacacacacacacacacacacacacacacgctctacttaatgaaccanagggaaactttgatgttgctcaagacaagagggagagccacgggctcgcacgcaaggtgcatcttttcttgaagtcttntccaggcctgctcntncagctcttagtcctctgag

SEQ ID NO: 27174 - DNA, 595 bp, Homo sapiens
  misc_feature (1)...(595): n = A,T,C or G
ccagcatcgacncccctnnnnnattgatcactattccagagaggngcaantcctttcctgctctggcctccttganagttcagagtacccagtacaagtcagctttaaagtacagcttttagtgtttcctgggttgtttctctggggctttagtgagggacctttgccctctggtttttcttgcctcctggtttagggagcatctcacacttgttagtatctggttgttgggccagccgtgcctcctctagatctggagccaggccaggcaggggccacgtgtgggccagtcagccactacaagatttttgctaagctttgggctgttggcagcatcttggacctcatgcctgggcctgaatgaggctctttcttaagtgtttttacaagtttgtgttttatttatggagtgacttatcccttccattcagagcagccccacccagccagcccttcagcctctgggcttctgctgcttaaaggcagagccgcctgagtggtctccaccctgtgcattgngagcccagccaccatgctgacgggtatttttcctcatannagttataaaccagttattatatgaatctttgtatgg

SEQ ID NO: 27175 - DNA, 592 bp, Homo sapiens
  misc_feature (1)...(592): n = A,T,C or G
agcgatcgatcactgtcagagtggaggaacctcataccagccctctcggactgaactggcttttctattaactggagtccaaagattgagaattaacttcttttgttctgtttgccttttggctgtggcctccctttctctatgtctgtggagacccgggcctagttctaaggaaaaagggaggaagagggagtcacgaggagctgccgccctcgcactctgtctcgcgtcctgagggagggcagcatggaattcgtgtggttttgtgtgcgaggaggatcttgtatttattgctctgccacttctgggcagcattaagaatagcgtcacgtgaccaagaacacacatttcttacaaatcagcagccccaatacatgatgcctaagatgtcccaaaaaggccaggtacggtggctcccacctgtaatcccagcactctgggaggccacggtcggagggttgcttgaagctaggagttcgagaccagcctgggcaacacagaccctatctcgacaaanatcaagaaaaaattagccacgcgtggtggtgcacacctgtggtcctagctactctggaagctgaggtgggaggan

SEQ ID NO: 27176 - DNA, 454 bp, Homo sapiens
  misc_feature (1)...(454): n = A,T,C or G
gcggccgaaaatcggaataccgttgcanctacnanagngcggnggaantcgcactgaccggcttccacagacgtccctgggataagcctgctgggagactctatgttttatcaaagcgtgatgcacaaagtgggcagtatgcccagggtgcttctgcagacgtccccgggatgagcccgctggcctgaggggtgggcatggtgtgtggtgccatacaggtggctgtagcagtactcgccaggaccctgggggaagggcagccgacgacagtgacccacaacctatcagcttccaggccatgtggctttgggcaagtcactttggctctccgagcctcagtgttctcatctggaaggggtgattaaagttgaacagtcaaggctatcgtgggatttgaaaaatgtgagtcttggcgcagagtctattttaccaccaatgatacaagctggcccta

SEQ ID NO: 27177 - DNA, 518 bp, Homo sapiens
  misc_feature (1)...(518): n = A,T,C or G
gtagaanacacagacgagacctactgcattgataacgaagctctctacgacatttgcttcagaaccctaaagctgaccacgcccacctatggtgacctgaaccacctggtgtctgctaccatgagtggggtcaccacctgcctgcgcttcccaggccagctcaatgctgacctgcggaagctggctgtgaacatggtcccgtttccccggctgcacttcttcatgcccggctttgccccactgaccagccggngcagccagcagtaccgggcgctgaccgtgcccgagctcacccagcagatgtttgatgccaagaacatgatggctgcctgcgacccccgccatggccgctacctgacggttgccgccgtgttcangggccgcatgtccatgaaggaggtggatgagcanatgcttaatgtccaaacanaaacagcagctattttggtgagtggatccccccacatgtgaaaacggctgtctgtgacatccccacctcngngggctanaattggcgg

SEQ ID NO: 27178 - DNA, 476 bp, Homo sapiens
  misc_feature (1)...(476): n = A,T,C or G
aggcggggggnnnnnnagacctgggtgctccgnaannactgatgcctccgnacagncnggnggaattccggttttgatgtagaggaagccaagatccttcggctcagtggaaaaccacaaaatgcgccagagggtaagacccgaagttcctggttcctggagggaggtgtcagttcatctccagggctgagcacagatatctgtctcctcttcctatctaagattgagggcaagggaggtgttgattttcccagcgtctagactcactccgttgccacaggttgtcagaacagactgaaagtactctacagccaaaaggccactcctggctccagccggaagacctgccgttacattccttccctgccagaccgtatcctggatgcgcctgaaatccgaaatgactattgtaagtgcatccttatcctcgcctcatgcatggagaaagagggcctgggaccacacaaacaaggaag

SEQ ID NO: 27179 - DNA, 359 bp, Homo sapiens
  misc_feature (1)...(359): n = A,T,C or G
anggntatgccacccagggccacaggcacggaagaagaccatcccagtccttacccataggagccaagcccagctcatgatgggatcacagggcagacagcaattcattttgccccagggactgaggtcccaggggtcgaggagctggctctatgggtttttgaagtggaagtcgccacctcccctctgaggttacagaagtggaccccttttattttcctgagtcagcaatccaaacctccactgaggagccctctgctgctcaaaaccccaaaagggagattcaaaagatccttgaagtttgcggggcgctccctgccagaggagactagtgacctcatggcttgacacacgtcgtg

SEQ ID NO: 27180 - DNA, 459 bp, Homo sapiens
  misc_feature (1)...(459): n = A,T,C or G
aatagatgacgatcggtacgaaccgccgnggaattccaccaaaccccagctccgcccccatccacggctcccagaatggtttctggagtccctgctacagacctgtgaggagagggcagggcagggcctgcctcctgcgtccccgtgatgacctgggggatgcactgggcagggacagcttcctccatccacacagccctgtgggcaccaacaaggccactgtgacttcacacgacagcagtgttccccagctcatctgagccggggtgcaggggacagcacagggcacagtcctgtgccgcaaggccctcgtgctcctggaagcctctgggaggaggcgcccgctggtgggacgtcgaagtccaggcgctctcggcagcgaccccaggacggcgcacctaagctatgccgtggtgcaagggacgtgctggagggacaggagcaggcaagagagaaccc

SEQ ID NO: 27181 - DNA, 454 bp, Homo sapiens
  misc_feature (1)...(454): n = A,T,C or G
cacctaagaccatcgtacgggccgcaannntnngngaaaggngagcacgtgaccatgccgaccacaaaggtgtctgcggaaactcgatgtcattcaccacgatgattttcctctctttgatggactgcaagtgcaactcaaaactatatctgcagggatgaatctgtaacttaaattgggccaatcagaattgttatctttgttcaggtaaaatgagttgcaagatattgtgggtacttttgtgcgctcatttgtgttttccccccctcctacaacatttttttaaccccaaaattatagcctgaatgttcgcttttagtctggccagggatctgactcctgagttggttgcctctcccctgctcactccagtcacatagagaattggtgtttcccgcagtggggatgcagctgttggacaggtattgggggcaaggttggtagggaagacaga

SEQ ID NO: 27182 - DNA, 462 bp, Homo sapiens
  misc_feature (1)...(462): n = A,T,C or G
cgcgccccaaaattggaatcncgtcgtacctacgnaanacgnngnaantnnnncctgctactgaaagaaagtgccatagcctgagtggttaataaaacatttagaatttatttctcacagccctggaagctggaagtccactatcagggtgccagcatagtgagggcttgcttctgggcactgacagctatcttctcgttataacctcacatggtggaaagagagagctgtctggggtctcttttataaggacacaggtcccattcatgagggctccaccctcatagcctgatcacttctcaaagcaaccccctcctagaaacatcacagggtgtattgggatttcagtatagaggatttttttagggaggagaaggcacaaacattcaatccataaaacacccaatatttaacacatcaacatgtcccaccaattctaccttataaatatatccagaatcg

SEQ ID NO: 27183 - DNA, 479 bp, Homo sapiens
  misc_feature (1)...(479): n = A,T,C or G
atcgagccctnatcgagnaccactaggccagngcggnggaattcactcgggaggtggaggttgcagtgagccaagatcgcgccattgcacttcagcctgggtaactccgtctaaaaaaaataagaaaagaaagaaaaaaaagaaagagaccatcccaggaagttgtggggttggggaggcctagggttaggcaagaccttgaggcaggggttgaagccagggagtggtcagccagcactgtccctgcctgtccccatcccacagagggcaaggagttggtgcacacctacaagggctgcatcaggtcccaggactgctactccggcgttatatccaccaccatgggccccaaggaccacatggtaaccagctccttctgctgccagagcgacggctgcaacagtgcctttttgtctgttcccttgaccaatcttactgagaatggcctgatgtgccccgcctgcactgcgagcttcagg

SEQ ID NO: 27184 - DNA, 456 bp, Homo sapiens
  misc_feature (1)...(456): n = A,T,C or G
agtgccananaatccgagtacagtagcactgcgaagaacncggctgctgcgcgccgcctaggtgtctgggcgatctatgggcaagagcaagggcctttatgatttattacggcgaggagcaacgcaacgagctggaggccctggagtccatctaccctgactccttcacagcttgattgcacattgatccaaccctcctaacaactagtcttccaaaatataaatggactctcctgataccacattctccttcagtagtgcttcacttgacaaggtcctgctaagtattatcagaaaatccacccagcttcaccattactgtgacggctgaggctggaaaaaatgatgaaactgtccagactaccctcaagtttacatacagggaaaaaaacccaaatgaagctcccctttatgaaatattcctccaggaaaaactagaagattatgatgtctcan

SEQ ID NO: 27185 - DNA, 517 bp, Homo sapiens
  misc_feature (1)...(517): n = A,T,C or G
gtgggagcggngatgatctgtgatgcccgcatctactcatgcagcctgctgagccccagctatggctggatctgtgatgagctcatgggcggcgggggcttgcacaccatggggacctacattgtggacctgctgacccacctgaccggacggagagccgagaaggtgcacgggctgctcaagacattcgtgaggcagaacgctgccatccgtggcatccggcacgtcactagcgatgacttctgtttcttccagatgctcatgggtgggggtgtgtgtagcacagtgacactcaacttcaacatgccaggcgcctttgtgcatgaagtcatggtggtaggctctgcaggacgcctcgtcgcccggggagccgacctcttgggcagaagaactctgccacgcaagaggagctgctcttgagggactcgctggcagtgggcgcaggactgcctgagcaggggccccaggatgtcccgctgctgtacctgaagggcatggtctacatggtgcaggcctn

SEQ ID NO: 27186 - DNA, 462 bp, Homo sapiens
  misc_feature (1)...(462): n = A,T,C or G
agcgccacanaatccgatntacagttgtacctacnanagagcggnggaantctggnctcactggccaccaccgcgcggcccgtctttctgatcagcatcctttcagttttgaaagtattcaacagaatcactgatgcctctgccctgcgacttgtcgataaggcccaggtgttggtgtgccgagccctctctaacatcttgctgcttccgtggccaaaccttccaaagaatgagcagcagtggcccgtgcgctccatcaaccacgccagcctcatctctgcactctcccgggactatcgcaacctgaagcccagtgctgttgccccacagagaaagatgccactggatgacaccaaactgattatccaccagacactcagcgtcttaaaagatattggggagaatatctcgggggagtccaccaagtctcgacagatttgctaccagtcgctgcaagaattg

SEQ ID NO: 27187 - DNA, 454 bp, Homo sapiens
  misc_feature (1)...(454): n = A,T,C or G
agggtcacnaaatcctagntcagtcgtacatgcgaaggaacnccaacaagtcagctcttctctacgactcccttcaaaccgagagtgtcccttttgagtttctgcttagcgaaggcaacaccatccgcatcgagttcacgtccgaccaggcccgggcggcctccaccttcaacatccgatttgaagcgtttgagaaaggccactgctatgagccctacatccagaatgggaacttcactacatccgacccgacctataacattgggactatagtggagttcacctgcgaccccggccactccctggagcagggcccggccatcatcgaatgcatcaatgtgcgggacccatactggaatgacacagagcccctgtgcagagccattgggggtggggagctctctgctnggctggggggggattggcccaaactgggccgaaccctacgggaaag

SEQ ID NO: 27188 - DNA, 462 bp, Homo sapiens
  misc_feature (1)...(462): n = A,T,C or G
aggaggggccccaggtgnnccccccctggganntcatgagtatcatcgaccangcggnggaattcgnggaagtgacatcgtctttaaaccctgcgtggcaatccctgacgcaccgccgtgatgcccagggaagacagggcgacctggaagtccaactacttccttaagatcatccaactattggatgattatccgaaatgtttcattgtgggagcagacaatgtgggctccaagcagatgcagcagatccgcatgtcccttcgcgggaaggctgtggtgctgatgggcaagaacaccatgatgcgcaaggccatccgagggcacctggaaaacaacccagctctggagaaactgctgcctcatatccgggggaatgtgggctttgtgttcaccaaggaggacctcactgagatcagggacatgttgctggccaataaggtgccagctgctgcccgtgctggt

SEQ ID NO: 27189 - DNA, 459 bp, Homo sapiens
  misc_feature (1)...(459): n = A,T,C or G
ggagttcccaggatnncccccctaagnantcctaatgatcctagaacangcgccggaantccccaaggccgaggtccgcggccaggtgctggcgccgctgcccctccacggagttgctgatcatctgggctgtgatccacaaacccggttctttgtccctcctaatatcaaacagtggattgccttgctgcagaggggaaactgcacgtttaaagagaaaatatcacgggccgctttccacaatgcagttgctgtagtcatctacaataataaatccaaagaggagccagttaccatgactcatccaggcactggagatattattgctgtcatgataacagaattgaggggtaaggatattttgagttatctggagaaaaacatctctgtacaaatgacaatagctgttggaactcgaatgccaccgaagaacttcagccgtggctctctagtcttcgt

SEQ ID NO: 27190 - DNA, 464 bp, Homo sapiens
  misc_feature (1)...(464): n = A,T,C or G
tggagttncncagggtgncnccccccaggtanntcatgangatcctcgaacangcgccggaantcgcaaagcgtctgcaagcaaatgcgtgcaggccttcggacccctgccccgcgccgagcatcacgtgcgcttggagaggacctcgccctgtcaggacagcagcgtgaactatgggatcactaaagtagaaggacagccccttcacaccgaactgaatagagctatggacaactgtaacagtctccgaatgtctcccgtgaaagggatgcaagagaagggagagctggatgaacttggggataaatgtgatagcaatgtatccagcagtaagaaacggaggcaccgaaccaccttcaccagtttgcagctagaggagctggagaaagtctttcacaaaactcattacccggatgtgtatgtcagagaacagcttgctctgaggacagagctcactgaggcca

SEQ ID NO: 27191 - DNA, 473 bp, Homo sapiens
  misc_feature (1)...(473): n = A,T,C or G
agagcgttncnnccaactgatgaccattganaatgctggaacaangcggcggaattnccactgcacagagcctcttagtgtctgctctttctcatgtgatacaaagctgtttttccttctctcgcttacttcctgctccaaagccacttggatagaacactgactctttgctaggtaaattctggcctcccatccttgatttcctcatctatgcaatggggataataattgtccctacaatactgaattttgggggaatcaaatgaggatgccacctctatggatatggtttttattacagttacaatcagacaaacacttgatgacagtgccccttatgtaaccattgacccctcctgtggacccagaggtgcctgcgttcagcacaggaaagtggaggtgcagaggagattgtttcctgcctcactgggcccccaggtattgctaccaagcagcccacccctccccaccaa

SEQ ID NO: 27192 - DNA, 451 bp, Homo sapiens
  misc_feature (1)...(451): n = A,T,C or G
cccccccnnnaattgaacatgaaaactngnanntcccnaantnnncggaantccgcccagtataacgccattaagatcttttttttcatttttttgtcaccatgcatatagaattggagcgttgagaaaatttttcatttatatagagttccctggatctgtgcagtccatattgatcctttttaatggcaactgaatattacatcatgacctttcctcagttgtgtgacatgtggcttattatttttcacaaatattgtgagaagcaacaattgtggagaggaggccacaggtgtggttaatattatgagattcctctgaagggatgatatcaccttatgtactattgagagtgtgtaggcttgttactgtcccacttaagatgactggataagaaagtattgtgcccaatagttactcgatggacggtggaatattgaagagctgttan

SEQ ID NO: 27193 - DNA, 473 bp, Homo sapiens
  misc_feature (1)...(473): n = A,T,C or G
natcgagaccctgatgaccngtcgaggaanccgagccgggcaagcgcctccgtggacacgcacttcctgcgaggcctccgtgcgcaccttggccgagccgaaccgagccgagtcctgtccttgcaggccgttcgcaatggtggatgagttggtgctgctgctgcacgcgctcctgatgcggcaccgcgccctgagcatcgagaacagccagctcatggaacagctgcggctgctggtgtgcgagagggccagcctgctgcgccaggaatagcgctccagttacctgctgctggggtcggggctggagcctcactcactcggaagtgcttggaagtgtcatctaccctggccatccccgggatccctcccctgctaatctgaactgtgtcctgaaccccagctattggccaggcccctgttacaaactgcgcagaccacccatagccctgctgctgccacctgccctgctgccg

SEQ ID NO: 27194 - DNA, 468 bp, Homo sapiens
  misc_feature (1)...(468): n = A,T,C or G
ngagcgtccnnnccctgagacccctgnaatcctagnacagngcgccggaattcgagagctccagagagccaattctcatttcattgaggagcagcaggcacagcagcagttgatcgtggaacagcaggatgagcagttggagctggtctctggcagcatcggggtgctgaagaacatgtcccagcgcatcggaggggagctggaggaacaggcagttatgttggaagatttctctcacgaattggagagcactcagtcccggctggacaacgtgatgaagaaacttgcaaaagtatctcatatgaccagtgatcggcgccaatggtgtgccatagccatcctctttgcagtcctgttggttgtgctcatcctcttcttagtgctgtgacggcggggcctctgggtgcgagttcctcctgcatatgaaccgaggggaggaggagaagctgagcacgtgtgacattgccg

SEQ ID NO: 27195 - DNA, 458 bp, Homo sapiens
  misc_feature (1)...(458): n = A,T,C or G
aaataaggacatcagtaggccacngncgnggaattcggcatcctggacgccagcaccgcggcgcagagtggcgtgggtctggcacgagcacattttgagaagcagcctccctccaacctcaggaaatccaacttcttccacttcgtgctggccatgtacgaccggcaggggcagcccgtggaggtggagcgcacagccttcatcgacttcgtggaaaaggaccgagagcccggggcggaaaagactaacaatgggatccattaccgcctccggctggtgtataacaatggactgcggacagagcaagacctctacgtgcgtctcatcgactccatgtccaaacaggccatcatctatgaggggcaggacaagaaccccgaaatgtgccgagtgctgctcacccatgagatcatgtgcaggtgagatggccatgtcactcacacctcacccctctgccg

SEQ ID NO: 27196 - DNA, 567 bp, Homo sapiens
  misc_feature (1)...(567): n = A,T,C or G
natctgacttctagtccagcgtggggaattcggtggacataaatgcagtgaanaatagcagggcaccgatgttttagaaggggtgattatggagggcctccccgaggaggtgatctgaaccaaatgaaggatttctggtggggtgggaagagagtagctggtggatatgtggggagggtttggcagccataccgccgcctgtgtcatgactggccccaggcatcctgaccttgtcctcagttgtctccccctgttcctaagacccagatttcaaccagctggatggtcccacccgcatcattgtgccttttgtgacctgtggggacctgagctcctatgattcggaccgcagttacccactggacctagagggcggctcagagtacaagtacactccacccacacagccccccatctcgccaccataccaggaggcctgcacgttgaagaggaaggggcagctggccaaggagatccgcccccaggactgccccatcagcagagtggacacgtttccccagcccctggccgcccctcagtgccacacccttgctggccccttgagan

SEQ ID NO: 27197 - DNA, 528 bp, Homo sapiens
  misc_feature (1)...(528): n = A,T,C or G
ggngagcagctgcaaatgcctgttaagcctgaacgtgggctgggtccttcagatgggtggctggtctcaagtcgcaggggcagcccaggcactgtcctgggccttcccttctggctcctgacgcctgtgcttgtttccaggagcatcagatccatgctgctgctgactcggagccccacagcttggcacaggctctctcagctcaagcctccggtcctccctgggaccctgggaggccaggccctgcatctgaggtcctggcttttgtcaaggcagggccctgcagagacaggtgggcagggccagccccagggccctgggcttcgaacccggctgctgatcacaggcctgttcggggctggactcggtggggcctggctggccctgagggctgagaaggagaggctgcagcagcaaaagcgaacagaagccctgcgccaggcagctgtgggccagggcgacttccacctgctggatcacagaggccgggctcgcttgcaggctgacttnncgggcccagtggttgcg

SEQ ID NO: 27198 - DNA, 458 bp, Homo sapiens
  misc_feature (1)...(458): n = A,T,C or G
nattatagacatccctacgccacngccgnggaattcgctgtgacatcactgaaatgtgacagtagcagggctgggtctccaaggagtgtatgtggcagaggtgaggggtagagggtgagaaagaaatatagacaataggcgacagacagctgtgtgcattgtcacaacctccctgtggggtaagaggattatcccctctttttaaatgaggaagccagggttcaaagaggttgaataatctactcaaggccacactagatctagcccagctagatcatagtgggctggaaacctaaccaaggtctgatagtcaacccatgaaaccagggattcccaaaccatgctcatccattcagtcatgtcgcctgttttgactgggcgcctgctacatgccaggngctttttcttttctttctctttttttggtttttggtttttgagacagagtctcactctgn

SEQ ID NO: 27199 - DNA, 457 bp, Homo sapiens
  misc_feature (1)...(457): n = A,T,C or G
nttgatgaccatcgtacgccangncgnggaattcggnttcctctccagccaacggggcgtcgctgccttaatgggaggagcactcggaagggttggtttgggcctgaaactctcccaagtggcatagccccttttccggtatggggtctcctacacccacgcgcaccacctctccggtcgcgtggctgcctctacagcctacctatacgtccctttttccccccaactgggaattgagaggtaaggtctttctctggaaatccagcagtagaggaagggaccacccaagaaaactaaaaaccaaggcaccttaccagtctgtctggggacaggatccctgctgcaccttccccaccccctcctgggaagtgccccctcacctcagggcacccgcaacctgggctcctccctgagcgcaccggcccttcctgtcacccaggtccaccctcagtactcn

SEQ ID NO: 27200 - DNA, 458 bp, Homo sapiens
  misc_feature (1)...(458): n = A,T,C or G
cacctgaggacctcggccangncgnggaattcgggagggttgccctcagccctttccgtggcttctctgcatttgggttattattatttttgtaacaatcccaaatcaaatctgtctccaggctggagaggcaggagccctggggtgagaaaagcaaaaaacaaacaaaaaacaaaaccctggagtgttaggaggagagtgaaggtagaggggtgaggaagggtaaggggcagggctggtttcagctgggggctctcaccagccctcctttcagcctctacaacagagcagcttcccagacttctccaggaacccagaaacgggatggttgtcggcaaaggttgggagtggcttttcctctggtagccacacacctgagcactacggacagggaggcaggtgccaccttgacacctctcttccatagcaatgggaaagtgatgagtgcgcgagtcctg

SEQ ID NO: 27201 - DNA, 481 bp, Homo sapiens
  misc_feature (1)...(481): n = A,T,C or G
catcgatcgcgtacataggccangncgngtaattcgtgggtgtctcgaatcccagctactcgggaggcagagacaggagagtcacttgaacctgggagccagaggttgcagtgagctgagatcacaccacagcactccagcctaggcaaaaagagcgaaactccatctcaaaaacaaaagaaagaaaagtaaactggtgtgcactcctacagcagtgtctctgggagacagtcaaagaaggtctgagctgggaaggacctctgaggtcctctggattaagtcctcttgtagctgaaaacaggccaaagccaaagaggtgaagtaattggctgacgctctggaagccagctgatggccaagcccctttagtttaatgtgacctataatatcctggacccagagctgttccttcactcactagacatcagtgcttgaagtangaagccgtttggattttgtccaggctcggnggccgctcttg

SEQ ID NO: 27202 - DNA, 446 bp, Homo sapiens
  misc_feature (1)...(446): n = A,T,C or G
gggactgattcctccgaaggactgagaccntagacatngcccttgttggctgaaagccagaaatcaggggagaagctgaccttgctccagaggctcctcttgccgcggccatgttgctagcatcctttatgtttgcacttccagccacttacgatgtgaaatttggggagaatgtagtatttttttgcttcttttgtgtgttttttatttttgtgtttttgttcttttacttttctctgaaagtgattcatttattctggagatctctttatcattctctgagtcccagagcagatgtcccctcaggtagcaacctgtacagaagaaagcacgtgggttttagaaccagacagatctggatttgaatcccagatgcaataagatgaaggtgaagtgcctcacacaggatgtggcacatgacagtgcctgaagggctcccttcaagg

SEQ ID NO: 27203 - DNA, 458 bp, Homo sapiens
  misc_feature (1)...(458): n = A,T,C or G
nttaatagacgaccctaggccacngncgnggaattctccttgtcatcatggagaagtgccagcaggggactgggaaaagcactctacccagacctcacctcccttcctccttttgcccatgaacaagatgcagtggccctaggggttccactagtgtctgctttcctttattattgcactgtgtgaggtttttttgtaaatccttgtattcctattttttttaaagaaaaaaaaaaaaccttaagctgcatttgttactgaaatgattaatgcactgatgggtcctgaattcaccttgaaaaaaacccaaaggccagtcaggggggggggggaactcagctaaataaacctagttactgccctgctaggccatgctgtactgtgagcccctcctcactctctaccaaccctaaaccctgaggacaggggaggaacccacagcttccttctcctgccan

SEQ ID NO: 27204 - DNA, 453 bp, Homo sapiens
  misc_feature (1)...(453): n = A,T,C or G
ccctagggacctcngtagnggcngcaantccggtgtcctggagacaggattctcgagagccagacgccggccggattcacgctgggagcaaaactgccaagtatttggccgccgacgcattagagcttatggtgcctggtggctggaggcctgggactgggtcccagcagccagaaccccctgcagagggcgggcatcctggcgcggcccagagaggccagggggaccttcagtgccctcactgcctgcagtgcttcagtgacgagcaaggggaagagctcctcaggcatgtggctgagtgctgccagtgaccgagactcacccgtgcccttgcggcctcctggcccggtgcagctgccctcagggacagggtgggtgctctcagatgccatgggttgagctctactgagagccaaggcccctagaatagttgcggngcactctgatcgttca

SEQ ID NO: 27205 - DNA, 469 bp, Homo sapiens
  misc_feature (1)...(469): n = A,T,C or G
ggagtnnnaatcgatatccatactcagtgtggtggaattcggcatggaattgttaattttctgacacgtctagatgtgaaatttctgaaaatgttgaagcagagaaacattcacacacaaaaagcaacatagtcatgtgggtccagatggcctcagtcctagatgttggcaccctttgctgtgtctcctcagagtatcctgttccgcctcctgccagctggacctccctcagtggatgtcttccctcccccgaccccagcctgtcagtccgagcacagtgcaggtttggctctgacttgggcctttggctgcagtgggggtggatttcagagcctctcatggcagcatctaagtgaccagagctgggatgagagaggggaaggggcaatgtgagtggcgctatgggacgggccagccctgctcctgagccagccccgccctctgccccctggccctgggctctgtgcta

SEQ ID NO: 27206 - DNA, 495 bp, Homo sapiens
  misc_feature (1)...(495): n = A,T,C or G
aggagttaggggnnnnnnnnnattgtagacctgaatcactgtcgnggaattcgnatgttgcccaggctggtcttgaactcctagcctcaagtgatcctcctgccttggcctcccaaagtgttggggttacaagcgtgagccaccacgtctggccccactttctaatgtgctgacctggccgtatccttcccctgcctaaagccttgccctggggcagagtgggtttggagctcggccttacttcctgccctggggatggaggacaggcagcctcctgtttctgagcctgtctgctgtactttgggctggtggcatggcctcggtgcctcagtcttcccacacgcaaagtggagcgacagctcccacctcatagggacgctataagaactagcgatgtggggaccgggctaagaggggagccggccacagtgagctcaataaatgtctgctgctgccaaaaaaaannnnnnnnnnnnnnnnnnnnnnnnnnnnnnn

SEQ ID NO: 27207 - DNA, 478 bp, Homo sapiens
  misc_feature (1)...(478): n = A,T,C or G
natcgagnccctgatgacactagnccagngcggnggaattcggggttcatctgcaccacagagagttgaggccctaacaaatttcaggctcagccaagagcccatgaatggaggctgcaggaggctgagtccggctgccatgcacgtctcccctatagtggttctctggacaaggctttgtccatcccggtccccagctgagtgcccagcgctgagctgggtgcacggtgtgattccaggaggagagccaggcctgccctgccctgctggcttcctgactggagagacaggacccacagaaacagcctgacagcagctggtttggtccttgtgtgagggaccaagcatgtggcccaggctctaagctctgcggggattggagagggatggggagggaagggaaggcagctccaagaagaggtccctgtggcgaagttacctggggatcctggctggcccgccttcctggctgcagtcn

SEQ ID NO: 27208 - DNA, 456 bp, Homo sapiens
  misc_feature (1)...(456): n = A,T,C or G
catcgttgacctcngtagngncgngcaattcagctgagttcgaaccagacagatcctgggaccccctactctatccgccaccggaagaatctccgtccttgtctttccattctgccctcccggcttcccagtaagcacacagccccaggaccacccttgaccgtcctcaaccaagcgatgcatgccaggggcccccatggccaactgtccccagcactgcctctggcctcctcagtcctgatgctgctgatgagcaccctgtggctggtgggggccggccccggcctggtcctggccccggagctgttgctggacccctggcaggagacggggtctatgttgcccgggctggtcttgaactcctggcctcaagtgatcctcccgtctcggcctccccaagtgctgggattatacagctgtgagccactgcgtccagccctaagatgattcatacct

SEQ ID NO: 27209 - DNA, 458 bp, Homo sapiens
  misc_feature (1)...(458): n = A,T,C or G
naaataagacatctgtcggcacngncgnggaattccagggagcaagtttccgaggttggaaagaagtgacttcactgtttaacaaagatgatgatcagcatctcctggaaagatgtaaatctcccaaggccaaaggaactaacttacgattaaaagaagagttgaaggcagagaagaaatctggattttgggacaatttggttttaaaacagaatatacagtctaaaaaaccagatgaaattgaaggttgggagcctccaaaacttgctcttgaagacatatcggctgaccctgaggacaccgtgggtggccacccatcctggtcaggctgggaggatgacgccaagggctcgaccaagtacaccagcctggccagctctgccaacagctccaggtggagcctgcgcgcggcagggaggctggtgagcatccgacggcagagtaaaggccacctgact

SEQ ID NO: 27210 - DNA, 490 bp, Homo sapiens
  misc_feature (1)...(490): n = A,T,C or G
tgcaggtagggaannnnnnnaattgagacctgaggcacngtcggggaantcgctggtgaggactcgcaggtgcgtgtgcgtggcgcagcgctggggcggcaagcgcgatgtcatgtacacagccttcaaggcgctcggagattcggtggactacgtgcaggtctgtgactcggacacaaggttggaccccatggcactgctggagctcgtgcgggtactggacgaggacccccgggtaggggctgttggtggggatgtgcggatccttaaccctctggactcctgggtcagcttcctaagcagcctgcgatactgggtagccttcaatgtggagcgggcttgtcagagctacttccactgtgtatcctgcatcagcggtcctctaggcctatataggaataacctcttgcagcagtttcttgaggcctggtacaaccagaagtttctgggtacccactgtacttttgggatgaccggccctcacaaccgg

SEQ ID NO: 27211 - DNA, 498 bp, Homo sapiens
  misc_feature (1)...(498): n = A,T,C or G
tgggtataggagagncnnnnaatcgagncccatgatgacctcggccagngcggnggaattcgttttttcctagaaacaggacttcagagagcccatgtcctctatttcattaatgggatcttgacaagaggagtcggaagatttagagagcttctcagagcagttgaaacaagaacaactcaaaacctgcgaatgacaatagccaggcagctggcagagatcttgttgcggggtatgtgtgagcagagctactggaaccctctggaggatccaccgtgccagtcacctctggacgatcctctccgcaaaggagcaaacacaaaaacctacactctcactcggagagcccgtgtctactcaggagagaacattttttgtcctcaagaaaatacggaagaagccctgttgttattgctgattagtgaatcaatggccaaccgggacgctgtgctgagcaggatacctgaacacaagagtgaccgcctcatcagtctgcag

SEQ ID NO: 27212 - DNA, 457 bp, Homo sapiens
  misc_feature (1)...(457): n = A,T,C or G
catcgttgacctcngtcagnggcgngcaattcattcaagcagtcctttcagttcctacaaaatcaaatgatcttttttgtttatatcccctcctccaagaccagttccataaaaagcattttgcatgcccagtaacggtaccgcctacaaacacaaacttcatcttggaggatattgctggttaatgtagcacagtgtaccctggccttgttcccctaaccatcacctttatgaaatcacgttttatttttaagaggttcttggttatagtcttagaatcgggggaaagagggctgtgagactgaaataaatcttattgtcatatatttacattcaggattatagaggcagaattctgccatgttcatgcagaacatgtcaccatagccctaagcttaaaccttagtattgtaaaatttcactgggccaaaagccaaagataaacccagagtaacaa

SEQ ID NO: 27213 - DNA, 457 bp, Homo sapiens
  misc_feature (1)...(457): n = A,T,C or G
acttaagacgaccgtacgaacngccgnggaatttacttgcagctgcaccgggccctcaagatgattgtggatcccgtggagccacatggcgagatgaaatttcagtgggacctcaatgcctggaccaagagtgccgaggcctttggcaagattgtggcagagcgtcctggcactaactcaacaggccctgcacccatggcccctccaagagccccagggcccctgagcaagcagggctctggcagcagccagcccatggaggtgcaggaaggctatggctttgggtcaggagatgatccctactcaagtgcagagccccatgtgtcaggtgtgaaacggtcccgctcaagtgagggcgaggtgagcggccttatgcgcaaggtgccacgagtgagccttgaacgcctggacctggacctcacagctgacagccagccacccgtcttcaaggtcttcn

SEQ ID NO: 27214 - DNA, 499 bp, Homo sapiens
  misc_feature (1)...(499): n = A,T,C or G
gggtgttcggggnnnnnnnnnnattcgagacctcagtcactgtggngaaggagcangnggcggaggtgcgcgccaagctggaggagcaggcccagcagatacgcctgcatgccgaggccttccaggcccgcctcaagagctggttcgagcccctggtggaagacatgcagcgccagtgggccgggctggtggagaaggtgcaggctgccgtgggcaccagcgccgcccctgtgcccagcgacaatcactgaacgccgaagcctgcagccatgcgaccccacgccaccccgtgcctcctgcctccgcgcagcctgcagcgggagaccctgtccccgccccagccgtcctcctggggtggaccctagtttaataaagattcaccaagtttcacgcatnngnnnnntgnntnnnnnantgaaaaaaaaaagaaaaaaacgccctctttgtatttaagggccctataaaacccctgtgacaacctctgggtgtgtctttgaag

SEQ ID NO: 27215 - DNA, 490 bp, Homo sapiens
  misc_feature (1)...(490): n = A,T,C or G
cggggtcccggggnaattgagnaactcgagacctctagtccangnggnggaattcggcggccaggtcgcctgctcgggcctcccaggcgactttgccccactgcgcccgcgctctcttctcctttccatttctggaccaaggggctgccataaggagtctgtgactagagatgggaggtggtggccacggcctctcgctgtatgctgtgtggaaggtcgaatcatcatcatcataaaacttaatattgcccttatgtgccaggaactactatctcagcaatggagatgtggtgcttggccgcaatcgtgaatcggccctggaggggacacaggaaggggctgcctgcgactcatgacctcctgcgtgcctgcctgctgacctatgacccttcaagttcccacccctcagccacgcctgtgaggagggtcttgttttgtcgcctacgctggagtgcagtggtgtgatcacagctcactgcagcctcaactt

SEQ ID NO: 27216 - DNA, 450 bp, Homo sapiens
  misc_feature (1)...(450): n = A,T,C or G
cctgaggccttcgtcaggcggcaatcgttatcccagggccgtgggaccctggaggctttgaaacaggacaatgggctggctatacaggtgcaggctatggccaggaaaccccccaaatacaacggaattgaaagactcctgttggaatgctggcccccgcaggaaccaccatgatcccgattcacccaggagggccaccctcccgtccagccccccaagagcagcagggctccctcttgcccttgaacctcctctgccctgacaggcggcgtcacccagggctcaggatcctggcttccagcattccagaggtgactcaccaaccaaagtgtcactcaccaaccgaaggaccttgcacaaatgcaccagccttcccatgcctcagtctccccatctgtaaatgagtgttatgacggtactgtcataaactccctggaggatccaggtggn

SEQ ID NO: 27217 - DNA, 497 bp, Homo sapiens
  misc_feature (1)...(497): n = A,T,C or G
gtgccggnnnncccccccctgtattccatacgccangngcgggaattccaatgaaataaatgcaacagagttggagagctcaagtcacgtattcatttattctacaaatactctctaaatggctactctgtaaccaagcattttatattgcttttttattgagagaggacatacatgtttagaattcacacagctcaagtatacagcttgaccaattcttacattagtgtccatccatgtaaccatcatccaatctaagatgtggaatatttctagcagctcagaaggttctcttgtgccttctccccgttcctaatcccctccaaaagatacccattattttgacttctatcactgtgggatagttttgcctgctcttgaattcacggacattcaaatcgactcatccagtacatactcctttgggtctgngctgtttcgttcaacattatgtccaggaaattcatccctttgcttatgtgcaactatagttcatn

SEQ ID NO: 27218 - DNA, 450 bp, Homo sapiens
aatgagacctgaggacgttgcgggaactaatggaaacctgtggtatcgccaagggatcacgcccagctacccgcagggctccatttgggagcacgtgtccaacaacgtgtgccgagtgtccgtggggcccctggaccaggtctgggtgatcgccaacaaagtgcagggcagccacagcctgagccgggggacagtgtgtcatcgcaccggcgtgcagcctcatgagcccaagggccacggctgggactacggcatcgggggaggctgggaccatatctctgtccgggccaatgccaccagggccccccggagctcgtcccaggagcaggagccgagtgccccaccagaggcccatggccccgtctgctgctgaggcccccccacacacctacatgcagggacggtgcccagtttgggggatcaaggctgagccattcttgtgctggagtg

SEQ ID NO: 27219 - DNA, 497 bp, Homo sapiens
  misc_feature (1)...(497): n = A,T,C or G
ggctgtaggagggccnnnaattgagnccctcgagaccactagtcagtgcggtggaattcccggctcgagcggcctgcggacaggaagagggacgccgaaaagaaggacctgcctgtcaccaaaaacacgctcaagtgcactttccggtccctccaggtcagcaggctgcccagcagcggcgaggctgcagccacgcccaccatgtgcatgaccgtggtcaccaaggagaagaacaagaagggtgaggtggggcaggctataaggccacacggcgcacaagggcggctctgtgggagagggcggctcgcagtcaacagggatgacagcccccgggctggcctcgggcagcccacatgcgcaggcaggggcgggtggggtgagggagcctgaatcctgagggcagtgagggtcacgtgcttctgaccatagcctcaggcggaggccatctgggtgggcaggagagcacctgtcctcagtcaccgtggaaggcaggattn

SEQ ID NO: 27220 - DNA, 481 bp, Homo sapiens
  misc_feature (1)...(481): n = A,T,C or G
catcgatagcgtncactaggccangnggnggaattccgcatccagcagattgccgagggtgaaaaggtgaagcaggtcctcttggcacaggcagaggctgagaagatccgcaaaatcggggaggcggaagcggcagtcatcgaggcgatgggcaaggcagaggctgagcggatgaagctcaaggcagaagcctaccagaaatacggggatgcagccaagatggccttggtgctagaggccctgccccagattgctgccaaaatcgctgccccacttaccaaggtcgatgagattgtggtcctcagtggagacaacagtaaggtcacatcanaagtgaaccgactgctggccgagctgcctgcctctgtgcatgccctcacaggcgtggacctgtctaagatacccctgatcaagaaggccactggtgtgcaggtgtgaggctcctgcaagcccactctcttcagcagccacccggccctcc

SEQ ID NO: 27221 - DNA, 481 bp, Homo sapiens
  misc_feature (1)...(481): n = A,T,C or G
catcgaatatgcctagccagngncgnggaattcgttttctcatgcgaatatgcacagttttaattcacgttgttacactagcctgccgatgagacccagacacaggcagacctggcgctcttgacccctgattccagtgaggactggccctgaggagtccttgcagacctgctgcctgccccacgacaggcccaaagatggaccccccctggccttgtgacagctccccaagtgttctccggtggagaaactgcagaggactggggggcggggctccccagccatcaccatcctgtgtacaatggctgtagacttgtatatggctcctttaatattggaaagatgctgatgtacaattgtcgtgcatttgtgtgaacacattgcgttcccagtccatgccataaatgatgctctcaagcaaaagactggaggctctgtcctgtgcagaagcagcagccagactcccgcattcgatgttgtg

SEQ ID NO: 27222 - DNA, 494 bp, Homo sapiens
  misc_feature (1)...(494): n = A,T,C or G
tgaagttgcnnnnntttcgaaacccatgatgaacattagtccagngcggnggaattccccaaactgtgatgaagccgaccttagatttagtagtgtaagctagaataagtgagtgtttctatgagtggaaaaagccaaggtgtcatttatgtgtcagttcatttgtggtgatatagaattagctttttcatccccttacccttagaatccacgtattccccttcccactagcctaggtcataaagaggcgttgctttcactctcctatgccttttacgagtgctaagtgtaggatattttgtcaccagaacacaatgctaccgccccaaagtaaaagaaaccacttctggtcaatcaacactaccagcgtatatataagaaagacatctttctcttttctaaaagacttccctaacacttaccccatggctgcacagttggtggggtcctgccggagaggaagagacactcagaccagagaaggggtgtgcatg

SEQ ID NO: 27223 - DNA, 482 bp, Homo sapiens
  misc_feature (1)...(482): n = A,T,C or G
ntttgatcgagatcactaggccangnggtggaattccctgcccccacctgaagagagccatgtgtttctaggtcttccacgtgctgccctctcccctggatggagcccagagctatgtgtcctcctgtaggtgccatgaggggcagccgcagagacccggcctccagcagcctctcacctgaccacctggcacagctgcaaccaggggcgggtttcctcttttgctccgcccctgccctgagtgggtcctttccacccagacctcaccacagggtcacttggcaactgctggctcctggctttgccaccagatcaggcccagccacaggcacctgctctgtgtggacccaggagaggggtagcttgggtgggcatcgcttgggaagattcangaaagtctgtgggtgaagtagccagcgcgcgcacacacacacacacacacacacactcactcaggcctnctgcaatggctccatgctggn

SEQ ID NO: 27224 - DNA, 498 bp, Homo sapiens
  misc_feature (1)...(498): n = A,T,C or G
cggtcttaggagngccnnnnttttgagnccctcgagtaacactagtccagngcggnggaattcggacttgacctgagggtgttacttacggagttggccttaggcattcctgagtatcttcacaggacacatggatacttgccacttcctgtcccgcacaggggcctcattctcatggctcctggtctgcggctgttggctcagactccgtggaggcctctgatgcctgcatcagtgttgcattgagtttcaccctaagttgtcacctccagtgttctggactgttctgtgacatatcctagcccttggtgacagtgcttgtgatccttcctgaggtgcccacagggcccctgcagagggaatggagaggaaaagctgctgaggctctgagaccgcacctggaggtctctggacctggctgctgggaggagacagctgggctcagacgcacctgagggaaggctgccctcggctggctgatcacagccattctgtcct

SEQ ID NO: 27225 - DNA, 497 bp, Homo sapiens
  misc_feature (1)...(497): n = A,T,C or G
tggcgtnaggggagccnnnnttttganccatcgtagaccctagtccatgtggtggaattcgcgacatccgctgtgagttctgcggcgagttcttcgagaaccgcaagggcctgtcgagtcacgcgcgctcacacctgcggcagatgggtgtgaccgagtggtccgtcaatggttcgcccatcgacacactgcgagagatcctcaagaagaagtccaagccgtgcctcatcaagaaggagccaccggctggagacctggcccctgccctggctgaggacgggcctcccaccgtggcccctgggcccgtgcagtccccactgccgctgtcgcccctggctggccggccaggcaaaccaggtgcagggccggcccaggttcctcgtgagctcagcctgacgcccatcactggggccaagccctcagccactggctacctgngctcagtggcagccaagcggcccctgcaggaggaccgcctcctcccagcagaggtcaag

SEQ ID NO: 27226 - DNA, 458 bp, Homo sapiens
  misc_feature (1)...(458): n = A,T,C or G
agcgccacnncataccgtaatcagatgatntcagnaanngcgnggaantnngggacttaggtgtcctgcggccaactcatccccaaccctccagggcctttccactttccactgagtttggctcattgtggcctcgaccgctccagccatatcagtctcgccagggagaagccctccagctcgcagctgtccaagtaaagggggaggaaaatgatgtccccagcctaaggggccttcgggagagggcccgcaaggatggggcccccaaggatagaactcgcaaggatggggtccccaaagatagaagtggcaaggatgtggaccccaaggatagagctcacaaagatgatgtccccaaagatagagggggcaaggatgtggaccccaaggatagagctcacaaggatgatgccccccagatagaggtggcaaagatggggaccccaacgattgagttg

SEQ ID NO: 27227 - DNA, 484 bp, Homo sapiens
  misc_feature (1)...(484): n = A,T,C or G
cattgattagcactacgccagngnggnggaattccagtttccctcactgattcttggtgttttctccaccacaggcacatagggcagcccaacgaagccttaaagttcctgaacaaagcacgcaaggacagcacttggggccagagcgccatctaccacatggtgcagatctgtctgaatccagacaacgaggttgtgggcggagaggcttttgagaaccagggagctgagagcaactacatggagaagaaggagttggagcagcagggtgtgagcaccgccgagaaactgctgcgtgagttttacccacattcagactccagccagacccagctgcggctgctgcagggcctctgccggctggccaccagggagaaggctaacatggaggctgcgctgggcagcttcatccagatagcgcangctgaggtgtggctggtggggactggtgggcatgggcaggtggcanggccgagaagaccag

SEQ ID NO: 27228 - DNA, 467 bp, Homo sapiens
  misc_feature (1)...(467): n = A,T,C or G
agggttannnnnngatcgagatcatagnncnngcattgtagacctctagtccatgcggtggaattcgaactttataaccgataccagggaggattcttaatatccagactaataaagctatcagttgagggatttgcagttgataaaatggctggagaggttaaggctttcttcgagagtcacccagctccttcagctgagcgtaccatccagcagtgttgtgaaaatattctgctgaatgctgcctggctaaagcgagatgctgagagcatccaccagtacctccttcagcggaaggcctcaccacccacagtgtgaatcctgaggtgccgccattggcggttctgctgcttcgctgcagggataaggtggagctaccgaacagctgattcatatgccaagaatttggagtcttctttcaaaccagtgggggttggacaatgaatgtagttaactggttcctgctn

SEQ ID NO: 27229 - DNA, 498 bp, Homo sapiens
  misc_feature (1)...(498): n = A,T,C or G
tgggtgtaaggggnnnnnnnnnaatcgagnacatgagtcactgtggnggaattccggagacagacgttacgcgggctcgagcgtcctcggggagtgccagccagagttggtgacgaccacttcctcgacgtggggcgggcggacgggaagcctggggtcgtggccaccgcctcgggagctctgggagcccgggtgaccgcgtagaaatgaacacagaagcggagcaacagcttctccatcacgccagaaatggcaatgctgaagaagtaagacaactattagagaccatggcgaggaatgaagtgattgctgacattaattgcaaaggaagaagctggtgcagaagtgaatgtgttgaatgacatgggagacacgccgcttcatcgagctgcctttacaggacgaaagctgtagaaaggactcaacaaagaaagcttgaagaattacttttagcagcagcaagagaaggcaaaacaacagaactcacagctcttgtan

SEQ ID NO: 27230 - DNA, 496 bp, Homo sapiens
  misc_feature (1)...(496): n = A,T,C or G
tgttataaggggnnccnnnnnattgannccttgtagacactagtcagtgtggtggaattcctcagctgctggacccgaggtatgaaggaggcctgtggctggtcaggaagtgcactggtttgtgtgttcactctgcagcctctaaaacccatccactggtgtctcaggtgcacccaaagggaaagctgctggactgtaactatagaagattctatttctgtataagcctttgcctgacatgagaatcgtttgaaggcagaacagtgggatagtgaaggtaggtgtatggtggaggccagagccagagtggtgctgggttagcccgaagctttgctcctgagcagaacctagggttacttgctgtctctacccgccttgtcttctgtttttgcctctgggcaggaataagaattggatggggattctagatcccacacctacaaaaccctgagtttccagcccttaacagtgtgtccacctgactggagcagctgcn

SEQ ID NO: 27231 - DNA, 472 bp, Homo sapiens
  misc_feature (1)...(472): n = A,T,C or G
ggcggagnggggntttgagccctgagaccatcggacangcggnggaattcgagtatcattaagctggcctttgggccttttcctttctacctcccctgtgaccttttctagcctcagatctgttaattcttttggccccagccctgtccctcactgtcctctgtccttggaccagaaccctggggtcagacccatctcctgtagctgtccatcacactgacaggcttcttcctgagatatcctcaggttttctcagccagagagctgcctttagagtccaactgttgtacgtatgtcaccttcactagaaatgtcccatcatcgtgggaggggagcagggcacaggggatggtgtgcattcagagcattgggttgggggcttccctgttccctcagccccagtcgagaggaaagagaatcgggccactgccagaaagagagtcaagcaaacctggaagggcaaatctgagag

SEQ ID NO: 27232 - DNA, 459 bp, Homo sapiens
  misc_feature (1)...(459): n = A,T,C or G
ggattcgtgaccattannnanngnaatgatgttctttagtccatgtggnggaattcgggtgggcgtgggagcagcagccgtggagcagggcaccgagaagcaagtcgatgacgcagtcagttcctgacaggtccaggtgcaccagggcgttgggttgggccaggaaactgtagagggcattggcctcatccgtggcgaggagcccgggattcttgctcaggtccaggtatcgaagggagctggcaaatgctgggtttgccccgaaggtctggccgagtgcctggagccctcgaggggaaatggcagtcttggccaggcacagtttggtgaggccagaggggaagcagaggagctgctggctcagactgagaaaacccttgtcctcgatggggttgtgggacagagtgagggcatgcagcacacagcttccgttctccccaaacaccccggccagcttgt

SEQ ID NO: 27233 - DNA, 475 bp, Homo sapiens
  misc_feature (1)...(475): n = A,T,C or G
catcgagcaccactagnccaatagagaggcattcgnttcaatcaactaaagaataaatgatgaagaaattctccttgtagcacaactgtatgctgtgtaaattggtgtgagctcaaagcccagtcatgtgttttacctgtgggtgactctgttgtagaatggtcatattactgcatatgttatcatgacaatttgtgagtttgagtttatatttctcaaagaacaagttacccgtatatgcaacattgcgccattaaaagcttatttctctgtacacaaaatgggtaaaatcttgaaaaaacttagtaatttctcattcctaacacacagacagagtctcactctgtcacccaggctggagtgcagtggcgcaatctcggctcactgcaacctccacctcctgggttcaagcgattctgctgcctcagcctcccgagtagctgggactacaggtgcatgccaccacgcccagctt

SEQ ID NO: 27234 - DNA, 440 bp, Homo sapiens
  misc_feature (1)...(440): n = A,T,C or G
natgatgactgaagacatcgcganggacttctntacagncccctgttgccagcctccccagttcaaactggatccccgcctagtttggctgctggggctgcacacacagagccgctcagccattgtccaggccctgtggcagtatgtgaagaccaacaggctgcaggactcccatgacaaggaatacatcaatggggacaagtatttccagcaggtaacctctctcctgaaccctgggatctggggagcaggcggagttctccagcaggggaagtacctctaccaaggtaactaccacccctcccttctagattcctgagtagcagaagcagtcatggtcttggagccaagagaccgaccaggattctagttcaggccctactgtggattagctctgtgctgcagccaatccatgttagcccccccaagttaggaagacc

SEQ ID NO: 27235 - DNA, 491 bp, Homo sapiens
  misc_feature (1)...(491): n = A,T,C or G
aggggctnnaagggncganccnnnnnttttgannccactgatgatcactcgtacagngcggnggaattcctatgagaatacttatcaaacttatctaaaaaagaaaaataggaacagccatatgcatagtcagcccaacaggaaaggacatattagattaaaatacattgcggcctgggcttagtggctcacacctgtaatcccagcactttgggaggctgaggcaggcagatcgcttgagtccaggagtcgaaaccctgtctctacaaaaaaaaaaatacaaaaatctgcctgttgtcccacccactggggaggctgaggtaggaggtcaaggctgcagggaaccttgatcattgctactgccactccagcctaggtgacagagtgagaccctgtctccaaaaaaaaaagggaatatgtatgtgggtatatatagcaagagagagttctgtgatcattggaaggcaaaaacagtaccactgagaggggct

SEQ ID NO: 27236 - DNA, 455 bp, Homo sapiens
  misc_feature (1)...(455): n = A,T,C or G
aggcgctnnnnnnaaaagaactcaagacaattgtccagcnggtggaattcccaagttcccaagaccctgcttctcaatctggcaaatgccagacccatccaggtgcccacactgatgggcagctaagcaggcagcgaggagtcagtgctgccatccaaggagaaggtgccaggcagaagtgtgcttctggcttctggtactcagggtgccatggggtgtccccagcacagcgtgaagccgttcaagtgagggatcaggcaggaagccataaggctgatggggaaggagctggtgggagtaacgaccaggccacccgggctcagagaccattacccgcattacccctgtgccgcggctctttctagtgtcctcctcaggtgatgcccaccctcccctgggcccatccctgggtcacagcagccctctcccaccaggaggcacagaactccggcctg

SEQ ID NO: 27237 - DNA, 579 bp, Homo sapiens
  misc_feature (1)...(579): n = A,T,C or G
agacgatggacctcggatcacagtncagngnggngcaattctcggatcactgttaattggatgctctctccctgccacagcccttgtcaatgatatttcacagagaccctgggagcacctgctcaagagtcagggacacacgcatcactaaatgcaagttcccaggccctggctgcagtgggaggacctggcaagctgcactcttgctgagtccccagggtggtggaagaagaatgagaaacacatgaacagagaaatggggaggtgacaaacagtgcccccactcagactccggcaagcacggctcagagagtggactcgatgccatccctgcagggccgtcctgggcaccactggcactcacagcagcaaggtgggcaccattggcactcacagcagcaaggcaggcaccagcaacccacctcggnggcactcaggcatcatctacttcagagcagacagggtctatgaactacagccgtgggctgcttccaaggcaccctgctcttgtaaantaaagtttatgggaacacaaannnnnnnnnnnnnnnnnnnnnnnnnnnnnnnnnnnnnnnnncn

SEQ ID NO: 27238 - DNA, 483 bp, Homo sapiens
  misc_feature (1)...(483): n = A,T,C or G
ggggatgtccggagtgnnnnnnaactgagaccctcgatgacactcgnccagngcggnggaattctgcaagcagctggacgtcaagaggacgtcgaggggagcaaaccagtggaagagcacacgacgctggcacaccggcaggccatcagagtttggccggggtagtcggaggagagccctggtgctgagtggctcaactccaggggaaaaccatctcccttctggcttcaccatctgctgagagctacttccactcaataaaaccttgcactcattctccaagcccacatgtgaactgatttttccagtacaccaacgcaagaaacctcaggatacagaaagccctctgtccttccaataaggcagggggttctaattgagctaacacaaggcacctacggatgcctaaattaaagagcaaacttgtaacacacgcccactagagcttcagctgcaaaccgctagacactgccgtggagtcag

SEQ ID NO: 27239 - DNA, 572 bp, Homo sapiens
  misc_feature (1)...(572): n = A,T,C or G
agcgatgataccgtgatcgttcagaggggcaannccttgataaccatacgaacaagacccagcctccaggcagcgaggaggcagcggnggagccggtgcagaatgtcgcgccagaggaggagcagctcccgcctgagtccagctactccctcctcgctgaaaattcctatgttaaaatgacctgtgacatccggggcagtctgcaggaggacagccaggtcactgtggccatcgtgctggagaacaggagcagcagcatcctcaagggcatggagctcagcgtgctggactcactcaatgccaggatggcccggccgcagggctcctctgtccacgatggcgtccccgtgcctttccagctgcccccaggcgtctccaacgaagcccagtatgtgttcaccatccagagcatcgtcatggcgcagaagctcaaggcgaccctgtccttcattgccaagaatgacgagggtgcgacccacgagaagctggacttcaggctgcacttcagctgcagctnctacttgatcaccactccctgctacagtgacgcctttgctaagttgctggagtcg

SEQ ID NO: 27240 - DNA, 481 bp, Homo sapiens
  misc_feature (1)...(481): n = A,T,C or G
gggatgtcagggcgttccnnnnaattgatnnccatgatgacactagtcagngcggnggaattcacgtatcaagaatgtgaatgtgggacctttcctccatccctgttgtccggagccagctcactgtcttccacactggtgctaactggcccaggcactggagtggaatagaatgcagctggaggctacgcatggcctctgcagcacacgcagctggagagggcttctgtccctgtcagcggcagagggcgttggggctggccggggcaccttgtccctgctatggtccacatgctaacgctgtccacctgccaggtggagtgtatgtggctgtggccctccctcgtggaggtgccgtgctttaaagaggccttagtgcccgggatgggcacagtgttttgaagggaggtgggagctcttgctctcctggtcactgcagaatgacagagaaagtgaagctccatgcatgtgtgcgcgagtg

SEQ ID NO: 27241 - DNA, 460 bp, Homo sapiens
  misc_feature (1)...(460): n = A,T,C or G
aaataagaccntcgtacggagcgncgaggaatnnccagagccaggctggtggggagggagggaccgctgaagccagaggccctggccaagtccctgcacatccaggagctcctgtgtcactgccttgtggcatcccctatttctgtggggatggggaggacaggccacttttggatacccttggcccatgaagtgtcagccagagtggcttaaggattgcagagtggcagaaaaagccctggccatgtgcccacaagccccctatcccactcttttctgcctgctctgtgaccttgggcaagtcactgtccctctctgggccacaattgcctctaaaattgggacagacagctgctccctgtggcttctttcgcctggggcatcagtgcctctcccagccctgagcaacccccatcccacccccttcagagtcttggcagaatctggcctctgtaggtgg

SEQ ID NO: 27242 - DNA, 450 bp, Homo sapiens
  misc_feature (1)...(450): n = A,T,C or G
nctgagnacttgaaacgtccgggatcccgacagcgcttcggatggaggtcgaagtggatggacagaagttccaaggtgctggttccaacaaaaaggtggcgaaggcctacgctgctcttgctgccctagaaaagcttttccctgacacccctctcgcccttgatgccaacaaaaagaagagagccccagtacccgtcagagggggaccgaaatttgctgctaagccacataaccctggcttcggcatgggaggccccatgcacaacgaagtgcccccaccccccaaccttcgagggcggggaagaggcgggagcatccggggacgagggcgcgggcgaggatttggtggcgccaaccatggaggctacatgaatgccggtgctgggtatggaagctatgggtacggaggcaactctgcgacagcaggctacagtcagttctacagcaacg

SEQ ID NO: 27243 - DNA, 585 bp, Homo sapiens
  misc_feature (1)...(585): n = A,T,C or G
aggcggcgaacttcggagacccctnagngnggnggnantttcgatcactagtcagtgtggtggaattcggagaggcggctcctccaaaaccggcgtctggacttggatgcctgcaaagcgaggctgaagaaggccaatgctgcagaagccaaagccacgctctggaatgatgaagtggacaaggccgagcaggagctccgcgtggcccagacagagtttgaccggcaagcagaagtgacccgtctcttgctggagggaatcagtagcactcacgtgaaccacctgcgctgcctccacgagttcgtcaagtctcagacaacctactacgcacagtgctaccgccacatgctggacttgcagaagcagctgggcagctcccagggtgccatatttcccggcaccttcgtgggcaccacagagcccgcctccccacccctgagcagcacctcacccaccactgctgcggccactatgcctgtggtgccctctgtggccagcctggcccctccggnggaggcctcgctctgcctggaagaggtggccccccctgccagtgggacccgcaaagctcgggtgctctatgaa

SEQ ID NO: 27244 - DNA, 574 bp, Homo sapiens
agacgacgaattttgatcactgtccgtaggggcaattcttaggaaccgcgtctctcccatgccaagggctccttcaccccccaccacctatgggtacatcagcgtcccaacagcctcagagttcacggacatgggcaggactggaggaggggtggggcccaaggggggagtcttgctgtgcccacctcggccctgcctcacccccacccccagcgagggctccttagccaatggttggggctcagcctctgaggacaatgccgccagcgccagagccagccttgtcagctcctccgatggctccttcctcgctgatgctcactttgcccgggccctggcagtggctgtggatagctttggtttcggtctagagcccagggaggcagactgcgtcttcatagatgcctcatcacctccctccccacgggatgagatcttcctgacccccaacctctccctgcccctgtgggagtggaggccagactggttgaagacatggaggtcaccacacccagcggctgggaagggggatgcctccctggccccctgactctcagatctcttcccagagaag

SEQ ID NO: 27245 - DNA, 584 bp, Homo sapiens
  misc_feature (1)...(584): n = A,T,C or G
agaggcganctcggancccantnngnannnnnnannntttcgatccactatccatgtggtggaattcggctgggtggagggctgaccaaggtccaaagggcctgcgcagcctccgggagggcagcttctccagccagaggcttgtgtgagccatcgtgtgctgggcttgtttttaagtaagaaacaaggaaatcactccagattctgtcattccaaggaaagggaaggggacagttcaggtttctcagctgttcttaggggtcactgagcgtctacctcctcctccagaggaggctggctcagaacacctagaggagggggccggggatgcaccccccaccagaggctgccttcagcgtctcacgggtgcaggacagcgctcaggcttgggctctaagctctgtgtctagtgtagaacatggggaaggagcatcttangaactgctgaagtaacttcttactgctctcacaattctaaggaagcgggagaacggcctcctaccaacagcgcccaccccagagctgcctgggaaagggcagttttactgaaaggtgctttactgttcacctgcatctttcagcan

SEQ ID NO: 27246 - DNA, 472 bp, Homo sapiens
  misc_feature (1)...(472): n = A,T,C or G
gggagtgccggnntttgannncaactgagattcctagtaagngcggcggaanttctgggaagtccattcctttggagtctgtgttaccattctcaataaacctaatgagggctggcagaggggaactggccagtctctccttgggctttcaccgtacctcatgccatgtcacctgtaacagtgttgtagttacctgcttatgtctttgtccttgagggcaaggcccatatttatttttatttccagtgcttggcatatattaataaagaggtgcttaagatgtttgtacaaatgagttaaggtggagggaggagagttgaggcacaggtcagctggctttggcttctgtcttcttagtaaggtgaacagtgagtcatccacacagattataatggtagcagagctggagtctacagctccttgagtatgaaagtccccttgagtgtgaaagacaaaatgctggtcggaggaa

SEQ ID NO: 27247 - DNA, 565 bp, Homo sapiens
  misc_feature (1)...(565): n = A,T,C or G
ctcgacatcgatcactnatccagcgaggnccaattcgcgcctaaggagggactggtggaaggcgaggattatgtgctgctcccagcagctgcttggcattacctggtcagctggtatggtctagagcatggccagccacccattgaacgcaaggtcatagagctgcccaacatccagaaggtcgaagtgtacccagtagaactgctgcttgtccggcacaatgatttgggcaaatctcacactgttcagttcagccataccgattctattggcctagtattgcgcacagctcgggagcggtttctggtggagccccaggaagacactcgggcttgggccaagaactcagaaggctctttggataggttgtatgacacacacatcacggttctcgatgcggcccttgagactgggcagttgatcatcatggagacccgcaagaaagatggcacttggcccagcgcacagctgcatgtcatgaacaacaacatgtccgaagatgatgaggtacttaaggggcagccatgcatctgtggcctcaccaatctgggcaacacgtgcctan

SEQ ID NO: 27248 - DNA, 481 bp, Homo sapiens
  misc_feature (1)...(481): n = A,T,C or G
aggacgtganctcgagttcgtantccgtgtggtggaattcgctggatggtgtggaagaaaaacacttctctcaagctccctgttccctgagcacctcgccgctgcagaccaggctcctggaggcaataatccgcctctggcccctgggactggtcctggccaatacggctatgggtgtaggcagctttcagaggaaattagtggtctgggcttgcctccagctccccaggggcagccccagtagctacactgtccagacagcacaagaccaggctggtgtcacgtccatccgagcgctgcctcagggatcgataaagtttcactgcagaaagtctccactgcggtatgctgacatctgccctgaaccttcaccctacagcattacaggctttaatcagattctgctggaaagacacaggctgatccacgtgacctcttctgccttcactgggctggggtgatccttggtgcctttgtttcn

SEQ ID NO: 27249 - DNA, 478 bp, Homo sapiens
agaaggaattcgagctcagtacctatgcagtgtggtggaattccccacctgtaaaatggggcattgtagccttcacatgaaatggtacttctaaaggcatctgtgagccagagccctgctctgatggctgtgggagagaggggatatttttctaacctgcctccacccttcccggtgccatgggaggcagacactaagttctggggtctccagttttagtgggtggccactgattgcttctctctgtccagaacaacgagaacaagagcacactgcagttggagcagcaagtaaaggagctgaagaagtcaggtgagctgaaagagactgtaacctccgacccatccaagaagatgtgggaggcgggcaccagcctctggggaggggaggtgccaggccacaggcagctgcagcctggggacaggtgaccccagcaccctccggggcagtcctatgactgtttcttgcttcctgccct

SEQ ID NO: 27250 - DNA, 468 bp, Homo sapiens
  misc_feature (1)...(468): n = A,T,C or G
gggttcnnactcgtgatcatactcagtgtggtggaattccctctctgttcttcctgtagtatattcccctttgaaccaccctttcctgtctgaattctactttgcctcctttctcttcctcctctttgcatggtttgtgtgtatagacagtggaacctgaggatgggatctgctcagcctatcttcggggcaattgctgagcttcaggatgggctattaatgtgggataagcccaggtgcaaggggaggagggcaggctgggaacagagcggagaatgcccatggccctttattccttcttccctcggtccacgaacaggaagaggctgaggccatgctgggcagggtctggatgcccactttccatgcagcagcatttcattgctcanaaccatccttcctttcctttcgcccttggttcccacattcccttcgtcctgcccaagggcggggactgagagctggaag

SEQ ID NO: 27251 - DNA, 452 bp, Homo sapiens
  misc_feature (1)...(452): n = A,T,C or G
atatgaatcactgcatcngcanggcanttntgncattgnaaggcaagggaacttggagtagggaagggatgcagtcgccactcatattccagtacaacctcgctcctgtcttacaactactgtcttataacactaacaataagcttcatattatttaaaagactcatgtgcttggtaatattttctatcatagtacattcatattattttgctaccctgtttaaaagtgaatcattttggctcattctgggtaactcaaattccttttacaacttgcagaattattaaatgtatgggcacatatggatactcacaaagatatacaagtaagatagttccataacatgttcccttttgaaagcctctgggatgatgttaaaactatttccatctattgtaccctggatgaacttaattgctgttccctattgctgaattaactaggaaatgtc

SEQ ID NO: 27252 - DNA, 476 bp, Homo sapiens
agacgtgatttgaatcgtagtcagtgtggtggaattcgctaaggaagtggggagagcaggctctccctggcaccgagggtgcccaccctctccctggtgtggccccgtcaacatcagccacagcccaaccccattagtgggttagtgggtctgacctcagccccactcaggtgctcctgctggcctgcccaagccctgccctcagggagcttctgccttttaagaactgggcagaggccacagtcacctccccacacagagctgtccccactgccctgggtgccaggctgtccggagccaggcctacccagggaggatgcagagagctggtgcccatgatgtgcacccccatattccctctgccctgtggcctcagcccgctggcctctctgaccgtgaggctggctctcagccatcgggcacgtgcctggtcgggcctggcttaacccacgtggggcttggcacaagcgggcggg

SEQ ID NO: 27253 - DNA, 474 bp, Homo sapiens
  misc_feature (1)...(474): n = A,T,C or G
gatggaattgatttgantacatagtcagtgtggtggaattcggcggcggcggcggctgcaggcgaggcgcgccgggtgctggtgtacggcggcaggggcgctctgggttctcgatgcgtgcaggcttttcgggcccgcaactggtgggttgccagcgttgatgtggtggagaatgaagaggccagcgctagcatcattgttaaaatgacagactcgttcactgagcaggctgaccaggtgactgctgaggttggaaagctcttgggtgaagagaaggtggatgcaattctttgcgttgctggaggatgggccgggggcaatgccaaatccaagtctctctttaagaactgtgacctgatgtggaagcagagcatatggacatcgaccatctccagccatctggctaccaagcatctcaaggaaggaggcctcctgaccttggctggcgcaaaggctgccctggatgggactcct

SEQ ID NO: 27254 - DNA, 479 bp, Homo sapiens
  misc_feature (1)...(479): n = A,T,C or G
agaatggaaancttgagttcgtatncagtgtggtggaattcccagctgtgtgtgcggttgcaagagtgcccacagcccggcctgctccgagccctggtccctggagctgccatgaacatgccccagtccctgggcaaccagccactgcccccagaaccgccatcccttggaacccctgcggaggggcctgggaccacgtccccacccgagcactgctggccagtgcgcccgactctgcgcaacgagctggacaccttctctgtccacttctacatcttctttggcccaagtgtggcccttccccctgagcgcccagccgtgttcgccatgaggctgttgccagtgctggacagtggaggcgtcctcagcctggagctccagctcaatgcgagctccgtgcgccaggaaaacgtgacggtgtttggatgcttgactcacgaggtgcccttgagcctgggggatgcagcagtgacctgttc

SEQ ID NO: 27255 - DNA, 458 bp, Homo sapiens
  misc_feature (1)...(458): n = A,T,C or G
catcgatnttcatagcatcggcacgngccgnggaantttaactattcattctcctcgctgccctgtaaggacatccgtgtatatttctgttactttatccggcttgcaagttaaaggaacgacgatggtctctttgtttctttaagttttgccgagacatggttatgcctaatttatttataaaaggggaagtggaatcattaaagtaataataattattaataacagtaatggtagccgagtggcacgcgggggcgtgtgctctgcgggacagtccccacggccagcgacgtccaggtcaccaatgggattctttttgctcttgtcttgagaattttttcagtcctatttagctggtgaaatccctagcttgttcttgatacacgaacctatttattctcgtggntttaagtcctccctgccctctctcctctcccctgcagcagggcagggacccn

SEQ ID NO: 27256 - DNA, 457 bp, Homo sapiens
  misc_feature (1)...(457): n = A,T,C or G
atcgaccccntnatcgagaccctctgaccgngcggtggaattcatcccagaagcgggtttgaacgtgcctagccgtgcccccagcctcttcccctgagcggagcttgagccccagacctctagtcctcccggtctttatctgaggtcagcttatagatgaacggggagccgccctcctgtgctgggctaggggctggaggctgcatcttcccgtttctagggtttcctttccccttttgatcgacgcagagctcagtcctggccgggacccgagccacctctcctgctcctgcaggacgcacatgggtgggtctgaatccctggggagaggagcaccgtggcctgagagggggcccctgggccagctatgaaatctgaatgtctcaatcacaaagacccccttatgccaagccaggggcgactgcctctggtctttgtccctggatgctagcacatn

SEQ ID NO: 27257 - DNA, 538 bp, Homo sapiens
  misc_feature (1)...(538): n = A,T,C or G
attgaaacccnatcgagagngcgtttgaacactattcgcaccctccagcaacaagagggctggaagggggagctgcaggccaccctcggctctcccactgctggggcggtgatgttcgggtgacatgtttgaaaaatactcttaaagataccaactgttcccttatatggctaatggtttgtgcagccaccagcgatggcggcccctattagagaccaggtttgttaaaacaccaaatattgctgtccacactagacattaaccggcttcagaaaagatggacaccttttcccacgctgtttcgcttcttaactttggtccagctttagccaccacacagcgtgtgagggactgctgctgcggagtcagcctcggttggtccttccgcctcccaccaacatgcgccgcttctgagagacacagcttccttgctccaagctggtgcacaggcctgtcgtgagggaccctgcttccgagactcctggggggttcttgcttcaccactggagaggtgtcagtcagtccgagttgaacaggt

SEQ ID NO: 27258 - DNA, 467 bp, Homo sapiens
  misc_feature (1)...(467): n = A,T,C or G
ngcgggtnnnccccaactgagaccctgagnacgtgcggnggaattccttcaaggagaacaacgtggtgtttaaccggttcttcgagatgaagatgaagtatgacgaaagcgacaacgcgttcatccgggcatcccgggcccttacggacaaggtcaccgacttgctggggggcctgttctccaagacagagatgtcggaggtgctcacggagatcctccgggtggacccggcctttgacaaggaccggtttctgaaacagtgcgagaacgacatcatccccaatgtcctggaggccatgatttctggagagcttgacattctcaaagactggtgctatgaagctacttacagccagctggcccaccccatccagcaggccaaggcactgggtctccagttccattctcgcatcctagacattgacaacgtcgacctggccatgggcaagatgatggagcaggggccg

SEQ ID NO: 27259 - DNA, 565 bp, Homo sapiens
  misc_feature (1)...(565): n = A,T,C or G
ggatgggtcccgccccntttgaaacactatgcagagngatgagatntcctggcagagnggcggaantcgtcatagcttctttggtctctggatgaaaggaaataaatgcaaattacaaattcacttgtcttcaaactcttagcctggaaccgcttgcacaaataaaagcttacatgggagtccaaaatataaaataagtaagagcaagtctgatcccattgtggtaaagatgggtacctacagctgtgcttggccagtctcccaagatccccctgcaaaacccctcaggcttctgattgtacaatttaaaaagcaaaaactaacaaacaaaaaaatactgggaattgaaactgtttgttgcaatcttatgtatggaatgtgactagctttaagaattaaaatagctctggggagtcaggcgtttcattgctgaaattgctatctggaatgccataatgagaatagggagatgaggtggggtagctaaattagaggcagctaagcagaacttccctgtaagagtcattgtgactcctcagagactccttctagtgctgcatgtgtn

SEQ ID NO: 27260 - DNA, 474 bp, Homo sapiens
  misc_feature (1)...(474): n = A,T,C or G
cgcccccccccccccccatagaagaccattataggagngcggtggaattcccggctcgagcggccgctcgagccgggccgctgtccggctcccgggctgtcctcagcaagggcgcggtctggtactcgtgcgtcttttatcgcctcaggttccctccgccgactagcgcgcggagcccggttctccatcgcgcgcacggcagcctagcgcaatgaggcgggcagcactgcggctttgtgccttgggcaaagggcagcttactcctggaagaggactgactcaaggaccccacaaccccaagagacagggaatcttccacattcatgaagttcgagataagttgcgggagatagtaggagcatccacaaactggagagaccatgtgaaggcaatggaagaaaggaaattacttcatagtttcttggctaaatcacaggatggactgcctcctatgagaatgaaggacagttatat

SEQ ID NO: 27261 - DNA, 472 bp, Homo sapiens
  misc_feature (1)...(472): n = A,T,C or G
cccccccccccccnccttgagaccattaatgaagacatctagaccangcggnggaattcagaagtgatacttctgaggctcagacttttgttgtttgctctgtatcgaggaggtgtctcattctgtcgcccaggctggagtgcaggggcgtgatctcggctcactgcaagctgcacctcacgggttcacgccattctcctgcctcagcctcccaagtagctgggactacaggtgcccaccaccacgcccggctaattttttttgcatttatagtggagacagggattcaccatgttagccaggagggtgttgatttcccgacctcgagatccgcctgcctcagcctcccaaagtgctgggattacaggagcgagacgatgcgcccggccggagggacagatctaacaggcctagcagcttccacttttgtcatataggaatgtggctctgagacctccatgggacgaggcca

SEQ ID NO: 27262 - DNA, 478 bp, Homo sapiens
  misc_feature (1)...(478): n = A,T,C or G
ccccccccagccccccccccatagaagnccnttatagatgattattagacagngcggaggaattcggataacatgccaacagtacagtgaacactttaaaaggtagatatttacagaatctctcatagaccttttttcttcttttcttttttcctatttgaacttgctttgctagttggtaagtataacatttgaatttacaaagcattgtcattgtgaaccatcaccctaatgcattgcatgcccaattatatttcataataaaaaccttgattcctctctctctgctcctcagttaacacctagaaaattctgcactgtgtctctcatatctgttatctatcttctcttttgctttctcacttctgcttgctactccatttcttcattcacaacaaagaaagaaatgcagtgatagttctcttcctcccaaaacctccgctagaaaacattggccatctcaaggtaaacagcaatg

SEQ ID NO: 27263 - DNA, 470 bp, Homo sapiens
  misc_feature (1)...(470): n = A,T,C or G
atcgagcactgaganctctaggcagngtcgtggaattccgctaggctggagccagcatatgtttttgaggtagcttgcctctcagaggctttttagaggatgtgtgacctgtgcagcttcctgatgtcagtgacaccatggggatgttgagtcaggtggtcttggagcctggacttttcagcctagctgcaggagccagcatggagggacgtctcctgagcatgtgcttggtgtggctcctgggtgggtgggcggctgcgtctctggggtatagaaggagccaggtgcttgtggaagaattccataccacttttctttctgctagtgtggatttgcagaggtgatgggagatggacgaggtggtggacaaccagaagttcaagaagtcatgacctaagacagtttcaagaactagtcttacaggaaggagaaccctagaagaaaactgtgactgctccctggagccaggn

SEQ ID NO: 27264 - DNA, 459 bp, Homo sapiens
  misc_feature (1)...(459): n = A,T,C or G
catcgatattgatnagcatcggcacgngccgnggaantcgntctgggtcaggcattgttctaggtgctggagatagagcagtgaacaaatttgcttttcttactctcagcatgatgccttttccagtggactacttcacagcctatcatattgagaaataaaataattgagtaaaacgtgattaggaaactgtctgcctgtgagacaattttctgaaccacagttattaggatagcgatagaatccaggtcagggtaaaaatatttcctctgaaaacgttgtaggaatagaaaatgaatgtaatattcataagatataccattgtatgttcattacatacattaaagataacatcagacctttgaatactcatggtgttaggtactgaaaaacattgttagcactaaaatacaaaatccctatccacagaatacagctctcagaataaaagaaaggaag

SEQ ID NO: 27265 - DNA, 572 bp, Homo sapiens
  misc_feature (1)...(572): n = A,T,C or G
cgcccggccccccccccattgacncccctcnnnnnnnattgatanntcctctgccagngnggcggaantcggtggagattgtgaagaagctggagtctcgccagcggggctgggaggaggatgaggatcccgagcggaagggggccatcgtgttcaacgccacgtccgagttctgccgcaccttgggggagatccccacctacgggctggctggcaatcgcgaggagcaggaggagctcatggactttgaacgggatgaggagcgctcagccaacggtggctccgaatctgacggggaggagaacatcggctggagcacggtgaacctggacgaggagaagcagcagcaggatttctctgcttcctccaccaccatcctggacgaggaaccgatcgtgaatagggggctggcagctgccctgctcctgtgtcagaacaaagggctgctggagaccacagtgcagaaggtggcccgggtgaaggcccccaacaagtcgctgccctcagccgtgtactgcatcgaggataagatggccatcgatgacaagtacagccggagggaggaataccgn

SEQ ID NO: 27266 - DNA, 452 bp, Homo sapiens
  misc_feature (1)...(452): n = A,T,C or G
caatgaatcactgcatgngcgnggcanngncagacacagcagagtccttactgtctgagcccattcatatgaagttcaaaaacaggccaaacgcatgtatagtggccaaagtcaaaacagggtgggtagaatagcagcttctttctggaaattaccatgaaagaactttctgggtgacggaaatatcctatatcttcatctgggtagtggttatagatacatttataggtaaaatactcttcaggctgtacatttttgtttttattgtgtatgacatatacctcagttacacacaaaaacccattatgtacctaccagaatggttaataaaatttaacagattgacaattctaagccttggcaaagaggtggataaacaggaattctcacacactgttggtaggaatctaaactagtgcaaccactttggaaaatagtctggcattaccaag

SEQ ID NO: 27267 - DNA, 456 bp, Homo sapiens
  misc_feature (1)...(456): n = A,T,C or G
ctttgatttgatagcatcggcacgngccgnggaanttngaactttcccctgcgagattctggtgaaaggggaaatatgctttgagtcttttattctgcgcaagtgcacagtcaaggagagagtcttgggaaaaccaaggatagtttccggagatgacttttggactgcggaaacgtttgtcagaggaaagaggcttcagtttaatgtgagatcattggaagttgaactattcaggcggcgagcagagcccctttctccatcttcccactgtatggtcttgtcccttagcctataatttcttataaagagcgttttgaagactaggtttttactggcagggccctgattcaggctcacagtataaagagagaagtcagagaatcctagaaatttattgcttgaagaaggggttggtgtcctcatatctcaccttcctcaggctgggcttcatcaccn

SEQ ID NO: 27268 - DNA, 451 bp, Homo sapiens
  misc_feature (1)...(451): n = A,T,C or G
tattgagccttantgagagtcatccggaannccgccgagcgcaaagcattggcaggaggggcacggtggaacagttatcttcagattatgaagagattaggagaatccgaagggaaaggaataagatggctgcagccaaatgccgcaaccggaggagggagctgactgatacactccaagcggagacagaccaactagaagatgagaagtctgctttgcagaccgagatagccaacctgctgaaggagaaggaaaaactacagttcatcctggcagctcaccgacctgcctgcaagatccctgatgacctgggcttcccagaagagatgtctgtggcttcccttgatctgactgggggcctgccagaggttgccaccccggagtctgaggaggccttcaccctgcctctccttaatgaccctgagcccaagccctcagtggaacctgtcan

SEQ ID NO: 27269 - DNA, 468 bp, Homo sapiens
  misc_feature (1)...(468): n = A,T,C or G
cgccccccccccccccattgagnccccattgagancattagaccgngcggnggaattctgcaagtgtaggaaggcacgctggatcgtctatctgattccaaagctgtcctttgccatctcatcccttggcctgccccccaaccctgaggatgcccctgccatccccccaacctcctcatattgcctctgaacccagatggcaatccatcccggttctctctgagggccacgggcttgggtagtggaaagggtgtttgggaaattgttaaatcagttacccgtagtagagctatttcttgtacttctaagttttctagaagtggaaggattgtagtcatcctgaaaatgggtttacttcaaaatccctcagccttgttcttcacgactgtctatactgagagtgtcatgtttccacaaagggctgacacctgagcctggattttcactcatccctgagaagccctttcg

SEQ ID NO: 27270 - DNA, 474 bp, Homo sapiens
  misc_feature (1)...(474): n = A,T,C or G
agagcctcnnnnnnnatcgtagatcgttagtcagtgcggtggaattccaagaagttaactcatacattcattcattcatttacttgttaacttagtcaacaaatatttgagggtcttaccatgtgccaagtacaggtctaacactgaggatataatatagaattaataacaggcttttttagaataagtataggatttcaagtggtagtaagtattcagaaagacaacatggagtcataggatagagttccaaggtagggttggggtgggtgatgtttttagatcggtggctggtgtaagaacctgaataaagaatattctagtctaaatgagcttgggataaggctagtatgtctgaagggagcacagctggtggtcaagggcggtggttgttagaaacatattgggaaattccggcaagaaccagattggggtaaggtcttaacggtgcaaggagaggagtttgaatttatt

SEQ ID NO: 27271 - DNA, 455 bp, Homo sapiens
  misc_feature (1)...(455): n = A,T,C or G
cattgacgnccnattgtagaccatctagnccgngcggnggaattcagccagggagaggggcctggcccgtccagcactgagcttcctcagataagggtggcagccaggtgacgacaggtggaaaaaccacagccaggtgacaacaggtggaaaaaccacagccagggtcaggtacccagatggcctctgctcccttctgtgtggtagcagaccagaagatcaggacaccagggcccttggcgaccctctggagtggtgtgcacctccttctctctgctgggcccaggcatgcggtgcacacagacacacacacacgtgcacctacacctgcacacagcactagctgaccccagatgtccacccccccagggaaggccccagcctgtttccctgcctgggaaactagaaagagggcttctttctcctcctgtggagggtgcaggccgcccaaggac

SEQ ID NO: 27272 - DNA, 477 bp, Homo sapiens
  misc_feature (1)...(477): n = A,T,C or G
ccgccccggcccccccgtagagnccctnatagatgaccattagacagngcggnggaattccgcaccctggccaggctcagcgtgaggcgtgagagccccgtcctctcttaatgcattacccaccctacaccacagccttttctggctgtcctggagtccctcaggcccccaccaaagcgcccctcatcgctgagaaaagtcacccatggccgtcccagcagcagcttgcccaaagcaaaacttttctttttctaatattttttatttaccttagaaatccatgtggattttgcattccattgcatatttccaagtcggctttgctataaacacaaatattctccagaaagacttgccatgggcatccttcaggcatgtattctagggatacacatacccacttaagtagcagggatggctgtcaaacagcaccccacacctcccacccaaagctggagccctctgtttcctatgtga

SEQ ID NO: 27273 - DNA, 472 bp, Homo sapiens
  misc_feature (1)...(472): n = A,T,C or G
gatggnnnnnnnnnatcgagatcattagtccgtgcggtggaattccagaaaaatagagaaattttaatttgcaaacttactgtattcttccccctcacttaagccagagtagtgtttttcccatcgcgatcttcgctctagctccggtgtcctcccaagctctgtgctgctgttgccagcgtatcaacctctctgtcttcttcgggtctaagttgtattggcctgaacgagtttttcagatcccagagttaataatgatactgtgcaccacagagtgcaggaagcgcacacgttcatttgatcgtcccccgcctgcaggcaaggcagatggggaccccacgttttgctgctcagactctctcccactgttggttccttgtatgtttcgtattctccctggagacagtggtttcttcagagacaaagatgctgtctggttcccggcaccagtttgcccacttccttatatgca

SEQ ID NO: 27274 - DNA, 471 bp, Homo sapiens
  misc_feature (1)...(471): n = A,T,C or G
cccccccccccccccatagtagacattatagagngcggtggaattcgtcaagaagggcggcggcaagaagagcggcaagaagagttacctcagcggcggggccggcgcggcgggcggcggcggcgccgacccgggcaacaagaagtgggagcagaagcaggtgcagatcaagaccctggagggcgagttctcggtcaccatgtggtcctcagatgaaaaaaaagatattgaccatgagacagtggttgaagaacagatcattggagagaactcacctcctgattattcagaatatatgacaggaaagaaacttcctcctggaggaatacctggcattgacctctcagatcccaaacaactggcagaatttgctagaatgaagccaagaaaaattaaagaagatgatgctccaagaacaatagcttgccctcataaaggctgcacaaagatgttcagggataactcggccat

SEQ ID NO: 27275 - DNA, 456 bp, Homo sapiens
  misc_feature (1)...(456): n = A,T,C or G
ccatcgaccncctnattgacgnacnattagncagngtggtggaattcataaatatctcagtacatctctctaaaagataagggactctttggggaaaaagcagaagcaaccccataactacaataccatgatcacccctagaaattataattttggaccactgttttttcagtgcaccaaataggcagaagcaaaaggaaagcaagcaggtgaccccaaggtcactccttgagtttgcagcttacctgaacatctgggctcggaaccagccaggggcttcctctcagcgtgtgctgtgggagaggccttggagagagagggagcaaggcgacaacttggcctctgagcccagggcttttatgctctggtgtggcgacagcataccccccgctaacagtgggaaggaaacacaaatgctggtggcttctggggtgttgagagggtcccggtgttctt

SEQ ID NO: 27276 - DNA, 493 bp, Homo sapiens
  misc_feature (1)...(493): n = A,T,C or G
agggatacannnctcgatacctgagtgncgtgtcgnggaattccaacgccaagagggaaccctagtgtagcccttccagcgctgtggactctgggtgacagttttgcgttagggtagcttcatggattgccgtactctatgagggatgttgctggtggggaggctgtgcctgtcggggcagggagtacatggcagctgtattctgtaccatcctctcaattttgctgtgaacctaaaactgctctaaataataggcttcttgttttagtcacttactaagaaaagaagtcagtgaaagattttgtccttgaattaggatcccaagaggaggagctggtggagaagaagaggacagacaccacagtggccatagcagaagggtcgagggttcttctaatgagcccgtttaggggccataagctgatggccctactcttaaaaagcccaggtcagttaaccgcagcaggaaagatagcggcccattattgaaagg

SEQ ID NO: 27277 - DNA, 388 bp, Homo sapiens
aaatgaataggcggtactgagttgtgcacagtgggatgtaaatatcgccttcctctccctatatccctcccatgaaaaatggcttcctggccgggcgtggtggctcacgcctgtaatcccagcactttgggaggccgaggtgggcggatcacctgaggtcgggagtttgagaccagcctgaccaacatggagaaacccagtctctactgaaaatacagaaaagttagccaggcgtggtggcacatgcctgtaatcccagctgctcaggaggctgaggcaggagaattgcttgaacccaaggggcggaggttgtggtgagccgagattgcacctttgtactccagcctgggcaacgagcaaaaaactctgtctcaaaggaaaaaaaaag

SEQ ID NO: 27278 - DNA, 439 bp, Homo sapiens
  misc_feature (1)...(439): n = A,T,C or G
nattgatgacccttagaccagngnggnggaattcgacacagagacccccgtgccaaatcctgggcatccccagccccctggcccctcccacatcccccgtgtattcaggaccccatctgctgagctctgacctgcccccgctctgccatcagcccctgctgctcctcggccagagctcccaggacgcagggagaccctgggagagtgaggtcatcccggggccatggaagctggcaggagacactggtctcagaggagggatagagacgcagatttcagatgtaagaagcccgatccacattgcataagtggacccagctgccagatgtgtgggcagctgcagggagtggcccggggtgctgggcccagctgtggttgttcttttctgggtcaggagtgactgcggagtggctgggacgctcctgccgggggaccctcc

SEQ ID NO: 27279 - DNA, 444 bp, Homo sapiens
  misc_feature (1)...(444): n = A,T,C or G
actgatnnactncgtagactttagaanagncnggnggaattcaattcaaaaatgattaagaaggatgttgagcctgaaagtataatttttctgattttatcattaccatcctcattaataccaccaatctctaaataccattgcaggatgctgattccatgttttgaaattcaaattgctcagctgcctttaaattttatttttaatactaccttctccctcaccccccccaacaaaaaaaaatccaacaacacaaattctgcccatcagttaaagtttactttcacggcaaacatgcccacaggaaattcaagggctgaggggtgagttggtctgtgggtaaaatttcgcagaatgtgataagagttcatgaccttccgatagaggatactaatgcttaactcaacaaggtcctaaaccacaatcttcttgtaaaactattag

SEQ ID NO: 27280 - DNA, 433 bp, Homo sapiens
gggcgattggagacctctgtcattgagggcatattaatggtgttaaatagtccagacagaggcggtgttgcccgaaaaacctagaatattcaccatctgagcttttacgggaaaatttgctaatatctgttctcatgcattaaatacaatgtttgttacaggttaaggaagtttctgactatttttagctttctgaatgtcttgtggttgtgtgtgctttaaaattaggactaaatattaaatttaccagttgcttgttaggggcctatcttttgagatgcccaaagtttcccttttttagtctcttcatgtagtgagttgtactaacagattctctaatgttgaaccgtctttgctttcccgagatagactttacttgctccctggggattggattctgtttgttaatacttttattttttgggtaatacat

SEQ ID NO: 27281 - DNA, 439 bp, Homo sapiens
  misc_feature (1)...(439): n = A,T,C or G
tcttgatgaactttgannacctcgngaaaancaagcnttngtaggggggattagtcaaagggtacaagcatttaatttctttgtttttagacaattttaagacattatgttctttattgggacagaatcctaagttgccattaagacactatcataactttagagaaaatctgtgtagaactctgcagtgtgcaagttttagcatccagtagtgcttttacagttttttttcactgtgcatccttactagctgattcttgcagccttgtgtactattttctgggactgagctatggctgtaaataagaggacaggtggtttgtaattatgggccacaatcatttacattaagtgctttctaagtccctcttccaggctttggagttgaatggattgatgtgtgtaatgaaaggattggagattattggctgataaatct

SEQ ID NO: 27282 - DNA, 476 bp, Homo sapiens
  misc_feature (1)...(476): n = A,T,C or G
gggtaccnnnnntttcgagnccatgacgaccattcgtccgngcggnggaattcggcagaggcagacgccgcggcgcaggctcagcacgggccacgaggggccgcctgctttgctccggccggctgttcctgccgtctcacggtaagcccgagtgacgccgcacacaaaatccttggtcactccggatcgaactcgctgctcaaagcaagtgccacacgggagggacgggtgtcctgtcagcacctaggacagggtcagggctctgcgccactgtctcccctgcagcccaagggcctgctctttgaggctgtgacacccagacctggtggatttgatttttatgaattttgatgaaattacacaaaacttatttctaaaatcacagccaagtgaacgtgacttcctgatagccctctgctccgtccacgcacgggcagtctggccacagggtacgcctcctctgggggctcccaggn

SEQ ID NO: 27283 - DNA, 442 bp, Homo sapiens
  misc_feature (1)...(442): n = A,T,C or G
cgggagaattgcgcccattannnattgacgacccctagtccatgtggtggaattccaccagtaaaaactgtacaaatggagaaattgtggccctaaatagattatggaaaggacacttgattacggtatgggagctgaaaaaaggaggctgggtatgtgggtctcagatgactcaaatattttgctgcactgtgagtatttaagtctaataatgacaatgcaaggctgtagtattgacgttggggttacaaataaatttcagcaggtagattaactgcaaatatggaagctgtaatttatgaggattaactatattgacagataactttgaccctataaaaatggaaaagttccacaagacaaaaatctagacagacatacaattcaagtcaaaagaccaaaatcaaactaagtaaaaatatctgcaacacatgtcatagaa

SEQ ID NO: 27284 - DNA, 445 bp, Homo sapiens
  misc_feature (1)...(445): n = A,T,C or G
tacttgagacctgnagttggagngcnggaanacggctgagctctcacctcagtgacctggacaggggagagaatgggagaggagcatctccacccccaaatctgccctctgaacctgtcaggaggagtcctggaggctggtcctgggtcctgcagtgcttccaactcagtggggccaagacaggcctgccagagcagcaggggtggggttacgcttccctagttctgcctgcctgcttgttagaaaggcctgaggagctttaaaagcataccactgtgggttgccacctcagaccgttaaatcagaatcctctgtcaggatcacgactcacttgagttgaagaatgtaaactccaaatgtttacagcaggtgacaataatggggaactacgacctgatctaatatggtggtggagaaggacagggatgcggcgagtgcatgtgtt

SEQ ID NO: 27285 - DNA, 460 bp, Homo sapiens
  misc_feature (1)...(460): n = A,T,C or G
ggggtannnggggnnnnnnaaatgagactttgaaganggcctgaanancgactttgggggcccttttcttcccacactgtgtttttgagatttacccatgctgttgtgagtacctcgctgaatgcagcacatactgcatcatacaagtgcatcctgatccatttcccctgacggacgtgttcattttttgttatggcaatgctgcaatacacgtttttagctgtgcctctttgtgcttgaatgtgaggggttttctaaggtgtgaacctcagaacagagtcgccaggccatagggtgtgcacagcctccgtctgtcctgggcggccccacgcgggctccacactggtttccgtctgtcctgggcagcaccacggtggctccacactggtttccacactggtttccgtctgtcctgggcggccccgcgcgggccccacactggttgtgcgtttctcaggcc

SEQ ID NO: 27286 - DNA, 461 bp, Homo sapiens
  misc_feature (1)...(461): n = A,T,C or G
ggggaaggggttaattgagactatatantgagncttcagnacagngcggnggaattcccggtgcttccctgaggctgaggcgcccggcctcccgccctttgcgctccagattaagtgtgagcactgcacgcgcaaggaatgtagtacgaaaacaaaaactgatgaccaagagaatgtgtcagtcgatgcaccgagtccagcccaggaaaatggagagaagggagaatttcacaagttggctgatgccaagatatttttgagcgactgcctggcatgtgacagctgtatgactgcagaggaaggagttcaacttttccagcaaaatgccaaggacttcttccgcgttctgaaccttaacaagaaatgtgatacctcaaagcacaaagtgctggtagtgtctgtgtgtcctcaatctttgccttattttgctgctaaattcaacctcagcgtaactgatgcan

SEQ ID NO: 27287 - DNA, 456 bp, Homo sapiens
  misc_feature (1)...(456): n = A,T,C or G
catgatcantctagncattgaggngcgtttcggaggatgccacagccccacagcacccaggctccatggggaagtgctccccacacgtgctcgcagcctggcggggcaggaggcctggccttgtcaggacccaggccgcctgccataccgctggggaacagagcgggcctcttccctcagtttttcggagggacagccccagggccctaacgggggtgcggcaggagcaggaacagagactctggaagccccccacctttctcgctggaatcaatttcccagaagggagttgctcactcaggactttgatgcatttccacactgtcagagctgttggcctcgcctgggcccaggctctgggaaggggtgccctctggatcctgctgtggcctcacttccctgggaactcatcctgtgtggggaggcagctccaacagcttgaccagacctagaccn

SEQ ID NO: 27288 - DNA, 444 bp, Homo sapiens
  misc_feature (1)...(444): n = A,T,C or G
catcgattgacgacgactagtccgngcggtggaattcgctgatgtgaacatccggcattcaggccgcgatgacacctcccgctacgatgagagggaccgggaccgggaccgtgagcgggagcgcagagagcggagccgggagcgagacaaggagcgagaacggcgacgctcccgctcccgggaccggcggaggcgctcacggagtcgcgacaaggaggagcggaggcgctccagggagcggagcaaggacaaggaccgggaccggaagcggcgaagcagccggagtcgggagcgggcccggcgggagcgggagcgcaaggaggagctgcgtggtggcggtggcgacatggcggagccctccgaggcgggtgacgcgccccctgatgatgggcctccaggggagctcgggcctgacggccctgacggtccaaaggaaaagggccg

SEQ ID NO: 27289 - DNA, 457 bp, Homo sapiens
  misc_feature (1)...(457): n = A,T,C or G
ggccggtncttaagagaccttctacntgatgcctgaganacgagcagggcaggcacgtggtgctgggtgccatcgagaacaaggtggagagcaattgcaattcaccttcgagctcaagagaggcctgtcgcgaggagaagggcctggctgccgaggatagtggtggggacagcaaggacctcagcgaggtcagcgagaccacagagagcacagatgtcaaggacagctcagaggcctccgactcagcctcctagagcctgccccatcccctcctcaccccacgagctttcacaataaattcgctccgtggcnnannaaaatcaaaaaaaaaaatacaatgaaaaaaactttncgcggccccttttaattaaggggccccataaaaacccgtgtaaaccactcccttggtcttaaaaaggcccacatttttgtgtttcccccccccccccgcctcctg

SEQ ID NO: 27290 - DNA, 400 bp, Homo sapiens
aactcagagggggctgcctggatccagcccccagcaggagaaccgacctggggacaaagcggaggcacccaaagggcaggagcaatgccgcctggagactattcgtgatcccaaggacacccctttctccacctgctcctcctcctctgactcggaacctgaaggatttttcttaggcgagcgccttccccagtcctggaagacccccggaagcctccaagcagaggacagcaacgcctctaagacgcactgcaccatgtgctagtggcgcagctcagagaggggatgctgggacagccccgtccccaccatcctcctcccaagccaattaaatgatcacagcacgcgtgacagttaccggctggagagccggaggtgggaccgggagcaggggaccgta

SEQ ID NO: 27291 - DNA, 444 bp, Homo sapiens
  misc_feature (1)...(444): n = A,T,C or G
atgatcccctcnnaangcggtgatttcctccacnacacaagggggnngngnggaaggagatgtgggagaagggacactttcgaggaagattacgcagattgggcaggaagaccagctctcatgtgggggtgggaggctctcttccttttttgctcctgttcctccttttctctagctggcaggcctcttctcctgcacagtggtcctgtcggtgctgctgtggctggggcccttcttttactatctgcccaaggctgtcctggcttgcatcaacatctccagcatgcgccaggtgttctgccagatgcaggaacttccacaactatggcacatcagccgagtggactttgtgagaaatgccattacccccagattgccccctctcatcttgttagcatccccagcctctgccctgaaccaaacctaattgtcctgggcttaagt

SEQ ID NO: 27292 - DNA, 577 bp, Homo sapiens
  misc_feature (1)...(577): n = A,T,C or G
ggtgaaantnnnnaggggnnnnnagggnnnnnnnnattgannnnccatcgaaccactatccatgtggtggaattctaataagcagagccctccatatccctaaatctggaatgtccccaatactaaacaggcctggttcttcctcgcactctgaattcatggtcattagtaaggcgttcattcctgcaggcccagtagatgctgactccagtttgggctgcaacgggagtagctattttgtatctggaagcagcagtcccacacccctgtctgcactcaccgcccagggtcccccgtcactcacagcgcattggcacaatggccagaatcccccgtgaccgtcacctctcccccgcttcaggctctcctgctgtagcctcttctgtggaattctccttatgacccattaaaataaaaaagcaaccccaggaatcatttctgacgttcagattccagatggagacaggccagcttttgcacatgcagtactgctgtgcagaggaaataacttggctcgcagggtcaatctcagcccgtgcctcatgcctgcgctctccanatcccacgggaatcccag

SEQ ID NO: 27293 - DNA, 463 bp, Homo sapiens
  misc_feature (1)...(463): n = A,T,C or G
naactgagactatcgaanagngcggnggaactgaagacgctagctgncccaggcccgagatgagaataagaggacccacaatgacatcatccacaacgagaacatgaggcaaggccgggacaagtacaagacgctgcggcagatccggcagggcaacaccaagcagcgcatcgacgagttcgaggccctgtaacagccaggccaggaccaagggcagaggggtgctcatagcgggcgctgccagccccgccacgcttgtgtctttagtgctccaagtctaggaactccctcagatcccagttcctttagaaagcagttacccaacagaaacattctgggctgggaaccagggaggcgccctggtttgttttccccagttgtaatagtgccaagcaggcctgattctcgcgattattctcgaatcacctcctgtgttgtgctgggagcaggactgattgaatta

SEQ ID NO: 27294 - DNA, 491 bp, Homo sapiens
  misc_feature (1)...(491): n = A,T,C or G
ggccgggattcggacccctnnnattgagagcatatcagtgtggtggaattcatttgatggcgtgatgtctcacagaaagttctccgctcccagacatgggtccctcggcttcctgcctcggaagcgcagcagcaggcatcgtgggaaggtgaagagcttccctaaggatgacccgtccaagccggtccacctcacagccttcctgggatacaaggctggcatgactcacatcgtgcgggaagtcgacaggccgggatccaaggtgaacaagaaggaggtggtggaggctgtgaccattgtagagacaccacccatggtggttgtgggcattgtgggctacgtggaaacccctcgaggcctccggaccttcaagactgtctttgctgagcacatcagtgatgaatgcaagaggcgtttctataagaattggcataaatctaagaagaaggcctttaccaagtactgcaagaaatggcaggatgaggatggca

SEQ ID NO: 27295 - DNA, 462 bp, Homo sapiens
  misc_feature (1)...(462): n = A,T,C or G
naagttagacgatcctacgccacgncgnggaattnctataagagatgaaatcaaattaagcatggaactaaatcacacattttaacctctaccgtcatggctccatctgcctaaatatgtatagaaaaaaactgtataatggaaaactggaatcgaaaaacttgttctctgacttcctgcaatccgttcacaggatgacaatacccccaaattgcaaaataagcaaaaaatagagacatgaaaaaaaatgcaagtggcctattaataaaggattggggaacatgaattaaaacctagaatggtataaagaggttgcctcatgtagaatttatgccctcatccttcaaacagttcatgagaggtactcacagctgctataatcagcaaagctgaattccttgagatctattcatccttccttgctagaagacctgatacatgaaatacgaatttgaaaaactn

SEQ ID NO: 27296 - DNA, 503 bp, Homo sapiens
  misc_feature (1)...(503): n = A,T,C or G
tgtgtgccnnnagcccgcntttcgagaccctagncatttgagagccattcgcttctgcgagaactccctccctccctccagctccgccagcccaggcgccccttccctggaagccgagcggcttcgctcgcatttcaccgccgccgcctctcgcaatattgcaatataggggaaaagcagaccatggtgaatccgggcagcagctcgcagccgcccccggtgacggccggctccctctcctggaagcggtgcgcaggctgcgggggcaagattgcggaccgctttctgctctatgccatggacagctattggcacagccggtgcctcaagtgctcctgctgccaggcgcagctgggcgacatcggcacgtcctgttacaccaaaagtggcatgatcctttgcagaaatgactacattaggttatttggaaatagcggtgcttgcagcgcttgcggacagtcgattcctgcgagtgaactcgtcatgagggcgcaaggcaatgg

SEQ ID NO: 27297 - DNA, 470 bp, Homo sapiens
  misc_feature (1)...(470): n = A,T,C or G
aggacgggtnnccccccctgatgantcccttgagatcctagcananngcggangaantcnnatgtcctcaccggcatgcacgccgggcagcccaagcacctgctgctcgtggaccccgagggcgtggtacggacgaaggacgtgctgtttgagagcattaaccacctgatcgaccaccacctgcagaacgggcagcccatcgtggccgccgagagtgagctgcacctgcgtggcgtggtctcacgggagccctgagccaggtgaccgttctcagccctggctcctgcctgttctcagccccggctcctgcctgtcatggccttggggctctcagccctcctcctggatcctggtcaggccgaaccaccgctgcctctccttcctccgcatgagcctctggcatggtccttcctccagctggccccaggctgggcagagcctactcctgcccgggcccctgcccacccact

SEQ ID NO: 27298 - DNA, 488 bp, Homo sapiens
  misc_feature (1)...(488): n = A,T,C or G
attgagaccctagnnatttgagatccctagtgagtgtggnggaattcggacgagagtgggaagaagttcgccatggagccagaggagtttgactctgacaccctccgcgagtttgtcactgctttcaaaaaaggaaaactgaagccagtcatcaaatcccagccagtgcccaagaacaacaagggacccgtcaaggtcgtggtgggaaagacctttgactccattgtgatggaccccaagaaggacgtcctcatcgagttctacgcgccatggtgcgggcactgcaagcagctagagcccgtgtacaacagcctggccaagaagtacaagggccaaaagggcctggtcatcgccaagatggacgccactgccaacgacgtccccagcgaccgctataaggtggagggcttccccaccatctacttcgcccccagtggggacaaaaagaacccagttaaatttgagggtggagacagagatctggagca

SEQ ID NO: 27299 - DNA, 474 bp, Homo sapiens
  misc_feature (1)...(474): n = A,T,C or G
tgtgccgcnnnnnnnnncccctggngacctcngtagngncgngcaattcgttcagttggagaaaatctaatctcatgtattattgtattgtacagagtgccaattattgacagtgaccataaaaaacaaagacctgttacaaagcctgttaggtgaacagactattcacggagttgtctttggttttgccaaattggatcaagagtttcacctgggttttattaagatgattgtgctttagctttttaacataaatgtcttttaatgtttaaaatgtgcaagtccttgtagacttgttagatccggaaacatcgattcagcatggattctgtgccaggcattgggaataccttagttttctttcagtgggcagtggaagacttgggagaactcctcacaacagaatcctaagggaagagtcctttcagactcactgcaagtttcattactagagaaacttgcattttcacattn

SEQ ID NO: 27300 - DNA, 486 bp, Homo sapiens
  misc_feature (1)...(486): n = A,T,C or G
nttcgaganccctagnccattgtagagccattctgtcatttggcttcttcccacttgttgaaacactaaataatacagataatgccttgtctacactggcttgctttcaaagactcagaacctcaagcttaggtaaaaggattccagccacacatttcctctcctgctctgtgagtcactagaggaattccccagtaaggcaacattcctgagtgccaggctaggccatgagaacagaatgctctgagaggggtggagtctgagcaagcaaggccaagggctctgttgttgggctcacaagtaccttgactatcgcccacaggtgatggaggacgaggagaaggcagtggagatcttgggcaacacggaagctgctcatcctccatcccccatccgctgctgctggctccgcctccgctgcttggcagctactagcattatctgtggctgctcttgcctgggagtcatggctctggtgtttgccan

SEQ ID NO: 27301 - DNA, 473 bp, Homo sapiens
  misc_feature (1)...(473): n = A,T,C or G
agccncncnnagagnncccgnnncnncnnnncaactgattacatttagacagcgcggaggaattcagtagctgggattacaggcacccaccatcatgcccgggttaatttttgtattttcttagagatggagtttcactatgttggccagcctcatctttgaactcctgacctccgatgatccacctgccttggcctcccaaagtgatgggattacaggcgtgagccaccgcacctggccccagtggcttcttcagacttgaaacacaaaatgtggccagctagggatagagagaattctgactttcaacactgctgagccatggcatgggctgcttctgggtagtgagctccctgtccttggggtagacacagccatcccttgggtccttcctccagaccttccaggtacagccctttgctgctcttccctgcctccaaacctttgccagtttttgagtttctttacccagg

SEQ ID NO: 27302 - DNA, 463 bp, Homo sapiens
  misc_feature (1)...(463): n = A,T,C or G
ntttgatgccctttcgannncnnnnatacggttgacctcggaaagncnggnggaattcacccaggggccatgttgcccttgccccatgtatgggtgggaaagaagctcatttcctcacagggccttaagtgtgatgccttacgagagcaccactcatatgggcagctgtactctggtgtcctgagactctgccctcttgccacagcctacctgccccacccatccctgcaaagccatttttcagacagagccattactaagaacactgaagggctggaatgctggctggccactctctgcctcagtggcctccctacagcctggaagaaggagggtcctgattgccaaggaaacctctcctcattgggctaaagagacactggagtctggagtgtggagccccacagtcttgcaggtcacatgctctccttgcacatctggcctggttgtacccactggcctt

SEQ ID NO: 27303 - DNA, 469 bp, Homo sapiens
  misc_feature (1)...(469): n = A,T,C or G
gaggggnnnnnnnagaccctgggtcctcccgaaggctgatgacttccgcaanagcggacggacacgcagtacttcatcctcctcatcatcacggacggtgtcatcagtgacatggatgagacacggcatgccgtggtgcaggcttccaagctgcccatgtccatcatcatcgtgggcgtgggcaatgcggacttcgctgccatggagttcctggatggggacagccgcatgctgcgctcccacacgggggaggaggcagcccgcgatattgtgcagttcgttccctttcgagagttccgcaacgtcggtgaccgagtacctccatgtgcctggcctgtggctggctgttcactagtgaaccatactgtcaggcccatttattcccgccaagaaggtgctcaggagatgtttgccggacacataggtgcttcccgcagacggagtcatcctaacccgttactcccaagca

SEQ ID NO: 27304 - DNA, 447 bp, Homo sapiens
  misc_feature (1)...(447): n = A,T,C or G
tttgtgccctcgaanccgngtctgtgctctcgacanccancnanacnnaccatttccttgtgagcccagaatctttatttgagcggaagagcatgtgttcttcagggaattagtgtctttttttggaagtctgttgaagtaaagtaacatcggccttctgttcacttaggcagcatttatagaaacaaaagaagaaagaaacaacctactgtctggagtcataacacaactttcctggattggaaaccaagtgggggaaaaaatacagaaactttaagggggatgggaggggggggagaagggaaaagccagccctttgtatagaaattttgcttttttttccctcattctactttagaactgcaagcttgtgcactgcggatgcgtgaatattttagtgtgaaacgtgtttttgtcatagtattgaaataaaacttcaacatagtn

SEQ ID NO: 27305 - DNA, 479 bp, Homo sapiens
  misc_feature (1)...(479): n = A,T,C or G
ntcgagaccctatccgtgtggggcattccgtgctatatcctgtcagtcaatattaagaaattactaggttattttgtgtttatgtgtgcactattagatttaatgagttatgctagttgttgcctcttatatccacattcagtcttcattgtctgttctgtaataatagatctgggccctgtaaatacctctcccatgacagtaagcacagagtgaaactttgtcaatcgagggtgctgctgacacactgaaggggcaagggctgcttttcctggttccattgtgctcctctaggcagacacctgcaacacctgtgccatctgcaataccagctcctgtagcacatacactctgcctctgcagcacctcgttctggctgcacacttcttgngcggtgcctaacttcagcagcacccaatggtcagcagcgcacagtacccccacatgaatggcttcccttgacatgcacaaggtccctt

SEQ ID NO: 27306 - DNA, 483 bp, Homo sapiens
  misc_feature (1)...(483): n = A,T,C or G
cttcgaanccctgnnnattgtagaccctatacagngtggtggaattcgatccacctgcctcggcctcccaaagtgttgggattacaggcgtgagccactgtgcacagccttgccctgtctattttgaccagccaggaggctctggctttttgcagaaggcttctttgttgtgcaggttctgccgatgatgagaggatcttgaggttcttggaattggcaggcctggtaagtggggagagggaccctcaggacccgagcccacctgggagcaccagctacaggtaggcaggtgctggccctgctatgcttgggcccaggactggaagtctgaacctggggtggagaatgggagtatcagttgacagtgtgtgctgttggccacgtttatgcacgaagggggtagtgctctcattggagaattttaaaacaagaatacgattgatgaaggcggcttgctttttactgtcatcatgctccagcaag

SEQ ID NO: 27307 - DNA, 478 bp, Homo sapiens
  misc_feature (1)...(478): n = A,T,C or G
nttcgagaccctagncattgtggagcaattatgggatcctgcagtggtctggtggcatttcttggaaccagatttacctgaggagctctgtcctgctccctgtggagggctccagatagctcagaaatgaccagccaatggccttttgtttgggggcctgaggtcaagagagctgagagtattcgctcgactgagcacattcaggaagatcagggcaggcgtgtgggaggtccctcactccacgggacagaggcccctggacagcagaggaaacctacagctctgggtgaggggacacttggctttggtgtttgcactttacagatcctgcggtccacgaggggcctcaggagaggacgtgtcaggacgtggcttcccagccttctgccttgggcagngggggtgctcctgtctgtccttttcccccacaccctggactgtgcttggctgttggtgcacatggttggcacacggcggg

SEQ ID NO: 27308 - DNA, 487 bp, Homo sapiens
  misc_feature (1)...(487): n = A,T,C or G
natcgaagaccctagnccatcgtagagccctattccagagtggcggaattcggcaagggccgtgccgagggctcggagaaggaagagagccggaggaagaggagggagaggaagcagaggcgggaaggtggtgatggggaggagcaggacgtgggagatgccggccggctgctgctcagggtcctgcacgtctctgaaaaccccgtacctctgacagtcagagtgagccccgaggtccgggatgtgcggccctacattgtgggggccgcggcgcgaggcatggacctgcagccagggaatgcactcaagcgcttcctcacctcgcagaccaagctccacgaagatctctgtgagaagaggacggctgccacccttgccacccacgagctccgtgccgtcaaagggcccctgctgtactgcgcccggcccccgcaggacctcaagattgttcccttggggcggaaagaagccaaggccaaggagctgg

SEQ ID NO: 27309 - DNA, 464 bp, Homo sapiens
  misc_feature (1)...(464): n = A,T,C or G
natgagccctgagaacntcgngagagcgggcattcaagtcatattctgagaaagaataattcttaaactgcttaaaacaggggtccccacccccaggccacagaccagtaccagtccatggcactggttatgaaccaggccacacagcagggggtgagcggtgggtgagtgagcacagcttcatctgtatttacagctgctccccagagcttgcattactgcctgagctctgcctcccgtcaggtcagcagcagcattagagtctcatgggagtgcgaaccctgttgtgaactgcacatgcgagggatctaggttgtgcactccttatgagaatctaatgcctgatgaatctaatgcctcatgatctgaggttgaatagcttcgtgccgaaaccatcccccacccccatcccgctaccccgagtgcgtgaaaaaattgtcttccatgaagccggtccctggtac

SEQ ID NO: 27310 - DNA, 479 bp, Homo sapiens
  misc_feature (1)...(479): n = A,T,C or G
nttcgagaccctagncagngtggagcaattccggcattcccatgagccacgttgcccggcagattaccaaagaagattttgccacatttgattatatactatgtatggatgaaagcaatctgagagatttgaatagaaaaagtaatcgagttaaaacctgcaaagctaaaattgaactacttgggagctatgatccacaaaaacaacttattattgaagatccctattatgggaatgactctgactttgagacggtgtaccagcagtgtgtcaggtgctgcagagcgttcttggagaaggcccactgaggcaggttcgtgccctgctgcggccagcctgactagaccccaccctgaggtcctgcatttctcagtcggtgtgtaatcacgttccagggcccaaagcccagctctttgttcagttgacttactgtttcttaccttanaaagtaattgtagatggaaatcagttgtgtttgg

SEQ ID NO: 27311 - DNA, 463 bp, Homo sapiens
  misc_feature (1)...(463): n = A,T,C or G
agacgtgctnnctctagttacgtcagcattncggnggaattccacagaagatcctggtgtcgccatgggccgccgccccgcccgttgttaccggttttgtaagaacaagccgcacccaaagtctcgcttctgccgaggtgtccctgatgccaagattcgcatttttgacctggggcggaaaaaggcaaaagtggatgagtttccgctttgcggccacatggtgtcagatgaatatgagcagctgtcctctgaagccctggaggctgcccgaatttgtgccaataagtacatggtaaaaagttgtggcaaagatggcttccatatccgggtgcggctccaccccttccacgtcatccgcatcaacaagatgttgtcctgtgctggggctgacaggctccaaacaggcatgcgaggtgcctttggaaagccccaaggcactgtggccagggttcacattggccan

SEQ ID NO: 27312 - DNA, 460 bp, Homo sapiens
  misc_feature (1)...(460): n = A,T,C or G
gagcgagggcccctatgagcccatgaagaggccctccganagccaggggaattccccggagctgcagccaccggggagccaggcagcaaagcacttgctctgagtgttcatggggaagcgatacttctgtgactactgcgaccgctccttccaggacaacctccacaaccgcaagaagcacctgaacgggctgcagcacctcaaggccaagaaggtctggtacgacatgttccgagatgcagctgccatcttgctggatgagcagaacaagcggccctgcaggaagtttctactgacaggccagtgcgactttggctccaactgcagattttcccacatgtcagagcgagacctgcaggagctgagcatccaggtggaggaggagaggcgagccagggagtggctactagatgctcctgagctccccgagggccatctggaggactggctggagaaggga

SEQ ID NO: 27313 - DNA, 455 bp, Homo sapiens
  misc_feature (1)...(455): n = A,T,C or G
tttgagaccctagaccacgtcggggaantccactcactgtcccaagtttgggaacctgaaaaagtctccattcagaacatggttgttctccctgtcccatgctatcttatcttcctaaatgactaatgaggaagcgggtgttctttttctgcactttgattcgccatctgggttctgtagggtgctctgaaggtgtgatctgccttctggctgatgtggaggaagagcaagcgccttcccaggccacagctgctcacctctcggcagatattttaggcaagcatccgtgtgtcttcccatcttcaggagaaaggtaaatgcaccctaagtgttcacttctggacctttttcaagttcacttgggactgtgtgacagaagggagttggagggaggatgggaatatttttaacactttgttttcctgtgcagaaacataataccagttttcgcagaa

SEQ ID NO: 27314 - DNA, 558 bp, Homo sapiens
  misc_feature (1)...(558): n = A,T,C or G
agctgtgtnnncctcgaacactattgcgtgnggcgcaattcctccaagaaaaggccaagaccgtcaccctcaaacaggccttactgggccacactgataccgtcacctgcgccacagcatcattagcctatcacataattgtcagtgggtcccgtgatcgaacctgtatcatttgggatttgaacaaactgtcatttctaacccagcttcgagggcatcgagctccagtttctgctctttgtatcaatgaattaacaggggacattgtgtcctgcgctggcacatatatccatgtgtggagcatcaatgggaaccctatcgtgagtgtcaacacgttcacaggtaggagccagcagatcatctgctgctgcatgtcggagatgaacgaatgggacacgcagaacgtcatagtgacaggacactcagatggagtggttcggttttggagaatggaatttttgcaagttcctgaaacaccagctcctgagcctgctgaagtcctagaaatgcangaagactgtccagaagcacaaatagggcaggaagccccagacgagn

SEQ ID NO: 27315 - DNA, 464 bp, Homo sapiens
  misc_feature (1)...(464): n = A,T,C or G
cgcccgccattgaagcccctnngnnnatgangtcctctagaccagcgnggnggaattcgttcaacttcaaaagacaccaagtaccagtcggtgtacgtcatatccgaggagtaggatgagtgcgtcatatcaactgaggtgtaaaatggaagtgagatggcaagactcccgtttctcttaaaataagtaaaattccaaggatatatgccccaacgaatgctgctgaagaggagggaggcctcgtggactgctgctgagaaaccgagttcagaccgagcaggttctcctcctgaggtcctcgacgcctgccgacagcctgtcgcggcccggccgcctgcggcactgccttccgtgacgtcgccgttgcactatggacagttgctcttaagagaatatatatttaaatgggtgaactgaattacgcataagaagcatgcactgcctgagtgtatattttggattcn

SEQ ID NO: 27316 - DNA, 454 bp, Homo sapiens
  misc_feature (1)...(454): n = A,T,C or G
ctcgagccccttgnnnatgatgttcctctaaaccancgnggnggaattcaccagcccggcgcggcccttttccgttagcgttgctgcttttgttcctgctcggccccagattggtccttgccatctccttccatctgcccattaactctcgcaagtgcctccgtgaggagattcacaaggacctgctagtgactggcgcgtacgagatctccgaccagtctgggggcgctggcggcctgcgcagccacctcaagatcacagattctgctggccatattctctactccaaagaggatgcaaccaaggggaaatttgcctttaccactgaagattatgacatgtttgaagtgtgttttgagagcaagggaacagggcggatacctgaccaactcgtgatcctagacatgaagcatggagtggaggcgaaaaattacgaagagattgcaaaagttgg

SEQ ID NO: 27317 - DNA, 562 bp, Homo sapiens
  misc_feature (1)...(562): n = A,T,C or G
cgcgggcnnaattgagcccttactgatgatcgtcccgagnggngcaannctcanangccagtgaaatgtatacccagaaaaatgatggaaaggaaaaggaacatgaatttcatctggatttgtcccttgaaatcagcaacacacttacggatgagaaaatgaaaatagaagagtagtataaagaaagggaaagaggattatgaagagagtcatcagagagctgtggctgcagaggtatccgtacttgaaaactggaaggagagtgaagtgtataagctacagatcatggagtcacaagcagaagcctttctgaagaagctggggctgattagccgtgatcctgcagcatatcctgacatggagtctgatatacgttcatgggaattgtttctttctaatgttacaaaagacattgagaaagcaaagtctcagtttgaagaacaaattaaggcaattaaaaatggttctcggctcagtgaactttctaaagtgcagatttctgagctttcatttcctgcctgtacacgggtcatcccgagttacctccttgagcttttaggcg

SEQ ID NO: 27318 - DNA, 560 bp, Homo sapiens
  misc_feature (1)...(560): n = A,T,C or G
gcaggcnnaattgannccccctcgatctactactccgtgtggtgcgaattcgtccgtccatgccatgaatgagtgggctgtagttgggcctaaataaatgagctgttggaagaaaagaatcacagtactttccagcagtcagtccctggttcctagatgtgttctaagcaatgcaaatgtctaattgtcccccagtgggcatagtcagtgtcgtttatattgtagcagttacagctctgtagtttatgatgcaaatctgccaagagagatgtatgtgtcactgcatggcttctgaaagcaggatgaattttctgcagctgtttcaaagttggggtctgttcttgaatcctctattaattactgtgtgtgagccagagggagctgtggtaagggttgggcccccagcctgtanggaactttctggactcccactctttgaatcgatataggcatttggtctcactacttgaccattctcaccctgtgaaacgtnccacactttgaagcanatacanttcacagcacagtacacacaanaacctttgcataagacagagaag

SEQ ID NO: 27319 - DNA, 557 bp, Homo sapiens
  misc_feature (1)...(557): n = A,T,C or G
agcggttnnncctcgacnacacttcagaggcgcaattctcntagttccttctgtagctcagactcggccaccacaacctcctttggcttctggtactgtggatgcagtcaggaataataaaataattcagtcactgtcccatctccttccacacacacttggggccccttctccttctgatccccttatttgcacgagaaaattgaggcctgtaggattgaatgatttgctcaaggtcatgtgcctgagtaggagcagaccttggaccagaagaacccaagttcagcaatttccaccgcttccctttcaccctctaccctcttctagctgtgaattatatggtcaggctccttcctgagccccctccctgctctcccccatgctgaattagagatgcctattctcccacaagcataccctanggcttggggctagaactgaggactcttatgggatgggaagtgggcagggaaagaggaagactcntcctgatgcagtgtccaagaagtctgggtgaatcttacagagatgatcangggtgcagtggcgtgggcaaa

SEQ ID NO: 27320 - DNA, 419 bp, Homo sapiens
ctggaccacatgcacctcatatgcaagtgccacgggctgtcgggcagctgtgaggtgaagacctgctggtgggcgcagcctgacttccgtgccatcggtgacttcctcaaggacaagtatgacagcgcctcggagatggtagtagagaagcaccgtgagtcccgaggctgggtggagaccctccgggccaagtactcgctcttcaagccacccacggagagggacctggtctactacgagaactcccccaacttttgtgagcccaacccagagacgggttcctttggcacaagggaccggacttgcaatgtcacctcccacggcatcgatggctgcgatctgctctgctgtggccggggccacaacacgaggacggagaagcggaaggaaaaatgccactgcatcttccactggtgctg

SEQ ID NO: 27321 - DNA, 488 bp, Homo sapiens
  misc_feature (1)...(488): n = A,T,C or G
naggcgagtggnnnnnaactggagnacatcgagagcactctgcagngtcgcggaaanctggcacggctaaaagcccagccccattgaggactgaggaagtagcttcgcgcagagcagttctccagctggaacaggaggtggagggtgaggctggggagaggatggcgaacctgccctgaggtgcttgggtctgtgctggtggggtcctggtatgcaggggccaccggtcactaacactcttatgtcctggctttctgtccccgctgagctttctctcacccgcccgttttctctcctgcttcattgcctgctgcctaagccttgggccttctctcgggcagaggcaggtgctgtggcagcacctatccccaccaccggggcccctgcaggccgcctccctcctcccaggcctgctaaccctctctcttctccttctttgctgtcctgccggggatctccagtgtgtgcgggggcttaaggacctcctg

SEQ ID NO: 27322 - DNA, 477 bp, Homo sapiens
  misc_feature (1)...(477): n = A,T,C or G
gggcggnnnnnaactgagacctttgagaccgtnggaancnctcacacagctgaccagctccatcgtgcggcgcgtgaatgaggcttctgggctctaccatatgttcggtgtgctggccgatgtcatcctgttgaaggaaacaggaggtgaggttccgccctgcacactggcccctgcctcggcccacggccatccatcacatcgtggaagacttcttaacagactggactgccccgatcgggcacatcctacctctgaggcgcttcctggagaactgtttggacaccgatttgcgaagcttctatgcagagtcctgcttcctgttcgccctcacgcgccagaagttgccacccttttgccagcaggggtacctgaggatgcagggactcgtgagtaccgagagcctttggcagcacagagtggagagcaggctcctgcgggactatgcccccacaggcaggcgcctggaggacagcn

SEQ ID NO: 27323 - DNA, 463 bp, Homo sapiens
  misc_feature (1)...(463): n = A,T,C or G
cgccccccattgaagcccctnnnnnnatgatgacccttagaccagcgnggtggaattcggtactgttctcagtgccctcctctctccatcccaggcctcccagttccagcttccagtgctccctgactccccagcttttttttttccaaagacagggtcctgctctgtagcccaggctggagtgcaggggcacaatcatggctcactgcagcctcaaactcccaggcccctaagtagctgtgactacaggcgtgcaccattatgctcagctaatttttaaaatattttgtagagatggggtctcattacgttgcccaggctggtctcaaactcctgggctcaaacaatcctcctccctcagcctcccaaagggctggaatcacaggcatgtgccaccacgcccggtcccactccccactttctattccccctttctgagacctctctccaccgatccctaggg

SEQ ID NO: 27324 - DNA, 455 bp, Homo sapiens
  misc_feature (1)...(455): n = A,T,C or G
ntttgagaccctgatcacgtctgggaannccgncaaccaccagcttcctgtagccagaggccccatcgctggctcagtggcctgagaccttcccacttttcctgtccctccacaccctggattttctggccccctcctgggccaatcggagcttccatccaactgtcagactggtggcaggagtcacctgtctgtttcagtgctttgccctacccttgccaccactccccttggccttgatttccccacctgcggcaccagccagctgcccttggggcctttgcagctggcccacaggagtgagcttgctggtctatcacttcctggcctctccaccaactgtacctcccaaaggctacctgaccgccctcacagacactcagacgcaccacacacacatacacacacacagacacacacacacacacacacacacacaccagcgactgtgacca

SEQ ID NO: 27325 - DNA, 486 bp, Homo sapiens
  misc_feature (1)...(486): n = A,T,C or G
gaggacggggcnnaaatcgagaacctagaaancatctgaagngncgnggaattctgtggagcgtgcctgtggtcccaactactaaggaggccgaagcaggagaatcgcttgggcccgggaggtggaggttgcagtgagccaagaccacgccactgcactccagccggagcaacaagagcaaaactctgtctcaaaaaaacaaaaacaaacaaaaaaacagaaagggcttaacagaggactatgctactgttttcaaggacaggagttattttctgctggggacaatgagctattgtgattcccccttccaatgtgttaaggggcagaataacagtgtccagactagaaaaaataagacaagagtttggtgaggggagtttccccaagcaaatgcacacacatgcaccacatcatatgattccgttctcattccccaatgaccacttctctgtgctgaggttcctgcaggggcataaggagggctgn

SEQ ID NO: 27326 - DNA, 530 bp, Homo sapiens
  misc_feature (1)...(530): n = A,T,C or G
gagaatgggnccngnaaatcgaganacatggacacccntgnggaannncgggctggagtgtaccccaccgcgggcgtggtgcctctgactagcgggagactcgttgaagtagctgtctccccgggtgtagtcagacgcagggcgcgcacctgggtctcgtctagacagtggtgtctcatagaattatgcgtaagaagagaatgactcggcacccttctttcctgtagctanntggcagtcacgaccctggcagtaggtaacctacgtctacacgaacgtcccaaactctggcaagggatggtgccagattttggcagattatgtgctttgtccccacccagcactgatgatattataaaacctatactacaagaaatgataatggaagttcttcaactgagcaagaaatgatattaacagaaaacttggatcttcagaagcaaatgaagaacatcagaaatgcaactttcattgttagagagaggagagagagagaagccttgttggttgacgtcacttggttcatgaag

SEQ ID NO: 27327 - DNA, 481 bp, Homo sapiens
  misc_feature (1)...(481): n = A,T,C or G
ncgaagtggcccgnaatcgagnnnccatgccangctacgcagngccnggaatctgaaagaaacgttcctctttgcccctgcacacccataacccacaatgcagtttctggaggagtcagtcttgtttcttcttcgggcttcaggggccccatctgtccagtgtaggccaggccccatctcacctgccattcagccacggggctcacaggggttatttgggcagctgccctctctctcgtcttctctctgtgtctgtcctgtctctgtgttgccatctgccatcctatctctcagccacccacaccacgaagagatgtgtttgcccacgttccagtgcaggggtggagcacagcccggcttgttacagatatggtgggcctgcccgggggaggtgagctcttgctgggccctgcctgggtgctagtcagggggcttgcagctggggacactgcttggttggcctgcctttttccagattgcc

SEQ ID NO: 27328 - DNA, 442 bp, Homo sapiens
  misc_feature (1)...(442): n = A,T,C or G
taccgaacgactcngagantcgacgncannncngannnnanaaaaaaaagaaaagaaaaggccatcttggtggggtgtgtaccattaggaggctatgaagtgtgactttgtcaaatgtgtgtgtacatgagtgtgtgtgcttgggggctgaggacaggcatctgaaggtctgtgctcagtggggcatgtccaagctccacggacagccacgtgtgcaggattggcatgtgtcgaggtatacagcagtgtcccagcaatgcacagcgaaactgatgtgaagtttcacggctgtgccctctggggaagtgtacatctgagggccaccaggtgagaacaccattgtgcactggcagagggttcctctgctggcagcgtcctgaccgtgccaaccctggtgcaaatcgagcatagccaggcggcttgggcagtagcgctcacttcg

SEQ ID NO: 27329 - DNA, 444 bp, Homo sapiens
  misc_feature (1)...(444): n = A,T,C or G
attgagacatctgccattgagggcattcgnngtncgaaggcttatctaaaacagttcctctttgtcagggaccaaccctctgccagtgtgtgcttgtcattgctggaatggatatgaagcacccttatctgctggctaatctcttgctttggatgttgtagggttgaatgcaatgcagttacagaatttggctgcactagctgctgcagctagtgcagctcacaacacaccaagtggtaccaatgctctcactacatccagcagtcccctcagcgtgctcactagttcagggtcctcacctagctctagcagcagtaattctgtcaaccccatagcctcacttggagccctgcagacattagctggagcaacggctggcctcaatgttggctctttggcaggaatggctgctttaaatggtggcctgggcagcagtggcctttt

SEQ ID NO: 27330 - DNA, 462 bp, Homo sapiens
  misc_feature (1)...(462): n = A,T,C or G
ccccccccttcgaccccctcnnnnnattgatgtcccttagtccagcgtggnggaattcggacagctgtggaccctggctccccactacatccttggttatttagaaaaatgtgtaggtttgttatttgtaacttcctggggtcttctttacttgtttgaggctcattttgatgtttcaaaggtggcgcaacactaacgatgaggtaggaggagaaacccctacgtaggtgcctccgtttccctcctgtctcctccagccctgtttcactgcccagccagctctgttagatgtgatttcctaaaagaagctggataggttccactggcattcacatagcgcatgaggaagctgaggcacatgtgcccctggaccgcacggatgcctctgtggcctccctgggccacctcctggcccggccaggggacatctggggcctgggcagcagcatggggctctcagag

SEQ ID NO: 27331 - DNA, 453 bp, Homo sapiens
  misc_feature (1)...(453): n = A,T,C or G
ngtactgatacctttcgaantccagggacctttgcacanacncannnatggccacataaaaccacaccccaaggccagcacagtgtttcacgcctgtaatcttagcactttgggaggccaaagcatgaggatcacttgagcccaggagttacagaccagcctgggcaacctagcaagacccccatctctatcaaaacaaaaaacaagcgaggcatggtggtatgcacctatagtcctagctactcaggaggccaagacacaaggatcacttgggcctggggggtcaaggctgcagtgagctatgattacaccactggactctagcctgggtgacagagcaagaacctgtctctaaaaaataaaccacagctcagcccactactcacaacatccctgagttgctattttccacaaggctttcctttgccgaggctcagtcaggcaggtgtgcct

SEQ ID NO: 27332 - DNA, 477 bp, Homo sapiens
  misc_feature (1)...(477): n = A,T,C or G
atggagannnnnntttgatcgacgtcactagtccgtgtggtggaattccctgttcatgcgtggtcgtcgctcactggtggccgcttaagtgcacttctcaatggcagtgcccagcacggagcaatgcctcggagtggcagtttcttcagtacggtccccacggcctctcccaaggcggaggatgctgccgccaaggaaactggctcaccacggacgctggtgagctatggagctatcagtgaggtgtggatttctcaggcctctggcgggagccggagtaaaggccctgagtgtctagaccagccagagtgtctgcgtgtaggtcagcaaatgtgggcaaatgtctatgcggtggtgtcctgcagggagccgaaagcccgtgggggacgtgaccaactcagcattccgctggaggctacaaacagcaaactgtttatcatgaatgcaggatgtgggcaaactcacactggcctgccn

SEQ ID NO: 27333 - DNA, 455 bp, Homo sapiens
  misc_feature (1)...(455): n = A,T,C or G
catcgacccccttggnnattgatgacccttagnccgngcggnggaattccccggctcgtgcgtcgatgaagaacgcagctagctgcgagaattaatgtgaattgcaggacacattgatcatcgacacttcgaacgcacttgcggccccgggttcctcccggggctacgcctgtctgagcgtcgcttgccgatcaatcgcccccgggggtgcctccgggctcctcggggtgcgcggctgggggttccctcgcagggcccgccgggggccctccgtccccctaagcgcagacccggcggcgtccgccctcctcttgaaaaaaaaaaaaaaaaaaaaaaaaaaaaaaaanggcggccccttagtttaaaggggccctttaaacccccgtgaaaacccccgggggggctttttaagggccaccccttggggggtggccccccccccgggctttttttgg

SEQ ID NO: 27334 - DNA, 474 bp, Homo sapiens
  misc_feature (1)...(474): n = A,T,C or G
aggagaaaaanttcgctagcctacatagtgccgngcaattcgaaactgatgttccatgcatgtccctgcttccaaagcctgaccttgcaaagcttgcttccttcctcctgactgcacagacacctctgcttggccacagctttgctctttggtcctcaggccaccagacccctcacagaatggcccttggctcttactgcactgccctcaccctcagccgtcccaaggagtgcccagcactactcagcatgtaatgcatgacctgcggcatcagcatcccctgcgagcttcttagaaatgcagacctgtgggctctaccacaagcctctggaatcaaaatcttcagggtggggcccatcagtctgtgctttaacaggttctcccggtgatgctggtgcatgctcaagtttgagaaccgctgctctcatagactgctcctccgaggggaagcagcgtggaacaactgacatagcn

SEQ ID NO: 27335 - DNA, 451 bp, Homo sapiens
  misc_feature (1)...(451): n = A,T,C or G
aatgatgatcactagnccattgaggngcaattccctgagcagctaggtctacaggtgcacaccaccacacccggatagtgtttagttttctataaagacagggtctcactgggttgcccaggctggtctcaaactcttgggctcaggtgatcccccacgcacggcagctttgacacttacttgaccctttcctcctaagctctaccctgacgctggctgtgtgtcccagagacttaatcagaagctggaagaagggctgtgacgtgtgtgacagcaggaactgctggtcaacccacagccggccagcctgccgggacgccatcttggccccaatcttggcagggagaggggagtgtatcggactctggggagagcagctgcctgcacgggcagggtcctcccgtctcaagattaacgttctcaactgtatttgatttctcctcagccagan

SEQ ID NO: 27336 - DNA, 481 bp, Homo sapiens
  misc_feature (1)...(481): n = A,T,C or G
ngggcgggnnnnnnccttgaaaccatagagagccntgnggaantccattgnctcaaaattcttgaagctcagcctgttctcagcagtagagaaatcactaggactactttttaccaaaagagaagcagtctgggccagatgccctgccaggaaagggacatggacccacgtgcttgaggcctggcagctgggccaagacagatggggctttgtggccctgggggtgcttctgcagccttgaaaaagttgcccttacctcctagggtcacctctgctgccattctgaggaacatctccaaggaacaggagggactttggctagagcctcctgcctccccatcttctctctgcccagaggctcctgggcctggcttggctgtcccctacctgtgtccccgggctgcaccccttcctcttctctttctctgtacagactcagttgcttgctcttgtgcctcctgggcaagggctgaaggaggcn

SEQ ID NO: 27337 - DNA, 485 bp, Homo sapiens
  misc_feature (1)...(485): n = A,T,C or G
tggccgagtgnnngnaaccgagancccatgagancntcnggagngncgnggaannatgcatacagaacgacaagggcttctgggcacctgccgtcagccatgcagttcccgcgcattcgggccccacgagtggggctgggggtgaggacatggggaccacagtcaatggagatgtgtttcaggaggccaacggtcctgctgatggctacgcagccattgcccaggctgacaggctgacccatgagcctgagagcattcgcaagtggcgagaggagcagaggaaacggctgcaagagctggatgctgcatctaaggtcacggaacaggaatggcgggagaaggccaagaatgacctggaggagtggaaccagctgcctagtgaacaagtttagaagaacaagatcaacaaccggatcgctgacaaagcattctaccagcagccagatgctgatatcatcggctacgtggcatccgaggaggctttn

SEQ ID NO: 27338 - DNA, 474 bp, Homo sapiens
  misc_feature (1)...(474): n = A,T,C or G
tgaggcctnnaattgataccatgatagcgtcnggaattcctgggctggatgctggcaagagggatctgtgacccagatgacgatgtctggtgggaattgctttatagctaagtcagcaatcctcatgtcttaggcctggcagggccagcctaggccattgagtccagctccccttccagggacatggccacgcgagtctgcacacacacctgcccagtgtagtcacggccccagagctgctcaggcagggctcaccgtcttcctgggttctgatggctgttgtgaggcagctcagtaagggacagggcgcagggcagggagggaaggggaaggctgaattcagggcttcagctcacaagaaaccgcagaaatggatccttagtatccaggctaaggacacagaacgggggcaggacgggtggggcgggccgctgtgtcctggagcctttgctggagagaacagagggcaggtca

SEQ ID NO: 27339 - DNA, 457 bp, Homo sapiens
  misc_feature (1)...(457): n = A,T,C or G
ntttgagancctagaacacgtcgnggaattccatcggcaaggatgagcacaatgaggagagggatgtgatgctggccaagcatgtcatcactctgcacgtgagcgcactgacacagacacaggctgtggagggcgagattgacctggccaagctgaagaagtttattgcctactgccgagtgaagtgtggcccccggctgtcagcagaggctgcagagaaactgaagaaccgctacatcatcatgcggagcggggcccgtcagcacgagagggacagtgaccgccgctccagcatccccatcactgtgcggcagctggaggccattgtgcgcatcgcggaagccctcagcaagatgaagctgcagcccttcgccacagaggcagatgtggaggaggccctgcggctcttccaagtgtccacgttggatgctgccttgtccggtaccctgtcaggggt

SEQ ID NO: 27340 - DNA, 452 bp, Homo sapiens
  misc_feature (1)...(452): n = A,T,C or G
natagatgaccattagnccattgtagngcaattcgcgggagctgagcctagagtccggctgttggctagagtgggcgcggatctggtgtggggaaggcggcgggactcaggcctgcctgcgaagcattgtcctacataatggtagaggacgaactggcacttttcgataaaagcataaatgaattttggaataaattcaaaagtacggacacctcctgtcagatggcgggactaagagatacctacaaggattccatcaaagcatttgcagagatcagcaggcaaaataagctcattcaagaaaaaaaggataacttgttaaaattgattgctgaagtaaaaggcaaaaagcaggaattggaagtactgactgcaaatatccaggatcttaaggaagaatattctaggaagaaggaaactatttctactgctaataaagcgaatgcagagag

SEQ ID NO: 27341 - DNA, 451 bp, Homo sapiens
  misc_feature (1)...(451): n = A,T,C or G
natagaagaccattagnccatagaggngcaattcggctaccgctgcgaggacaccaaccgctgcgtggagccctacatccaggtctctgagaaccgctgtctctgcccggcctccaaccctctatgtcgagagcagccttcatccattgtgcaccgctacatgaccatcacctcggagcggagcgtgcccgctgacgtgttccagatccaggcgacctccgtctaccccggtgcctacaatgcctttcagatccgtgctggaaactcgcagggggacttttacattaggcaaatcaacaacgtcagcgccatgctggtcctcgcccggccggagacgggcccccgggagtacgtgctggacctggagatggtcaccatgaattccctcatgagctaccgggccagctctgtactgaggctcaccgtctttgtaggggcctacaccttctgn

SEQ ID NO: 27342 - DNA, 460 bp, Homo sapiens
  misc_feature (1)...(460): n = A,T,C or G
gaactgaaaccctcgnannnnactggagaccttcgtacagncnggnggaattccctaaggtgagaatagcagggcgaaagcagtcagtggttggctgcagaggccctgtggacactgtggaagctgctctgcttccttctctcacagcagaacaaaccagacacttcactcaatctcggcatcgggctgacaatttagaaatgaggacacgacaactcaaagttgttaagcagagggcaactgcagtttaccaagcccacaaataagaaaagaggtttagcaccaggaagctgaggggacactcatgaaacctgcacctacccgggggcggaaagggtggcgggaggaagccttcaggctttggggccttacactggttgcactctgttctccaggcgaagttctggtttccacaacccctgcatacaattacatcacagcagaaatcaccaattgaact

SEQ ID NO: 27343 - DNA, 451 bp, Homo sapiens
  misc_feature (1)...(451): n = A,T,C or G
aatagatgaccattagnccattgtagtgcaattcctacaacctggccaagcagagcatcacgcgctccgtatcgccctggatgtcagttctgtcaaaagagaagctgtccgagcaggagactgaagcggctgagaagtcagcttagcgggatgggcaagttccttacaatgtgtcacttgcaaataacaaagggactttgagggacatttcattaaatataattactgatactttagaggttactcatttacggtgcaattgcttctgtttgctaatgctgctttgcaaataaaacttgctgccgaccacccacgggcataaaatcaagtgcatttcagcattgcctaaagagctctgacaccacttttcacgttaagatcttcatttagctcctttactgggatttattggatgctgtaaaaaaataaatttacactggatatgcgaagg

SEQ ID NO: 27344 - DNA, 452 bp, Homo sapiens
  misc_feature (1)...(452): n = A,T,C or G
catgacgccctcgnnntatgatgtcatctgaccancnggnggaattccgccgctgctgtagttccccggctggatgcggtgactggtgccagtgctcaggcgcccgctgcccttgacctcccgccccgcgagccctaactcagcgcaggaggaccggctgccgccgccgccgccgccaggctctgatgctggtgtctggtagaagaagattactcacagctctgctgcaggctcagaagtggccctttcaaccctccagagacatgagactagtgcagttccgggcaccccacctggtggggcctcacttgggcctggagacagggaatggtggaggggttatcaacctcaatgcctttgaccccacactcccaaagacgatgacgcagttcctagagcagggagaggccaccctctcagtggcaagaagagccttggctgcccagttgccg

SEQ ID NO: 27345 - DNA, 464 bp, Homo sapiens
  misc_feature (1)...(464): n = A,T,C or G
ggggtnnnnnnagttgagcccctnnnnnnnntttgtagtcattagtccgtgcggtggaattccaagaaggcacggaggtctggggggctcaggaaccccagcacgcgccagggaagcttcagccaggaaggcgaggcagctgagctggagcttggggcacgcatcatacccagggctgcgaggagagcctgggaagcgagtgtcgtgcataccactctgaggctcaagagacagggctgtctcggctctgccctcccccttcccctcccctcctgggagaccctggtcaaggcacctgccctctgagcctgagcagcgtccgtgggatgtgagtgtgggctgggccaccgcctctggcctctcacccgtgctagccagcggtggggacatgggggaagcagaatcctccccaaaccctgccggactctcccccacccccagctctgcccaggctccgaggaggn

SEQ ID NO: 27346 - DNA, 455 bp, Homo sapiens
  misc_feature (1)...(455): n = A,T,C or G
gacctgatagcctcgaannnactgangacgatagtacangcggnggaattccccggctcgagcggccactttccagcttaaagcccctatagccactaagtactcagggctacaaacttgggccagcagggctcaggactggactgtctccctgagacccagctaggtgcctggtatattgtaaggtcctaaagtaaagaagatgaggccgggtgcggtggctcatgcctgtaatcccagcacttttgaggtcgaggcgggcgcatcacgaggtcagcagatcgagaccatcctggctaacgcggtgaaaccctgtctctactaaaaatacaaaagattagccgggcgtggtggcgggcgcctgtantcccagctactcgggaggctgaggcaggagaatggcgtggacccgggaggcggagcttgcagtgagccgagatggcaccactgcactc

SEQ ID NO: 27347 - DNA, 453 bp, Homo sapiens
  misc_feature (1)...(453): n = A,T,C or G
ggagtnccagntgncccccccaagtagcttagngaatctcggcaangcaacccagaaggntaaggggagctcatcgattcagcacccagaaacacctctgcacatttctggtttccatctgccctacaagcctaaacccccacaagaaacagaaaaaggacactcagcttgtgagcctgagaacctggaatttatttccttcatgttctggagaaaccctttgcccaacatcgatcatgaactgcaggagctgctgattgacagaggtgaggacgttccaagtgaggaggaggaggaggaagaaaacgggtttgaagacagaaaagatgacagcgatgacgacgggggtggctggataacccccagtaacatcaagcagatccagcaggagctggagcagtgtgacgtccccgaggacgtgcgggttggctgcctgaccacagacttcggcat

SEQ ID NO: 27348 - DNA, 472 bp, Homo sapiens
  misc_feature (1)...(472): n = A,T,C or G
gccccccccngnnnnnttcgagatcgtagtccagtgggaggaattcgcctgtttcctcctgaccccaccccttcccctcctgctgggcagatccgagtgaagcctgacaggaccggtgtggtcacggatggtgtgaagcactccatgaaccccttctgtgagatcgcggtggaggaggctgtgcggctcaaggagaagaagctggtgaaggaggtcatcgccgtcagctgtgggcctgcacagtgccaggagacgattcgtaccgccctggccatgggtgcagaccgaggtatccacgtggaggtgcccccagcagaagcagaacgcttgggtcccctgcaggtggctcgggtcctggccaagctggcagagaaggagaaggtggacctggtgctgctgggcaaacaggccatcgatgatgactgtaaccagacagggcagatgacagctggatttcttgactggccacagg

SEQ ID NO: 27349 - DNA, 508 bp, Homo sapiens
  misc_feature (1)...(508): n = A,T,C or G
caaaactggaagaacatatggattgagtaccaatatctagagtttgttttaatatgtgggggagaggaaatatactatgttaatttcaagcgtaaaaatagggctgcaagtaaacagatatgttccttgaaatgtaaaatttcgtccgtcactgatttcaggctttttcaaactgctgatgctgtgtacaggagggggaggaggaaaggttcgagacctttgaaggacatcgtgtagcgctgtaacctgaggggccgccttggttttgtgggtgctcctacgtcactaggctgtgattttggggaaatggggccctccaccttatgtagatccagagtccgtggctctgagcatcctccctttcccactggacctgcctgcagtgtctgccttgggaatggtcaagacagagatggtatcgtgcagcctctggtctccacacagtgagagtccagggctcaaggctgctcaagaccaagcttcccttgatgctcactttcggtgtcan

SEQ ID NO: 27350 - DNA, 442 bp, Homo sapiens
  misc_feature (1)...(442): n = A,T,C or G
naagattgcattcgtcagngcggnggaattcccagccccagccccgcagaatcacagtggtcaggggctggccgtagtgaaggtccaggccattctgaccatgacccccataaggagctggacgtttctaaccccacgggaatgcgtgttccgctcacacacggcactgcatgttgcccaaattaaacccaactcctgtcctccccgaaacgagtggggccgcgctctgggtctgagccacattcatgacgtctgtccaggcggaagaccagccagctgtgcaagccgggagcctggccctgcggagcatttgggtgccgtccagcccgcatccccacgtgggccctgcccggcggtcctctcccgcccgcaacagcgtccccggggtgggaggctccaaggcagccgcgcanggccccgtttgcagctcaaggcagctcgc

SEQ ID NO: 27351 - DNA, 560 bp, Homo sapiens
  misc_feature (1)...(560): n = A,T,C or G
gcgggcnnaatcgatcacactccgagngcgctanncctgaggagaagaatgcagccctccctacagtcccggagcctgcagccttggaccaggtccaacaggatgacccacagccagttgcagaagctgggacaccttgggccgcacaggaagatgcggattccactttgggcatggaggccctcagtctccctgagccggcctctggtgctggggaggaaatagcagaagccctttctaggcctggacgggaagcatgtctggaagcgcgagcgcacccaggtgatggggctaagcctgactcaccccaaaaggagaccctggaggttgagaaccagcaggaaggaggcctgaagccactggcacaggaacatggacccaggtcagcacttggaggtgcaagggagggccccgatgcgcctcctgctgcctgccctgaggtcagccaggcccggctcctgagcccagccagggaggaaagaggcctgagtggcaagtccacccccgagcccacgcttccctcagctgtggccacagaggccagtctggactcctgcccn

SEQ ID NO: 27352 - DNA, 444 bp, Homo sapiens
  misc_feature (1)...(444): n = A,T,C or G
nattgattgacgtccatcagnaccgngcggnggaantcgcctctgtttcccagacattgactcgaggcgcctccagtcctctcaaccccctgactttcaagtcctttcaagtccttgtgccctgaccaagttatgaggaaaagagggctgagggcctggaggtgggctcgcaccccctcgaacccacctagatgtctcctcctcgcccagcctatgagttcagacttggggggctccatctgtccctccctgaggtccctcatcttgtccctgctctgattctgtcagcagatcctgaacactccttggtggggacccatgcctccaaggctgcccccaatgccagctgtcctggtgaaactccccagaactctcggtgaaaggcccgagaaccttcggaggaagccttcgggactcctcgcccctgctctgtttctctcccgg

SEQ ID NO: 27353 - DNA, 575 bp, Homo sapiens
gcgcgatagacactatcaggtggagaaccccagcgcctggaggctgaacgaagagcgaggttgcaggacgaggagcggaggcggcagcagcagttagaatagatgcgcaagcgggaagcggaagaccgagcgaggcaagaggaagagcgccggcggcaggaggaggagcgaacaaaacgagacgctgaagaaaaggttatggtcctttaagggcagctagaattttaccaagttagcctgaacgtaatcgattggctggggcagagcgggctggaagttctgtgtttcttaagaagcacgaggcagagcagggcctggctcccccagctttgtgattggacctgcaactttaccccatctggcccacctacctctcttctggactgtctccagatccccttatctgccaagttttgtctccttcaaacttctgaactcttgggcgtgtgtagcagtgagcctctttgcaaagaggtcgtttcctcgggcactcatctttactgaacatggcccagcttgtcattgtgaaggtgacattgggtcagtgatagcttaatggatgtggaccgtggagg

SEQ ID NO: 27354 - DNA, 474 bp, Homo sapiens
  misc_feature (1)...(474): n = A,T,C or G
cccagcccagcnnnnttttgatttcgagatccatatccatgtggtggaattccagatggacactgagggccagaagcctgcacggaccacaggcaaagaagagagatagtcagacccaggattggggctgccggcctcctgtcgccccagccccagcttcctggccttcaagaccagacccctcttccactgtggtcttgtgtcttgtcttagggagaaaccttacagggaacaacctccttggcagttcaaggccaaagccctcagagggaggagtgggaggcagaaaggacacacaggaggtgtctggggaaccccctccaacatagccagaatgtctcctgcctgatgaccccccgcccccaacattaaagctgttcacagtcatcaagaagaaagattcctgtgggacgaggtggctcatgcctgtaatcccagaactttgggaggcccaggagttcgcgaccagcctgg

SEQ ID NO: 27355 - DNA, 475 bp, Homo sapiens
  misc_feature (1)...(475): n = A,T,C or G
ccgcgccgcccagnnnnnttagaattcgtatnncgtgngcaggaattcggaggcagtcgccagcctgcggagaggccacatccagcggctgaacctgcgctacactcaggtgtcccgccaggagctcagggactacgcgtcctggaacctgagtgtgaacctctacacagtcaacgcaccgtggctcttctccctgctgtggtgtgcgggggtcccatccgtcacctctgacaactcccacaccctgtcccaggtgccttcccccctctggatcatgcccccggacgagtactgtctcatgtgggtcactgccgacctggtctccttcaccctcatcgtgggcatcttcgtgctccagaagtggcgcctgggtggcatacggagctacaaccctgagcagatcatgctgagtgctgcggtgcgccggaccagccgggacgtcagcatcatgaaggagaagcttattttctcagag

SEQ ID NO: 27356 - DNA, 564 bp, Homo sapiens
  misc_feature (1)...(564): n = A,T,C or G
agcggtgcnnnaattganncccattcgaatcactactccgtgtggtggaattcctgctgtgggtctgagatgtagaatggctgtggtggacaagccaggaactgcgttttttttaagaggctgcccaaccactccatttcttaaggaaaaggagaccttgccagtttgatcctagttagtgtggacttagggaccacaaaacactggaggagatttcattcctcctctagggttttggctgatgacttggcggctctccgactcccctgatgtccaggccattctggccattgcttccctgtaggcgttgttgccaaccagatgttgcataaaaaacatgaaattcagcatgtctctggtgaacattctctgtccccacgcccacccttcaccctgctcttgcttcctctctttctgggtgaggggagcatgtgtgcgctgtcccatcagctcccttccttgctcatctcctggcctggcctcccacgccggaaacctgcangccattctcttcctttcatctcgtagtcagggagtccccaagttctgttgcttctgtctccg

SEQ ID NO: 27357 - DNA, 476 bp, Homo sapiens
  misc_feature (1)...(476): n = A,T,C or G
cccagcccagcnnnntttggatttcgagaccactatgcagagtggaggaattccctgcagcggaggtcggctgttgggtgtggagtttcccagcgcccctcgggtccgaccctttgagcgttctgctccggcgccagcctacctcgctcctcggcgccatgaccacaaccaccaccttcaagggagtcgaccccaacagcaggaatagctcccgagttttgcggcctccaggtggtggatccaatttttcattaggttttgatgaaccaacagaacaacctgtgaggaagaacaaaatggcctctaatatctttgggacacctgaagaaaatcaagcttcttgggccaagtcagcaggtgccaagtctagtggtggcagggaagacttggagtcatctggactgcagagaaggaactcctctgaagcaagctccggagacttcttagatctgaagggagaaggtgatattcatgan

SEQ ID NO: 27358 - DNA, 481 bp, Homo sapiens
  misc_feature (1)...(481): n = A,T,C or G
agagtgcaggccagcccccaatagaattttcgtgtgcagtgtgcaggaattccaagcgtgagccaccacgcccggccaaaaataaaatattaatgaacacatggtctcagggaggggaacgtcacacatcacgtcctgttggggtgttgggggctaggggagggatagcattaggagaaatacctaatgtagatgacaggttgatgggtgtagcaaaccaccatggctcatgtatacctatgcaacaaacctgcacgttctgcacatgtatctcagaacttaaactataatttaaaaaaaaaaattatcttcatctatagaaattagaagtataagttgatcaggttaatcaaaaaattctgtttataacttggagctaatgttaactgtcttgtttcttagaattgtacaatgaggtgccgggcacggtgggttattgcctgtagtcccagcactttgggaggctgaggcgggtggattn

SEQ ID NO: 27359 - DNA, 419 bp, Homo sapiens
tatcttaatgatttgtccacagaaacaccgggttgtcttcctctgcccctctgccccgcagagggggcactctctgtaactcagcatcacggtggggggcagctgggaggcctggttccaggtgaccttctccacctagatgttcaccccactcagttccagctttaccaacagggccccccgcagggacttggggtcgcagagtcccggcctgtctcagggccttgttcatggaagggagatgagtcaggttgaaagctcatcgtgtagggttctgtgcagggcccttacaggactggaccgcagccaagatgcctgcctgttaaccatgcccagcccccgtcatttccgcgtgaagccgcaggcctcggagccttggtctgaaatgcctgtggagtaacctcggtccatatacatgg

SEQ ID NO: 27360 - DNA, 476 bp, Homo sapiens
  misc_feature (1)...(476): n = A,T,C or G
agggcgccnggnncnccnaattgactgacatctctatgcacngncgnggaattccagctgcgggagcggctggagtcaggggagcctgctgagaagaaggcatcgaggctgtctgaggaggagcagcgcctggtgcagcaggccttccagcgcaactttttcagcatggcacggcagctccccatgaagatcaggatcaacggcagggaagacagagcagaggcctcggctgcagcactgaacctgaccacgagtagcattgggagcattaacatgtctgtggacatcgatggcaccacctatgcaggtgaggccctggagctctgggggaggcccacgtggccgcagctagccacagggcagctctgcggctggccctgcctcttaccctctgtctgaacacctcccacagtggcttcctttttcctggtctcagagttgcaaaggtcaagtggtcctctggactagtagactgt

SEQ ID NO: 27361 - DNA, 425 bp, Homo sapiens
  misc_feature (1)...(425): n = A,T,C or G
gaagcttcctgacatgggctgcagtcttcctgagcacagggcacaccaagaagcaagccataggcagttctgtgagtcaaagaatgggcccccttatccccagggagctggccagttagattatgggtccaaagggattccagacacttctgagccagtcagctaccacaactctggagtaaaatatgctgcatccgggcaagaatctttaagactgaaccacaaagaggtaaggctctccaaagagatggagcgaccctgggttaggcagccttctgccccagagaaacactccagagactgctacaaggaggaagaacacctcactcagtcaatcgtcccaccccctaaaccagagaggagtcatagcctcaaactccatcatacccagaacgtggagagggaccccagtgtgctgtaccagn

SEQ ID NO: 27362 - DNA, 425 bp, Homo sapiens
caaatcagagaagtcccagagataacaaaaacacaaccacagagatagggagacgtaagccggagaaagacccagagattcgcatagaaagcaacgtggagactcagaagcaagcacagcatcaaggaatgatcaataaaaagaaaaaaaaatatttcctgaggacttccaagtacaaggccctgcaatctcaggccacttctgtcccatctctgccttcagagggggggacaggtagtccagacaattagaatacagagggggctgtgttctgacggggccacgcgggcattgaggaaacgctgcaggcccctcccctagctggggcggggatgtctgtgtgccatcatctcactccatctggtcattcctttgcccattcatccatccattcattcaagtcaccccatgcacattttccaaga

SEQ ID NO: 27363 - DNA, 559 bp, Homo sapiens
  misc_feature (1)...(559): n = A,T,C or G
agcggttnnccctcgacactgtccgtgngcngcaattcttcttatttatcaattaaagtaaaaaatagtttgatatcaaattcgaaccaaaaaagcagaatactcaaatacaatgaggattccaaattatctgctatatcacatgactaggaaagtaaattataagagaataaatttcctcacttatatcttttgctttctttaaattctgtaatgatttctctaatgatcttactctttaagataattgtgaatcttgattttcacatcaactattttgtcttatgcaaatttttaaacatacgatttttttcccccaagtaattgatactggaacaagacaggtcaaacccgaaactctaaggcatgttaacacctccttcctagaagagaggaagaataaacattctttggatcctattgttcaaccagttaagaatcatagttaatcacactttcttaccctgtccacggtaagaaactggtcagatgccctgttgtgatcaggattccctgtgtctgtagcattcatatctgtatatagctgactggttntatn

SEQ ID NO: 27364 - DNA, 471 bp, Homo sapiens
  misc_feature (1)...(471): n = A,T,C or G
gcagtctaggggnnttagagttcgtatnccgntgggggaattcgaagaaggcgtcggcggcgcagctgcggatccagaaagacataaacgagctgaacctgcccaagacgtgtgatatcagcttctcagatccagacgacctcctcaacttcaagctggtcatctgtcctgatgagggcttctacaagagagggaagtttgtgttcagttttaaggtgggccagggttacccgcatgatccccccaaggtgaagtgtgagacaatggtctatcaccccaacattgacctcgagggcaacgtctgcctcaacatcctcagagaggactggaagccagtccttacgataaactccataatttatggcctgcagtatctcttcttggagcccaaccccgaggacccactgaacaaggaggccgcagaggtcctgcaaaacaaccggcggctgtttgagcagaacgtgcagcgct

SEQ ID NO: 27365 - DNA, 475 bp, Homo sapiens
  misc_feature (1)...(475): n = A,T,C or G
cccccccccagnnnnnttagagttcgtagtccgtgngcaggaattcggaagagagcagctcgcttctaactggactgcacgttggtgacagcgtcccaagctggtgacagacccactctgtaactttcagctagattcagccaccagatcccagaaacatgacccttgctgcctacaaagagaagatgaaggagctcccgctggtgtccttgttctgctcctgcttcctggccgatcccctgaataagtcgtcctacaaatatgaaggctggtgtgggagacagtgtaggaggaaggatgaaagccagcggaaagacagtgctgactggagagaaagaagagctcaggcagacacggcggacctgaattggtgcgtcatttccgacatggaagtcatcgagctgaacaaatgcacctcgggccaatcctttgaagtcatcctgaagccaccctcctttgatggggttcccgagtt

SEQ ID NO: 27366 - DNA, 480 bp, Homo sapiens
  misc_feature (1)...(480): n = A,T,C or G
gcccgccgcccagnnnntttagatttcgataccactatgcagagaggtggaattcccctcagctccctccttgcagccctcgagaaagctcagccccacagaacctaagaactatggctcatacagcactcaggcctcagctgcagcagccacagctgagctgctgaagaaacaggaggagctcaaccggaaggcagaggagttggaccgaagggagcgagagctgcagcatgctgccctgggaggcacagctactcgacagaacaattggccccctctaccttctttttgtccagttcagccctgctttttccaggacatctccatggagatcccccaagaatttcagaagactgtatccaccatgtactacctctggatgtgcagcacgctggctcttctcctgaacttcctcgcctgcctggccagcttctgtgtggaaaccaacaatggcgcaggctttgggctttctatcctctg

SEQ ID NO: 27367 - DNA, 477 bp, Homo sapiens
  misc_feature (1)...(477): n = A,T,C or G
cgccagcccagnnnaanttcganatcgagaccactaggcagagaggaggaattccccggctcgagccgggcctggctcagaacaggctgtgctgggaagcgggagcaggagctggcgccgccttgcgggctggcagaggaccatccactccctggcgctggggccgtcccatctcatgggcaagaaacgtgagacccctggctcgctccacacacaacctaagtgccagatggatgagacgcctacgcgtgagtaaatgccaggaacatgagactcgaacgtggcaggatatccttctgcccacgaatctaaaagcttactcggtaatgggagaatggttccaatttgataaactcgggtttttggaacgtctgtgctccagaaacactggaaggcaagtggctgctgactggaggagataattggatgctgcaagcggcaaagggctcgggatgcaaaacaccgcaagaaatgcan

SEQ ID NO: 27368 - DNA, 475 bp, Homo sapiens
  misc_feature (1)...(475): n = A,T,C or G
cgcccgccccgcnnnnnttcgagatcgtagtccgtgtggaggaattccagcggcgctggggagggcgaggcggaggcggcaaaacgggcggtcgagcagaacgtgtagccgcgtcccctccagtccgctccgggcagctgctgatgcaaggaatcccctgggctcccgtccactccactgctgaccagcccattcgcctgtgctgagtcttcctgcaggcctttccttgcctctgtgggaccctgtgggggtccatccggctggagaagaaaagcctctcatgctaacgttgcagaccccagagggtgagagaaagggggacttcattcagtcttgaaacctgtgtgctcagcccccaaggcatcaggaattcttcctgcccagagaatcaaggcagcttcatttttttcgtaccttggtcagtggttctcaacctttttgttatcaaggcactttttgttgtacatatgtcctg

SEQ ID NO: 27369 - DNA, 478 bp, Homo sapiens
  misc_feature (1)...(478): n = A,T,C or G
gtgcggnnnnnnnnnaatcgagacccttggaagncnctnggaantcgccccagccagcgaggccgccgagccaggcccggtcgcgtacccaggctttgacggctgccattcagggtggacgatgcctaaagattccaccgctaatattttttttattaatattttttattttttatttctggactgactcagataaaggaatttagaaagactgagcaccagccgctgcacttctctggacttctctcctcaatccgttgccaactttgattgaatgggtgctgtggatgtgattatataatactgccatttccaagcagtgtttttggtaggttttaataaacagacttttcaaaagacggcaatatagaatcgttagatccgttgttgatctaaaaatatttgctttatattttcattaaatgacttcttttaatattttattcagaatacttatgaactgctgcaaaacggtaat

SEQ ID NO: 27370 - DNA, 556 bp, Homo sapiens
  misc_feature (1)...(556): n = A,T,C or G
gggncgccccaattgaaaaccccaactgagcccccatccgagnggngcaanncgncttctctnctacttccatgaagacgcggccatcagggaagaggccttcctgcatgttgctgtggacatgtacttgaagctggtccagctcttcgtggctggggatacaggcacagtttcacctccagctggcaggagcctggagctcaagggtcaggcagggcaaccccgtggaactgataacaaaagctcgtctttttctgctgcagttaatacctcggtgcccgaaaaagagcttctcacacgtggcagagctgctggctgatcgtggggactgcgacccagaggtgagcgccgccctccagagcagacagcaggctgcccctgacgctgacctgtcccaggagcctcatctcttctgacgggacctgccactgcacaccagcccagctcccgtgtaataatttatacaagcataacatggagctcttgttgcactaaaaagtggattacaaatctcctcgactgctttagtggggaaaggaatcaattatttatgaac

SEQ ID NO: 27371 - DNA, 564 bp, Homo sapiens
  misc_feature (1)...(564): n = A,T,C or G
aatttgagcacanctcgngnggnncatcgaaccactgctcagagaggtggaattccgaggacagaggaaaggcgccgggtctgtgttccgcgcgcacgtgaagcaccgtaaaggcgctgcgcgcctgcgcgccgtggatttcgctgagcggcacggctacatcaagggcatggtcaaggacatcatccacgacccgggccgcggcgcgcccctcgccaaggtggtcttccgggatccgtatcggtttaagaagcggacggagctgttcattgccgccgagggcattcacacgggccagtttgtgtattgcggcaagaaggcccagctcaacattggcaatgtgctccctgtgggcaccatgcctgagggtacaatcgtgtgctgcctggaggagaagcctggagaccgtggcaagctggcccgggcatcagggaactatgccaccgttatctcccacaaccctgagaccaagaagacccgtgtgaagctgccctccggctccaagaaggttatctcctcagccaacaaagctgtggttggtgtggtggctagaggtggccgaat

SEQ ID NO: 27372 - DNA, 550 bp, Homo sapiens
  misc_feature (1)...(550): n = A,T,C or G
catagatcacgttcgngggngaatgtaggtccatgtccaccccttgagtctgggctgaagccacgcccacccaagtgatgatggggataaagaatgggggtggagttgccctcaaaggtgcccaacagtcagaagacgcctgactctgctataaggaacaaaatgagaaaggcaggacagcccctggctctcagtgagaccagacctttcctgaaactgtggcactgtgtccctccgggttccctgctgcctccctttctctgaagccaggctgaggacctggctggccttaccttccctttcttccccaggtgtccacactgaagggccagctgcagcaggagcttcgaaggagctcagcacccttctccccaccctccggccccccagagaaatgagctcctgctggcatctggagaacacccctgtgcctgggacaggggaggacccttcttttggacagcccccccccccagagcccggtcccttgggggcctcaaagctgggtggatgaggaggcgcctctgctgcagtgctgaagacggtactc

SEQ ID NO: 27373 - DNA, 563 bp, Homo sapiens
  misc_feature (1)...(563): n = A,T,C or G
natcgatttcgatcactatccgcgnggngcaattccctgggtgtcgttgttttgcgggaggatgggctcacagggcctgcccagggtcactggtctcagtcagcctccactcacaggtaagaactctgagactggtgagggaaatcactttggcatagcttcacagccagtcggtatttacacccagggcttcaggccacgcgcaaagcagcagcaggcgtgccccggattaattatcatctcctcctgccacaacagccgtttatttagatttttttgtttacgacactgctgtgggttgaactgtgtctccctaaaaggtaggttgatgtcttaacccctggtacttgtgaacatgaccttatttggaaatagggtcttttcagatataatcgagtgaagatgaggccatacttgagtaggggggcccttaatccaacatgacaggtatcctggtagaagagaaaaggagacatggacacacatacagaggagaatgccgcatagcatagatgggagcggtgtggctccaagtcatgtcaagcattgccagccactaccac

SEQ ID NO: 27374 - DNA, 567 bp, Homo sapiens
  misc_feature (1)...(567): n = A,T,C or G
natttgagcatcgagtcacngnggngcaanncagctagngaaagacccacctttatttttgccctcaccccaagtcccccctggctggggctgagcagagaggttaagctgatctccgatccacaaataccaccagctgcttcatccacagaaggcgctaagaacggggaggtgaggaataagatccttaaaataaactcttgggcatccccctcaccagctgactggctttccggaggcttgtgggtgagtttcaagtttgtggtggcaacagcagcaggacagggcacggagggagcgagggagagaggaccggtcccagcttttggatattttgggttatggggaagcaagggccaaacattctttatccctcccaccccagggaaaacatttggaaaatagtcctttttcttggaagcagagacgtctccctacccaatctttcccatcctatcaacccatggggctagagactgccatgcaaccaccaccacgacagcccttcctccatcagaagacaggagtgagggccccgggcagcagtggacgacccagcctccccat

SEQ ID NO: 27375 - DNA, 483 bp, Homo sapiens
  misc_feature (1)...(483): n = A,T,C or G
cgccgtgccttagaaaaccntnatagtagaccctagtcagngcggtggaattcaccattctttatccattccccttattcctacatcaattgtttttactttcttgggtgtgagactgagtgagacacacacaaaatgtgttgacactgtgatgccggcaggcagagcagctactgactttgaacatgggcagagaggcccctggatctcatccagcccactccttttccccttccagtacagtgacactctggtgcccattggcagatggcgacttccctgcacccataactgatgctttgtgaattcttcctccttttcagaactactctgtgctaattgttctgccagtatgggcgcatcagctccatcctgacaaacaagacatttaggtaaaactttgtaggcaccttctgcttctctgcttcattgttcctgtgatagtcctgttgttattacagcatgtacccaaaacagcctcan

SEQ ID NO: 27376 - DNA, 562 bp, Homo sapiens
  misc_feature (1)...(562): n = A,T,C or G
agtagaaaccanctcgngnggngcattcgatccacaatcagtgtggtggaattcgtgggacatccagaacctgcagaaggtgaacaccatccgggcccatgacaacccggtgtgcacgctggtctcctcacacaacgtgctcttcagcggctccctgaaggccatcaaggtctgggacatcgtgggcactgagctgaagttgaagaaggagctcacaggcctcaaccactgggtgcgggccctggtggctgcccagagctacctgtacagcggctcctaccagacaatcaagatctgggacatccgaacccttgactgcatccacgtcctgcagacgtctggtggcagcgtctactccattgctgtgacaaatcaccacattgtctgtggcacctacgagaacctcatccacgtgtgggacattgagtccaaggagcaggtgcggaccctcacgggccacgtgggcaccgtgtatgccctgggcggcatctcgacgccagaccagaccaaagtcttcagtgcatcctacgaccggtccctcagggtctgagtatggacaacn

SEQ ID NO: 27377 - DNA, 478 bp, Homo sapiens
  misc_feature (1)...(478): n = A,T,C or G
cgggccgcccnnnnnnaattgagaccactgagaaactcggcagngtcgcggaantctcaggggcacaaaggctgaccagcagaggcaagctgaggacagtggagagaggtgacgctgtgagctctgaaggtggagtttggatctccagactcactggacctaggatgatgactggctctgctgcatttctcagtcatgtgagccaataaggtcctctcttctgtttcagtttgagttggatttctttgacctgcaaccgaatgcgtcctccctaatatattcttgcaccagagtgtacatcctcagtgagtgcctgagggagtgtggggagggaattcctgcaaagcagagtgagggctatgcaagcccatcagaccagctgctggccagcctgtgagagcagcgcaagggaaccttgtgtgtgagcagcattttgggcggccaaggctccaggccacattgcattggcaggtctgtg

SEQ ID NO: 27378 - DNA, 463 bp, Homo sapiens
  misc_feature (1)...(463): n = A,T,C or G
gaaaattagataccatannnnntttgatgaccttagtcagtgcggtggaattccccggagctgcagccaccggggagccaggcagcaaagcacctgctctgagtggccatggggaagcgatacttctgtgactactgcgaccgctccttccaggacaacctccacaaccgcaagaagcacctgaacgggctgcagcacctcaaggccaagaaggtctggtacgacatgttccgagatgcagctgccatcttgctggatgagcagaacaagcggccctgcaggaagtttctactgacaggccagtgcgactttggctccaactgcagattttcccacatgtcagagcgagacctgcaggagctgagcatccaggtggaggaggagaggcgagccagggagtggctactagatgctcctgagctccccgagggccatctggaggactggctggagaagggagccc

SEQ ID NO: 27379 - DNA, 479 bp, Homo sapiens
  misc_feature (1)...(479): n = A,T,C or G
nggggacggggnnnnnnaatcgagacccctcgaagncactnggaantctcgaggaggtagatcaccctttctgcgggggacgatttcgtcggtggtaggctgctaccatgaggttgaatcanaacaccttgctgctggggaagaaggtggtccttgtaccctacacctcggagcatgtgcccagcaggtaccacgagtggatgaaatcagaggagctgcagcgtttgacagcctcggagccgctgaccctggagcaggagtatgccatgcagtgcagctggcaggaagatgcagacaagtgtaccttcattgtgctggatgccgagaagtggcaggcccagccaggcgccaccgaagagagctgcatggtgggagatgtgaacctcttcctcacagatctagaagacctcaccttgggggagatcgaggtcatgattgcagagcccagctgcaggggtaagggccttggcactgaggcn

SEQ ID NO: 27380 - DNA, 429 bp, Homo sapiens
gaggctggagaggggagccgggggagccggccaggaccaggttgggctggcagtcccaaaactgagaaggagaagggcagctcctggcgaaactggccaggcgaggccaaggcacggcctcaggagcaggagtctgtgcagcccccaggcccagcaaggccacagagcttgccccagggcaagggccgcagccgccggagccgcaacaagcaggagaagccagcctcctccttggacgatgtgttcctgcccaaggacatggacggggtggagatggatgagactgaccgagaggtggagtactttaagaggttctgtttggattctgcaaagcagactcgtcagaaagttgctgtgaactggaccaacttcagcctcaagaaaaccactcctagcacagctcagtgaggccctgcccaggctgagctg

SEQ ID NO: 27381 - DNA, 471 bp, Homo sapiens
  misc_feature (1)...(471): n = A,T,C or G
agggcnnnaatcgtgatcatacttagtgtggtggaattcgttttgtagacacagaacaaagaatcagaatttgaaaaaagaagaaaaacaaatcttcgcagctgcaactttaaagtatcacctttatagatggcagggatttccattatgcaaatggaatctaagatttcaatgtgaaatcttagaatgcagttttaccacttgcagtcttgtatttgtggtggccatgtggtgagggcggtgatgctgagctttctgcccaggaggaatgagctttcaagctctcagcagggtgtcaggcttggggatttgagcatccactgctcaaagtccaggctattctccagtcctcacggcagccactaagcccaggagccagacctggcccagggacacatctcctgagggatcccagaaagaacccagtctttcctttccctttgggtccttgntagaatgaaaacctctcta

SEQ ID NO: 27382 - DNA, 502 bp, Homo sapiens
  misc_feature (1)...(502): n = A,T,C or G
agagcggtnnnnnnncctgagacccctgagaaccgtaggaagngcctnggaattattcaggaccctgcactccgttctcggaagtgccaccgagaagcgccggcctcggggctgtctacagcggcccgagagaggctgtggtggccccgagcgcgagtgtgtaggtgacaggacagcggccaggcccgcccctcccctcgtgatggtgattgtcctccagagcagtgatggaggaaataccagcccaggaagcagcagggtcaccaagggtccagtttcagtctttggagacccagtctgagtgtctgtccccagagcctcagtttgtgcaggacaccgacatggaacagggactcactggggatggagtttcactcttgttgcccacgctggagtgcagnggtgcaatctcaactcactacaacctctgccttccaggttcaagcgattctcctgcctcagcctcccaagttgctgggattacaggcattggccaccacgc

SEQ ID NO: 27383 - DNA, 557 bp, Homo sapiens
  misc_feature (1)...(557): n = A,T,C or G
naatagatcaccgntcgangagggcatagatcacctatgacctgngggcccgttctccagcagaaaaccacgcccaccaagcagaggccacgcccacaaccgttgtcaacgccaaccctgtactcaaacctcggcccatagttcctcagatcccctcacccctggccagggatccctctaacccaccgtgtcccgactgctgaccgggccctacctccatcttttccgggttcttcctcccagctaggccccgcccccatccccgcccatacgcgttaggccccgaccatgcccctctgagccctgccccagtacgccaggcccccctcccaacgacgcagcccggttctgcatccggtgaagaaacgcggctggcccaagggcaagaagcggaataagattctgccgaatgggcccaaggcaccggtcacgggctacgtgcgcttcctgaacgagcggcgcgagcagatccgcacgcgccacccggatctgccctttcccgagatcaccaagatgctgggcgccgagtggagcaagctgcagccaacggaaaagca

SEQ ID NO: 27384 - DNA, 551 bp, Homo sapiens
  misc_feature (1)...(551): n = A,T,C or G
cgcattagatncacagttcagagaggatgaattctctggaccgccatcatatgtggtctgttgttgaccgtatgtatgaggtacatgactgtactttgtaaaggcccttcaaggattctgaaattatagataataaaacctgccccacaatttaaaaaaaaaatcatgtcatgttagtgaagaatgtgaatgtaacgttggtcaggagtgagaggaagggaatttgtcatgcagcgtcagtggcttcacctcgcaaagcagcagcaggacggccccgtggcgagaggctgtgcaggcggtgcttgcatctctgcacaggttggctgtgagtgacagctcagagtgcggccggatgtcaccatactcggtgccaggcgcgggttcgtcatcaggaagtcgtgttctcatggcgaacaacttctggggaagttctgatcaaatcacagcatgagcgactctagattatatactgnggccttcctggnaacgtcagtgtagngaaaccgtccagtgacacacccgtatttttacccgcacggtgttgcactcan

SEQ ID NO: 27385 - DNA, 473 bp, Homo sapiens
  misc_feature (1)...(473): n = A,T,C or G
ggaaaagaaaaacctcgagaccattagganancctgatgtccctagtccatgcggtggaattccgaggagcagctgtgctgcggctgtgctcggccttagtggtgtcggggtctagtggacagagaagactcttggccaggcagatggcttctcggtggcagaacatggggacctccgtgcgccggagatctctccagcaccaggagcagctggaggacagcaaggagctgcagcctgtggtcagccatcaggagacctctgtaggggccctggggtccctgtgcagacagttccaaaggaggctgcccctgagagccgtcaacctcaacctccgcgcagggccctcctggaaacgcctggaaaccccagagccaggtcagcagggcctccaggctgcagctcgctcagctaagagtgctttgggtgccgtgtcccagagaatccatgagtcctgccaaagtggcaccaagtg

SEQ ID NO: 27386 - DNA, 477 bp, Homo sapiens
  misc_feature (1)...(477): n = A,T,C or G
aggccgnngnnnnnaatgagaccactgagaccgcaggaagngtcgaggaagtccatacaggtgttacagcttccaccattttacacaggaggaaacagagctcagctcagagaggttgagttttccaagaagccaagtcatggggccaagaatagtgcccgggtgccatgagactctgcccactactgccctgctggctgcagagcggctcacatacggctgtcatccaagccagggagcctttgagccagtgctgctgagaaaattgggaaaaagcccactgcccggttcccagcacatcttcactgttcctcgggctccctccatgtctgtttccctctgagtgtagtagattggggactcagaaccttctagaacagaagttatggttttgtaaggggaagaaatatggtcaagtgcacatctataatttagagtattaaatttccttgtacccttatgatttattctagaagg

SEQ ID NO: 27387 - DNA, 442 bp, Homo sapiens
  misc_feature (1)...(442): n = A,T,C or G
nggaaactggaccatccganctgagggcaatcgaaangcgctggaagactttgagggagagaaccctcaggtgcccaagcttgagttgagcatcagcgggttcagccccaaacgggaacacctgcccctggccgtgggcatcgccttcttcctcatgacgttcttggcctcctagctctgccccctcccctggggggggagagatggggcggggcttggaaggagcagggagcctttggcctctccaagggaagcctagtgggcctagacccctcctcccatggctagaagtggggcctgcaccatacatctgtgtccgccccctctaccccttccccccacgtagggcactgtagtggaccaagcacggggacagccatgggtcccgggcggccttgtggctctggtaatgtttggtaccaaacttgggggccaaaaaggg

SEQ ID NO: 27388 - DNA, 465 bp, Homo sapiens
  misc_feature (1)...(465): n = A,T,C or G
cgcgcccgggcaatagagncccctngaatgatgaccattagncagggcggtggaattcccagatgagtgggagagacacccagggccacatggcagtgcgctccggcagcgtcggaaaccaacatgcaagacgcagcttgaaggactgtccttgctgcattcatccagctcaccccagcaaggacgggcggcaagaggaggaatattcaccaagccgcctccacagtgccggtgggcgtggtgcccaagggcagctaccccttctcagctccagcctcacactgacctcagcagtgtagactgctgtctattagtgtatgaagaaaccaagtgtagtggcttgaatagtgtcctctaagaatccgtgtcctccctggacctcagaatgggaccttattggggaaaagggtctttatacagaataggagaggacacagagacacagagaaggaagcagagactgga

SEQ ID NO: 27389 - DNA, 455 bp, Homo sapiens
  misc_feature (1)...(455): n = A,T,C or G
nttagtagatcactagnccatttgatggcattcggatgccttggctgggttgatttctaggttttcttgttttcccccagattgaggacgagacgcaggtgtcacgggccactcagggtgaacaggacaattacgagatgcatgtgcgagccgccaacatcgtccgagccggcgagtccctgatgaagctggtgtccgacctcaagcagttcctgatcctcaatgacttcccctccgtgaacgatgccattgaccagcgcaaccagcagctgcgcacactgcaggaggagtgcgaccggaagctcatcacgctgcgagacgagatctccattgacctctacgagctggaggaggagtattactcgtccagctcaagcctttgcgaagctaatgacctgcctctgtgcgaagcttacgggaggctggacctcgacacagactctgctgatggcctn

SEQ ID NO: 27390 - DNA, 452 bp, Homo sapiens
  misc_feature (1)...(452): n = A,T,C or G
natgaaacctgagaccatcgtacagtgcggtggaattcctccacctcttctcctttgagagtggccgccgatgtcagacaggccatggaatatttgcatttaagtgttcccgggctgaggaaatcttcaacctccttcaggatctgatgcagtgcaacagcatcaatgtgatggaagagcctgtcatcatcacccgcaatagccaccccgctgagcttgacctccctcgagccccccagccacccaatgctctaggctacactgtctccagcttttccaatggctgccctggagagggcccacgattctcagctccccggcggctctcgacaagcagcctgcggcacccctcgcttggggaagagtccacccatgccctcattgctcctgatgagcagtcccacacctatgtcaacacaccggccagtgaagatgaccaccgcaggggccgg

SEQ ID NO: 27391 - DNA, 472 bp, Homo sapiens
  misc_feature (1)...(472): n = A,T,C or G
aagcaggggnncnnnatcgagaccattgaaacactggaagngccacangaattttcaaaagaaacaactaatcagttgcttgcattttctcttgtactgctactcagattcgttgatgactgtctgctatcagtgtttaaggaaaaatcagccgtagaattgttgattagtcttgcagaaggctatagttctcgctgtcatccggtttttcagcttaaaaaacaggtgctgagctgtgaggagagcatcagggtttgggctctgctgcctttccccgaagaactcactcggcaagccgtcagattagaagataattctgaaacaaatgcctgccactctttgattacaaaaatgacggatgagctgtatcaccatatgcctgagaatcgttgtgtgttaaaggacttggatcgtcttcctactgagacgtggccccagcttctccgtgagctctgcagcacacctgttccca

SEQ ID NO: 27392 - DNA, 449 bp, Homo sapiens
  misc_feature (1)...(449): n = A,T,C or G
cggaaaatgagacctcngaaaatgagacctacgganagnctggnggaattcattgggaagaagctggagtctcgccagcggggctgggaggaggatgaggatccttagcggaagggggccatcgtgttcaacgccacgtccgagttctgccgcaccttgggggagatccccacctacgggctggctggcaatcgcgaggagcaggaggagctcatggactttgaacgggatgaggagcgctcagccaacggtggctccgaatctgacggggaggagaacatcggctggagcacggtgaacctggacgaggagaagcagcagcaggatttctctgcttcctccaccaccatcctggacgaggaaccgatcgtgaatagggggctggcagctgccctgctcctgtgtcagaacaaagggctgctggagaccacagtgcagaaggtggcccg

SEQ ID NO: 27393 - DNA, 469 bp, Homo sapiens
  misc_feature (1)...(469): n = A,T,C or G
cctcgactttcgatgaccattagcccangcggnggaattcgaacaagtcagggattaggagacagcggtttggtttattgatatccagcttgaggtatctcctaggggcagcagcaggaggaataccagggccacggaggggccaggagtctcacagtggagggcacactctaacagatgccagctgaacgctcgctggccctggatgtcatacgagttggggaccagaaatctgggctcagagaacccgtccagggagatttgaagccatgggttatcttctagagttgatactgataatatattttaatttttattgatgtttaataccttctgaaacaggagggtaagatcagatgggaagcccctctgttgaaggatcttgggaaccttggtggcttttttttttgggttttttttttttggaacaggccggggacatctttttaattcgaactcgggggatagg

SEQ ID NO: 27394 - DNA, 468 bp, Homo sapiens
  misc_feature (1)...(468): n = A,T,C or G
ctttgaagttcgattacnccagngcggnggaattcgcgagatacttccctggctcctccaaacattgtgttggaggacacccagccgttctctcagcccatggttggctcccccaacgtgtatcactccctgccctgcacgcctcacactggggctgaagacgctgagcaggctgccggtcgcaagacacagagcagtgggcctgggctgcagaagaatagtgagtgtgtggcactggtggcctggagccaaatttagcttgggtgagagttgacaatggtagttttccttcctcaagcccctctgtgcccctagagcaccctggctgtggctgcctccttcatccaagagcagagtccatgttgggccaggagacttcagatccatgtcctggtgctgcctctggctttgtctttcctcagtgggcaggactgggtctgctggtccatctttacccttctctgagct

SEQ ID NO: 27395 - DNA, 527 bp, Homo sapiens
  misc_feature (1)...(527): n = A,T,C or G
tttgctacgcttttccagtcgtcaacgatgaactgaatagatccccacagggacnaacccaatgagacaatgtagatctggacacgcggggaatccacgcgccgaggaggaggagcgagcccggacggcgcctctcgaacgattgtgggcgcgaggcaggatgacgacctcaggcgcgctcttttcgagcctggtgccaggctctcggggcgcctccaacaagtacttggtggagtttcgggcgggaaagatgtccctgaaggggaccaccgtgactccggataagcggaaagggctggtgtacattcagcagacggacgactcgcttattcacttctgctggaaggacaggacgtccgggaacgtggaagacgacttgatcatcttccctgacgactgtgagttcaagcgggtgccgcagtgccccagcgggagggtctacgtgctgaagttcaaggcagggtccaagcggcttttcttctggatgcaggaacccaagacagaccaggatgaggagcattggccga

SEQ ID NO: 27396 - DNA, 478 bp, Homo sapiens
  misc_feature (1)...(478): n = A,T,C or G
ccgccagcccccnnnnnnnttagannttcgagaccactatncagagaggaggaattcctttcctgacacgcaaagacacagccctctttccccactgggcgtcctaccccagtgaggttgaaggcaccaattccaagaatccctccaacctccctgccagcactcccccttcaccccacacccggcccccccacctaaccacagcgcctctccagacctacctcgggacctaaagttctctacatgaactgctcatttggaggacagcagtgaggtcctgccatagagcaaatgtgttaggagagaaggtttcacatgggacccaacatccttcatcaatactttcctgagtttgatcatccatttagccttgacaaacagcagaccctacagagatgtgttggagagcacgtcgtgaccttgggggcaaggaatccagaaaggtaggaagatatgaaaagagaggtgtcaacagcaa

SEQ ID NO: 27397 - DNA, 576 bp, Homo sapiens
  misc_feature (1)...(576): n = A,T,C or G
tggatatgagaatacatacgaacgaaccgatcagtgacatattatacgtccaacataacgttgatactatcatctatactgtggggcgacnaccccggattgagnccccatcgtagagcactaggccagngcggnggaaatccaggagtccactgcctccatgatgcaagccagcttcctgtgcagaaggtctggtcggttaactccctaagtacccgctacaattctgcagaaaaagaatgtgtcttgcgagctgttgtagttacagtaaatacactgtgaagagactttattgcctattataattatttttatctgaagctagaggaataaagctgggagcaaacagaggaggccagcctcacctcattccaacacctgccatagggaccaacgggagcgagttggtcaccgctcttttcattgaagagttgaggatgtggcacaaagttggtgccaagcttcttgaataaaacgtgcttgatggattagtattatacctgaaatattttcttccctttcagcactntcccatggattgatactgggccccacttcacagctggagacaccgga

SEQ ID NO: 27398 - DNA, 547 bp, Homo sapiens
  misc_feature (1)...(547): n = A,T,C or G
acactctatgtactcttccgatgacatgtaaacactctataatacgcgaatgattatacatattcatcctttctacccacccaagggcccgnanananaannaattgatttgcgtncgatcagngcggncgaannccagcagagcaagcgcacgcccctgcatgcagccgcccagaagggctccgnggagatctgtcatgtgctgctgcaggctggagccaacataaatgcagtggacaaacagcagcggacgccactgatggaggccgtggtgaacaaccacctggaggtagcccgttacatggtgcagcgtggtggctgtgtctatagcaaggaggaggacggttccacctgcctccaccacgcagtcaaaatcggtaacttgtagatggtcagcctgctgctgagcacaggacaggcggacgtcaacgcccaggacagtggggggcggacgcccatcatctgggctgcagagcacaagcacatcgaggtgatccgcatgctactgacgcggggcgccgacgtcaccctgactgacgacgaggaa

SEQ ID NO: 27399 - DNA, 586 bp, Homo sapiens
  misc_feature (1)...(586): n = A,T,C or G
cgccatgaccccctnnntttagaacactagtccagagtggnggaattccgaatggcgagattgagcacgtgaccaagcgggccatcagcacccccgagaagagcatcagtgatgtcacgtttggagcaggggtcagttacatcgggacaccacggactccgtcgtcagccaaagagaaaattgaaggccggagtcaaggaaatgacatcttatgtttatcactgcctgataaaccgcccccacagcctcagcagtggaatgtgcggtctcccgccaggaataaagacactccagcctgcagcaggaggtccctccgaaagacccctctgaaaacagccaactaaacagcgcctcccaccagtgtccaggcaggcaggagcccttgaggaagcagtctcgtgtcctccgtgtgaaggcagctggatcacttcccgcagtccttgggcagcgctttgctgtggaacacgagagctcctcctcangggcctggcactcaccttctattctgtatgatgtatttggntaaacactgtcanataatagagatgtgccagaattagatttcttaccctaaatctgttaatan

SEQ ID NO: 27400 - DNA, 447 bp, Homo sapiens
  misc_feature (1)...(447): n = A,T,C or G
ntttcgattgccgtacgactagtccgngcggtggaattcggatgagaagggtcacagtctggccaggagtgtcaccgtgccccctgaccccatctggggtcgggctggacaggtcctcaggcctagacgtgggcccagccagaaccttctcccctggcatgtctcttccaggcctagttccagagctgtcattcttcggcgagccgcgctgcacgccagcctccagtctggcagttaaacctcactatgaaaatctgcttttgggattttatttgcatttccattagactgagcgcatcacaagccacttcaggatagactgaggtgcagagggaggggacaagcggccaggttgactagaagagcacagaacctggctgtctcgaagagggcagcttgttccagggaaccaatgaactgtcagtaaaggggattgtggcttcctan

SEQ ID NO: 27401 - DNA, 589 bp, Homo sapiens
  misc_feature (1)...(589): n = A,T,C or G
cgcgcatcgancnccnntnnnnatagaatcatctatccagagnggngcaattctgctaagggaggntggaggtataagaaacatcttttaatttaaacatatttcccattaaaaccacctatttaactttcatgtaaatcttgtaaagagacgtttcaatatttagtgtgaatattttgttaattagatgtagcagaaaaataacgctttgatgggcaaaattgctgttcagatgatcttgaaataaagaagtttttaaagcaatttttatatactttttattatttagcaatacatgtttatcatagaaatttaagaacctaagtaatacaaagaaagtaaggattacctttaattaagaacctaagtaatacaaagaaagtaaggattacctttaatcaataaacaaagataaacttttggagggagcatataccattccagtcactaagtaaggttttaatattcagattccagaattctgatcaatcaatggctatgtttcacacttctttaaattaaaaaattttctatctttacatantttagtgactgaattaccatggcgtaattgagagtttgatttatn

SEQ ID NO: 27402 - DNA, 482 bp, Homo sapiens
cgggcccaaatcgagatcatagttcgtgcggcggaattcttttccctctgctcccacccacctaaacacagcagccatttgtacctgtttgcttcccatcccacttggcacccactctgacctcttgtcagtttcctgttcctggttccatctttttgaaaaaggccctcctttgagctacaaacatctggtaagacaagtacatccactcatgaatgcagacacagcagctggtggttttgtgtatacctgtaaagacaagctgagaagcttactttttggggaagtaaaagaagatggaaatggatgtttcatttgtatgagtttggagcagtgctgaaggccaaagccgcctactggtttgtagttaacctagagaaggttgaaaaattaatcctacctttaaagggatttgaggtaggctggattccatcgccacaggactttagttagaattaaattcctgcttgtaatttatatcc

SEQ ID NO: 27403 - DNA, 485 bp, Homo sapiens
  misc_feature (1)...(485): n = A,T,C or G
cctttgatcgcgtccactaggccangnggnggaattcgtgtgctctggtctttgatgatgttgataaaatgtggtttcaaatgttgtcccgaagaggccggtttcctgtctgtatgtggaatggaaggaccgtgccggggcaccaagaggcaccctgagaactcagaggacccagaggctcccctcaagcaaattccctgctgaccctggacaccccttgaaggagggggcaagaggctgccacaaggctcatcttataactcccagcaaggactcccagcaaacaagttcagcttgggatctgcccaccaccaagcctggctgggaggtgggggggagcgaggggcggtggagaggcagagtccctgaacagggaaaagacaatcagttgttcccctttctggtgtcagaggcaaagaagtctgaagggctggtggcggcgctggctctgggtttattgactctgtgatcctggccagctgtcn

SEQ ID NO: 27404 - DNA, 486 bp, Homo sapiens
  misc_feature (1)...(486): n = A,T,C or G
nattgaagacccatcgataaccactaggaagngccgcggaataccacacacacacacacacacacacacacacacacacacacacacacacactttctgattcttgccttgagagacaagcccaagagctctcttggccgtgttccacactctctacagtggcctgtggtgtttctgtctttgctcacaccctcacaggtgctctgtggcagagggtggcatagcctaagagcagctgcaattgcacctgagggacacgccctagagtgtgggggcccaagtcctgaacctctcatacaccaggtgaggcgcagaggtgggtgctgcttccagtttccctacacacttaggtgtgagaaccccactcatattctttggccttagttttcccatgtgaaaaacacacacacgcaggtggagagtccttattcatttagtgcgcgaatatattataatatgtatagcgcgccttgtgtgtaagacact

SEQ ID NO: 27405 - DNA, 474 bp, Homo sapiens
  misc_feature (1)...(474): n = A,T,C or G
ntggtnnntatcgtgtgcctacttagtgtggtggaattcgaagaagttcgccatggagccagaggagtttgactctgacaccctccgcgagtttgtcactgctttcaaaaaaggaaaactgaagccagtcatcaaatcccagccagtgcccaagaacaacaagggacccgtcaaggtcgtggtgggaaagacctttgactccattgtgatggaccccaagaaggacgtcctcatcgagttctacgcgccatggtgcgggcactgcaagcagctagagcccgtgtacaacagcctggccaagaagtacaagggccaaaagggcctggtcatcgccaagatggacgccactgccaacgacgtccccagcgaccgctataaggtggagggcttccccaccatctacttcgcccccagtggggacaaaaagaacccagttaaatttgagggtggagacagagatctggagcatttgag

SEQ ID NO: 27406 - DNA, 503 bp, Homo sapiens
  misc_feature (1)...(503): n = A,T,C or G
gtgaagacagganaagctccaggccgtggttctcanagtgtggtccctggaccagcagcaacatcacctaggagcctgttaggaaggcacagcctcaggccctgccccagacctgcagaatcagaaactctggggtgaggcctggttatctgctgtaacagaccttccagtgggttctgatgccctctagagcaggagaaccactagcttagaggttgcagtatgtttggcatcttgccatttgtgttagttcagaggaatggctgacccccatgtctcatttctaagcttcaggcagcttttctcctgggcagctgtcattctgttgaggggaatcctggggactgtggctcctcctccctgtccgtgtgtccttgatctggcagtctacccccttcatctccccgtggaggctccatgcctagaggtggtcttcanacagaagaatggcanagataattgtctcgtgtttaccctgaccccatttcttttagaggtcactn

SEQ ID NO: 27407 - DNA, 588 bp, Homo sapiens
  misc_feature (1)...(588): n = A,T,C or G
cgcccatcganccccctnnnnattggaacacctatcagagnggngcaattcanaatatttatagtaaatatcatatttatggtaaaatgttgtaagctttctctctgaaatcagtaataagacaaggatattcactatcactgtctatttgacattgtacagaagatctagcaaatgcagttaaacaagaaaaagcaacaaaatatgtaagaattataaaatattgcattacttacagatgatctaatgtgtacattgaaaatccagaagatttacagataaattatgaaattaataatttaacaattttgtaaaatcaatatatggaccagttgtaatcctatatataccactaacaagtacaaaatgaaatttgaaaaatacaatgataatggcaccaaaaatatgaaatatttaggaaaatgttgaactgaaggtccgaaagagctgaaatacattgttataaaatcttactgaagccaggtgtggtggctcacacctgcaatcccaacactttgggaggctgaggtgggcggatcacctgaggctgggagttcaagtccagcctgaccaacgtggagaaacccn

SEQ ID NO: 27408 - DNA, 635 bp, Homo sapiens
  misc_feature (1)...(635): n = A,T,C or G
agcctctgggctcgctcgccccgcgctcgtatctacccggataccactcttctttctcccccccccccccgcgcgatgaaccatcgttggacaacctccgcccagcagctctgcctgtgaagaggactgctcttttgggacggctgctgagctccgtcttcggctacaggctgtacctagacctgaggagcctcctaactaccctgcagcccctgcttctgaccccctcagagagggcagaggcaaggatatgcctaaggtccagggcttactggagaatggagacagtgtgaccagtcctgagaaggtagccccggaggagggctcaggtaagagagatctggagctgctgtcctcgctgttgccacagttgactggccctgtgttggaactgcctgaggcaacccgggcccccttggaggagctcatgatggagggggacctgctcgaggtgaccctggatgagaaccacagcatatggcagctgctgcaggctggacagcccccagacctggagaggatccgcacacttctggagcaatgaatgagaagtcccgttgctccatatcctcatcagcatttggtatagtcgcgggcctggatttaggcatactaatagtntctttctcaggaan

SEQ ID NO: 27409 - DNA, 470 bp, Homo sapiens
  misc_feature (1)...(470): n = A,T,C or G
caatgagaccttcggtttgatcgccntaggcnagcgcggaggaattcgcgctggtttatcctcacagacaactgcctctactactttgagtacaccacggacaatgagccccgaggaatcatccgcctggagaatctgagcatccgagaggtggacgacccccggaaaccgaactgctttgaactttacatccccaacaacaaggggcagctcatcaaagcctgcaaaactgaggcggacggccgagtggtggagggaaaccacatggtgtaccggatctcggcccccacgcaggaggagaaggacgagtggatcaagtccatccaggcggctgtgagtgtggaccccttctatgagatgctggcagcgagaaagaagcggatttcagtcaagaagaagcaggagcagccctgaccccctgcccccaactccattatttattacggagctgccccgcctgggtggccgga

SEQ ID NO: 27410 - DNA, 461 bp, Homo sapiens
  misc_feature (1)...(461): n = A,T,C or G
ggcagtgccnnnnanaattgaaactgangatcatcagnacagncnggnggaattcggagtttgaaaataaggaagacttgtcgggaacacaggcagggctcatcgtcattaaagaggcagaggcgcagctgtggtgggcagccaaggagctgagaagaacgaagaagctttcagactacgtggggaagaatgaaaaaaccaaaattatcgccaagattcagcaagtaagtactttttgctttaatgtgtcagtagtttttgttatttcccttcaaactgataaaaatgtacagtgaatccgaaagatttaaactactggtacaaatattttaatcttattggctcgggtttaaactaaaaatatcctcttcctgcacaccaacaaaaactggaagaaaatatggattgagtaccaatatctagagtttgttttaatatgtgggggagaggaaatatactat

SEQ ID NO: 27411 - DNA, 458 bp, Homo sapiens
  misc_feature (1)...(458): n = A,T,C or G
atgggctgnntnnncccagcctgcngncntccgactggncgaattntacaaaaantanctgggcatggtggtgggcacctgtaatcccggctactcaggaggttgaggcaggagaatcgcttgaacctgagaggtggaggttgcagtgagccaagatcacaccactgcactccagcctggtgacaaagcaagactccatctcaaaaataaaaaacaaaaacaaaaacaaaaaaacttaacgtcaaaatcaaccagtaaatgcccatcctagccactcaaataggctggattctatccaggtcccctccacagccaggtggctcttttcctatcaaaaccaagagtctcccaggcagccacaacatgaggtttcccactgaacggcacgattccagcctctagaggcagaagttccaaaggcaggcctggggcacacagagccctcgctgctgacagcn

SEQ ID NO: 27412 - DNA, 492 bp, Homo sapiens
  misc_feature (1)...(492): n = A,T,C or G
aggagtcccccgnnagcccccccnaatagatgaccntaggnatagatgaccactagtccagcgcggacaaataagtactgccatttatacacacatacgctgtatgtctgtatttttaaagctaaagataaataagcatgcagcttaagttggaacaactcaaagtaaatggaagaaaaatctccaaaactgactaaaagtaatagaaagcctgagttgtaatcactgatgaaattgagtcagtagttaagaatgttcccctagacggttttacagggaagttccacgatatagagaacaggtaattccagacgtagacaaattctaacagaatcaattgagagaacacttcattcgtgaacttagctttgataccaaaactaggtaagagaaagggaagttaccaaatacctgtgggcggcaagccacccaggcgccgaggcaagagacagaggacacgagctgttccagtataataaaatataaaacaag

SEQ ID NO: 27413 - DNA, 464 bp, Homo sapiens
  misc_feature (1)...(464): n = A,T,C or G
ggcgcgcccctaatgaacggatggctccagcacgncnggnggaattccgagcctcctgccaggccttgggcaccatccctaaacggagaagcttttgcattttcatcaagaggaagaagttcgatgatgagctggtggagagcagtctggcaaaatcttctacccgggcaaagggggccagtggggtggaaccagggcgctgttcggggagtgaaccctcctccagtgagaagaagaaggtattcaaagcccccagcactcctgtgccacccagcccagccccagcccctggactcaccaagcgtgtgaagaagagtaaacagccacttcaggtgaccaaggatctgggccgctggaagcctgcagatgacctcctgctcataaatgctgtgttgcagaccaacgacctgacctccgtccacctgggcgtgaaattcagctgccgcttcacccttcgggaggtc

SEQ ID NO: 27414 - DNA, 442 bp, Homo sapiens
attgtagacacttgacagcgcggggaattcccgcctccggttcctggatgcgtcagggtacacagacctttcccaggagattttctcgacatcagcacctctgcaaatggatgggggtgagagggctggatggagcctggcgccggtgacctccgggggccggacgagggccccatggtgcaggccatgggggaacgtggccaccaccatcctcagaagccaggaccaggtgccccggcagcagaacacagctccatggggacacctgcgtttaccaacctcaacctgcccagcccggtaggtccttccttgatgatggaatgttctagacgctgtccaccgggtagccaacagccacgtgtggctactgagctctggaaacatggcccacgtgactgaggacctgatgttttaatttcactgcactttaggcagccacggg

SEQ ID NO: 27415 - DNA, 455 bp, Homo sapiens
  misc_feature (1)...(455): n = A,T,C or G
ngggcaggcggccncccctgaaaccncctttgaccttcgtacgncngnggaattcctccttatcagcaagatccgagaagaataccctgatcgcatcatgaataccttcagtgtggtgccttcacccaaagtgtctgacaccggggtcgagccctacaatgccaccctctccgtccatcagttggtagagaatactgatgagacctattgcattgacaacgaggccctctatgatatctgcttccgcactctgaagctgaccacaccaacctacggggatctgaaccaccttgtctcagccaccatgagtggtgtcaccacctgcctccgtttccctggccagctcaatgctgacctccgcaagttggcagtcaacatggtccccttcccacgtctccatttctttatgcctggctttgcccctctcaccagccgaggaagccagcagtatcgag

SEQ ID NO: 27416 - DNA, 208 bp, Homo sapiens
  misc_feature (1)...(208): n = A,T,C or G
tgagtgggtatcctttcctccactattcccggggcccgcacgacttatgcttgagaactgccaacgcttctgctagggaatcgcgtgcaacaaatcctagaggagctgttccttccttcacagatacttanaacctccaccatgactgactcgagatctgcctgggagggtttagaaccatcgctggaacattctgggtggcgtcgaa

SEQ ID NO: 27417 - DNA, 459 bp, Homo sapiens
  misc_feature (1)...(459): n = A,T,C or G
aggggcaggcgggccggcatagatnccccctaagtatcatcgtanagncnggnggaattctttttttaaggaaaagcttggaaagccaggacacaacgctgctgcctgctttgtgcagggtcctccggggctcagccctgagttggcatcacctgcgcagggccctctggggctcagccctgagctagtgtcacctgcacagggccctctggggctcagccctgagctggcgtcacctgtgcagggccctctggggctcagccctgagctggcctcacctgggttccccaccccgggctctcctgccctgccctcctgcccgccctccctcctgcctgcgcagctccttccctaggcacctctgtgctgcgtcccaccagcctgagcaagacgccctctcggggcctgtgccgcactagcctccctctcctctgtccccatagctggtttttcccacca

SEQ ID NO: 27418 - DNA, 459 bp, Homo sapiens
  misc_feature (1)...(459): n = A,T,C or G
ntttgcgtacattacacagngcggnggaattccctggctaacacggggaaaccccatctctactaaaaaatacaaaaaattagccggtaatggtggcgggcgcctgtagtcccagctactggggaggctgaggcaggagaatggtgggagcccgggaggtggagcttgcagtgagccgagatcacggcactgcactccagcctgggtgacagagcgggactctgtctcaaaaaaaaaaaaaaaaaaaaaaaangggnnnctacccttttggagaggggcccctaacctttaaggctttggggagggggtttttttttttaaacccaaaaaaaattttttttctggcaaaaatttcccttcttgccaaaagaaaaaggggtttttttaatataaaaaaataaggggaaatttaaatttttttttttaagtttggggggactaaacaagttttcaaaaagg

SEQ ID NO: 27419 - DNA, 455 bp, Homo sapiens
  misc_feature (1)...(455): n = A,T,C or G
ggtcgcgggcnccccaatgaaaaccactgagnccctctgnccgngcggnggaattcctggagtacgaatagggcctgcatgggaggagttcaaagatgcttcttggagggagccgataacccgcgggtggagcctacccggtgagatcccggccagaaataccccatgtcacagctacgccccagatctcagtgttttctcacgggcctggtgcctcgcctgctccgaggaagctagtagaggttggagttgtggagggttaataacgttccacctagctttgtctcccgcacttggggttttggatcaaatctattgagagatatggtaccgcccagtgaacgcgaaagtactgtggaccaccagagcaagcattttaaaagttgaagtgcacgtcgggggtgaaagaaacccacgtactcgaatactgtcctcctggagttagaaattacgcg

SEQ ID NO: 27420 - DNA, 450 bp, Homo sapiens
  misc_feature (1)...(450): n = A,T,C or G
nggtcggnnnnccccaatgagaccnctgataccctgcggaanncgcccccccaggagacccccaagaagaagaagaaattctctttcaagaagcctttcaaattgagcggcctgtccttcaagagaaatcggaaggagggtgggggtgattcttctgcctcctcacccacagaggaagagcaggagcagggggagatcggtgcctgcagcgacgagggcactgctcaggaagggaaggccgcagccacccctgagagccaggaaccccaggccaagggggcagaggctagtgcagcctcagaagaagaggcagggccccaggctacagagccatccactccctcggggccggagagtggccctacaccagccagcgctgagcagaatgagtagctaggtaggggcaggtgggtgatctctaagctgcaaaaactgtgctgtccttgtgag

SEQ ID NO: 27421 - DNA, 441 bp, Homo sapiens
  misc_feature (1)...(441): n = A,T,C or G
attgtagacactagacagcgtgnggaantcggtggcagccgtcccgctggagtggccatgtcccttgtgcattgagtgcatccccgctggtgactaagctcgcagcaagcggctaccccccgatctgcaaaagggcctctccctttgtgttctatacattgtgaatcttcccgtctgaagaacgcccagcctgcccagacaaagccccgccttccccaaagcagaggggctgtctgtgtctccagaaaggggacatcgggggggaggggggctcagaaaggagaagggctgtgatctccagtcccttcccccatcatccttccttagactgatgctttgactgaatcatcactagctatggcattaaaaggcctctcttctcatctggtgccaaaggttccgttgcagctttttacaaccatccggtatggcttggaggag

SEQ ID NO: 27422 - DNA, 457 bp, Homo sapiens
  misc_feature (1)...(457): n = A,T,C or G
agggccggnnnnnccccccctgatgactnctagacagcctggnggaattcgncgcatgcatgctcccgggtgagctcggggcatcaagccggattgctgggcggggggtgggaggaagacagggagtgtgggcagcgggccgaggggatgatgttctgggctgctctggcactagccgccacctcacctcgagactgcttctctccccaggaagggcctgtcccagtcggctttaccctatcgacgcagcgtccccacttggttgaagttgacatctgacgacgtgaaggagcagatttacaaactggccaagaagggccttactccttcacagatcggtgtaatcctgagagattcacatggtgttgcacaagtacgttttgtgacaggcaataaaattttaagaattcttaagtctaagggacttgctcctgatcttcctgaagatctctaccan

SEQ ID NO: 27423 - DNA, 448 bp, Homo sapiens
  misc_feature (1)...(448): n = A,T,C or G
nttgacnccccttcgatgaccattataccangcggnggaattctgcatttttttagtagagacagggtttcgccacattggccaggctagtctcgaactcctgacctcaggtgatccacccgtctcggccccccaaagtgccaggattacaggcatgagccactgtgcctggccatttccttctgttcctagttttaggcaccactcttgcctttccctttttcgtttgtcctcaatccagatggagaccaggtgctcaccctccttcatgcagcaacacttcctgtactttaaggtggatgcctgaaggagggcagcttgaattttcttcttcagagaatttgcccacagttctcttcctctttccattaatttgtccagtcacaatgcaaacctttgttgagactgcactaggcttggcatagtgtttgccatccacaggtggttn

SEQ ID NO: 27424 - DNA, 456 bp, Homo sapiens
  misc_feature (1)...(456): n = A,T,C or G
aggccggngnncccccctgatnntcccagnngatcctcggacancnggnggaattcgggaaatacctctcagagatggtcatgcaggctccctaaggccccatcccagagccaggctggtttccatggagatagggcactgaggctcccgtgaggttggaatcgacttcaccatgggggtccttcagccagcatccagctccccacccccaggctggcagtagcactgctgagatgctgtatttccacccaattctgggtatatcagcgtgacttgcacaatcttggatcattaaagataaacatatttttaaataacaaaaaacaaaataaaataactagaaaatgaaacaaaaaaaaagtaaacaaaaacaatttggaagctggcgggggataataattgagccccataaaccccaggttgaggcgagctgtggtctttctactgccctccatt

SEQ ID NO: 27425 - DNA, 207 bp, Homo sapiens
caagggctcctgtctgtcctttgctgttttatatctctgctatgaagaactgtacctggcctgtacatgctcagtaaatgtttattgaatgaatgcacgtttctaaatcacaaactggcagaaggggggtgggcccttctcaaactctgtctctggaggttcaccagcccctccctccagggcccttttccccctttgctttgggca

SEQ ID NO: 27426 - DNA, 449 bp, Homo sapiens
  misc_feature (1)...(449): n = A,T,C or G
agtgccggcncccccctgggaccattganacccctgggaannccgcgcgnacagactccagacagatgggcccttggggccctccaacctcaagagatgagctgagatagatgctcacgtctaaacgtgcggggtgcacgcagcgctccatagactcctttgtgaactgaaaagagactggcatagtcccgagaagatggggccctggctttccagggagtgcagcaagcagccggcctgcagacccagcctgaccaacgatgagcatttcttaggctcagctcttgatacagaaacgagtgtcttcactccagccagcatcatggtcttcggtgcttcccgggcccggggtctgtcgggagggaagagaactgggcctgacctacctgaactgactggccctccgaggtgggtctgggacattctacaggccctacatttgtccttgg

SEQ ID NO: 27427 - DNA, 457 bp, Homo sapiens
  misc_feature (1)...(457): n = A,T,C or G
agtgccggncnnnccccaatgatgnntcctgangatccttgcaccgncnggnggaattcgagcaatgtcttggcctctctgcttcctgggtgacgttgggtgattcctttctctcacttcccggcatcatttccccatcagtcagatgcagggggatgggctaggccaggtacctggcctgatccttcctggccatgatgctgaaccgctcaggctgggacactgccaaggggaaagggtatctctctggaaggaggtactggctgcccatttccggagtaggcctgcttacaacaggaatattagctattgattgctggccctgcccttcactagtattgcagccggccactctgatattagaagggaaatagagatggtatcgaggattttatctgttaccaacaattgcactccttcccctgcttggccaaggcctgggtaggaagctctgctg

SEQ ID NO: 27428 - DNA, 465 bp, Homo sapiens
  misc_feature (1)...(465): n = A,T,C or G
agtgccggncnnncccccccaggtgagcatagatcnacctggcggaantcgnncacgccctgccttcctccgcctgagggcaggtgggagccacgngtggagttcacagtggagagacatagcctgtcaacaaccttccgcatgatncgagaggcgactacttccgcaaccagctactcaaaagcttcgacttccactttggcttctgcatccccagcagcaagaacacctgcgagcacatttacgacttcccccctctctccgaggagctgagtgcgcgggcagggtcttctgggagtggggaagtgggggcgtctagagactgagctgcgggagggagagggacttgtgggtctgatcccatttctccccaccctggggctcttctgtgtctgccaccattcccatatcatccgtagagaaagaggctggggatatttcaggctgtttggctgtccctgtacn

SEQ ID NO: 27429 - DNA, 566 bp, Homo sapiens
  misc_feature (1)...(566): n = A,T,C or G
ntaatgataatcgaatcacngcggngcaannncgagagtcgncggngtttcctgcttcacagtgcttggacggaacccggcgctcgttccccaccccggccgtccgcccatagccagccctccgtcacctcttcaccgcaccctcggactgccccaaggcccccgccgccgctccagcgccgcgcagacaccgccgccgccgccgcctctccttagtcgccgccatgacgaccgcgtccacctcgcaggtgcgccagaactaccaccaggactcagaggccgccatcaaccgccagatcaacctggagctctacgcctcctacgtttacctgtccatgtcttactactttgaccgcgatgatgtggctttgaagaactttgccaaatactttcttcaccaatctcatgaggagagggaacatgctgagaaactgatgaagctgcagaaccaacgaggtggccgaatcttccttcaggatatcaagaaaccagactgtgatgactgggagagcgggctgaatgcaatggagtgtgcattacatttggaaaaaaatgtgaatcagccg

SEQ ID NO: 27430 - DNA, 564 bp, Homo sapiens
  misc_feature (1)...(564): n = A,T,C or G
catcgactttgatccccatccagcggggcaatncgcttggtcttctagactctnggggcggnggcttgggtgtgtttccttacttgtaaaaggtcctgttgtttttgggagcagggagtaatggcggatgagacgctgtgtggaggcggcagctcctggtatggggtaacgccctgtcccctcattggcaggtggtttgcatgaagcatcatgccagagggtgtgagtgccaagccctcaccccacatgctgctcctgttaaaagcaaactccactgacccccccgggaagtcaggatttgggatttacttcctggaatgcttgcctctggctgctgggaattggggcctttccccaaagcctgaaccaggcctcacagtggcccatcaggcacagaatggatgggcacagctgagtggctccactggctttaatctgccccacctcttccacaccaacctccaccctctggttccgatgtgcttggttacaaagcacctgattatttaagagaacgaanaaccaccaccagttcctgtaaagaataagtcacaggtgcacagg

SEQ ID NO: 27431 - DNA, 446 bp, Homo sapiens
  misc_feature (1)...(446): n = A,T,C or G
aattgtagatcactaggccagcgcggtggaattcggctccctgggtgggatgggctactttgcctactggtacctcaagaaaaaatacatctagggccaggcctggggcttggtgtctgactgtcggtgtctctgtgctgtgtgattccccgtgagctctcagtaactcactgtctcatgaacacttggacagccctccccgcccttcgttctgagtaataataccgtcagtgtgaaaacattccgtagtttagaagtagacgttgccaatgctgtgactcaaggccacggctctactaaaagagagagaggaagcgagagagagagagaaaaaacaaaaaacagaaaacacgaatgccttttctatcgattcaaggtctcaagatggaactgtggagactggttaggatctgagggaactcttccacaggacaaagccgacatcn

SEQ ID NO: 27432 - DNA, 441 bp, Homo sapiens
atcgaaacccttcgtagacactagtccatgcggtggaattcactcgaggctataaggtccatgatcaccggcgaacacccctcattggcgtcctatagaaatcccatccatgaggagcagagatcaaccgggcctttattgactttgcaaggcgctgccctgagtggtccttctgactgaacagaaatcgatagctggagctcgccaaggtgttacttgatcaaggaacagctgccctgttgttaattcccaatcaatagtcccgagatgctgctgctcttacagctgtcaggctgacagcctctacagcacattttgaaagtaacttgccagtggtgggactttcttctccctgggcacacccaagaaaagttctcaatcaggcttcagaagagcaccaagtgcccctcacccggtgtaggggcctagcggcagtgtgag

SEQ ID NO: 27433 - DNA, 239 bp, Homo sapiens
gtgctgccaccgctggaggacatgggacaacccccggcggaggaggctgagcagcctggggccctggcccgagagttccttgctgccatggagcccgagcccgccccagccccggccccagaagagtggctggacattctggggaacgggctgttgaggaagaagacgctggtcccagggccgccaagttcgagccgcccggtcaagggccaagtggtcaccgtacatctgcagacgtt

SEQ ID NO: 27434 - DNA, 543 bp, Homo sapiens
  misc_feature (1)...(543): n = A,T,C or G
acgatggactgaggactcntccgagaggngcgaattcaagatattctccttgtagcacaactgtatgctgtgtaaattggtgtgagctcaaagcccattcatgtgttttacctgtgggtgactctgttgtagaatggtcatattactgcatatgttatcatgacaatttgtgagtttgagtttatatttctcaaagaacaagttacccgtatatgcaacattgcgccattaaaagcttatttctctgtacacaaaatgggtaaaatcttgaaaaaacttagtaatttctcattcctaacacacagacagagtctcactctgtcacccaggctggagtgcagtggcgcaatctcggctcactgcaacctccacctcctgggttcaagcgattctgctgcctcagcctcccgagtagctgggactacaggtgcatgccaccacgcccagctaatgtttgtatttttagtagagacggcgtttcaccatagtggccaagatagtctcggtctacttgactcgtgatctggctggcctcggctcccn

SEQ ID NO: 27435 - DNA, 508 bp, Homo sapiens
  misc_feature (1)...(508): n = A,T,C or G
aggccnatcnaagcngagagnnnggggnatattgatnatcccgtagnaacactcgnacagngcggnggaanncngccactcctgtgttcatgccagtgggcacgcaagccaccatgaagggtatcacgatcgaacagctggacgctctgggttgccgcatctggctgggcaatacctaccatgtgggtctaaggccgggacccgagctgatccagaaagccaacgggctccacggcttcatgaattggcctcataatctgctaacggacagcggcggtttccagatggtgtcgctggtgtctctgtccgaggtgacggaggagggcgtccgcttccgctccccctacgacggcaatgagaccctgctgagcccggagaaatccgagcagatgcataatgcgctgggctcggacatcatcatgcagctggacgacgtggttagcagtactgagactgggccacgtgtggaggaggccatgtacaggtcaatccgctggctggaccggtg

SEQ ID NO: 27436 - DNA, 501 bp, Homo sapiens
  misc_feature (1)...(501): n = A,T,C or G
agtncatgaaggggggtnnngggnaattgaagaccatgattacccctcggnggaancctgggaagtgatccagtgtcatcgctgggagtgggagacagaaatgttacttccaaagatttcgagtcctgtggtactgccaggagaaccgggggctggggtgatgggtaaggagaggcaccattagccccgccaggcagaggcaagatggggtgggggcggcacctgccaattatgccaaagtcttggagtggcagctggcaccatcaccaaggcacaaatgccagcagagacctggcactcacctgggttgtgattccatagggcccctgtctcctgttggtctcccaggctcaaaggctgacctgataattcaagtgaaggatgcctagttcaaggcctcccagttcctcatcccaggccacctggtcaggtggtcccaagggacaagctaggtcctcctgaactgcagaggctgccaataaactggcaacacaggtgttg

SEQ ID NO: 27437 - DNA, 493 bp, Homo sapiens
  misc_feature (1)...(493): n = A,T,C or G
gggtggaggggngcnnnnaaggagnccttgtagacactagtccgtgcggnggaattcgtcttttttaaatggaaggagaaaatgtcagccacattactgtctgtgtagtgccaggtgaagggttatcagaaggctggttggttttaataagtttattccaagagaccttctggctggaatgagtgagagtgtgtgtgcatgtgtgtgtgtgttcatgtgtgccctgtatgaatgtggctggctcccatatcccctgggctgccccctgccccatcccctttgagtgtcagaagcactctgagccaaggggacagggggcacgtgcactggtcacgagaaaaccctgggctcccactggggctcagcccagcctcctatctttccttcttctatggacttcagacagccagtgtctggggactctgncactctacccccagccctacccaccagcccccaggtgaggcttccagctgggacctgcccagacagg

SEQ ID NO: 27438 - DNA, 446 bp, Homo sapiens
cctgagacctttggtagagcgccgtaattcacctgatctgcatctttgtttgcatctccagagacacctgaggccccagagcttgaggcaaagccaggccgtccaaatcctgtgtgccgtggacgagtggccactttactactcctaaggctaagatgttgagagctcagaccactgctcagagcagtaatccctgctcagaatgctcccagttccctcgtccctgcccaggtctcttgtctcttgggaaggaactgataggtcgggccattgttgggccatcactgagcgctcagtatctcaagagactctgttcattctgctcgtatcccaaggcctggttggtcaaactctgggcaaagggttttcaggatgaggaggtcaagacaggatgtccagagctaccgagttcatctgtgggtgttgggggcaagtgggggctgaag

SEQ ID NO: 27439 - DNA, 478 bp, Homo sapiens
  misc_feature (1)...(478): n = A,T,C or G
nattgagcccttgagnaccactcggccagngcggnggaattcccgcggggacgcagcgacagactcggggtgctggcagcggcagcccacttctcccagggattgcaggcctgggcgccggggttggaccagtctcccgggcatggcacgccctggttattctgtacccgtgatttgtggcggggcaagacgttaagttgggtgacaccgaggtgagccacggtcctcggcaccagatgaggaaccactgtctcaataaggtctcagtgctgtgtgtgtaatggttaccgtgagagcttccctgcaatccgaatttgtgtgtctcattctcagtgacaccagtgatgctgttaaacaaagacaatccggttcatggattgtgacaacgcacgctgacatcaagcagaccctgccgtcaggtacagagggcaccacagtgaccaggaactgctgtcctttcataccaggttttaggaag

SEQ ID NO: 27440 - DNA, 233 bp, Homo sapiens
  misc_feature (1)...(233): n = A,T,C or G
canagcaagaacagcacctacttcgtggagtggatccccaacaacatgaaagtggccgtgtgtgacatcccgccccgcggcctcaagatgtcctccaccttcatcgggaacagcacggccatccaagagctgttcaagctcatctccgagcagttcacggccatgttccggcgcaaggcctttctgcactggtacacgggcgagggcatggacaagatggagcccaccgaggc

SEQ ID NO: 27441 - DNA, 464 bp, Homo sapiens
  misc_feature (1)...(464): n = A,T,C or G
agaggcgcnnntacggatccgatagcatcncaccggcggcgaattcgagccgtgggcggatcacgaaggcaggaggtcgacaccatcctggctaacattctgaaaccccgtcactactaaaaatacgaaacattagccgggagtagtggcgggcgcctgtagtcccagctactcgggaggctgaggcaggagaagggcgtgaacgaacctgggaggtggagcttgcagtgagccgagattgcgcccttgcactccggcctgggctacagagccagactccgtctcaaaaaaaaaaaaagcaaatccaaaaccaaaagatgccatagggaatagggatctttatccttcacgtagggagggcaaaggagggccaaaaaaagatttggaaatattccagatactctttaggttttttaagaaatagggaaaactttggccattgaatttgctataaaataaaaaaa

SEQ ID NO: 27442 - DNA, 465 bp, Homo sapiens
  misc_feature (1)...(465): n = A,T,C or G
agagcggcnnncaatgagaactanangcntgngcggnggcattcctttttctagccaagaagcccagttgccatgacaactatgtacagcttccccaccgctaaaagagccttccatctggttgctagggtgatgcttacaacagcctgttgctaagaagcacttcctctgtacctctctctctagctcttcttgggtttctatggaaactgcctcagcttcctgttgtaccctcctggttcaccacggcaatccttatagtttcctgtcgcttcttccctggttgctctaatgatgctgctgacaatttcctgcctcttggtagggggttcccttgcaactggatcgctatggtgactcacagcttcctgttgctatggagctttttcttccctgatggagcagcttggttgcttaaggtaatctggagggattctgtactctgctctcaccctagcttcccct

SEQ ID NO: 27443 - DNA, 467 bp, Homo sapiens
  misc_feature (1)...(467): n = A,T,C or G
agcggcgcnccctacagtaaccatggcctcagcanagncnggnggaattctgaggcaccctcgggctcgagacagcggcgacctttaaagctgagcgttccagtgccactggagacggtcagcttctccagtcaggctcctccagcccgagccagaagaccccctcccccagaattctgggggccgatggaagggagccgagtcagatcgcgaggtacccagagccgacagaccggagcgacagggagttgccagaagccccgcccctaggagtgatcggaaagcctcactcatccgggtgaggaacccggagggaccgtctccgggcggagcccgccgaccatggctacgcccctggtggcgggtcccgcagctctacgcttcgccgccgtggctagctggccagttgtgcgcggacactgcatggaacattatccgcgagtactggagtctctgcgatctctgcg

SEQ ID NO: 27444 - DNA, 477 bp, Homo sapiens
  misc_feature (1)...(477): n = A,T,C or G
natcgaagaccttaggccacngcggnggaattcgggggagccggaattttctctcttattacataaacacctacataatatccttaatttcgcctctttgcctacaaagcccaaagtataccatccatccttttatagaaaaagcttgccctgccctgagttagactgacagaggctgggaaaaggtatgcaagtgtcggcacaccaaacttgctgcaatgaacacaatgaaagtctcacactggaggttccaatgacgttttatggtggtttcaagtaccttcgggcaagtggtagacttaagtagaagttggggattaacatttggagactcgtgaaagtcctctggcatcataagcatcatttgaccaacgattgtgtatggcagctggaagagacttcctgaaggcctggcaggacttcaccatagagaagagataccaccaccagcgcacagtgccaccacccaactgtgtn

SEQ ID NO: 27445 - DNA, 492 bp, Homo sapiens
  misc_feature (1)...(492): n = A,T,C or G
ggggacgtnnnnnaatcgtagaccttgtagaccactcgnccagngcggnggaattccccggctcagtacaacctctgcctcccaggttcaagcgattctgctgtctcagcctcctgagaagctgggactacagggatgcgccaccacgcccggctactttttgtatttttagtagagacgcggtttcgccatgttggccaggctggtctcgaactcctggcctcaagtgatctgcctgcctcagcctcccaaagtgctgggattacaggtgtgagccaccatgcctggcccatggtagcattctttagttcacttactcattatcagtttcttcctcaaaagaaatgttttttgatagacacttgagaaaataaattttaaaataaaatagaagatccaaatcgtaaatattttgtcatatatatccttccagattggttttggtgtatataaatgtatgtatgaatacacttgagaaaaacattttaagaa

SEQ ID NO: 27446 - DNA, 471 bp, Homo sapiens
  misc_feature (1)...(471): n = A,T,C or G
natcgagacctcgagcnacngtgcnggaattcgaggagactctgaatgtgacagaaggaaatttccaccagttggtggcactgctacactgccgcagcctgcacaaggactatggtgcagccctgcggggcctgtgcgaagacgccctggaaggcctgctcttcctgctactcttctccctgctgtctgcaggagcgctggccactgccctctgcagcctgccccgagcctgggccctcttcccacccagtgacgactacgatgacacagacgatgacgaccctttcaaccctcaggaatccaagcgctttgtgcagtggcagtcgtctatctgagcccctcctcccggctggactggagcctggctcccctcttcggtgagcttccaagggccaccccagctcctgcagccgggcctctgcccccctcccgccctccgagctgctccaggcatgggctgcgtgcctcctg

SEQ ID NO: 27447 - DNA, 455 bp, Homo sapiens
  misc_feature (1)...(455): n = A,T,C or G
nttgaaaccatttgatgatcactcagaaagngcggnggaattcaatgagtcaacctcatactaactgctgttagctcaggtcttccctcatctgttagtttcctggagtctgttctcatactatactagacttgtgcaaagcacaaaaactaatgatttttatagtattttttattctaaggtgtgatatatctttcagaataaagtcatctggtaaaatgaaaagtccttaaatatccttaaaatattaattctgacactttattccatagaaggaatgcacatagaagttaaattatttatatattccattccttggaagacctcagcaaataaagagattccaaatgactagttctttcattgtgtcatcattgtattttatagattattttatcagttcctctagctttgctttggtaatcatttctttctaaggctctccattaattcct

SEQ ID NO: 27448 - DNA, 450 bp, Homo sapiens
  misc_feature (1)...(450): n = A,T,C or G
nttgaagacatttgagagcattggaaagcgcagngngaagcactccgtggaatctggtgggcagctcacagggcaggccctatggtggaggggattctcggtgtgctcgtaccagcaacccgtgcccgaaggccctgcccacgctggtccttggccacggggagctggcccacagcaggcaagtggtcaccaacgctctcccacggtgcaactcagcaaaacgcagctcgcccccaccagcgtggagccctggcaacaggtgagggccggaggaaagctgtttctatttctccacgaagggagggaggagcagctccaaggacagctactcaatctgtcctcccacagccatctccactggcctcccaaggagcctctcacttacccagggcagacagagggcaacgaggcgcggactgccaactgcctcaagtctggtcctcaggctca

SEQ ID NO: 27449 - DNA, 489 bp, Homo sapiens
  misc_feature (1)...(489): n = A,T,C or G
ggccgacaatcganacccctnnnattgagaccatagtcagngngcgggaattcgacaaactgtcagatgagtccatcttcagtgcttttttgtcagttgtgggcaagctgcgacgtggggccaagcctgagggcaaggtgagcagcacaggacacttcaatgcctgttgggttctgggctggctaagacatctgccggccctgggcagcatacggctcttgcagtcaccttcccgtcctccttatccccagctgggttgcaaccaaattgccagagtgacctaagaccagatctttgtctccagttctttttttattactccaaaaacacaaccaaagcagcatctcatccaattcttgtttgtttgctttcaatagtttttatttttcagagcagttttaggttcaaagcaaaattgagcagaaagtacagggagttcccttctaccccttgcccctacacataacagccttccccaccttcaacatg

SEQ ID NO: 27450 - DNA, 475 bp, Homo sapiens
  misc_feature (1)...(475): n = A,T,C or G
nttcgtagaccttagacacngtggnggaattcgcatgttctcttcaatcagaaatatacagtagaagcaggtatatcttccatgcagtttcagtagtaagcactacttatacctacataagagttaaaatccagatgtgggaccttttgataccatcagtgatatatatttttttaaactggtacagagaagtgaaaagattaaattctacttctatttttttttttttttttttgagacggagtttcgttttgtcaccaaggccggagggcaggggggcaatctcggttaattgcaagctccgcctcccaggttaacgtatttttcttgcctaagcctcccgactagctgggactacaggcgcccaccaccacgcccggttaattttttttgatttttagtagagacggggtttcaccatgttagccaggagggtctcaatctcctgaccctatgaaccgcccgttttggcctc

SEQ ID NO: 27451 - DNA, 463 bp, Homo sapiens
  misc_feature (1)...(463): n = A,T,C or G
ggccagcgaattgagacattagnattgagggcggtattcgctgacctggagaaggaaaatggcagagggtgaagatggggtgtctggtttggggaccatcctggccccccttgtcactgttggcatctcttctgcacagtggcattgctgggaggtgcttactgtgcctattcaaggggctggcagccgcagcctcactgcagatcagggacttggcttcccggttgaccacaggtccaagaacctgcagggtccagcctcccccccatccccagtcttccccaccctggcccggccctccaggtgcagaaacatgcaggcccctctccaggactgtgggaggagtgtgtccctcagactggcctgtgtcctggctcctcttaccacctcttccagaggttgtcacctgcagctgccccaagataaaggcaaggccagagaggactcctgaactcctgtgtgc

SEQ ID NO: 27452 - DNA, 469 bp, Homo sapiens
  misc_feature (1)...(469): n = A,T,C or G
agaggcngcnnnncactgataactganagtcntgngcggnggcatncgcagctacccacaccccctttctctgcctcagactatcacaagtccctggaggatgctctgagctcagacacatctggccacttcaggaggatcctcatttctctggccacggggcatcgtgaggagggaggagaaaacctggaccaggcacgggaagatgcccaggtggctgctgagatcttggaaatagcagacacacctagtggagacaaaacttccttggagacacgtttcatgacgatcctgtgtacccggagctatccgcacctccggagagtcttccaggagttcatcaagatgaccaactatgacgtggagcacaccatcaagaaggagatgtctggggatgtcagggatgcatttgtggccattgctcaaagtgtcaagaacaagcctctcttctttgccgacaaactttaca

SEQ ID NO: 27453 - DNA, 504 bp, Homo sapiens
  misc_feature (1)...(504): n = A,T,C or G
ggtnacaaagggnggggcnnnnnttttgaaaaccctcgacgatcactaggcagngcggtggaattcgaattccacacagcccagggcggcaccctcagggctgtgcccgctggagtgctaggtggaggcagcacagacgccacggtggcccaagagcccctttgcttcttgctgggggaccagggctgtggtgctggcccactttccctcggccaggaatccaggtccttggggcccaggggtcttgtcttgtttcatttttagcacttctcaccagagagatgacagcacaagagttgcttctgggatagaaatgtttaggagtaagaacaaagctgggatacggtgattgctagttgtgactgaagattcaacacagaaaagaaagtttatacggcttttttgctggtcagcagtttggcccactgctttctctagtctctatcccatagcggggtccctttaaaaaaaaaaaaaaaaaagcggccgcttgagtttagaggg

SEQ ID NO: 27454 - DNA, 568 bp, Homo sapiens
  misc_feature (1)...(568): n = A,T,C or G
cattcgacnatcgaatcactactccagcgnggnggaattcgntgngttatatgaagtcaagggttaaaggtttaggtggcctcatcgtggttagcaaaacaggagactgggtggcaaagtggacctccacctccatgccctgggcagccgccaaggacggcaagctgcacttcggaattgatcctgacgatactactatcaccgaccttccctaagccgctggaagattgtattccagatgctagcttagaggtcaagtacagtctcctcatgagacatagcctaatcaattagatctagaattggaaaaattggcccgtctgtcacttggtttggtgccttaataagcatctgaatgtttggttgtggggcgggttctgaagcgatgagagaaatgcccgtattaggaggattacttgagccctggagtcaaagctgaggtgagccatgattactccactgcactccagcctgggcaacagagccaggccctgtatcataaaaaaaagaaaagggaaaaaagaaagaaagcagcagcatgatcctgacatgacagatgtgggagacn

SEQ ID NO: 27455 - DNA, 443 bp, Homo sapiens
  misc_feature (1)...(443): n = A,T,C or G
catcgacattcgacgacccctagtccagngtggtggaattccccggccgactctctcaccgtctacctggtggtggcgttggcctcggtgtcgtcgctcttcctcttttcggagctcctgttcgtggcggtgcggctgtgcaggaggagcagggcggcctcggtgggtcgctactcggtgcccgagggtccctttccagggcatctggtggatgtgagcggcaccgggaccctatcccagagctaccagtacaaggtgtgtctgacgggaggctcagaaacaaatgagttcaagttcctgaagccgattatgcccaacttccctcctcagggcactgagagagaaatggaagaaacccccacctctcggaatagcttcccgttcagttaagtgtgggattattttactaaatcttacttatgtttggagatctcttttaactt

SEQ ID NO: 27456 - DNA, 454 bp, Homo sapiens
  misc_feature (1)...(454): n = A,T,C or G
tttgagctctgcaanncccntttgtaagctcctcgacancnggnggaattnggagcttccggatgtgttttccctctgttctttattaccttggcaacggctttggcggtagacgggtggtctgcaccgtcctggagggagatatgagtggctggactctcacccagccactgggatgtgttcgggctttggaccttgaggccggagagagctcccgagaggaggcggcgccacgttcgttcttctgaggggacggcagatttgggggttttcctctaagattctcgcgccgcttcctctgaagaaacaggaccagagagggaaggtgacctgaaagtcacagaataattttttagagctgaacaagaatccaagcctgcaactgcagagacgagagatctttctgctgtctatactcttggaaagcacatcctatgatctttgcgattattct

SEQ ID NO: 27457 - DNA, 459 bp, Homo sapiens
  misc_feature (1)...(459): n = A,T,C or G
naatgatgaccactagacagngcggngtagtatccantctgaataacgaaagagaaagtagctagactggagggaaaagctgcttcagaatgagttgtcaaggaagcctctttgcaatcagaaaggtgagaaggatttagtcaggcaaatatcaggagtaaattattcttggaggaaagtaagcccatgcaaaggccctggggcagagtgggcttatttgataaagaggtaaaagggtcaggatatctgtagcaatagtggccaagggagggagaggtatgagacagaggaggtgagccctgttgccatggtgagggcatgaggatttattctaagttccagatacctggagttaaagtcccctgaactggacaacaactacaagccttcatatctcaatgctaccatctttaagcccctgttataagagctcagaggcttcagagatgacaggaaacn

SEQ ID NO: 27458 - DNA, 441 bp, Homo sapiens
  misc_feature (1)...(441): n = A,T,C or G
gagttccagggtccccccaggtatcattgagttcctngaaannncncgcnccnncagnnngagctgagatggttctgtgagtccttggcaggggtcaaagggcacatctccttgaacctagaaagccccctacactctcagaggacacctctcctgtggattcagcgctggggcagtgaaggtgtcgggagccaacagagcatggtgcgtgctgccagctgccggccagccgggatagaggagatgccactggccctccgtgcccccagcccctccctcttaaccgaggctgtccttgctctctgcagaggccgctctgcaggatcctcgtgtcgcgcgtgatgtgtggtggcacagccgtgtcaaagtcacagtgtcttttctgtcgttctagttccagggtcacccccgagaggacaacaggcatctggaagtgctctc

SEQ ID NO: 27459 - DNA, 480 bp, Homo sapiens
  misc_feature (1)...(480): n = A,T,C or G
cggcaggcccnggcccccttaganttttcgagaccactagtccagagaggaggaattccggctcgagcggcgtagtttggtggaaaaacgggccttgcgtcggcctcacccccagtgtttgtgtttcagaatgaagactattctcagcaatcagactgtcgacattccagaaaatgtcgacattactctgaagggacgcacagttatcgtgaagggccccagaggaaccctgcggagggacttcaatcacatcaatgtagaactcagccttcttggaaagaaaaaaaagaggctccgggttgacaaatggtggggtaacagaaaggaactggctaccgttcggactatttgtagtcatgtacagaacatgatcaagggtgttacactgggcttccgttacaagatgaggtctgtgtatgctcacttccccatcaacgttgttatccaggagaatgggtctcttgttgaaatccgaaattn

SEQ ID NO: 27460 - DNA, 452 bp, Homo sapiens
  misc_feature (1)...(452): n = A,T,C or G
ccttgacacctttgnatgagggcgttttccccgcgcagactggaggggacgctggtagagatggaggaggaggcaattgggatggcgctaggcatacaagtaggggttgtgggtgaccagttgcacttggcctctggattgtgggaattaaggaagtgactcatcctcttgaagatgctgaaacaggagagaaaggggatgtatccatgggggcagggcatgactttgtcccatttctaaaggcctcttccttgctgtgtcataccaggccgccccagcctctgagcccctgggactgctgcttcttaaccccagtaagccactgccacacgtctgaccctctccaccccatagtgaccggctgcttttccctaagccaagggcctcttgcggtcccttcttactcacacacaaaatgtacccagtattctaggtagtgccctattntacaa

SEQ ID NO: 27461 - DNA, 460 bp, Homo sapiens
  misc_feature (1)...(460): n = A,T,C or G
tcttgtaagcccttggaaanncncnnttttatgacctctgacagcgaggggaattaacccggctcgagcggggggaaactgcccatctttcccccggcacagctgcattggtagggggtgtagataagaggagcaggccttggccaggcgtggtggctcacgcctgtaatcccagcactttgggagggggaggcaggcagatcacgatgtcaggagatcgaaatcagcctggccaagatgatgaagccccgtctgtactaaaaatacaaaaattggccggacgtggtagcgtgcacctgtaatcctagctacccggaaggctgaggcaggagaatggcgtgaacccggtgggaagagtttgcagtgagccgagatcgcgccactgcactccagcctgggcgacagagcaagactcggtcttctttttttnattnaaaagatataaaaaaaagcgggctcg

SEQ ID NO: 27462 - DNA, 446 bp, Homo sapiens
  misc_feature (1)...(446): n = A,T,C or G
atcggaaaaactcggangaccctagaanagncnggnggaanncccgcgacacccacgtcaaagcacagcatcaagttcgtttggacattcggcaaggcctcttaccaaatgaggcgccagagaacttaataagctcaaaagaaaaaaacatttaaaaagaaagaaaaaaaaaaaaaaaaaccccggcttttccttttttttttaccaaaaggggttgactgacccggagggggggcggtggggggggggaaccccccccgaaaaaaaaaaaaaaaaaaagaaaagaaaaagaaaaaaaaaattgaaaaaaaaaaaaaaattttttgaaccaacttgggttcaaattccaagagtggaaaaatggtttaaaaactccctttaacgggcccggggtccggggggcccccgggggaaaggggggccaaacccaattgccgggggggggg

SEQ ID NO: 27463 - DNA, 438 bp, Homo sapiens
  misc_feature (1)...(438): n = A,T,C or G
aactgatgacactgataaccgtggggaaancganggaggtgacgggggtgtcggcacccacggtgaccgttttcatcagcagcttcttcaacaccttccgctccgagaagcgatacagccgcagcctcaccatcgctgagttcaagtgtaaactggagttgctggtgggcagccctgcttcctgcatggaactggagctgtatggagttgacgacaagttctacagcaagctggatcaagaggatgcgctcctgggctcctaccctgtagatgacggctgccgcatccacgtcattgaccacagtggcgcccgccttggtgagtatgaggacgtgtcccgggtggagaagtacacgatctcacaagaagcctacgaccagaggcaagacacggtccgctctttcctgaagcgcagcaagctcggccggtacaacgagg

SEQ ID NO: 27464 - DNA, 466 bp, Homo sapiens
agcagaccctgatgaccctaggactgatgtcgttagacaagcgcggcgagccccacagaccgatccatgagcagctccctctcagcctctcagcttctcacggtcaacatgcgggaccctctgaaccgagtcctggccaacctgttcctgctcatctcctccatcctggggtctcgcaccgctggcccccacacccagttcttgcagtggttcatggaggagcgtgtggactgcctggagcaaggtggcgcgggcaagcgcctgcagttcatgcccttcaccaccgtgtcggaactggagaaggtgtcagccatgtccagccccaaggtgggtctggccatcacggacctcagcctgcccctgggccgccatgtggctgctaaagccattgctgcactctgaggggcttggcatggccgcagtgggggctggggactggcgcaaccccaggcgcctgcaagggaag

SEQ ID NO: 27465 - DNA, 465 bp, Homo sapiens
  misc_feature (1)...(465): n = A,T,C or G
ntttggaagacctcgcananncncnnttggatagaccatcgaacagncnggnggaattcaccgcagccgctccgtgcactgtctctgctctcataggaagccctgtccatggtttctggtgcacgggcactggcctgccttgaggccaccacatctggtgtctagaacagctgcgggccccacttgggcagaaggaagaggtgctagctgctgcccctgcctgctgtgaacacctgcccagcccttccttgtctgctgaggtgctcagaccagagtgccattaaataccaactgatgtcacggagcggacggtgcattgccaaggactcacagctgtgggctcccttccagctcctcccactttcttggctgggtcttctgaggcctacgtggaatgaactacacatgtggcctcatgcccaagggtttgttagatggcctctgactctgggggattcaacttgg

SEQ ID NO: 27466 - DNA, 461 bp, Homo sapiens
  misc_feature (1)...(461): n = A,T,C or G
tgggtcnnnnnnntttgaagttcgtagacattgcggaggagagcgcagttcgagccagagacgcccgaggctgaggccgagttccacagcatgggggctcggttgtcccagccttttgagtcctatatcactgcgcctcccggtaccgccgacgcgcccgccaaacctgcgaccccagctacacccggagcgccgacctccccagcagaacaccgccttttgaagacctgctggagctgtcgcgtgctttctgggttggggctgatgggggcgggcggatacgtgtactgggtggcacggaagcccatgaagatgggataccccccgagtccatggaccattacgcagatggtcatcggcctcagcattgccacctggtgtatcgttgcatggcagacgcactaggaaaagctaccgtgtgagtgatgtaccccacagagcagtgtctgctgtgtgacacn

SEQ ID NO: 27467 - DNA, 486 bp, Homo sapiens
  misc_feature (1)...(486): n = A,T,C or G
agaatgtgcccnncnnnagccccgccnatagatgaccataggactgacggcgtagncacncacngcaacctccgcctcccaggtccaagcgattctcctgccctagcctcccatttagcttggatgtcatgagatgacgcacgagccaccacacctggctaatttttgtatttttggtagagatggggtttcaccatgttagccaggctggtctcaaactcctgaccccaggtgatccaaccacctcggtctcccaaagcgttgggattacaggcatgagccactgcgcccggccatgatttcttataagtaccatgcgctaaccaattgcaccactggagccactgtcctctgtatgatttctgatctctttcacttcaagcatatgagtgctctactgtaaatatctcaaattcttagaagcgggtggacacaaatgtgataaagcagcagctctagactcccctcctatctctacccctagat

SEQ ID NO: 27468 - DNA, 483 bp, Homo sapiens
  misc_feature (1)...(483): n = A,T,C or G
cgcccccatcgagncccctnngnnatagtagactctagtccagngcggtggaattccagcatacgtggagatgaggcgagaggcttgggctagtaaggatgccacctatacttctgcccggaccctgctggctatcctgcgcctttccactgctctggcacgtctgagaatggtggatgtggtggagaaagaagatgtgaatgaagccatcaggctaatggagatgtcaaaggactctcttctaggagacaaggggcagacagctaggactcagagaccagcagatgtgatatttgccaccgtccgtgaactggtctcagggggccgaagtgtccggttctctgaggcagagcagcgctgtgtatctcgtggcttcacacccgcccagttccaggcggctctggatgaatatgaggagctcaatgtctggcaggtcaatgcttcccggacacggatcacttttgtctgattccagcctgcttg

SEQ ID NO: 27469 - DNA, 475 bp, Homo sapiens
  misc_feature (1)...(475): n = A,T,C or G
cccccccatgagaccctancaatagagggcattccccggctcgagcggcactcaagaagcacttggtgaggacgagccctcacccttcttgtcttccttcccagcagcgcccgcagcgggccatttacacgtcgaggctggcacctggcgcgctcgggggccactgtagcgtctgcctgctccctggactcgcaggcctcgcctgtggcgccttcccagggccagcctgggtcacgagatgctgtcactcagccagatcagtattgacccaccaggggaggtggggtttggtgagagacgccagcctcagactttttcccactgagggtccagagagcggggccacgtgtcacccacgtctgcgcttggtcacccgtcctccccaccctgtgtgtgtttatgtcatagttacattaaattccattcattgaaaaaaaaaanaaanaaaaaaaaaaaaaaaaaaaaaaaaaaaaaa

SEQ ID NO: 27470 - DNA, 465 bp, Homo sapiens
  misc_feature (1)...(465): n = A,T,C or G
gccgatnnnnnnnaatcgagacctgaggacgttcggaggaacnccagagattacgcttacatacgagctatgatgtagaaaacggagaattcctttgccttctttgtgaatgcttgagtaatactgttattcctctgctgcttcctccaagaaatatttttaacaacaggttaaatttttcagaccaaccaaatctgactcagtggattagaacaatatctcagcaaataaaagcattacagtttcttaggaaagaagaaagtactcctaataatgcctctacaaagaattcagaaaatgtggatgaattacagctccctgaagggttcaggcctgattttcgtcctaagatcccttattctgagagcataaaagaaatgctaacgacatttggaactgctacctacaaggtgggactaaaggttcatcccaatgaagaggatcctcgtgttcccataatgtgtt

SEQ ID NO: 27471 - DNA, 471 bp, Homo sapiens
  misc_feature (1)...(471): n = A,T,C or G
gggttccggggaatcgtagacctgagtancgtgcggnggaatcctactctaaaggctgacgtgggaggactgcttgagcccaggagttcgaggacagcctgggcaacatagatcttgtctctaaaaaaaaaattattccacttggtagggaaacctggatgggagggctttcaacaagaggtgttgagagggtagggttaggtgtagtctagggcaggagacaaggattccgtgagagctgccacatgaccatgacagagagctctgtgtttggatcaaacacagagaggaggaaaacaaaaggtgcttttaagtgagcccaggcagaactgtgagtgcggcccatgctgcaggctgtggctgtcagcaggctgcttctccacagctggcccagtcctaggattcacagggcagcagcagggtacactgggtgactgctgccctctcgtggtgcacagggcagacctgctg

SEQ ID NO: 27472 - DNA, 463 bp, Homo sapiens
  misc_feature (1)...(463): n = A,T,C or G
attgagnccatgatgacactcggacagngcggnggaattccgtgagtccctctacgccaaaaacaacgtctacgaggccaccttcctttttgctgtttatgggatacccccggccagcggcaccgggaccctccagatctatctcattgacatcaacgacaacgcccctgagctgctgcccaaggaggcgcatatctgcgagaggcccaacctgaacgccatcaacatcacggcggccgacgctgacgtcgaccccaacatcggcccctacgtcttcgagctgccctttgtcccggcggccgtgcggaagaactggaccatcacccgcctgaacggtgactatgcccaactcagcttgcgcatcctgtacctggaggccgggatgtatgacgtccccatcatcgtcacagactctggaaaccctcccctgtccaacacgtccatcatcagagtcaaggtgtgg

SEQ ID NO: 27473 - DNA, 461 bp, Homo sapiens
  misc_feature (1)...(461): n = A,T,C or G
nattgaagacctctaggcncgtgcggnggaattcgngaaagtgctggactaagtcatctctaaggtgcctctcaggttaaaatgccatgattttaaagtttacttcttatatggaagtcaccgtgacatcagtctcaccaatatgtaccctattaaagggagccatcttgttttttcctccaacctaaggcagatttcagtgaccgcatctgtcatttttcatgttgactctatattgtggagatcatagcttcaaaataaaaagtcttaacagatttgatgcgtgcctttaaaatgcatttatgggtcgggcgcagcggcccacgcctgtggtcccagcactttgggagcccgaggcaggcggatcatgaggtcaggagtttgagaccagcctgaccagcatggtgaaaccccatctctactaaaaatataaaaattagccgggtgtggtggcgcgtcct

SEQ ID NO: 27474 - DNA, 461 bp, Homo sapiens
  misc_feature (1)...(461): n = A,T,C or G
nattgaagacctctaggccagtgcggnggaattcgtattatagaattagtgctattaattttaggtttaagaatgtattgtgggccaggcgcggtggctcacgcctgtaatcccagcactttcggaggccgaggcgggtggttcacgaggtcaggagttcaagaccagcctggccaagatggggaaaccccatctctattaaaaatacaaaaattagccgggtttggtggcaggcacctacaatcctagctaatcgggaggcggaggcagagaattgcttgaacccgggaggcggaggttgcagtgagccgagatggcaactgcactccgacagagtctcaaaaaatatatatatatagtattgtggatacgtacttttaaaaatccttacgttttagagatacaaaaatatttatgaataaaatgatatgacgcctgggttttgcttcaaaacgatggtg

SEQ ID NO: 27475 - DNA, 472 bp, Homo sapiens
  misc_feature (1)...(472): n = A,T,C or G
gcccgttgnggggnaatgagacctgatgacatcggacgngcggnggaattccccaggactgacgatgaccccgaaagggaagaggccccatctctcggtgactgaggtggtggagagaggggacctcttccccctactctgcccccttcctgcacacccttgcgctggaggaggggagggggcaccgcctcccacccactgagggcaggagggcttgtggggagggacaccaacagggtttcaaggggaccaggagtcagaatgtggggagacgcctctgccaaggccatcccagcccctatgctgccatcccccagggctccccatcacccgagaggagaggacgccccaactaacccccgctggccctcgggcctcccgagtggccggctgcaaccacggctcctctccagggtaggccagcttgaggaatcttatttattttatttatttacccaaatttgaactagtg

SEQ ID NO: 27476 - DNA, 453 bp, Homo sapiens
  misc_feature (1)...(453): n = A,T,C or G
ggcgctgnnnnnaaagaccgttaacgaccggcggncgaannggcgngctggagggcatcctggatggaattgaagtgaatggaacagaagccaagcaaggtggagtgtgggtcagacccagaggagaacagtgccaggtcaccagatggaaagcgaaaaagaaagaacggccaatgttccctgaaaaccagcatgtcagggtatatccctagttacctggacaaagacgagcagtgtgtcgtgtgtggggacaaggcaactggttatcactaccgctgtatcacttgtgagggctgcaagggcttctttcgccgcacaatccagaagaacctccatcccacctattcctgcaaatatgacagctgctgtgtcattgacaagatcacccgcaatcagtgccagctgtgccgcttcaagacgtgcatcgccgtgggcatggccatggacttggtt

SEQ ID NO: 27477 - DNA, 461 bp, Homo sapiens
taatgatcgcccctccgaatggacggccgtatgccgcaccccgacggcgggagtcgcaggtgctgggtgcatgggccagtgaggacgcacagagatccctcgccgcgcggaggaggagcagcgcgggagccaggcgctgccccaagaccctgcctgcgtccgagcgagcggaacctcgcgcttcgcccggggacaatccgaagtccgcgctatggaagaggagaaatatttgcctgagctgatggcagagaaagatagcctggatccatcttttgtgcatgcgtcgcgccttttggcagaagaaattgaaaagtttcaaggttctgatggaaaaaaggaagacgaagaaaagaagtatcttgatgtcatcagcaacaaaaacataaagctctcagaaagagtactgattcctgtcaagcaatatccaaagttcaattttgtggggaaattgctcggaccaa

SEQ ID NO: 27478 - DNA, 476 bp, Homo sapiens
  misc_feature (1)...(476): n = A,T,C or G
agganaataaaaccctgatgacactagtcgagagttctggaactcgcatcctcgggaccagccaagataaggctccggctgtaatccgcaaggccatggacttacacaacctggaggatgaggagccggaggactatgagctgctgcagattctctcagatgaccggaagctgaagatccctgaaaacgccaacgtcttctatgccatgaactctaccgccaactatgactttgtcctcaagaagcggaccttcaccaagggagtgaaggtcaagcacggagccagctccaccctccctcgcatgaagcagaaaggactcaagattgccaagggcatcttctgagggcatcctcccagggtctggctggctggtagccaagcacttatggaccagagtggcccatgccagctgggcgcctttctcccacctgccagcccagggtaccccagactccagtttcatgctgaacctctc

SEQ ID NO: 27479 - DNA, 476 bp, Homo sapiens
  misc_feature (1)...(476): n = A,T,C or G
gagataanaannctgataccctagaagngctgatgacactatagcacgcggnggaatnccagaaagggacagatttggtctttctgctgtaaaagatattctgccttggtgccttctaatttgttgtgcataggcctgtgctgccaatcttccccaccaattgttaagggtaatgtgtgctttatatgtgcattcacaaacattaaaatgtaatcagtggattccattattgcccattttcatgtaaggtgggaggcactttgtatggttgggaatctgtaagatctttaggactaaaactcctgcctctaatcccaatttatgaggccctgactctccacgcagcatgacttatgtggatttttctctggcacgaaacctgccaaggcttcttcatcacccaaatccctaccatgaccaacctgtatgaaaagaggggcataggtcattattaatcacagacatgcactatgatn

SEQ ID NO: 27480 - DNA, 570 bp, Homo sapiens
  misc_feature (1)...(570): n = A,T,C or G
natcgaaattcgaatcacagtggngcaanncctgaagcacctggagtctgatgttggagggcaggaagcatccagcacgggagaaagatgcaggctgggaggctaagccagtctagtctttccacattcttcttcccgcatttattctggccatgctggcatctgattagatggtgcccaccaagattgaggatgggtctgcctttcccagtccactgactcaaatgttaatctcctttggtgacaccctcacagacacatccaggaacaatactttgcatccttcactctaattaagttgacactcaactatcaaccatcaaactttttaatcttttattgggaaatacaaatacaggttgattgtctgtaatctaaaaattagaaatcacaaatgttccaaagttcgaaactttttgaacactgacatcatgatgaagatgaccttaacactataggaaatgtacagaaacaccgtggtgagtgtgcgatgnggcttactgagagctggagcagcaggacacgtaacagagcaagagaccatggcagtgtacaaaatcagagtgatgt

SEQ ID NO: 27481 - DNA, 572 bp, Homo sapiens
  misc_feature (1)...(572): n = A,T,C or G
ctttcgacatcgatcacctatccgagnngggcaattccggaatcctaggcgcggatctcgcgtttccggccggaaggcttctccagcctttcccggaagctgcgctctctacccgggtaacgggtcccggctgtggaagctcccgcggcgccgcgatggacctcgaggagtcggaagagtttaaagaacgctgtactcagtgtgctgctgtctcatggggtcttactgatgaaggcaaatattattgcacttcttgccacaatgttacagagagatatcaggaagttacaaacactgatcttattcctaatacccaaataaaagccctcaaccgggggcttaaaaaaaaaaacaatactgaaaaaggctgggattggtatgtgtgtgaaggtttccagtatattctttatcaacaagcagaagccttaaagaaccttggagtaggcccagagttaaagaacgatgttttacataatttttggaagcgctaccttcagaagagcaagcaggcatattgtangaacccagtttataccactggaaggaaacctacggtattagaagataatctn

SEQ ID NO: 27482 - DNA, 484 bp, Homo sapiens
  misc_feature (1)...(484): n = A,T,C or G
gtgagannaagnnattttgataccctngnnnnnnttttgatgtcattagtccagtgcggtggaattcccctgagcctcgcgctgagcgggggccgcgcagcgcatctcactggtgaccagactgtccccacgccgggaaccaagcaggagacgacaggcgagagaggagccagacagaccctgaaaagaaggacgggttggggccgggcacattgggggtcaccggccgatggagacaccaaccgacaggccctggctgagggcagctgcgcgggcttatttattaacaggataacccttgaatgtagcagccccgggagggcggcacaggtcgggcgcaggattcatccggagggaagggacggggaagccgagctccagagcaacgaccagggccgaggaggtgcctggagtgcccaccctgtgagacagaccccacctccttgtgtagtgagcagtgagcagatagctgtgaacaggctgg

SEQ ID NO: 27483 - DNA, 483 bp, Homo sapiens
  misc_feature (1)...(483): n = A,T,C or G
gtgagaaannaganttttgattccctnnnnnnnntttgtagtccttagtccatgcggtggaattcaatcgatctacacacatccacgcacatgcgaccccgaggaaacgaaacccactctataaaacgcgaccttggccgcacctaaagcagccagccgtgagtgcagaccccttggccagcgtggcgcagtggccctgagcagtagtggcatgtgtgtagatcaagtcggatctagtccagctcggttcattagcgatccatgtaatctgacgtcatcttgtctcgaagtctctttttttggcccaggccttgaagaatacactgtgacttaagaagccttaccacgcagtaactaaagctttaggatgactgtattcgaggagtgccgtgtgttgcatgcagctacccgtaagaagacttcgcgcatatcactaataaacctgaagtcgtgatgnnnntnnntnttnnaaaaaaaaaaaat

SEQ ID NO: 27484 - DNA, 461 bp, Homo sapiens
  misc_feature (1)...(461): n = A,T,C or G
ttatgtccttntcggtaagatgatcatagnacagngcggnggaattcgagatggcttattttctacagtatttaaaatggatgcagccctaactgcaaaagtcagagaggctgacaaggaccaatgcttctttatctggtgctcagttctcagtcagacgtgcagcatggctgcagggtggaccagctgcctggcattcaggcccagatgcctgcagggctggggctctcgggacagatgcagggatgtgtgctgcagggctgctgggaggagagtggtgggggcctgagggctgagtgattctgtaaccacctgagaccttcacgtttgctgccgttgggggctcaagctgcactccccgggtcacctgacctgctgcccaggggcttccagtcctgtctgtgtggactggcacctgggctgctggagaagtctcctcccgttcggaccagcctcagggg

SEQ ID NO: 27485 - DNA, 449 bp, Homo sapiens
  misc_feature (1)...(449): n = A,T,C or G
naatgacttatcgaatgaggtcttgagcntcngcggntacagctggactcctctggccttcggagagggctgcccttgccaccctctgcacctgccacccaacttcctcctcatcccctgctcctgcctcctatccagttttctgggcttctccttcttcctccagcaatgccttcggtctcattcttccaggacctgcctcctcccaaagtcctctctgggggctctgggccatggcacagcaggacagccaccacaagccactgtcagagtctgatgggtgaggacggaaggtggctcacgagtccttccttagggcagggacaattttttccaggagaggtgtaaggcctccagctcctaaaactcctcgaggtttaagagcgggaaatgctttggctccaaaatattaaaactgcaacattaaaaaatagtaaatgtttaaaaaa

SEQ ID NO: 27486 - DNA, 473 bp, Homo sapiens
  misc_feature (1)...(473): n = A,T,C or G
ggggngggacatggaccctnntcggataatgacgacgatnagaccagngcggnggaattcccgagacagggctggatgctggcctgcaggagctcagctatctgcagaggcttgaggtgctgggctgcaccctgtctgccgacagcaccctgctggccatcagccgccacctccgagatgtgcgcaagatccggctgaccgtgaggggcctctctgcccctggcctggctgtgctggagggaatgccggccctggagagtctgtgcctgcagggtcccctcgtcaccccagaaatgccctcccccactgaaatcctctcctcctgcctcactatgcccaagctcagagtccttgagctgcaggggctggggtgggagggtcaggaggcggagaagatcctgtgtaaggggctgccccactgtatggtcatcgtcagggcttgccccaaagagtctatggactggtggatgaac

SEQ ID NO: 27487 - DNA, 569 bp, Homo sapiens
  misc_feature (1)...(569): n = A,T,C or G
catcgacattcgatcactagtccagcgnggnggaattcgctgggtacgacgacttcaactgcaacgtctgggatgcactcaaagccgaccgggcaggtgtcttggctgggcatgacaaccgcgttagctgcctgggcgtgactgacgatggcatggctgtggcgacagggtcctgggatagcttcctcaagatctggaactaacgccagtagcatgtggatgccatggagactggaagaccattccaacttggacgcgttaccatgagagcatatcctatccaaccgtactaacgtggacaccctacacctcccctcagaacttcaaaagggcaagatcttttttccttcacttattgctgaaaccaagagcacaattcccattgagagaaagatctctgtgctgtaaactaaaacaaattgtgcattccttccggngccatcgtctttggtttcttttttgtcttgaatgaattntaaaaggaaatatataataaaaatggtaaccagaagggaaaaaaaannnnnnnnnnnnnnnnnnnnnanaanaaaaaaaaaaaaaaaatttca

SEQ ID NO: 27488 - DNA, 456 bp, Homo sapiens
  misc_feature (1)...(456): n = A,T,C or G
catggacactctagcaatggaggtcgtatgcggacacggacagtatgtgggggcaggaaggttatctcctcccgggtaaagccatttcgtcctctccagtttggggcggaatgaggcctgctcctcttgtaaatacccccttccctcgaagctccctcccggtgctggggggcagctgaggggctgcaggggcagtctccctcctccaagcccctgtacataacctggagcgtgtgaccttcagagcttttcactttatgcaaaatggctcctgtgagggctgcaagctggagggtggtgcaggccttgggccacagggaggcgcctgtggaatagggggagttcatgcaccccttttttccccagaggggctggactcaggttagtttgggggtgggggctcctgcactttgccacaggcacggngagggttttctcctcaccccctctgccctc

SEQ ID NO: 27489 - DNA, 464 bp, Homo sapiens
  misc_feature (1)...(464): n = A,T,C or G
aggcgcctnnnnnnnaaaaggagactagangcaccgtctagtcnggtggaattcctgaaattgtgatgaacagaccttctgcccgcaatgccttggggaatgtcttcgtcagtgagctgctggaaactctggcccagctgcgggaggaccggcaagtgcgtgtcctgctcttcagaagtggagtgaagggcgtgttctgtgcaggtgcagacctgaaggagcgggaacagatgagtgaagcagaggtgggggtgtttgtccagcgactccggggcctgatgaatgacatcgcttcctcggcagtcatgggactgattgagaccacgcgagggctcctcccgggggcaggagggactcataggctgccccgttgtctgggggtggccctggcgaacgagctcatcttcacgggccgacgactgagtggaactgaggcccacgtactgtggctggtgaatcacgcn

SEQ ID NO: 27490 - DNA, 569 bp, Homo sapiens
  misc_feature (1)...(569): n = A,T,C or G
ctttgacatcgatcgcgagtccagcgnggncgaattccgacaaatggctgcccgagggagacgggcggagcctcagggccgggaggctccgggccccgcgtgcggtggcggtggcgggagccgttgggctgagtcgggatcggggacgtcgcccgagagcggggacgaggaggtgtcgggcgcgggttcgagcccggtgtcgggcggcgtgaacttgttcgccaacgacggcagcttcctggagctgttcaagcggaagatggaggaggagcagcggcagcggcaggaggagccgcccccgggtccgcagcgacccgaccagtcggccgccgccgctggccccggtgatccgaagaggaagggcggtccgggctccacacttatcttcgtgggcaaacgcagaggcgggaacaaactagccctcaagacgggaatagtagccaagaagcagaagacggaggatgaggtattaacangtaaaggtgacgcgtgggccaagtacatggcagatgtgaaaaagtacaatgctcaccagtgcggtgacgatgattatactcggccctctggtg

SEQ ID NO: 27491 - DNA, 564 bp, Homo sapiens
  misc_feature (1)...(564): n = A,T,C or G
natcgatatccagtcaccgtggngcaantcatttgagtctcatcgaatcctccgcttgcaaccacctcagggcgagctgactgtgatgcggtaccaactctccgatgacctcccctcaccgctccccttccggctcttcccctctgtgcagngggaccgaggctcaggccggctccaggtttatctaaagttgcgatgtgacctgctctcaaagaggtaagagtgaggctggcctggctgagttcagctctatgggacggaagacagggccagggcacctgctgcttctcccttcagatgcagctgccagcctcagaagccagttaaggtagaggctgtagaatttgggaaggtggggggcacctgtgctgaaatcctgttatgacattgaagaggaacaggacaagggactgtgccttcctggggctgactttgttcccgtctcctctgtagccaagccctcaatgtcaggctgcacctccccctgcctcgagggggggtcagctgtctcatgagcttgagcacccaaagcagaaggctgagctggcagaggagcccttcgtg

SEQ ID NO: 27492 - DNA, 452 bp, Homo sapiens
  misc_feature (1)...(452): n = A,T,C or G
taaatcatnctcganatgaggncatcgaacngcngcgnggagctcagagatagaaacctacgccccagaagaggaaaggactgtcctgcataaccatcacacccggggaatgcttcaggtgcagctggatccaggcatcctcaaatagtgtgattaggactccactttcctttgtcaccttggcttggctcttccctgctctgtgttgttttcagacgaggtggggccccagcagctctggtcctcctgacatcctagagaagagccagcccttccctcctggggtctacaccgtcccctaagggacctcagactgggctgatggaaggtctcaagcaagccatgtgaagggcactgcacaggaaacacagaaacgggaatcctataaggtcagcagagctctgagccctttgttcttgggcctgcttttatgagcctccctctacatgaag

SEQ ID NO: 27493 - DNA, 569 bp, Homo sapiens
  misc_feature (1)...(569): n = A,T,C or G
cttcggacatcgatcactagtccagcgnggngcaatncggcccagtcaatgagcattgcatcccatgagggaagcacgacagggctgatggtgaggatcanagcagttctaaggtgactcgttggggtaaggatcaggactttgtccatgtagtagccaaccaccctcttccctgattcccgtccggtgtcacagttcagtcagtgaggatgatgaagtagatacagtcttcaggacaccattagatgggctttcccaataggccaaaaaatgctgcgcatacccagagctggttgttgtgctgaggccagtcagaggatgcttcccctgaggtttgctataactaagcaacctttatgtgactctcaccttctgacctcctggcaagagaaattcagtgcagcagggggacacagacctgcccaagccaccccactgccgttccctctcggagcacaagctgggcaaatcactgtcccttggactccagtagaccagtgtcctagtcttgccttntttctctaagtggcaggatcagaaaacctgcgagctntagtttgtattttcan

SEQ ID NO: 27494 - DNA, 461 bp, Homo sapiens
  misc_feature (1)...(461): n = A,T,C or G
agggncnagagnccggngnncccccctgataccactgatgagcctgcggcaagncccagcgactgcaacatctgtgacccactatacccagctacttgggggaggacagacactgtggtgtcattaaagttgcttgaaccaaagtggcggatgcatctttgtcccgatgctagccgtgccggtctcccatcatccgctcgccctcctttcccctgggctgcgcccacttgtcttcctggatatttgggggtgactcgccatgcttggcaccctctgcttcctggtgctgctctgactcgaagacgggacagtccctggtgcacatccagggaagaggagtgtcggtagttcttgcagtacgcactttatcaagacctgacctgttgctgggtgagtttagtctctacaaacagaaagcgtttcaaagcgtcagctgagggagcagagtgaccctttgctgg

SEQ ID NO: 27495 - DNA, 694 bp, Homo sapiens
  misc_feature (1)...(694): n = A,T,C or G
cctgtacgacacatctcgcggacntgtgtaacgcgtcacaagagtggagtagaagtgactttgcntatagaacgaggtcttacaatcatccatcacccactcgatggagcgccccacaannnnnnttttgaaattcgatcnatctatccagagaggngcgaanctgcagctcctcccccaggcttccatccactggacccgcagagctgaccaggatccctgccagcggaatgtggctataggctctctcctgtcttagacagcaaatcttgagatggagataatcctgggttaccccaggtgggccctaaatgcaatcacatgcatccttataagaaggagatttgacacagaggaggggaaagcagtgtgaccacaaaggcggagactggagacgtggccacaagccgcggagtgtcagtggccactgcaggggatgtgcctcttgtggtcttggctctgggtccagcctaccttaaggtgtgtatttatcttccactataaaaactacaaacagctatttatttccaggcaagagttttaagaagaaccaaaatgcccccaaatctcactccactattgacggtttaaaaagtgaccacgtacgtgtggtgaaaaggttacaatagtgccagataaagcagcgtctgagcacccagggtcccatgcgccctgctctcctcgaaggtcactg

SEQ ID NO: 27496 - DNA, 483 bp, Homo sapiens
  misc_feature (1)...(483): n = A,T,C or G
ggcagtgccaatagagnnccntnatagtagactctaggcagngcggtggaattcgggttccacaggaggagtcacagagccaccaagggctctcctggcccagggagcagtcaacaccatggactgaacacccactgggctaagccctgggccaggctggggcatgtggggccaggaggcagctcagagtgggagacagagagacaagtgtgctcagagggcacccatatctgcatataacgtggtcctgaatttctggctggaaagtgcttccagggtttcatatgtgttatggagatgcttcctctctccaacctcaccgtgcaggaatcccagtgaatatattgccaccatcttggagctcagtgccctcatagtgtaacagcaccagcagatctgcctgtgcacagacttcctgtactacctcactcctgaggggagatgcttctgcagggcctgcgacctggtgcacaactttagaca

SEQ ID NO: 27497 - DNA, 474 bp, Homo sapiens
  misc_feature (1)...(474): n = A,T,C or G
gcactccaatgagaccntgatagagaccgtaagacgngacagctattccataacttggtcagccatagcctcaatttgacatgctaggctatgaatcctaaagactggtatatggttaccgcactggagttacttttctcattccaacaactacagaacattttgaatagttttttaaaattttattttaacgaaagttaagaaaaaacccttacttatacactaaagaaaataaacataaaatggtctcccgcctgactcacaaaagtcccatggcctgatcctggccagcaggagcagttggtgatgaggatccagggcaagatgcagctgagctgccagcctcctagatgtggttccctggtgtctacggtctgggtgagggatggtgcagagccggtgttctggccagcatcccggtgggttcccagccactgcaggatgttgccagcctacgggttttcgggctccagc

SEQ ID NO: 27498 - DNA, 452 bp, Homo sapiens
  misc_feature (1)...(452): n = A,T,C or G
gggggaactgatnccctcgnannctcgagancatcggacagngcggnggaattcgacaggacccgacatccgttttaaggtattttctctggctcctgtgtggacaatagattgtcacctcttccagcgggagaggtggagatgatgggcatagtctggggtgatagtggtagatttgctcttgttcctagtgtaatccttgaaattagtggtgaaactggctgtggatggctcttgcgttggaaggcctggaagtgtgaattacatacatgagaactccaggcatgacattcttcgggtgggaactgttgtcgcctgctctatcttgccagcttctctgtaccaaagttcttttggaaactttgagcctctctgaccttttgacccttatgtgcatgtgggagtcctggtctgtgatcccttgacttgattcagggggccccttagctccn

SEQ ID NO: 27499 - DNA, 470 bp, Homo sapiens
  misc_feature (1)...(470): n = A,T,C or G
agggnnncnagagnncncggcatgtccncccctaagtangcatagataatcatcaggaannccggcggcanaaaaagacgagcttttgttatcagttccacggggttgccctacagagaaaacaggcaaactcacaggttagaagacatacagaaacagggctggtgtgtcccccatagtctgcatgctgtgccggaacattctttggcagaaggagcctccggctggggggagctcccctggaggtgggactggcccttgcacctgcctgacccttgagctccaggctcctgccagctggaggtgaaactgtgcttgtatccccagccacgaagagctggaccagcttcaagtacatgtccacagcaacatgcaggaaggcctcttccctgatggccgcgtcttcatggaagtaggagagaagactagaggtaaagacatagtgacaaatggctacagactgctggaan

SEQ ID NO: 27500 - DNA, 479 bp, Homo sapiens
  misc_feature (1)...(479): n = A,T,C or G
agagacgggnnnnnnaaatcgagaccatagagagccntgtggaannccaccgangatggggagacgccaggaagctcacagaacttgggtctggctggctcctgcccgtgacgccttgcccagcagcaaggtgcgcaacatggctgccagccccgcctcccacccccaccccgagtcctgagctcactttcaccttctccatcccctgccgtgggggccacagccacacctcaccgcccagtccagctgtctccagaaggggacaggcagtccgcggtctctggacaatcaactcaaggtacgcccactgcaaggcctccctcccaccgcggcccctgcctggccacctggcctctctgcaccagggtgacaaggggtcctcgtctgccccccaatgctccagggccagtcctaaggagctgagggtctgaggacgcanggagggtggaggtgtcctgaggctgatggacagtgaccgg

SEQ ID NO: 27501 - DNA, 478 bp, Homo sapiens
  misc_feature (1)...(478): n = A,T,C or G
tggccgggggnnnaattggagnacatgagaggcctgggagnngacgnggaantctcgagngaacagctactactctcggtatcgcaactacgggcacctggagtttattcaactttagctggccgcccagtttgagaatgggggtaagagatcacaatcccattattcagagcgcgtatggagtggaaacgcttgtaaggcttcaccaggatccacctctgatgttcagtgaagaggaccggaaaagtctgctagagcagtaccatctgggtctggatcaaaaacgcagaaaatacgtggttggagagctcatctggaattttgccgatttcatgactaaccagtgtaaggggcagtttaacgcatgggataatggacccgtcctcattttttcaggttgccttgcccattctggacattttggctgtaagaatattggaaacaaaggggggaacctgggttaatccatgtagggtgg

SEQ ID NO: 27502 - DNA, 481 bp, Homo sapiens
  misc_feature (1)...(481): n = A,T,C or G
ctcgatcccccttnntttcgagancactagtccangnggtggaattcccggcggccagaaacggcagtggcagcagcgtccggagcagccgcagccttctggaagctccaggcggtctttctgccgagcctcggtcccggcccccatcctccccgccccatcggttgttgtctgggcggatttaaacagtcaagtaaaatcaagctgggtaatcatggcagaaggtggatttgatccctgtgaatgtgtttgctctcatgaacatgcaatgagaagactgatcaatctgttacggcagtcccagtcctactgcacagacacagagtgtcttcaggaattaccgggaccctctggtgataatggcatcagtgttacaatgatcttggtagcctggatggttattgcattgatcttgttcttactgagacctcctaatctaagaggatccagcctacctggaaagccaaccagtcctcataat

SEQ ID NO: 27503 - DNA, 477 bp, Homo sapiens
  misc_feature (1)...(477): n = A,T,C or G
atggccgggnnncnnaatctgaaatcattgagaaactnggaagngtcnggaaagtctacgccaagagggacccctaaagtatcccttccagcgctgtggactctgtgtgacagttttgcgtcagggtagcttcatggcttgccgtactgtatgagggatgtagctggtggggaggctgtgcctgtctgggcagggagtacatggcagctgtattctgtaccatcctctcaattttgctgtgaacctaaaactgctctaaataataagcttcttgttttagtcacttactaagaaaagaagtcagtgaaagattttgtccttgaattacgatcccaagaggaggagctggtggagaagaagaggacagacaccacagtggccatagcagaagggtcgagggttcttctaatgagcccgtttaggggccataagctgatggccctactcttaaaaagcccaggtcagttaaccgcagcg

SEQ ID NO: 27504 - DNA, 441 bp, Homo sapiens
  misc_feature (1)...(441): n = A,T,C or G
aattgtnccctcgatcgncgccntganaacancagcnggaggacatcagcaggactgaggaaagggccaccaccagcgtgaggataggggggagagggcagaacgcggcgaatggccgcgctcgagggctggcggggtcccagcgagcagcggctgggaaacaatggcgcgagcgtgacgtgggccggaggcgccgccgcggcgcggaggaaggggctgccgtgggactgtagagtctgtagagtcttttggaatttatgtgattacaatcttgcagtctgtgaatagagatggtttaactttcctgtaatctttataccttttagttttgttgctggctagtatgtccactattgaatagaaatagtgataatggacttccttgtcttggttgtaaaatcaagaggaaagcattcaatatcaagtgctttttctaccttt

SEQ ID NO: 27505 - DNA, 476 bp, Homo sapiens
  misc_feature (1)...(476): n = A,T,C or G
agggggctnnnnnnaattgtagatcattagtcagtgtggtggaattccagatcaaggctcgagatcttcgcgggaagaagaaggaggagctgctgaaacagctggacgacctgaaggtggagctgtcccagctgcgcgtcgccaaagtgacaggcggtgcggcctccaagctctctaagatccgagtcgtccggaaatccattgcccgtgttctcacagttattaaccagactcagaaagaaaacctcaggaaattctacaagggcaagaagtacaagcccctggacctgcggcctaagaagacacgtgccatgcgccgccggctcaacaagcacgaggagaacctgaagaccaagaagcagcagcggaaggagcggctgtacccgctgcggaagtacgcggtcaaggcctgaggggcgcattgtcaataaagcacagctggctgagaaaaaaaaaaaaaaaaaaaaataatgggt

SEQ ID NO: 27506 - DNA, 483 bp, Homo sapiens
  misc_feature (1)...(483): n = A,T,C or G
gccccccattgagacctaatcgtagagcactagtccgngccgnggaattcctcaatcagccctgattcagctcgccagccagccactggccaccctcttaggctggaaagggaagacaggcagtttctgctcctgttggcattcgctcaggctggtagctatttgcaagactgcctgaggccattccttggaggcaaggcaaagaaagctcagcccaaatcaggcttgagcctccctccagagcacagggagaaacagggtttagctggcttggtccagatacaacccacagcaggttctggtggtggctggggttgtgggggaggggtgggcagggatacctctttgtttcttttcaccccgaaatacaacagcccataacagagacttcctcggaccccactaacagggcaaggaacaagaagactacaccgctcatcacaaaccctgcctgtatcgaaagccactttcctgctctgaagc

SEQ ID NO: 27507 - DNA, 480 bp, Homo sapiens
  misc_feature (1)...(480): n = A,T,C or G
ntggcacggggnncnnaaactcgagaccactggacaccagtnggaannctccctccaagttccccagcgggatcccagagaaggatctgcacagtgttatggcaccctacttcctgcagcaacgggacaccctgcggcgccatgtgcagaaacaggaggccgagaaccagcagctggcagatgccgtcctggcagggcggaggcaggtggaggagctgcagctacaggtccaggcccagcagcaggcctggcaggctctacacagagaacagagggagctggttgctgtgctgagggagcctgagtgaggagaccgccagccccagaagcagagggcagtcaaggtcaagagcctgtggtccagcatgcctggcctgggcgggctacctctgagaacggctgaaatggtgcccagtccatcagcagtgatggaatttgctggaggactaggccagagcaagcctcactgccactgtgccn

SEQ ID NO: 27508 - DNA, 471 bp, Homo sapiens
  misc_feature (1)...(471): n = A,T,C or G
tggccgggnnnnnaattgaaccatgagaaactggaagnggcnggaanactcggagcaggcggtggaggcactggcagacacaggccgtgtggagggtgccgtgtcactgttggttggaggacaagtggtcactgagaccctggggacccatggaaagggtgggcctgcccactccgagggtcctgggcctccctagcccaagcagagagtggggcacaggcaggcccttgggtgctaagggctgggctgcatgtgggtagcccgagctcctactctgtctaaagagggccacagtggggagcaggggcacctctggaggcaggagaggccccccagcatgctgccctagtacgtgtttagaataaaaaccagtttgtttttcaaaaaaaaaaaaccaacctggggaataatttttaatataatcccccccttatttttcggtggtttaaaaaaaaatggcctcttcccata

SEQ ID NO: 27509 - DNA, 471 bp, Homo sapiens
  misc_feature (1)...(471): n = A,T,C or G
gcggataacacaacgccgcgcgggtaccgaatccctcgaagagcccatncgnacangcggnggaantcccctgaagccgctcaggctcaagagcaacatggaggtctgcttttaatcgctcctctccgggggcggccataccgaggaggcgtctcttccgtgcaggcaggctctcctggggacctcagagattctctccagcggcagcggaaaacggacaatgggtggattcgggtccagattctggtaggagggagtttgggatcgagatctggaaaaaagcactagactggaagaggacgcgatggagtcggagccgctggcggggacaaaaaccaaaggccggggaaggcgccggtgggaggcaaggcacggatggactttacctgcgcacgcgtcgcagccatctccgcgcacaggggtggccaccgcgactggtgctgaagtgttggcgcgtgcccggcgctccgg

SEQ ID NO: 27510 - DNA, 468 bp, Homo sapiens
  misc_feature (1)...(468): n = A,T,C or G
agaaattacacaaccncgcgccgcagcaggaaaagcccgnaagnnncctcncaanacacaangaagngnggatgccacctccagcctgcaggacggagccccctcccattatcacacagtgttcctgggctctgcagccccttgcctccattgcagccgcagcaagaggcctccacttgtccgtcagggacgctccaaggaaggaaaaagccgcccccggacaggggagaccactgtgttctctgtgggcaggttccgggtgacacacattgagaagcgctatggactgcacgaacaccgtgatggctcccccacagacaggagctggggctctggtgggggacaggacccagggggtggacaggggtctgggggagggcagcccaaggcagggatgcctgccatggagaggctgccccctgagaggccacagccccaggtcctagccagccccccaggacagaatgg

SEQ ID NO: 27511 - DNA, 472 bp, Homo sapiens
  misc_feature (1)...(472): n = A,T,C or G
tggaataaaacaaggccccgcccttatgtanaccatcgacntangnccttcgnacaagcganggaanncgggnaagatgcttcctgcaggtgcttggaccagtatctggtattgggcaggtgcttagcgaaagttccttattaatccctgtacctttcactgttggaagtaactcaggacattggcttggtggttacacaagcactgtgggagaaggtggtgtatctgttcaccctgggtcccagtggctgaggcagagccagccatgcaggaggcaggcgtccagtatgtatattggatggaaggttgaattgcataataaaatatattaaagatttccagagtggaggggtgaggaggtcaacaaaccctctctccaaaatgtacctgtaaatctaaacaaaagtcagaaacaaccatgtcagtgctttggaatttaaccaaaggcaaacagcaaaccaaggagtgttag

SEQ ID NO: 27512 - DNA, 482 bp, Homo sapiens
  misc_feature (1)...(482): n = A,T,C or G
nggccccaatcgagaccatagttcgtgtggcggaattcgctccgtggcagctataactgggactacctgctgagctggtgccctcagttccaaccactggccagtgtcttcacagagatcgctcggctcaaggatgaagctcggccatgtcccccagctccccgtatcgacccaccacccctcatcactgccgtggcccacccaggagccaagtctgtgccccccaagccagcaaacacagctgcagcccgggccatcttcccaccagcttctcaccgctcccccatcagccatgaaggctccctgtcctcagctgccatgtcccccagcttctcaccctctctgtctcctctggctgctcgctcacccgttgtctcaccatttggggtggcccagggtccctcagcctcagcactcagcgcagagtctggcctggagccacctgatgacacggagctgcacatctagctgtggcccaggct

SEQ ID NO: 27513 - DNA, 563 bp, Homo sapiens
  misc_feature (1)...(563): n = A,T,C or G
attcgacctctgtccaccgtggnggaattcaactgccaactctggccctcagaactctcaggtatagaagcccaggatgtctaataccctgtcccagtgcccgagagctgcctggtgtcaggtagagaggacactgtacctgggtgaatgatcagaccctggtagctaagaaggaacttgtccctttgagtcagtgtgcagaccccctttcaggccatgcctctgtgaaccctgtattgctggggccggaaggagcccctgagcctagccccttcccgtctgccctgtgtcctcactgcgtgtgggtatgacctctgcctggtggctggtgtatcccaactgggcaagagatggcagagggtcccccttgtgggtgcgcttggatgtgcagagccttctccatggattntcttccctgtaagtgccgggcccctcaccccagctgacaggctggtgctgtgcctgctcacacctgctcctgcaggcacactgggctagggacgaggaacgagcagccacaagtggtagaactgccttggtggacaccagcctcgccctgtctt

SEQ ID NO: 27514 - DNA, 459 bp, Homo sapiens
  misc_feature (1)...(459): n = A,T,C or G
cgaaataaagccgccgggtaggaaacctctaatgancncatcanaaccngcacaaggaggggctggtgctgcgcgtgctgcgggcgctgcgcatcctgtatgtgatgcgcctggcgcgccactccctggggctgcagacgctggggctcacggcccgccgctgcacccgcgagatcgggctcctgctgctcttcctctgcgtggccatcgccctcttcgcgcccctgctctacgtcatcgagaacgagatggccgacagccccgagttcaccagcatccctgcctgctactggtgggctgtcatcaccatgacgacggtgggctatggcgacatggtccccaggagcaccccgggccaggtagtggccctgagcagcatactgagcggcatcctgctcatggccttcccagtcacctccatcttccacaccttctcccgctcctacctggagctcaagn

SEQ ID NO: 27515 - DNA, 468 bp, Homo sapiens
  misc_feature (1)...(468): n = A,T,C or G
aggtagtgcctacggaagccctaccgagaccatcggaagngcggnggaantccggcgggagcggtgactactatcccatcatctacttcaatgactactggaacctgcttatggactactaccccatcaacgagagcctggccagcctgccgctccgcgtctccttctgcccactctcgctttggcgctggcagctctatgctgcccagagcaccaagtcgccctggaacttcctgggtgatgagttgtacgagcagtcagatgaggagcaggactcggtgaaggtggccctgctggagaccaacccctacctgctggcgctcaccatcatcgtgtctatcgttcacagtgtcttcgagttcctggccttcaagaatgatatccagttctggaacagccggcagtccctggagggcctgtccgtgcgctccgtcttcttcggcgttttccagtcattcgcggtcctcc

SEQ ID NO: 27516 - DNA, 483 bp, Homo sapiens
  misc_feature (1)...(483): n = A,T,C or G
gggacaaatcgagccatnattgtagaccctaggccgngcggnggaattccgatgaggctgcctggcttggagctcagccaccgccaggccatccccgtcctgcacagcccgacctccccggagcctcccgacaccacctccccggagcctcccgacaccacctccccggagtctcccgacaccacctcccaggagcctcccgacaccacctcccaggagcctcccgacaccacctcccaggagcctcccgacaccacctccccggagcctcccgacaagacctccccggagcccgccccccagcagggctccacacacacccccaggagcccaggctccaccaggactcgccgccctgagatctcccaggctgggcccacgcagggagaagtgatcccaacaggctcgtccaaacctgcgggtgaccagctgcccgcggctctgtggaccagcagtgcggtgctgggactgctgctcctggcc

SEQ ID NO: 27517 - DNA, 468 bp, Homo sapiens
  misc_feature (1)...(468): n = A,T,C or G
tgaaatataaagccgccccgcgattgagngcatcgactgagcnctctagaacangcggnggaattccaggatcaagtgattctcctgcctcagcctcctgagtagctggtattacagatgcttgccaccacggctggctaatttttgtatttttagtagagatgggattttgccatgttggacaggctggtctcgaactcctgacctcaggtgatccgcccaccttggcctcccaaagtgctgggattacaggcatgagccaccacgcctggccgcagttgagtcttgagatgcttgcagccctgtgagacaccttgagctgaggcaccagctaagccactccagggttcctgacacagaaacagtgacatgatagatgtttgtgtcctgctgctatgctttggggtaagttgttaggcagcaatagatagctaatacatgtgtttatgtagaaaagtcttcttggtt

SEQ ID NO: 27518 - DNA, 460 bp, Homo sapiens
  misc_feature (1)...(460): n = A,T,C or G
ngaggttcnnncactgagncccctgagatctacgaaggcggggaattccactgcacagaccccggaagtgtctcctattccttcactgaagcggaaaatctcttgtttttaaaaagagataaatggggtgttaggtccttggcactttccttcttttccaactgggagaatcctttctccctgccttcttgccctgccctctctgtagcccccaccctcctgccaagctgcctctgggaaggaagaaacaggagctaggcagaagccttgagcagggaagagttcttcccttagccctgactttacttgctgtgggaagagagatgagggtcagataggtgggaggactaacttccagggtgccaagaaggaagaaaagccccaggttctcttttcttattgaggaacgatccgaccacctcacaggcctgccctgcagctggaagactcggcgctctaa

SEQ ID NO: 27519 - DNA, 466 bp, Homo sapiens
  misc_feature (1)...(466): n = A,T,C or G
agagggcncnnccctgagaccatgagtatctggcgaaancngccggtcgagcgcgcgaacaaacggacagagctcgcttaaatcccaatgtctcactcccttgccagggatacctcagggagcatacgcgaccccacgagctccaacccatccctccagggtctaagaaagcactatttctggagccaaggaggagactgtggccaccctcaccatgaccgaccgggtgcccagtcctctctccacagtggtatccacagccacaggcaatttcctcaaccgcctggtccccgccgggacctggaagcctgggacagcagggaacatctcccatgtggccgagggggacaaaccgcagcacagagccaccatctgcctgagcaagatggatatcgcctgggtgatcctggccatcagcgagcccatctcctcctgctctgtcctgctgacggcgtgctgcatgaag

SEQ ID NO: 27520 - DNA, 442 bp, Homo sapiens
  misc_feature (1)...(442): n = A,T,C or G
aacttgatagaactttgatagagcgtggnggaancccagnagacctagcctataattcgttcaatattgatgtgtttaaaaattaaaaattctacctatattaaaggccaaaatataacatggagttatgacagtcagggtttatttagcatttctataagccagtagcctttcaatttattctgcatgtattcagtggtggtggtagacaactggttttgagtcaaaattgcatataggatcacattttcttgctaattcaactttcttagttctaggttggtaaatattgtagaaaaagcaaaatgtttcccacatgtctacagattttcttgctttaatagcttcatttgtgattttgggaaccagaatatttttaaataaaacaagtcatttattcctggaataagtccctatgccatgcatgtcttgagattagaag

SEQ ID NO: 27521 - DNA, 464 bp, Homo sapiens
  misc_feature (1)...(464): n = A,T,C or G
cgatatataaancccccgccccaattganaccatctantgatgncatcanaaccngcctgcgccttgataggcctcccgggccctttctctgaatggggaagcactgttgatacgtgatccaagaggtactgaggtctgacttaaaggtccttctggctcctgaactgaaacctgtgggggaggcagtcacggagcggggagaccagatgggcagctcccctggctacctgggagaagctgttgccagccttggtgggccagtggagtcaggtgaggatctggccatgggtttgaagctctgggaagactgagttgcttctccaatagtcaggacccaagatctgtttctgccttcagacagaatgcggtcagctgggcctccctgtcggcctctgtgctggccagatccatggcagcctcttaggacctgtgtgagcttcttgccactgcactctcccttgca

SEQ ID NO: 27522 - DNA, 442 bp, Homo sapiens
  misc_feature (1)...(442): n = A,T,C or G
caaatacctccaaactgctgcttaaaacaacattcagcatttgttatcccacacaccttttgtgggtcaggaatttaggagtggcttgaggtcccttctcaggttgcagtcaactgaaggcttgatagggcctggaggatccaattgcaacatagtgcattcacaaggttggcagagttcttgctggctgttggcagaagcttcagttccttgcacatggaacctcttcatagggctgcctgagtttcttcatgatactgcacctggctttccagaagaaaggattcatataagagcaaggtgaaagctgcaatgtcttttatgacgtagccttggaagacattattgtcaagagtttgaataccaggaggcagagctcactgggggccattttgtgggctggttaccacagttctcatgaaaatgttagtgaatagaatan

SEQ ID NO: 27523 - DNA, 480 bp, Homo sapiens
gggccgcatcgagaccatagttcgtgtggcggaattccttaccgcactcagtcatcagcctcattggctgcttcctatgctgcccagcagcatccccaggctgctgcctcctaccgcggccagccaggcaatgcctacgatggggcaggtcagccgtctgcagcctacctgtccatgtcccagggggccgttgccaacgccaacagcaccccgccgccctatgagcgtacccgcctctccccaccccgggccagctacgacgatccctacaaaaaggctgtcgccatgtcgaaaaggtatggttccgaccggcgtttagccgagctctctgattaccgccgtttatcagagtcgcagctttcgttccgccgctcgccgacaaagtcctcgctggattaccgtcgcctgcccgatgcccattccgattacgcacgctattcgggctcctataatgattacctgcgggcggctcagatgcac

SEQ ID NO: 27524 - DNA, 460 bp, Homo sapiens
  misc_feature (1)...(460): n = A,T,C or G
cgaaaaaaacgccgccgggggatggnaccatgattgtgccatgaaaacncnctnancaaccatcttgccatcaatctgaatatagttttcaactgaaatcttatggcgtgcccacatgtcaaataggtggaacttcgctggctgactgcgagcggagagccagagcctcccctaacctaggggcaacatcaccaccacagaactcccaggctctcccggaccaggctcccttggccatcatataaacctccagggccactcagcccatctcagccctggccacaggggactggaaacacgctgctcttcctgtctgaaaactcgaaagttcccaccgcttttactcacacccacagccggtcatcagaaatcctgctggctcccctcagaagcccagcagcccctctatgggggtccacagcccaggctctatgccccttgccttgcccactgcttctaa

SEQ ID NO: 27525 - DNA, 475 bp, Homo sapiens
  misc_feature (1)...(475): n = A,T,C or G
tggagtgcnnnnnnnattgagattcgatgaccattagtcagngcggtggaattcgtcagcctgaggccggagaggaagggcttttgcctggggtgagagggtgagagacttgacctgaaagcagctgctgcccctgaggtgcagccagagtcctgtgtgcggacagagagaatggctaatgatgctccgcgtggaattgcctattgttttatgccacctgatgtgtctgcatgagaggtttcctttttgttcctttttaagctgctgataaaccaaaaccatgttgtgctactgagtcagccttttcattattgcaaattttacttttactatttaagtgaatgcatagaatccaatttgccaaggttctaaaggcttatgaggtcctgaaggagccaggccttgtgatggagtacgtgacacaggcctgtttgtcctgtcatcagaacggaaagcacgggctggactgaaagga

SEQ ID NO: 27526 - DNA, 482 bp, Homo sapiens
  misc_feature (1)...(482): n = A,T,C or G
gggcncnnattgtagaccatagatcgagtggcggaattcggggagtaggaatcaagggaagcaatcagcatcaggggcaagctgactgtttagatgggcagcagggttgaggccattcgtttattccttcattcagctcaccctgggctggggacagctgtgttgctcttcagagttaccctccaaactgcagtgggattggcaggaggagattctaaacagactcccaaaggtttagaccatcaaatatcagagccacaaaattaccaaacgaaatttcttaacagttttaaaatagaaatctattttttgactcagcagtacatacatatggttctaaatgagacaggtggaagaggacacagtgaaaaggctgttggataacttccactaggtcaagaaattaaattgaaaaaatagcagctactattggaactatgtgatatacaagaaaaacaaactatggaactagtaatatgaca

SEQ ID NO: 27527 - DNA, 485 bp, Homo sapiens
  misc_feature (1)...(485): n = A,T,C or G
tggcacncaatcgagaccataaatcgtagaccttagtccangnggnggaattcgtccaagacagggctcagttttgcacttatctcgaatttgaagagattgctgacgcccgagagcctcgctttttcatccttctttccttgttcagcaggctagacagaaacatgtcttgactgttagttgtccacaaatcttcagtattttctccacttcatttttaagaaaggaagcaacagatagatgttgctctttcacctgggtgtctgggctcaagctttcccgcccagcctcacttcctttgcccttcctcctgcctttctcaactgtcccaaggagggggcctcattgtgtctcccgtgcatgctctgcagcattgaagtatggtgtgttcacgtagttctagcagtccccagctgagtgagtgggagagtacctgtgtgtttcgtaacggccttgatccccttgatagatgtttggatattttg

SEQ ID NO: 27528 - DNA, 480 bp, Homo sapiens
  misc_feature (1)...(480): n = A,T,C or G
agagggtnnnnnactgagaccatgagagcgtcnggaanncgcttcggcgggcaagcgggtgtaatcagcagccatccgttcttgggcatggtggcttccgaccgcggggaccccgagagtctcttgtcggccgagtagcagccaggaaggagagactgggatggttttttatctgttgctttcttaaatcaagggccgccgggccggagatggatggagggaccggggatttgggaactcgaaaacgagctgagggaagggagcctgtggaaatagactggagtctgggtagtgtcgtttcctagagaatggtctcgaagtaacttctcggtaaagtcttcacggaatttccagaccacacttgcccactgggaggcttttaggacccgagacgtgtgcaggcttttccagccaaaatgaagtttaatccctttgtgacttccgaccgaagcaagaatcgcaaaaggcatttcaatgcac

SEQ ID NO: 27529 - DNA, 482 bp, Homo sapiens
gcccccaatcgagaccactatttcgtgtggcggaattcggcaaagagaagaaggagaagcacaagaccaagacagctcaacagattgccaaggacatggaacgctgggcccgcagtctcaacaaacaaaaagaaaacttcaaaaatagcttccagcctatcagctccctgcgagatgacgagaggcgggagtcagccactgcagatgctggctatgccatcctcgagaagaagggagcactagccgagagacagcacaccagcatggatctcccgaaattggccagtgacgaccgcccaagccctccgcgaggactggtggcagcctacagcggggagagtgacagtgaggaggagcaggagcgtgggggccctgagcgggaggagaagctcaccgactggcagaagctggcctgtctgctctgccgacgccagttccccagcaaagaggcgctcatccggcaccagcagctctcagggctc

SEQ ID NO: 27530 - DNA, 472 bp, Homo sapiens
  misc_feature (1)...(472): n = A,T,C or G
gagcgggnnnnnncnnaatggagnccanactgagacctctgnccgngtggnggaattcgtggctgggagccagggtgctctctggaggtgcagccagagatccaaggtcaaccctggagggacaggcagttcctggttttttctaaacattagcttcgaaacttccagagttaacacgccggaatcgtgttgcatattattgagcttccagtctggggtgctgcgtggaccacgttgaatgcccagggactccgttgggcagatagaggggtgtcaggagcatggagtcagcccggctggcctgcaaactgcagatgctggaaggcccgtcaggtgggacctcccgtcaccaagcagatcttaacaggcctctgcttcttggtggaatgttctggtacattggcaggatgcactgggaaaagctaccatcctcaggccatgtcccccacacagtgtcattttcctccatttc

SEQ ID NO: 27531 - DNA, 480 bp, Homo sapiens
  misc_feature (1)...(480): n = A,T,C or G
gccccccatcgagncccctnnnnnatagtagaccctagtcagtgtggtggaattcctgaaccgaacgactactctagaatatatggactgaatattccatgagagcccacgaagctgctgatactagtgtatttaatttggaaatgagacttttgagacaatcttatgcggaccaggaaggattcgcttcactattatttacttacctgagtgaagaggtccttactgatggaaagatttcatttgctaacttttttcaaggtggcagaaaaggtgttttacttgaagaatttgaggagagggaagacttactgatttgcattatcagtcagtccccaattaccttggcataatcagtcccattatttagtgttactcatttttaaccagaactgtctgggtgtatcagagcacaattgggaagatgggcttcttatgtagttcagcctcctttaggggcctaatgaaggaagacttata

SEQ ID NO: 27532 - DNA, 472 bp, Homo sapiens
  misc_feature (1)...(472): n = A,T,C or G
cccccttgagaccctagcaatagaaggcactccagcttgncagactccggcaccaagcgcatggcggctggagtccgcatggagtgccagagcaagggacgatgcccctcgtcctgccccctgtgtcatgtgacatccagccctgacacccctgctgagccggttctgctggaggtgaccaaagcagcccccatctatgaactagtgaccaacaaccagacccagaggctcttgcaggaggctaccatgagctctctctggtgctcagggactggagatgtcatcgaggactggtgtcgatgtgactccactgcttttggagctgatggactccccacctgtgcgcctctcccacagcctgtgctgagactctccacggttcacgagcccagcagcactcttgtggtcctggagtgggaacactcagagccaccaatcggggtgcagattgtagattacctcctccgtcaaa

SEQ ID NO: 27533 - DNA, 474 bp, Homo sapiens
  misc_feature (1)...(474): n = A,T,C or G
agggggnaatcgttgacctcactagtgcagtgcggtggaattcgcgatcttggctcactgcaacctccacctcccaggttcaagtgattctcctgcctcatcctcctgactaactgggactacaggtgtgtgccaccatgcccagctgacttttgtatttttagtagagacgaggtttcaccatgttggccaagatggtctcgatctcttgagctcatgatccgcccaccttgacctcccaaacatggacctgcatttctacccagacctgcactactgtactacacggcatttccacactggcctgcatttccacactggcctgcatttccacacaggcctgcatttctgtgtggccgcaatcactggcactggccagcagctgcctgctccttaccccagactcctctgcttcccagctggtggtggcaggtctctgagttgtcaatcctaggactagaggctccccagggt

SEQ ID NO: 27534 - DNA, 485 bp, Homo sapiens
  misc_feature (1)...(485): n = A,T,C or G
aggggtgacaggnggnnnnggactgagaccctttcgagaccataggaagngcggnggaattcgcgagagagagcggggaggagggcgggtgggagggctcttttttttggcccccgttccatgttccctgcttcactgtaagctttcgagcaacagaaactaggctaagattgcagcctgcagagactccaagcggagtcggagaaatttggcctcgttttaatagggctgaggaatgaactccggaggtcaataaagccctccaaaaatgatgaatgattgagcacctgtgatgatgatagtgattaccagagcaattaaacagtttgattaaatgagccatcataacaatgatgtctgcgggaaatcggccctcacatataaagaaagatagtgcgaaggggctggcagaggcgcggatagcgcgacgccagggagaggggctgcgggccgcgaggtttctgcccaatggcccgagcagggac

SEQ ID NO: 27535 - DNA, 469 bp, Homo sapiens
  misc_feature (1)...(469): n = A,T,C or G
gggggtntccngnnaattgaaacccctgagatcactcggacangcggtggaattcctgtagctgttttgggccctcctgggtttggcttcctgtataactgacagcacctatcaatcaacactttaagatgacagaaataccaaagtacctaaaacatgctaatatcttattttaatacagaggtcactctgcatgtgtctaattcatccattctgattctttcatttagaacagcaagtcttagtgtcttttattatttctctttctagaagactcactccatagttcatggccccgtgatccagagtccctgctggcgccttcgagtggggcaggctgagaactcaagctgtaactaatgtctcctccgaagaaaactaaaccgagggctgagctgatgtgaagttttccgtggctgcattcatacaaatggtgaaaatgtagcatacctcccctcaaaagcctgaa

SEQ ID NO: 27536 - DNA, 484 bp, Homo sapiens
  misc_feature (1)...(484): n = A,T,C or G
tggggtttccaggnggggnnnaactgatagcccctcgagaccctcggaagngcgnggaantcggcagtgtggtgtgacagggaggggctcgctgggcttcagcccctgcactctccacttgacctcagcagctccaggtagaggggggagaactcagcgtctccttctagaacaggttccaggatccaacactgaaatgagggtgaggtggttttagcatcattttatcactcttgatttagtttattaatcatacatgattattgattataattgttgctgggcatcctgaggcctcagaagttcaccctttgccctgaccccatgggggccctgcccccgccttccgggaaggacaaacacgggaagaggtcagtgcccgagccacccccaccgccctccctcggggcctcattgctgcagacgctcaccccagacactcactgcaccggagtgagcgcgaccatcatgtccatgctcgtgg

SEQ ID NO: 27537 - DNA, 487 bp, Homo sapiens
  misc_feature (1)...(487): n = A,T,C or G
tggggtcccccggncggggnnttttgaaaccccatcggagaccctaggaagngcggnggaattcgggggcgttctctcgagtccgggccgcaagtcccagacgctgcccatggaggcgtccagcgagccgccgctggatgctaagtccgatgtcaccaaccagcttgtagattttcagtggaaactgggtatggctgtgagctcagacacttgcagatctcttaagtatccttacgttgcagtgatgctaaaagtggcagatcattcaggccaagtaaagaccaagtgctttgaaatgacgattccacagtttcagaatttctacagacagttcaaggaaattgctgcagttattgaaacggtgtgaagacggattctttggttgataaattgctatcattctaaagtcatggacttcactttcggcaacaaaactaaataaggatggaacatttattgaatgaaaaatgcacttttgtttttccat

SEQ ID NO: 27538 - DNA, 460 bp, Homo sapiens
  misc_feature (1)...(460): n = A,T,C or G
aggcgctnnnnnnaaaagacagtagacgacagtccagncnggtggaattccctaagcgtcgtggagcattgttctgccacagccctgcatactgaccccgggaggctgggcaggtggacagccccagccaccaccttcagcctagcctgtcccccaaggatggtgaagctcagcaggggtctgagggtagccggccagaagaggctggaacctcctgctcaagtctagacccctacttctctgctgcccccaccctgccagagctgatgtttccaataccaagatgtcttcacagggcacagcccctgcagagcatcttggtcatttggaagaggacacggtatcccctctggccagagtatgtcagagaaggaagagtagggcttttttgttttgtttttttttaaaggtgcttgcttgtttaatgtaaataatagaaagccttaatatcttttctgta

SEQ ID NO: 27539 - DNA, 459 bp, Homo sapiens
  misc_feature (1)...(459): n = A,T,C or G
agcgtagcnnncattatgactanagcattngcggnggcattcattaagggagtttgcagagagtgagggaggcaaaacttgaaaagggcctgcaacactttataccttctcaggttcacccacatgaaacggctgtgctgagtgtgctgccggtgcccggggagcttctctgactgtgacccggcagaggcttctgtggcggtgcatgagcggccctacagtggagggttctctttggaaacaaacagccctgcttggtttcagtttgaggccacttatcttcaatgtgacatttcttgccaagccctgtgacactccccattgatgactcccataggtacagataaagttaagaacaggaaacagaagggtaggatgcatagggagggagagaagccctgaaaactttttttttctttttgaagcatggaaaacaaatcttttatgccactccagcca

SEQ ID NO: 27540 - DNA, 448 bp, Homo sapiens
  misc_feature (1)...(448): n = A,T,C or G
attgaagacccttagncctgtgatggcgaattctggngatcaaggcactcctggaagtaagtttgcatttggaatccaggcaaggtggtgaagataccacgttttggtggtgagtggtaggtagatgagcaggaaggaaggtggcaaggatccagcagtaatgcttaatgactgctgtgttccaggcactgctctggtctatggtgtatcctaactgctgtgttccttgaaatagccatgcaaggtgtgatcattagtgtctttatccagccggggcagctgagggttgtgcagggacacacagcatgagaaccagaggcaggatgtgaacccagctgtccagctgtggaatctgttctcgagccatcactaggccttccagaggcttgaactgttgctaaagtcaggggattagagaactggagatatggttgggctttgtcaagac

SEQ ID NO: 27541 - DNA, 504 bp, Homo sapiens
  misc_feature (1)...(504): n = A,T,C or G
ccccagctgaccagctgctcatagcccctgccaactccccgctccagtaccccctacagggtgtggaagttcagcccctcaggagcatcttggtgccagggctgagccttcaggcagcttctggtcaggaggtataccaggtgaacctgactgcctccctaggcacctgggacgtggcaggggaagtgactggagttactctcactggagagggtcaggcagatctcacccttgtcagcccagggctggaccaactcaacaggcaactacaactggtcacttacagcagccgaagctaccagaccaacacagcagacacagtccggttctccaccgagggacatgaggctgctttcactatccgcataagacacccgcccaaccctcggctgtacccacctgggtctctaccccagggagcccagtacaacatcagcgctctagtcacgattgccaccaagaccttcctccgttatgatcggctacgggctctcatcaccagtn

SEQ ID NO: 27542 - DNA, 563 bp, Homo sapiens
  misc_feature (1)...(563): n = A,T,C or G
tgtttgccnnngnnccnnnnaatcgaaccacagtcgagtgtgcngtaattcgggaaagcttttaggtggatctctcgcctgagtcagcatcagctgattcacactggagagaagccttataaatgcaacaagtgtacaaaagcctttggttgtagttcacggcttattcgccatcagagaactcacactggagaaaaaccatttaaatgtgatgagtgtggcaaaggctttgttcagggctcacaccttattcagcatcagcgaatccacactggagagaaaccctatgtgtgtaatgactgtggaaaagccttcagtcagagttccagccttatttaccatcagagaatccataaaggagagaagccctacgaatgcctccaatgcggaaaagccttcagtatgagcacacagcttacaatacatcaaagggttcacactggagagaggccctataaatgtaatgaatgtgggaaagccttcagtcaaaactcaacccttttccaacaccagataattcatgcaggggtgaagccctatgagtgcagtgagtgtggaanacn

SEQ ID NO: 27543 - DNA, 455 bp, Homo sapiens
  misc_feature (1)...(455): n = A,T,C or G
ctcgatccccctnnnnnnatgatgtcttttagaccagcnggnggaattcggcgcttcgggagccgcggcttatggtgcagacatggccaagtccaagaaccacaccacacacaaccagtcccgaaaatggcacagaaatggtatcaagaaaccccgatcacaaagatacgaatctcttaagggggtggaccccaagttcctgaggaacatgcgctttgccaagaagcacaacaaaaagggcctaaagaagatgcaggccaacaatgccaaggccatgagtgcacgtgccgaggctatcaaggccctcgtaaagcccaaggaggttaagcccaagatcccaaagggtgtcagccgcaagctcgatcgacttgcctacattgcccaccccaagcttgggaagcgtgctcgtgcccgtattgccaaggggctcaggctgtgccggccaaaggccaagg

SEQ ID NO: 27544 - DNA, 576 bp, Homo sapiens
  misc_feature (1)...(576): n = A,T,C or G
cgggtcctnnnagtnnnnnnnaggnnnnnnnggttcgaacacattcgatccactatccatgtggtggaattcgtaggaccatccaagaaagggcagaagaccaagggcagtcggggtctagaaaggagggcgctggccctgctgggcgcttcggagcccccactgtttcccactcagctttgtgctcagatcccaggtcccaaggagtgacaggggcttcctcccaccttctgtccttgtccagtcatgtaaataatgtgctttttctctccccgagtcttttttttttaaacctaccgtggttcctcagctaactgcattccctacccaggcagagactgtcctatgcctcgagcttccaaacgagactcagaccgcgacacagccaccgtatttatggaatgacaaaataaataaagcccaaacccatcggtctctgtgaagaaagaatattggaagaagaggaaaaaagataaaaaagacataattnnnnnggggggcatgtggattagaggccngtaaaaccgcgtcaatgccccctgtgctgccttttataattgcaacgtggttatgatc

SEQ ID NO: 27545 - DNA, 464 bp, Homo sapiens
  misc_feature (1)...(464): n = A,T,C or G
cgcccgccatagatnnccntcggcctgatgaccatagtaagngcggtggaattcggcagagcacgtatttctgccctctagtacctctgcatttgtgagtgttccctctggctttctgaagggcagcagactcttgagtatactgcagaggacatgctttatcagtaggtcctgagggctccaggggctcaactgaccaagtaacacagaagttggggtatgtggcctatttgggtcggaaactgcatgtttcagaaagtttgtctctttttcctactcattatttgaagaagagagagcctgtggggatagccttatcttggtccacaggactgaagtgaagtcacttgggaaggggagacagaggatgagcggcgtctgtgtagggacccccccccgggcctgcagaagggtggtgtgctcccaggactggcatgacaggtgtctcctcctcaccacaggct

SEQ ID NO: 27546 - DNA, 475 bp, Homo sapiens
  misc_feature (1)...(475): n = A,T,C or G
agcgggcannnnnttttgctgacgtccttagtccgtgtcgtggaattccccttcaccagcgggagcttgatatcccttgtctgtaacatagaccccgggtactgcgggaggggagggctgctggggaggatggggggatgttatataaatatagatataattttattttcggagctaagatggtgttatttaagggtggtgatgggtgagcgctctggcccaggctgggccagactcccgcccaagcatgaacaggacttgaccatctttccaacccctggggaagacatttgcaactgacttggggaggacacagcttcagcacaacctctcctgcgggccagcccgctgcgaaccctccaccanctaccggagggaggagggaggatgcgctgtggggttgtttttgccataagcgaactttgtgcctgtcctacaagtgaaaattgttcagtccaagaaactgatgttattn

SEQ ID NO: 27547 - DNA, 456 bp, Homo sapiens
  misc_feature (1)...(456): n = A,T,C or G
gcccgccactgaaatcctcggactgancgccgctcgacaggcgctgaacctggagacttcccctgcgtgaacgaagccattgaccagcgcattcagcagctgcgttcactgcaagaggagtgcgaccggaagctcatggcgctgagagacgagatctggattgacctctacgagctggaggaggagtattactcgtccagctcaagcctttgcgaagctaatgacctgcctctgtgcgaagcttacgggaggctggacctcgacacaaactctgatgatggcctctcggcccctctgctggcgtccccggagcccagtgctggccccctacaggtggcagcccctgcccactcccatgctggtggccctggccccactgagcacgcctgagcctccggggccacgcttcgttctcaggaacaaaacctgaggcaggcctttggatgccctcacagc

SEQ ID NO: 27548 - DNA, 462 bp, Homo sapiens
  misc_feature (1)...(462): n = A,T,C or G
gcccgccactgaaaccntcgnactgatgaccctaggaagagcggaggaattcgccatcagcaccaccaccagcgacttgtctgcccgggaggatgcaacaccatctgtttccaccggccacctttcagtgtttcctgctttccaagtaaagataccagcagtgccctcagagcagaccagccagagtttttctgaagcctcccacagggtgctccccggaggaggcccgagatgctctcgtgactttggagccggggtggctggccaccttggcctgggcatctttggggtgggcttcgggagcccggcactgctgcagagtgtggtggatgagaacagctgctgcttgctgtacgtggtggaggaccagctgtgtgatgtggagcaagccttcaaagctgagcatttgggccaacaccagagtggttcgggaacaggatgcagacattgtcctcaacgacc

SEQ ID NO: 27549 - DNA, 574 bp, Homo sapiens
  misc_feature (1)...(574): n = A,T,C or G
cgcgcatcgaacactagtccgtgtggtggaatccggacaactgactntctgctttcacctttgcttgtcaactctcccttctcctcattctcttttaatgttaggccccttctccagtcttttccttttactctggtcttttactcgtttttgtatccatttttatttagccccatcacatcattgcttaaccgctgctctcctcccattttcgcttcaccctctttacagcagcctgtccctctcccgatctcagtgatgatgctctaagtggttaagagttgattccggagccaggctgcctgggtttgaacccagatctatttattagcttggtgacccagagcaagttattctgcctgtgactcaatttcctcacctttaaactggggatcatgctagttagcatttcataggattgttgtgaaatttaggtgagtgaatatatgaaacacttcatcagtgcttagcatatgtaggagagttggctgtcacatgattattcagtcctttagttntgccagaactcatttntgtccctactttctatatgtagactagtttatgtcaaccc

SEQ ID NO: 27550 - DNA, 456 bp, Homo sapiens
  misc_feature (1)...(456): n = A,T,C or G
cgcccccaatgaaaccttcggactgacgcgctcgnaagnacaagccgggaggcggtggctcaagcgctggagctggagatgtttcgagaggttgactactacatttatgatgttctggaccagatgggcgccagtagcctgggcggggagggcccccggcgccacccagatgagccccctgaggatgaagtcttcgagctcttccccatgttcatgggggggcttctctctgcccacaaccgagctgtgctagctcagcttggctgccccatcaagaacctggatgccctggagaatgcccaggccatcaagaagaagctgggcaagctgggccggcaggtgctgcccccatcagagctccttgaccacctcttcttacactatgagttccagaaccagcgcttctccgctgaggtgctcagctccctgcgtcagctcaacctggcatgtgtgcgc

SEQ ID NO: 27551 - DNA, 449 bp, Homo sapiens
  misc_feature (1)...(449): n = A,T,C or G
ggagggccggnnntaggggcctgaaacctccgaaactgatatctccgaanncannnnaggagcnggaaaatgaaggagatgatacatcccagtacttggcacagggcttgcatacagtacatgctcaataaagggagctgttgccacctcttgtggtccctgctagggagggtgaggccttggcgtggaaagtgagaacagagctggtccctactgaggtggacactcttcttgctccctgggagggcaccgcgggcccagggcaggcgctgagtcgcgtgtgctcctctctgattgctgcgcaggtcggccggctggcggagctgggcgcggcgtcaggacgggccaccaggccgggctaggaaggtgtagtgggcctcagcgccgccaagggcggtcccggctcctgtaaccgttgcagtcttctgtcccttcacccaggtgggcag

SEQ ID NO: 27552 - DNA, 453 bp, Homo sapiens
  misc_feature (1)...(453): n = A,T,C or G
gccgccactaaaacctcgcactgacgcccctcgaagnccancccaacctggaggagaccatgggagactacacgtggaccaatggtttctagccctgtgtttacctccaagcccagattcagattccagtcatgtacacaacgcagggtggaggagaggcctggggcatctctgtactgaaccccaacaaaaccaatgtccagggaagctgtgagggtgcccatccccacctgcttctctcattcccctatggacacctcagctttggattcatgccagacctccagcagaaggttgtctacctgagctacatggcgggggagtacaatgtgtccttcccccacgcagcacagaggacattctcggctcataatgcatcccttccatatctccaagcacccctgccgcagaactgtagttgcagcaactcgagcatcattctttcaccagctg

SEQ ID NO: 27553 - DNA, 464 bp, Homo sapiens
  misc_feature (1)...(464): n = A,T,C or G
ggccgccaatgatnaacctccgncctaagcatcntcgnanagngcggnggaantcgaaaagcctagctgtgaccttggaagaagagatgaaatacttttgtcaatagggagccagtctctggcatagtgctcaggtgtgaattgtagccaaactgctgccaactggaagcagcacctctgctggggtgacaggtccattttcttggctctgttggctgttttctgctcctcacttgggcccagctgagcagttcaacagctttgcttctctgtgacatgacagagcccacctgaaaattcatttcttggtggctatggaggtggcttctcaccctgtctcctgtcccagctctaaaaatggattgcccttctgatatgaacatgcatgacatctctggaacatgagtcccatgttctgtgtgcagacagtgtgccagcagcttctcctgtgtgatgtcagtgtt

SEQ ID NO: 27554 - DNA, 501 bp, Homo sapiens
  misc_feature (1)...(501): n = A,T,C or G
ggcgttnaaggggaannnnnnaatcgtagacctcgatcaccgtcgnggaanccaggcattgttcagtgggagatcaggggcaaggagaaggataactatttctttatgtgtgtgtgaatctagaggaaccagacttgtctctggaaatgcaagtgggaagtgggattcactgagaagccatcattctgctcaggtgagtcctgacttcaggcgagggatcctaaaggtgacaccgcgatccttcacctggaaagccaaggagacatgacatcagtgtgtttcacatcctaagcttaaacaaatgtatattgtttttaccgcctctttctcaagggggaacactgcccctgaaactgcactccttgaaaccgagcaaaggtgccatcgctaatgattagcaagacgctccggatggtttgcatcgaactccacctgctatgtgaaaaccccatgcttttctcactttcccattcaagctgcttagcagttgggtcctctcct

SEQ ID NO: 27555 - DNA, 460 bp, Homo sapiens
  misc_feature (1)...(460): n = A,T,C or G
cgcccccatagaaccccctcnnnnaatgatgaccctcagacagngcggnggaattccgcgggtccacgcgtgtgatcgtccgtgcgtctagcctttgcccacgcagctttcagtcatggcctccggtaacgcgcgcatcggaaagccagcccctgacttcaaggccacagcggtggttgatggcgccttcaaagaggtgaagctgtcggactacaaagggaagtacgtggtcctctttttctaccctctggacttcacttttgtgtgccccaccgagatcatcgcgttcagcaaccgtgcagaggacttccgcaagctgggctgtgaagtgctgggcgtctcggtggactctcagttcacccacctggcttggatcaacaccccccggaaagagggaggcttgggccccctgaacatccccctgcttgctgacgtgaccagacgcttgtctgaggattac

SEQ ID NO: 27556 - DNA, 449 bp, Homo sapiens
  misc_feature (1)...(449): n = A,T,C or G
natggtgactatagnacaatgagggccattccgcctccgngggcatgcacctgctgtccccgcccagccggggcctgttccacagggccgtgctgcagagcggtgcccccaatggaccctgggccacggtgggcatgggagaggcccgtcgcagggccacgcagctggcccaccttgtgggctgtcctccaggcggcactggtgggaatgacacagagctggtagcctgccttcggacacgaccagcgcaggtcctggtgaaccacgaatggcacgtgctgcctcaagaaagcgtcttccggttctccttcgtgcctgtggtagatggagacttcctcagtgacaccccagaggccctcatcaacgcgggagacttccacggcctgcangtgctggtgggtgtggtgaaagatgagggctcgtattttctggtttacggcgccccaggn

SEQ ID NO: 27557 - DNA, 475 bp, Homo sapiens
  misc_feature (1)...(475): n = A,T,C or G
nctgagaccttgggaacngtcgnggaantccgagggggcgcggcccagccaggagagctggagaggcagcgaggatcttccctcagattctatctagggggcgcggcccagccaggagagctggagaggcagcgaagatcttccgttagagcccagcgagggggtgtggcccagccaggagggctggagaggcagcgaggatcttccctaagagcgtggcgagggggcgtggcccagccaggagagctggagaggcagcgaggatcttccctcagagcctggcgagggggcgcggcccagccaggagagctggagaggcagcgaagatctttcgttagagcccagcgagggggcgtggcccagccaggagggctggagtggcagccaggaatcttcctcagagcctggcgagggggcggggcccagccaggagagctggagaggcagccaggatctttccttagagcccggcgag

SEQ ID NO: 27558 - DNA, 503 bp, Homo sapiens
  misc_feature (1)...(503): n = A,T,C or G
ggggtttacgganannnnnnnaattgaaacccttgtagaacactagtccagngcggnggaattcaggggaaggtgtgcaaagctggaagtcctgcggggcatgtctgtgttctgagtcagggccctgaagagatctctctgcctttgtgggctgtgcctgccatcgtgggcagctgcgcaaccgtcttggccctcctggtccttagcctgatcctgtgtaaccagtgcagggggaagaaggccaaaaatcccaaagaagagaagaaaccgaaggagaagaagaaaaagggaagtgagaacgttgcttttgatgaccctgacaatatccctccctatggggatgacatgactgtgaggaagcagcctgaagggaacccaaaaccagatatcattgaaagggaaaacccctaccttatctatgatgaaactgatattcctcacaactcagaaaccatccccagcgcccctttggcatctccagagcaggagatagagcactatgn

SEQ ID NO: 27559 - DNA, 449 bp, Homo sapiens
  misc_feature (1)...(449): n = A,T,C or G
attgagacctgaggacgtgcggnggaactcctggaaacgcccgagttttctggcgacggggcccacgcgctgagccggcggtcggtgctggatctgggttcgggcaccggggccgtggggctcatggctgctaccctcggggctgatgttgtagtcaccgatcttgaggaattgcaagacttgctgaagatgaatattaatatgaacaagcatcttgtcactggttctgttcaagccaaggtactgaaatggggggaagaaatagaaggctttccttctccacccgacttcatactgatggccgactgcatatactatgaagagtctttggagccattgctgaaaactctaaaagatatcagcggatttgaaacttgtattatatgttgttatgaacaacgaacaatggggaaaaatccagaaattgagaaaaaatattttgagaaatt

SEQ ID NO: 27560 - DNA, 451 bp, Homo sapiens
  misc_feature (1)...(451): n = A,T,C or G
cttgaccccctcgnnnatgatgtcctctagaccgggcggnggaattcgttttaaaaacaattcctcatgaacactaagattaattgtgtctgtatctctggaactgggtgctcatgttggttttaatgagcttgcaacccttccccgtttgctttgtttaaggaggtgcctctgttctttgtggaggagtgaaatggagctttaagtgtgtgtgtgtgttatgtgtgtttgcacacacgcgtgtgttattgtagcaataacaaaaagtagccatctccttgttccagctgaaaacctgctgtgagagttttgacagagcactttattttcgtcaagtttcaagtctgagttcaaaaccagccctgatcccttatgaccaactgctactcgaccagtcgccactcagtggccacctggtgcccgtttagatttttgcttgggttttactggg

SEQ ID NO: 27561 - DNA, 458 bp, Homo sapiens
  misc_feature (1)...(458): n = A,T,C or G
cgccccctttgaccccctnnnnaactgatgtctatagacagngcggnggaattcgggattaggggttcgtctaaggctccccagggcctggctctgacaaagcgtctgcaactaatgatgcttcttgagctctggagacaggatttatgcatctaataaagtctgtaactccaggcttaagggccgggggcaggaggctgagagcatgaagtcctgggggcgccatgggaggagatcccaggtggctcctaatgagccctgcatttccatttgcctgctctagattcccctaaggctactgtgaggctgggggtgggggaacagcaggtataagaggttggggtggctgtaggagggtaggtggcagcatggattctaggcaggctgctgcactgctggtgctgctgctgttaatagacgggggctgtgctgaagggccaggaggccagcaggaagaa

SEQ ID NO: 27562 - DNA, 440 bp, Homo sapiens
attgagccttgcattgaggccattcgaagctcgagccatatggagtccgtcagttgctccgctgctgctgtcaggaccggagacatggagtcccagcgggacctgagcctggtgcctgagcggcttcagagacgcgaacaagaacggcagctggaagttgaaaggcggaaacaaaagcggcagaaccaggaggtagagaaggagaacagccactttttcgtcgccacctttgctcgggagcgagcggccgtggaagagcttctggagcgcgcggagtcggtcgagcggctggaggaggcggcctctcggctccaggggctgcagaaactaatcaacgactcagtttttttcctagccgcttacgacctgcggcagggacaagaggcgctggcgcggctgcaggcggccttggccgagcggcgccgggggctgcagcccaa

SEQ ID NO: 27563 - DNA, 492 bp, Homo sapiens
  misc_feature (1)...(492): n = A,T,C or G
cgccggttccnggggnaaattgagnnaatcgtagacctctagtccgtgtggtggaattctcccgcagagatactgactgtgggacctgcctgcctggcttctatgaacatggcgatggctgcgtgtcctgccccacgagcaccctggggagctgtccagagcgctgtgccgctgtctgtggctggaggcagatgttctgggtccaggtgctcctggctggccttgtggtccccctcctgcttggggccaccctgacctacacataccgccactgctggcctcacaagcccctggttactgcagatgaagctgggatggaggctctgaccccaccaccggccacccatctgtcacccttggacagcgcccacacccttctagcacctcctgacagcagtgagaagatctgcaccgtccagttggtgggtaacagctggacccctggctaccccgagacccaggaggcgctctgcccgcaggtgacatggtcct

SEQ ID NO: 27564 - DNA, 484 bp, Homo sapiens
  misc_feature (1)...(484): n = A,T,C or G
agaccaaaatcgagaccctagnctttgaggngcaattcgatgcctgtggagcagtgcccatcccagcccgtttctgcccaccagttgttctcaggaaccttacccatgctccagcgtccttcacctggcacaggacatgcaagataaatagggcaggcacgtgtttgggtgtcctctcttttctgataaaatccatcccgtgtttgccacacgccctccagtcctcagttcccactgtctaacgtctgcccccgtgtagatactgagaggtggcggcagtaattgtggccttatcagccgctcaggtccaggcttttgcccaggtcactgttgccccatgttcggagaacctggcccacctgtcttggctttctcatccttcccaacccagggccgtttatttcagaagctttctggccactgggcttggatgcttcgggcttctgactgctccatangttttgactggggaaacaggggccca

SEQ ID NO: 27565 - DNA, 456 bp, Homo sapiens
  misc_feature (1)...(456): n = A,T,C or G
ctttgaccccccttcgnnnnatgatggtcatctgacagngcggnggaattcgcttcttggcaaacatgctaggccggatggagcagaggtttctgttacatgctgtagtctcttattaatgaatcaatccaagaacacgttagagaatctgaagtcaacacatacagatttcatatattttaactttataatttatatttcttgtcagagtgctcccaacttgctgtaaatattttcgcttttgaaagttccaacaaagactgtgaagtaagacagattcaaaatcatatcttcattccttgtatttaacaggtactaccaaactttacttttaatactatcacaaattggaaagcaaatccttgcatatcgtagggcttaattttttattggaggaataataacatgcagactgatgcagtttgaaacattttcttcccatgtgtgtgtctatgt

SEQ ID NO: 27566 - DNA, 451 bp, Homo sapiens
  misc_feature (1)...(451): n = A,T,C or G
aatgatgaccactagnccattgcagngcaattcagcagggatagaaggacttcctgcttattttctgttcacatttccactgaccttcaatcctgtagactgcaaagattgagccagctgagcccccaaagagactcagcagtgcagaatgtgggcctgagtgggaggactgcccagccgcccaccttccagctctgttcttcccgggccctggatgcttcttgccacgctgtcctctgaaatgacgctctgccccagcagacctgtgcgggcccagcacagggatcacattgtcggggtgacctggatcctacttgaagcctttgagctggactgtggctttatccctgaggccaggcttcatgtccagatggccatgccataggttgacgtggcagagaaggagtgtgacacaggccagtggagcgagtggagccagcctgtgtgcttt

SEQ ID NO: 27567 - DNA, 477 bp, Homo sapiens
  misc_feature (1)...(477): n = A,T,C or G
gtggtgagggatgagatcactagtccgagtggtggaccttctcacaatgcggaggaattccgggcttgagcccaaagcatgttccagatcccagagtttgtgccgagtgagcaggaagactccagctctgcagagaggggcctgggccccagccccgcaggggactggccctcatgcttcggcaagcatcatcgccaggccccaggcctcctgtgggacgccagtcaccagcaggagcagccaaccagcagcagtcatcatggaggcgctggggctgtggagatccggagtcgccacagctcctaccccgcggtgacggaggacgacaaaaggatgggggaggagcccagcccctttcggggccgntcgcgctcggcgccccccaacctctgggcagcacagcgctatggccgcgagctccggaggatgagtgacgagtttgtggactcctttaagaagggacttcctcgcccgaag

SEQ ID NO: 27568 - DNA, 452 bp, Homo sapiens
  misc_feature (1)...(452): n = A,T,C or G
nattgatgactatctgnccattgcggngcaattcggccaacctggcctccggctgccctgacaaggtgcgaacccacggcccccagctcctcacagccatgattggcgggctggacgacggggacaaccctcacagcccagtggccctggaggccatgctgggccttgcgaggctggtgcacctggtggagtcctgggacctgcgctcagggctgctgcacgtggccatccgcatccggcctttcttcgacagtgagaagatggagttccggacggcatctatccgcctctttgggcaccttaacaaggtctgccacggagactgtgaggacgtcttcctggaccaggtggtgggcgggctggcgcccctgctgctgcacctgcaggaccctcaggccaccgtggccagcgcctgcaggtttgccctgcgcatgtgtggccccaatctggca

SEQ ID NO: 27569 - DNA, 471 bp, Homo sapiens
  misc_feature (1)...(471): n = A,T,C or G
gcggtcnnnnaatcgagaccttatccgtgcggggattgatgtcgttattgacagatggatcccattgatacccccactgcataaccatgtaagcctatcatcccccacttgcacatgaggaaacggaggtccacagggtggggaagggaagacataatttgtccttcaaatgcgataccggtgagatgtgagaggcagcatccctcataactcagcaaggcagtgggcacactaggaccctcccaggcagatcgggtgcgtggtcgcccccattgcatagcatgggtgggagttggggagaccagacatgggtctcaccacctctgcactggcccgacctctctgcaggcccccaggacagggttagcatctgcttgctggcaggcctggccaccagaagtatttgcttatgtctaaggtccctgtagttgtggttcacaggattggggctgctcctgagattcagcacca

SEQ ID NO: 27570 - DNA, 570 bp, Homo sapiens
  misc_feature (1)...(570): n = A,T,C or G
attcgacaatcgaatcactagtccagngnggnggaattccgccggtgtttcctgcttcaacagtgctaggacggaacccggcgctcgttccccaccccggccggccgtccatagccagccctccgtcacctcttcaccgcaccctcggactgccccaaggcccccgccgccgctccagcgccgcgcagccaccgccggcggcgccgcctcttcttagtcgccgccatgacgaccgcgtccacctcgcaggtgcgccagaactaccaccaggactcagaggccgccatcaaccgccagatcaaccctggagctctacgcctcctacgtttacctgtccatgtcttactactttgaccgcgatgatgtggctttgaagaactttgccaaatactttcttcaccaatctcatgaggagagggaacatgctgagaaactgatgaagctgcagaaccaacgaggtggccgaatcttccttcaggatatcaagaaaccacactgtgatgactgggagagcgggctgaatgcaatggagtgtgcattacatttggaaaaaaatgtgaatcagtcact

SEQ ID NO: 27571 - DNA, 474 bp, Homo sapiens
  misc_feature (1)...(474): n = A,T,C or G
gaggtnnagggatgagaccctngnncnnatgacgacatctagtccagtgcggtggaattctgtgcagacaggctgcggtttgggggagaataaccacggttggcccgaaagggtcttcgaaaagctgcctttcttgctccctgactgggggcagacatggaggggtctcctcaggaccagggttggcaccttccccctcccccagccactccccagccagcctggctgggactgggaacagaactcggtgtccccaccatctgctgtcttttctttgccatctctgctccaaccgggatgggagccgagcaaactggccgcgggggcaggggaggccatctggagagcccacagtccccccactcccagcatcttactctggcagcaccgcctcttaccgccgtccagcccaccccatggacggctttcatgagctccatacacancgctgcttcggtacccaccacacaacat

SEQ ID NO: 27572 - DNA, 462 bp, Homo sapiens
agggttaggtttggacactagccgtttgaggactttgtacaccctgcgggagccagctagaactccacgcggggccatgtcttcacactccttccagatggatgagttgatggaaaccctgtcccttccttgtcccagcttgtcagtcctgggcaggagagaatttcaggttgtgccttggttagaggagctgtgttgggtcctaaacactaggaccacaaaggggagtgaactgtgttcccagggcttgctgacgcccgtggactatggagtcaggatgacaggacagtgcggtgaggggcatctgcgacaggactgcgggctctacccgccctgatgtgggagctcctggagtgggggtgagcagtgagccagggtctgcagggctgtcctctctccacagccaacagccaggccttacagtggggcaggcttagtgactgtgcctcagatatgctgtac

SEQ ID NO: 27573 - DNA, 471 bp, Homo sapiens
  misc_feature (1)...(471): n = A,T,C or G
gtgggnagngatgagacccttgnncnnatcgangaccttagtccatgcggtggaattcgaggaaagcttgagatcttgacacttccagtcttccaattctccctagctggtggccaaggaattgggccagacagggacacggctcactccagctgacaaagcatagcacatgaagcgacaaagacaccccagattgcgcccccagtcagcccagtcttctttccctccctcccctggtccttctcctgatgtgcaactggcaactctggctcagagagtcaaggaagttttgccccatgtgccattgggtgtcatccagagagacctgggtatgggaaagggtggccccacactgggagatgggcacagggaggaaaagtgggttgtgaaggaagaaagtaagtagggagtggactcccttctcttttctccccagccaagactggctgtgtagacttgactatcactaan

SEQ ID NO: 27574 - DNA, 454 bp, Homo sapiens
  misc_feature (1)...(454): n = A,T,C or G
aatgagaccatttganagcgcggtggaattcggaagaccgaagtttttttatggccatattttctactgcaattctgaagagttcatttctcacaaactgtactgactcgaggggcgctgatttcataggatctggtgctgtatatacgaatcttgcaaagctctaactgaacggaccttcttattcctctcccctaacaccatcgtttccactcttctcagtgtaggtaaccgtctatggtgtgttttttcattaatgacaaaaaaaaaaggtttcaactggattatttaaatattggtaaatattgtgcattagggtttgtttttccttttaagaagtatgtcctttgtatctctaagttacatgacctatatcttttcctctttaatagtagttttatgttaacctttaagagatttgtttttcctcaaaggagaatttaaaggtattttt

SEQ ID NO: 27575 - DNA, 470 bp, Homo sapiens
  misc_feature (1)...(470): n = A,T,C or G
nntttgaagnaccattagatgcaccgcganggcagtgcgcggtaattcttggtgcgagagaaacaataggacggaaacgccgaggaacccggctgaggcggcagagcatcctggccagaacaagccaaggagccaagacgagagggacacacggacaaacaacagacagaagacgtactggccgctggactccgctgcctcccccatctccccgccatctgcgcccggaggatgagcccagccttcagggccatggatgtggagccccgcgccaaaggcgtccttctggagccctttgtccaccaggtcggggggcactcatgcgtgctccgcttcaatgagacaaccctgtgcaagcccctggtcccaagggaacatcagttctacgagaccctccctgctgagatgcgcaaattcactccccagtacaaaggtaagtcccagctgctggaggggttgccacactggcg

SEQ ID NO: 27576 - DNA, 468 bp, Homo sapiens
  misc_feature (1)...(468): n = A,T,C or G
ggcagtgccngtttgaagcccnatgacgaccttagtccgtgcggtggaattcaggattcttaatcccactccaggatgggaaacccatggccgagtgggaagaaaccagctgaggtcacatcaccagaggagggagagtgtggcccctgactcagtccatcagcttgtgtagctgaggtctgggccaggtctaaccaggctccccactcctcccaacctgagcctgccctctgatctctgcctgttcctctgtcccacagggggcaggggctacgggtcacagagcggggaggaggactttgctgcctttcgagcctggctgcgctgctatggcatgccaggcatgagctccctgcaggaccggcatggccgtaccatctggttccagggggatcctggaccgttggcacccaaagggcgcaagtcccgcaaaaagaaatccaaggccacacagctgagtcctgagga

SEQ ID NO: 27577 - DNA, 486 bp, Homo sapiens
  misc_feature (1)...(486): n = A,T,C or G
gaggtacnnnatggagaccataaatcgtagaccctagtccangnggnggaattcgaatcaacaccacagttatatgggatgcctgctccagcagcgtgggagaggaagcctcaaggagtgtttcctgagccatcaggaggggattccagggccgtggtcctctctgaagcactgacacacatttgggggaaggtctttgccatggtgtgtttccacgatgatcagtttattcctggtttgaagcgggtcccagaatcctgctgggaagccaggcctgtgcttctgcctctgtcttgagccatcactggattgagcacagcgcccccggggtagggcagggacttgacagctggctggcagtatgtgtggccagaccccagtgtccatgcatggctgctgttccctgagctccatgaccccacgtggttccatctgattgctggatcttagggttgaaaggtcttagggtctcctgcgcacagtggn

SEQ ID NO: 27578 - DNA, 458 bp, Homo sapiens
  misc_feature (1)...(458): n = A,T,C or G
ctcgaattcgagaccttagtccatgtggtggaattccgtggacaatgctgctccctgccgcagctccgccggtcactcaggcagaacggggtatgcaaatggcctggagaggccgaggccgaacactgcgcccattgtcccgggcgctcaaagcgccgagcagctgcgcagactttctgggctcggaccctcggccgccacgctaatgtcatcattgcaaaacatcagattttgagaactatgcagtctgaattcattagcagccttctcggcgaaggttcttttccccgtgacaagtttcaaagtccagaccccctccaacgttggtaggggtaggaagaggaggaggggcccagggaggggggtctttcgcaagtggggcctcgggggatccctgctctccttctggtgcattccgcaactttaaaagccttccttggggttctgagcgcggatgn

SEQ ID NO: 27579 - DNA, 469 bp, Homo sapiens
  misc_feature (1)...(469): n = A,T,C or G
cttgcaattcaatnccatnnnanannnnttttgatgtcctctgaccancnggnggaattcgggatattggacgcaacctggcaaatgaagctgttcgcccaagtctctgggtactccctggaggacactgtctcactgtctcgggttggctcccagcctggaggtcccagatggggactgttctgacaagctggcatcaccaggggtgaaggccctggctgcagctgtacaccacctgtgcccccaggctcaaggtctctggcaggtgcacaccagcccaactctgcagggcttctctccctgccaccaccccccaagccaggaccccactccttccccgaggctgagctgagccttttccaggggcagggcccaggagaccattcccagaatccatggggcagtagccagggctccggctgctggaggaagcagctatccacaaagcttcctgccccagagctgaggg

SEQ ID NO: 27580 - DNA, 483 bp, Homo sapiens
cgccccgctttcgtagaccactagtccagtggagtggcattcattagaacttcttatctgaagccataccactcagagggaatgcaaaatacatattgacatctcctttaggatgtccttagagaattcatggaaaagaagttaaataatttaaaagtgcttttgggtacagctatttagcactagagggtaagattagacatagattgtaaagataataatagggttagggataggattaggatctgggtcagagtcagggccagaagtatggttagaggtggggtcatggtcagggtcgagatcaaagtcagggtcagaattagggaccaggatagggatcaggatttaggttcagtgtcaaagtcttgggacaaggttagggttagaattagaaccagagctttgttctcctcaggtcccacccgaggatgggtcaccatggctttggagcgcctggtagtgtggcatgtccacagtgaa

SEQ ID NO: 27581 - DNA, 455 bp, Homo sapiens
  misc_feature (1)...(455): n = A,T,C or G
nattcgatgtcattagaccgngcggtggtattccgcgttgcctcgtgaacgttagagcagcctccagaggcgggtttggtctgcacacctggttcgcgggtgacacagttgtgacttggcccaggtcagttgttggggcctggccagctgtgggtggtgaggttttctcggacgcttcatctgctctcgttcttgttcgaattccttctgcctaagaatgacagctttaaaagtgaaatggcagcacgtctccatcattacacagaatcccatgtgggaagaccctagtcggaggcccccacccttgcccggaactggactttggggcagcagcaaactgcagtgagtgtgagtcacacctgaggacaggtgggctgtcttcaggctcccaacaggtctgtcgcttaaggggctggggaatgggggctggaatgccacggcctgcccacctgggg

SEQ ID NO: 27582 - DNA, 461 bp, Homo sapiens
  misc_feature (1)...(461): n = A,T,C or G
atttgagtcatagaaanngcgnnngatgatgtccctctgaccgngcggnggaattccgctgagccactgtgttcatgacgtggtgtgtaaggaggtacgatggatgagggatgttgggcccacgttgcaaagacctcagttgtcgggctggaggtttggctttatttttaatttttaaatttttttagagatggaatctcgctctgttgcccacgctggagtacagtggcacaatcatagctcactgtagcctcagactcctgggctcaagtgatcctcccacattagtccctcgagtagctaggatcacagacgcagaccaccacacctggttaattttgtattttttgtagggatggtgtttcaccatgttgcccaggctgggctcgaactcttggactcaggcaaaccttctgccttagcctcttgagtaggtaggactacaggtgcacaccactatg

SEQ ID NO: 27583 - DNA, 424 bp, Homo sapiens
  misc_feature (1)...(424): n = A,T,C or G
cacaaaaatcagtagcatttatatatgcaaacagtgaatagtctgaaaaagaaatcaagaaagcaatcccatttgtaacagctacacagaatataacatatctaggaattgatttaatcaaagaagtgaaatatctattcaaggaaaactataaaacactgatgagagaaattgaagagggcacaagaaaatgaaaagatatttcatgtgcatgaattggaagaattaatattcttaaaataacaatactacccaaagcaatttatagccaatgtaatccctatcaaaataccaatgacgtttttcagaaaaatagagaacacaaccctaaaatttatatggaatcacaaaagaactcagatagccaaagcaatcctgagcagaaagaacgaagttgggaatcacactacatgacttcaaaatn

SEQ ID NO: 27584 - DNA, 453 bp, Homo sapiens
  misc_feature (1)...(453): n = A,T,C or G
aatgagacatagacaggcggnggtagatcgccctangcctcggtcagcaacggcgaagacgcgggcggcggcgcgggcagggagctggtggacttgaagatcatctggaataagaccaagcatgacgtgaagttccccctggacagcacaggctccgagctgaaacagaagatccactcgattacaggtctcccgcctgccatgcagaaagtcatgtataagggactcgtccccgaggataaaacattgagagaaataaaagtgaccagtggggccaagatcatggtggttggctccaccatcaatgatgttttagcagtaaacacacccaaagatgctgcgcagcaggatgcaaaggccgaagagaacaagaaggagcctctctgcaggcagaaacaacacaggaaagtgttggataaaggaaaacctgaagatgtgatgccatcttgtagg

SEQ ID NO: 27585 - DNA, 464 bp, Homo sapiens
  misc_feature (1)...(464): n = A,T,C or G
aattgagaccatcgnannnncgnngattgatgtcttttatacagtgtggtggaattctggcagaatttttgagtacaggagtgacatagtcagagctctgcttttgggtttagcaactgccatgcaggagggaaggtagaagagagaatgacaacagggaggtgacttaagaggctgttaaatattaaaggcgagatgcaatgggacctcaactgggacagagctgaggggatggaggggagatgatgggttgatgggaatgcccattgtcttacaaaatcagcaggaggatggctggatgcccccatgagccagttacaaaccctttcatccccacctccccctgccaatactgccctggctcaagcctgagtttcctggacctccctccccgcaaccaaatccttcttggccagcagctacccacaccccctttctctgcctcagactatcacaagtccctg

SEQ ID NO: 27586 - DNA, 453 bp, Homo sapiens
  misc_feature (1)...(453): n = A,T,C or G
nattgagacatctgccagngcgggtttgattctattaatataatttccagatagtaattttaagagtactcatcgctcttgccaaataagttcagggtattcaaatcttggactagtcctgcaaggtacaaagaataaaaatcccagtgagatacttggaaaccacagtttattattatttatctgggcaattattgtgtgtgtgaggatggaagggtagggaataatcgaacatctaaagccttgaataagagaatactaattgttttggtatgatgatactcagaaatggagatattataggaaaaagaaatcctttggaattttaactaaaatcactgcatatgggaaattaagagatccaggaccatatttgataagatttcctaaaaataatgtaattattaatgctaaagactgctcatgtatcttgatctaattactaaataattn

SEQ ID NO: 27587 - DNA, 464 bp, Homo sapiens
  misc_feature (1)...(464): n = A,T,C or G
aatggatntccctngnnnnnncnnnnattgatgatccttagacagtgnggnggaattcatcgtccgtgcgtctagcctttgcccacgctgctttcagacatggcctccggttacgcgcgcatcggaaagccagcccctgacttcaaggccacagcggtggttgatggcgccttcaaagaggagaagctgtcggactacaaagggaagtacgtggacctctttttctaccctctggacttcacttttgtgtgccccaccgagatcatcgcgttcagcaaccgtgcagaggacttccgcaagctgggctgtgaagtgctgggcgtctcggtggactctcagttcacccacctggcttggatcaacaccccccggaaagagggaggcttgggccccctgaacatccccctgcttgctgacgtgaccagacgcttgtctgaggattacggcgtgctgaaaacagatgg

SEQ ID NO: 27588 - DNA, 455 bp, Homo sapiens
  misc_feature (1)...(455): n = A,T,C or G
aattgatgacctttgacangcggnggttgatacctttccttggnggatgaattaaaaacctggtgcatgttaaagattcagaatctggagcagaagctttctggagattctagggcctgcagagctaaatccacaccatctacttgtgagtcctctacaggtgtggaccaattagtggtgactgcaggtccagcagcagcttccgacagctcccctccagtggttaggcccaaagagaaggccctcaactccactgctacccagagactccagcaggagctgtcatcttctgactgtacaggctcccgactgagaaacgtcaaggtccagacagccttgctacccatgaatgaggcagccagatctgatcagcaggctgggccctgcgtcaacagaggcactcaaactaagaagtctgggaagagtgggccaacaaggcatcgtgcccagcaacn

SEQ ID NO: 27589 - DNA, 588 bp, Homo sapiens
  misc_feature (1)...(588): n = A,T,C or G
cgcgcccatcganncccctnnnnattagaacactagtccagagaggngcaattcccanaagcaaagtattgttggcatctccattttataagatgaggagaagattgaggttcagaaaacagtgaatttctcaaggtcgtacagcttgtatgtggcaaaacttggacacgtaccaggttttctaactctaaaagtccatgccctaaccattatgcaacgctgggccacagtcaggggccgagattccaggcacgctttgccattgggattcgccagtaaagttcatcaccacaaactttccagccaggaatccctgggctactttcctctgttttatttgctggcatcagagttctgctatttatcacatctctcctagaagattcttgggggaacagatgtggcttggaatttgataagaacgtcacttcaacacatcctttcagtctgtttggaatcctcaccctggagagagagggacagctgaacaaacagcccacgccctctatgttggtattaaagtttctggaagctcagaaactgcttgagacaataataagagatcatttncatttanaggaacatttn

SEQ ID NO: 27590 - DNA, 567 bp, Homo sapiens
  misc_feature (1)...(567): n = A,T,C or G
cgcgaatagaacactgtncagagtggtgcaactcgaaatgccttacttcactctggcccggcggacctcccaccacccagcagtgcactggggatggacaggcctggtgtgctgcgtgctcgcaaccacagatggctcctcggctttagacagaaaggggaaggggttctaagtcaagagcctttcagtgctccctcatattgagggcagtggcagaaaagtgaccactctgcaggctgggcccaggatgtggtgtcctgagatagttttgtatcttaaagactgaggcacagaagcgaaacgagaacacactgtttttgagacacagttgtccaaatgtttctggccagctccggcccccttttgtatgacacttctcttccaccctgcacagcacatgtgcccgtcattcttttaattntaaaagatganatggcagatgctagtaattcacagaatggcctcttgtgggggtgggctgagggaagcagctataaacattgctggagtttgtcaatgggctgtcattttatatatgtgtttgaaatacatgcagccctgntcatg

SEQ ID NO: 27591 - DNA, 583 bp, Homo sapiens
  misc_feature (1)...(583): n = A,T,C or G
agcgatagaacactgtcagagtggtgacaaccccgagagtcgtcggngtttcctgcttcaacagtgcttggacggaacccggcgctcgttccccaccccggtcggccgcccatagccagccctccgtcacctcttcaccgcaccctcggactgccccaaggcccccgccgccgctccagcgccgcgcagccaccgccgccgccgccgcctctccttagtcgccgccatgacgaccgcgtccacctcgcaggtgcgccagaactaccaccaggactcagaggccgccatcaaccgccagatcaacctggagctctacgcctcctacgtttacctgtccatgtcttactactttgaccgcgatgatgtggctttgaagaactttgccaaatactttcttcaccaatctcatgaggagagggaacatgctgagaaactgatgaagctgcagaaccaacgaggtggccgaatcttccttcaggatatcaagaaaccagactgtgatgactgggagagcgggctgaatgcaatggagtgtgcattacattnggaaaaaaatgtgaatcagtcactactggaactgccn

SEQ ID NO: 27592 - DNA, 588 bp, Homo sapiens
  misc_feature (1)...(588): n = A,T,C or G
ccgccatcganncccctnnntttagatcactattccagagaggtgcaattcctggactgtcctctacagaaggaagcacaaaaagggacagtcggaagaaattcaaaagaaaagaacccgccgagcagtcaaattccagagggccattactggtgcatctcttgctgatataatggccaagaggaatcagaaacctgaagttagaaaggctcaacgagaacaagctatcagggctgctaaggaagcaaaaaaggctaagcaagcatctaaaaagactgcaatggctgctgctaaggtaattatggggtttctttactttcttgaacaatacaacaggaaaattttctttttttgagacggagtcttgctctgttgcccaggatggggtgcagtggcgtgatctgatctcagctcactgcaacctctgcctcccgggttcaagtgatactcctgcctcagcctcccgagtagctgggagtacaggtgcgcgccatcacgcccggctgattttttggttggttggttggttggttaagtagagacagggtttcaccatgtcggacaggctggtcttgaactcttgacttn

SEQ ID NO: 27593 - DNA, 463 bp, Homo sapiens
  misc_feature (1)...(463): n = A,T,C or G
agagccaggggnntatatgattcgttggcatttgcaccgngcggnggaattcgcccaagtctttccactatgaaggcaatcgtagagtgtgcaggaggatttgtgttatccaagcagccatctttccggaagctcatggagcacaagcagaactcggtgggtagagtggagtccgccagcgagtccgtcattgccctgtatcacattcagcgttcggtcactgagaaactcattttcttttccttagagtttgtcggaaataattttaatatcctgtgaaaatgaccttcatttatgccgagaatattttgccagaggcatagatgttcacaatgcagagttcgttctgactggagtgctcactcaaacgctggactatgaatcatataagtttaactgatggcgtctaggctgccgtgcatgtcgactcctgcggagcggggctggctgtctggctggcgac

SEQ ID NO: 27594 - DNA, 541 bp, Homo sapiens
  misc_feature (1)...(541): n = A,T,C or G
ntcgacctgtcgcgggggaattcccaccccaaggaacgccaatacaaggaagcaagcttcgacttccaggatatttatcagggaaaggcttccactctggggaggacagtggcttgataacaactgcagctgccagagtccgaacacagtttgctgattccaagaagactcccagccgaccaggaagtcgagctggaagcaaagctggcagccagggccagcagccgccgaggcagtgatgcatcagactttgacatttcagaaatccagtccgtgtgctcagatgtggaaactgtcccccagacacacagacctacaccccgagcaggttctcggccatccacagcgaagccttcaaaaatccccacgccccagaggaaatcacctgccagcaaattggacaagtcctcanagagatagtgcaattggttctaccaaggcccttccttgagcatttattanttaagtttgaacgatgtaaaatatggtgtagaaattcttgtgaaatattgcangaggcgagtttanaattctgcagatg

SEQ ID NO: 27595 - DNA, 538 bp, Homo sapiens
  misc_feature (1)...(538): n = A,T,C or G
nattgagaccatatcgagggcccatncgancntccttcccaccagggctcatgtctgattctctaatgcgaanagccttattctaagacccaaggtttggatctgctattaccagactcctaacatagaaaacttgaattgtcacatacattttacagtttggacttttaagaaaacatggatactactggaacttcccccagctgagttacatggtcactttttcagtgcaagccacatatcaacacaggtttttaggtggctccctgctgcacagcgtgacctcgtggtcgcgcagatgccgattctgagcagtgtagactcaaggtccctgtggaggtgctgaagcccacagttccacacagggcagcagggagcgcaaggctcaggtcaggatggacaccactcatgcgagcattgacctttnttttttttgtttacaatttaatctttacatgagggggagaggagctgttctttcccactaaaaattgctgttgaaaaattggaggtggagctggcactgctgactgctggg

SEQ ID NO: 27596 - DNA, 459 bp, Homo sapiens
  misc_feature (1)...(459): n = A,T,C or G
nttgaaaccctggagacactaggccagtgcgggggaattcctaattttgtatttttggtagagacggagtttctccatgttggtcaggctggtctccaactcccgacctcgggtgatccacccgcctcggcctcccaaagtgctgggattacaggtgtgagccaccacacccagcaacaagccatatttgaaaaacagccagcctttcctcaggcgtcccgcatctgctgattcctccttcctggtcactgcgtccttggctggcatcagaaaagtggctacaaacttcctagtacatgagaagatctggttcaacaagttaaaatgtgacaatgcagaaaggagattcttcaagcagatgaacaaggctgtggccagcacctcccgccaggagaacggcgccagcatgatcctccatgacattgcgagagccagagagcatttccagaaatccctggc

SEQ ID NO: 27597 - DNA, 546 bp, Homo sapiens
  misc_feature (1)...(546): n = A,T,C or G
nttcgaacctcgatcgactatccagagtggtgcaattcgtttccacgtaggcaggtcgctntgtgcctctgagtgcgctgctgtgtgttctctctatagttctgtgtcataaagctgtcctggccagccttcaagctggtgtggccactcttgatgtgaggcgtgtcggttccaggggggacatgggaggggctgcacagtggcccgaggtcatgcttgcttccacctgcaggtgcatttggtcctttccatggccaggaagccctgtgggctgcactttttatgcttgcagtaacaagagactccagagtcctcaccggtgcagagttggcacatattaattaactaaaattctaatgatcttgctaccagcaataaatcaagtaggccaagtgaaactgggctntaaaaaggatggatttcanatacactgtgcccactagaagcttcgaagggcctcgtccctctgctacagccctgggaggagccaggatccttgttggtctagctaaatactggtaggggagtgtgccccatctcatcatt

SEQ ID NO: 27598 - DNA, 461 bp, Homo sapiens
  misc_feature (1)...(461): n = A,T,C or G
nttagaaaaccctcgatgacactagtccagtgcggaggaattcctgggttcctggctcaaggagagctgtggcttctcatgggcctcgcaggcgtgtactgttaccgtgtcaaccggcgcctgttcccggtgcctgtggatcccggtaccccctgccgcctgtgcaggacaccgcgagaccagcagggccctgggaccctggcgcagccagcgcacgtcaggtgagtgaccagagtattgggacaccttgggggacagagcctgaaccactggttttaagaaaagatgggcctgggcgtgggcccccaaccgctgggaggctcctcaggggtcccccactgcccccctgcgcagggtgagcatcccgctgtcgatcctggagcccccgcaccggtaccacatccaccggcgaaagagctttgacgcctctgacacactggccctgccccggcactgcctgc

SEQ ID NO: 27599 - DNA, 546 bp, Homo sapiens
  misc_feature (1)...(546): n = A,T,C or G
nttccggatcattagaccagcgaggnggaattcgttgactgtgtangtgacagggagggaaagatgatggccaggggaaagagcatcgtataggctaggggattgaactgtggactgattcagtgtaaataaaaataaattaacaggtagtagttcctgtcagttctgttggaagcagcccactccctcacttttactccttcctccaaccctcaatcagagctacttacagccaggcaggatggggctttccccaaagcaattggccgtttgtccagtggcagacaatggtggctacagcctttgtgcttttaagagtgggctgggattgtggagactgcccaggggcttggctttgtcagaacttgtacaatcttcttttgatgaaattatctgaactcaacatctagcacatagaatgtgtcaacaaatgcttgttgaatgaataaattatgactgcagactggctctcctgccttaaactaatttcatcccagcctagtctcctgatgtctggggctcgtatgctatgccatgttgcttcan

SEQ ID NO: 27600 - DNA, 474 bp, Homo sapiens
  misc_feature (1)...(474): n = A,T,C or G
aggaaaaaaanncctgaggcactccgtcagngcggnggaattcgggaaactgttcctccatatggagtaatagggactggatatgtcatgccaaatgaaagaacacgccaaaccagacaaaatatatggaatgcagagtattaaaaaactggctgtgggccagtgagggacagcgacgtgtgggagctgggaaacaaggtaagccatgcgactggcccagtgtcctgtgtggagtttcctggtggagcctggcagacacccggactttaggagttgaaactgattcagagcgtcccagcagctggagtttgcagggcggagaaccagagagaagagagctgcacagggaaagaaccctggatatccacagaggctcccgttccagtgtgcagcggactacgactactggtgagcacaggcgtgtgaggaagctacccaagaccagggaaggccatcaccccagcaggagatgat

SEQ ID NO: 27601 - DNA, 560 bp, Homo sapiens
  misc_feature (1)...(560): n = A,T,C or G
tgantgcaccccggccccnnattgaaaccccattgaagacctatccagggggcaatcgtccttcccccagctcttcacccagatcttcggggtcggtgtgaagactgctgaccggtggtaccgggaaggactgcgaaccttagatgacctccgagagcagccccagaaactaacccaacagcagaaagcgggtgagccctccagagaggctgggccctgggcttccctaaactgcaccctggatccctcagcatcaactccctagagggaagggagcagtctggtgcagagggtttggtggcagctttgtgtggtgggcttcctggggtctccacccagtgcagtcaggatctatcaaagccttttctcagtggacgatgctgaccacagcaacttccatgatatgccaggggcttgtgtctgcctactggttagactttgaccagtgaccagggacagcctgggccttgggcacactgcccagtgtggtgcttgtacatggaggcctgcagaggtggcactgagcagcagaaagaacatcagctttcaagttgggtagn

SEQ ID NO: 27602 - DNA, 568 bp, Homo sapiens
  misc_feature (1)...(568): n = A,T,C or G
tgcttgccnnnagtnnnnnnaatcgatcaccatatagagaggcccaattccggaggcggngnccgagcccacgacggtggcgtttgacgtgcggcccggcggcgtcgtgcattccttctcccataacgtgggcccggnggacaaatatacgtgtatgttcacttacgcctctcaaggagggaccaatgagcaatggcagatgagtctggggaccagcgaagaccaccagcacttcacctgcaccatctggaggccccaggggaagtcctatctgtacttcacacagttcaaggcagaggtgcggggcgctgagattgagtacgccatggcctactctaaagccgcatttgaaagggaaagtgatgtccctctgaaaactgaggaatttgaagtgaccaaaacagcagtggctcacaggcccggngcattcaaagctgagctgtccaagctggtgattgtggccaaggcatcgcgcactgagctgtgaccagcagccctgttgcgggtggcaccttctcatctccggtgaagctgaaggggcctgtgtncctgaaagggccagcacatn

SEQ ID NO: 27603 - DNA, 562 bp, Homo sapiens
  misc_feature (1)...(562): n = A,T,C or G
cgggnccccnaaattgagnnccccnatcgaacacctactccgngnggngcaattcacggcatggagggtttcgtgctggagggcaagaagtttgcgcggctgccggaagaggagtttggccacttctacacgcaggactgctacgtcttcctctgcaggtactgggtgcctgtggagtacgaggaggaggaaaagaaggaagacaaggaggagaaggccgagggcaaagaaggcgaggaagcaaccgctgaggcagaggagaagcagccagaggaggacttccagtgcatcgtgtacttctggcagggccgtgaagcctccaatatgggctggctcaccttcaccttcagcctgcaaaagaagttcgagagcctcttccctgggaagctggaggtggtacgcatgacgcagcagcaggagaaccccaagttcctgtcccatttcaagaggaagttcatcatccaccggngcaagaggaaggcggccagggcgcccaacagcccagcctctaccagatncgcaccaacggcagcgcgctcttgcactcgtgcatcagatcaac

SEQ ID NO: 27604 - DNA, 459 bp, Homo sapiens
  misc_feature (1)...(459): n = A,T,C or G
nactgaagaccctagaccaccgtcgnggaattcccttgtcctgcacccactgctaggccacattctcgtttctgctcacatcccattgcccggctacaaggcctgcccacggcccttaaacttgctgggcaggtttggagcccatgggaccccgtgggtctctgtccaggagcagcagaggaggctgacaggccctgctccctctgctctgggggtgtctgggagccccagctcacaccctcccaatgcttatatgctgaagctcacagaatgggcttcttgcctgacagcaagtcaaagaatgagtttaatatcaaagtgtaagcttactttccatccccaagccagcctgccccctgccccatttcccatgagcacacttctggngaaggaaaacaggctcctggccttcactctcagcagagctttggagatgccccangcatgccctgagctccn

SEQ ID NO: 27605 - DNA, 455 bp, Homo sapiens
  misc_feature (1)...(455): n = A,T,C or G
nttgagacactagaacacgtcgnggaattcccttggncgtnccccatcaccaacctcaccaccacccccggagctgatggatgtgagcctggtgggcggccctgctgactgctccccacctcacccagcgcctgccccccagcacccggctgcctcagccctccggactcggatgactggaggtcgtccacccctcccgcctcctgatgaccctgccactctggggcctcacctgggcctccgtggtgtaccccagagcacagcagccagctcgtgaccctgccccctccctggggcccctcctgaagccataccctcccccatctgggggccctgggctcccatcctcatctctctccttgactggaattgctgctacccagctggggtgggtgaggcctgcactgattgaggcctggggcaggggggtcaaggagagggttttggccgctccc

SEQ ID NO: 27606 - DNA, 483 bp, Homo sapiens
  misc_feature (1)...(483): n = A,T,C or G
gccaggcccttttgagaccantagataggagcgctgtaagncatcncangaggagcacatggaggaagccatcacaagtgccagttttctagaacagataatggccccattgtagcccagcacatccagggcccacaagctgccctcgcggagacagcctggcctgctgcacctccagagctgcggggaccttgacaccttcacaccagcggggaggccccgagccgagaggaggccccggcgagtggaggctgagcggccacacagcctcattggggtcatccgagagactgtcctgtgaaccctggaagacagaaggccactccaaggggaaggatccctctcctctctgccatttcttggctgggagctgtggtccacctcaaaaaaaaaaggagcactctggaggacacgttttcccacctgttggctcccgtgtctgctgactgagggcattcaggagtaaatgcacaggtcggcccn

SEQ ID NO: 27607 - DNA, 545 bp, Homo sapiens
  misc_feature (1)...(545): n = A,T,C or G
ngggatgcactgtgaggcgtgcaattcgtctgcacaataacaccaaaatgtaggatttgttattcccctttgacagatgagaaaacagaagcctgcaaaggtaaagacagagttaggaagtgtggagtcagaatgcaaacccagatcagtctgccccaaagtccactacaccagctgccagaaaccctgttctagaaggggcagctaagaagggaggagccgatgaatctctacagtagcactgtggccaggtctggaaagccaggcaagacacctgtgtgtcctatctgggttctgctgtctccgcgtaggcagcttcggggcaaggattcaactccccaggcctcccacggttggtgctggctccttggctcccagcagccgctgaccatagccagcaaaagacctggcaggtcctgaatcaaaacaacagagtggctgaaagtcacacctctccagctcctttgcgagtgggtttgattgattttgacagctatatcatggctggggtcgtcatgaattncatgagaattggttggaagttn

SEQ ID NO: 27608 - DNA, 475 bp, Homo sapiens
  misc_feature (1)...(475): n = A,T,C or G
agggggaannnnntttgctcgacgatcttagtcagtgtggtggaattcgggaaactgttcctccatatggagtaatagggactggatatgtcatgccaaatgaaagaacacgccaaaccagacaaaatatatggaatgcagagtattaaaaaactggctgtgggccagtgagggacagcgacgtgtgggagctgggaaacaaggtaagccatgcgactggcccagtgtcctgtgtggagtttcctggtggagcctggcagacacccggactttaggagttgaaactgattcagagcgtcccagcagctggagtttgcagggcggagaaccagagagaagagagctgcacagggaaagaaccctggatatccacagaggctcccgttccagtgtgcagcggactacgactactggtgagcacaggcgtgtgaggaagctacccaagaccagggaaggccatcaccccagcaggaga

SEQ ID NO: 27609 - DNA, 478 bp, Homo sapiens
  misc_feature (1)...(478): n = A,T,C or G
nagcagncgnncnnnattgagaccattgatagccctggaagngcgcaggagaattgacataacaagactctgactcctcgttcgcataataatattgatctgattctcgaagaatctggtgctggcatagatgtacaggctggatgggagggtggtcaggatggggcaaggggccgagaccacaaatggtcctgctcctggggcttagaacgggacctggttctccagggaggtgaagaggagcaaggccagagctcagcagcagaagctgtggtttaagagagaggcttgattatagatgttaggaagtcaagagcccagtgcctagaacctgggctgcagacggggaatgaggcttatggctccgtaatggtgatgtaatgctgacacctcagctgtggcaccacagagtcctgtgttacccctccctgtgcccacacaagattaccagaaactactttgcatcccattgaatgcg

SEQ ID NO: 27610 - DNA, 447 bp, Homo sapiens
  misc_feature (1)...(447): n = A,T,C or G
ngggaaactgataccatcgnaaaactgatggcatcggagngcncccacccgncatggtcgacatcgtgtgctcgccgacgcccttcctcatcgggctgctctccagctcgctgccactgctcagggagctgccgctggaagaggtccttgtggttgacctcgtcaacagccggttcctcagacagatggacgatgaggactccatcctgccccggaagcttcaggtggccctggaacacattctggaacagaggaacgagctggcttgtgagcaggacgaagggcccctagacggcaggcacggtccagagtccagccccttgaacgaggtggtgtctgaagcctttgtccgcttcttcgtggagattgtgggacactactctttgttcctgacgtcgggcgagcgtgaggagagaaccctgcagcgggaggccttccgcaaagctg

SEQ ID NO: 27611 - DNA, 490 bp, Homo sapiens
  misc_feature (1)...(490): n = A,T,C or G
ggggtttagagcagnngnnnnnnnaactcgaagaccattcgatagacactcggaagtgccgcctcactcactctgcgaccttgagaagtgggaatgacacattctctctgagcctcagtgtcctcatgtgaaaaatattaccgaagccactgtcatggggtggcggcattgatcacactagagagtgcatggagaggaatatctgagcacttggtaaacggcagcagctctgattgctagaggcagagatatacatttcatgggtcacctccgagacacaaccaagagccctgcgtagccctggccactgtctgggcaagggcctgggaagggcagggtgtgcctggggagtgcccctggggtggggctctgccagtgagcaggggacgcacctcactccgggcacagcctttggcccccggccacccagcgcccgagatggtgttggaagaggctagtgcctgaatcatcagcctggaggtccacggcg

SEQ ID NO: 27612 - DNA, 503 bp, Homo sapiens
  misc_feature (1)...(503): n = A,T,C or G
tggtataaggagggcnnnnttttgaaccattgtagacactagtcagtgcggtggaattccccaaccgcggcgaccggacgtgcactcctccagtagcggctgcacgtcgtgccaatggcccgctatgaggaggtgagcgtgtccggcttcgaggagttccaccgggccgtggaacagcacaatggcaagaccattttcgcctactttacgggttctaaggacgccggggggaaaagctggtgccccgactgcgtgcaggctgaaccagtcgtacgagaggggctgaagcacattagtgaaggatgtgtgttcatctactgccaagtaggagaaaagccttattggaaagatccaaataatgacttcagaaaaaacttgaaagtaacagcagtgcctacactacttaagtatggaacacctcaaaaactggtagaatctgagtgtcttcaggccaacctggtggaaatgttgttctctgaagattaagattttaggatggcaat

SEQ ID NO: 27613 - DNA, 503 bp, Homo sapiens
  misc_feature (1)...(503): n = A,T,C or G
agggcganggnnnnnaatcgagacccctcgagaccactaggcagngncgtggaattccaaacatggtcattaaaagcataggagccacactgggtgtggactcatcctagtgctgatcctgtgagaccttgagcaagttaattcaccaccccatgcctcaatttcctcctctgtaatatggatgtgattatgagtaacttcctaataaggttgttgtgagttaatagaagggcacttagaattgtgcccggcatctgcttggtatatgtaagtgctttttgtcatcatttacagatgtcagcggcaccaagggacatccccaagcagtagtggagttgggatccaaacctaagcttgactgattccagagcctcagtgctaatattaggagatattgctgccctgtgtgatcccatgcatttcagcaggagcctccttgtccactcctttcagttgtcttccctggcaaaggagtttttataatggtgatttcaggatgggag

SEQ ID NO: 27614 - DNA, 455 bp, Homo sapiens
  misc_feature (1)...(455): n = A,T,C or G
catcgcgnccnctggnatagncncccatcaggacagngcggnggaattctgtcattataacagctaattttgataatgattaacatgtattttatggaggcttttggaatgacttatctcctttaacccttgaaacaaccctatgccataagttctattattgtccccattttacaggtggggacactggggctcggagaggtgaggaaacctgcccagagtcacccaccgctacatgacaggactgggattggaagcagctcacctcgtagccgggaccccctggcgcctgggggatgttgcactctgtgggctgtttctccctgtactcaatggccccagactcctcctcttctccttgttggaggggctgtcaatgctcattcccgcccactgctgtctaggaaaccagatgagtaagattgttagaaaagtgagcaaaccgggagcggacg

SEQ ID NO: 27615 - DNA, 491 bp, Homo sapiens
  misc_feature (1)...(491): n = A,T,C or G
tgggggccnngnnaattgagnaactgagnacctctagtccagngtgggggaattccgggggccctggtggccctgggatggggaaccgcggtggcttccgcggaggtttcggcagtggcatccggggccggggtcgcggccgtggacggggccggggccgaggccgcggagctcgcggaggcaaggccgaggataaggagtggatgcccgtcaccaagttgggccgcttggtcaaggacatgaagatcaagtccctggaggagatctatctcttctccctgcccattaaggaatcagagatcattgatttcttcctgggggcctctctcaaggatgaggttttgaagattatgccagtgcagaagcagacccgtgccggccagcgcaccaggttcaaggcatttgttgctatcggggactacaatggccacgtcggtctgggtgttaagtgctccaaggaggtggccaccgccatccgtggggccatcatt

SEQ ID NO: 27616 - DNA, 441 bp, Homo sapiens
  misc_feature (1)...(441): n = A,T,C or G
aactggacccttcgnacgatgagggccattggacccaccaagatccccaaactcaagctccccaaagaccggcagtacgtggtgttgctgatggcccccttcaacatgaggtgtaagacgtgcggagaatacatctacaaggggaagaaattcaatgctcggaaggagacggtgcagaacgaggtctacctgggcctgcccatcttccgcttttacatcaagtgcacgcgctgcctggcagagatcaccttcaagacagaccctgaaaacacagactacaccatggagcatggagccacgcggaatttccaggctgagaagctcctggaggaggaggagaagagggtgcagaaggagcgggaggacgaggagctgaacaaccccatgaaggtgctggagaaccggaccaaggactccaagctggagatggaggtgctggaa

SEQ ID NO: 27617 - DNA, 494 bp, Homo sapiens
  misc_feature (1)...(494): n = A,T,C or G
tgagtgccgggccncnccnnnnnaactggatatccnttctgcantngncnnnnnncnnntnnnnnntnnnnnnnnccgnnnncnnnnnnnnnnnnnattggnnganncnnattatgatnttgcctgtttctctttctcccaaagagctgggattaccggtgtgagcgagcgcactcctccccccaaattgtttacctttacccgaagttggtatgcattgacttacctgtggacaacagtgatttttgtctcctgtccttacttctctctgtctccaactctcagggactcattcatcacctctccctgcaccccaccccctgacccgtgctagtttggtatctatgcctgtagctttgctttggggcatcatctgaatctcatactgcacggcctttcagatctggcttcctgcactcaatgtcatgcacgtctcttagtgccgtgttcccttaatgctgagtcatgctccattgtatggatggaccacatga

SEQ ID NO: 27618 - DNA, 563 bp, Homo sapiens
  misc_feature (1)...(563): n = A,T,C or G
ggtatgccnnnccggcncgcncaatcgagcccccaattgatgaccactccgaagngggcaannccacagccaggggtgctgaacactggagagaggtctgcgagagcccccgcaagcctgtggtcaagtggcacagtctgagcgagtactaatcctgttcttctctcctctaatccccgggggccaagctggggagggatgtggaggggaaaaagatgacagagaagtggactccaaacctcattttagttgtagaagaaaatttcttacaaaacaaattccacaaagaacaccctatatgaccacagctgcagatcagttcttagcaatgatgtttttttttctgctttgcaaggcgctagaatcttttattttactttattttttttgagggggagtttcgctcttgttgcccgggctggagtgcaatggngagatctcaactcactgcaacctctgcccttcaggntcaagtgattctcctccctcagcctnccaagaagctgggttacaggcaccacgagcatgcccggctaattttttgtatttcagagagatggttn

SEQ ID NO: 27619 - DNA, 486 bp, Homo sapiens
  misc_feature (1)...(486): n = A,T,C or G
gggagaaaatcgcaatccctagncatcgaggngcatatcacttgatgtgaatctttgcatagttatcttctgaatacaaagtaacagaagatacgattttttaaaaatctctctttccaccatcctttggtgccgtcgtcttggtgcggatgaatatcctgtctgatgttctcaagaggatcaacaatgctgaagagaggcaccagacagagtattactaggaggtgctccaaagacattctccggattctaattgtgatgatgaagcatggttacattggtaaatttgacatcactgatgatcacagagctggggaaattgtcgtgaacctcacaggcatgttttacaagtgtggaatgatcagccccagatttgatgtactcaaagttctagaaaaacggcagaataatctgcttccatcctgccagtttggtttcattgtactgacttcagccggcatcatggaccacgaagcagcaagacan

SEQ ID NO: 27620 - DNA, 455 bp, Homo sapiens
  misc_feature (1)...(455): n = A,T,C or G
catcgagatcgatagcaatnngcgnggacttcgcccatttttcttccgctatactttgtctctatgtcttatttcctttgatcagtctgtcgtctccaccttgcgagaaatacccacaggtgtgcaggggcaggccctcttcatctggtgcccaatgtgggttcctttctctacggngaagatacgctagagtgtgatcattgaagacaaatcgacgagagattcccgaagacttccatggtcagccttgtggtaagcttgtgcactcagagaaacccagggtaagaatgggtcaaactgaaagcaaatatgcctcttatctcagctttattaaagttattttaagaagagggggagttagagcctccacagaaatctaatcatgctatttcaaacaatagaacaattctgcctatggtttccagaatagggaacgttagatctaaaagactggg

SEQ ID NO: 27621 - DNA, 453 bp, Homo sapiens
  misc_feature (1)...(453): n = A,T,C or G
atttgatctgatagcatcgcaangncnntnaantntnngattccaatgtacaaagagaagtagcgagaacaaaatcccatgcgccctctaacattcagggcgcccagactggagctcgccggccggtattccagacccggccggcgtgcccgggtgagggtggtgtctaccgagaggcagagagcagcggagggtctgtccacatgccctgctctcccggtaccaaggtctcggggcctgacctccgagtttctaatccagatcctgcagatgccgaaacgtcgagggctatcaattcccaaggtcatacagcaagttgaggacagggctcggactggaatctcgtcttttgggcacaccagacctcagggaaagtgaccgcatctcggccaaaagggctgtggctggtgtcagcctccaggtggctgctctggtgggaccaagctgcgccgg

SEQ ID NO: 27622 - DNA, 262 bp, Homo sapiens
tccgttgatagacaggggggagtctatgctgaaaagaatgcacccacgcacatactgaacagtcataaaaacaagcacacatttttcaaacaaagtcattttggtactgagacgtttggagcccattcttggttggagtattttcccaggacagccactgctccgccttctcagagccatttattgctcagtaacttccccagatagcaagaactgcagggtggatccgcttccataaatagttgtcagacgatcccagatg

SEQ ID NO: 27623 - DNA, 530 bp, Homo sapiens
  misc_feature (1)...(530): n = A,T,C or G
ggaatctacccagcgaacacaaaattttgaaaaccccttggaaaactactccgagaggngcaattcgcgatcgcggngaccaacgccctgagctcttgtgcccaaaggggatcgccaggttttttgatgcggatcgaaagggactggccccggagcctacaacctgacgcangtgggacttggggaaatgtcgagaaacctaggtctgggacttgagttggcttccagggcacacattcttgttcagaagaaacacattgcaaaaatcgggaggtgacgggcagatgaagtgtcggcgcttcgcctcgggactccagtgcaacctatggggcttttgggaaatgaggaagtcgatgactctgcagggactcctctgacccaggagcagatggcgctcgtctgggcactccccaggagaaaaggtgcatcgggaagcagcctggcttgtggatggtggacaaggtggaagagagagaattccttggcagtagcattatgaacaaatgcagggctgagaaacagcatggtgg

SEQ ID NO: 27624 - DNA, 476 bp, Homo sapiens
  misc_feature (1)...(476): n = A,T,C or G
aggggncgngnnncnnnattgannccactgataacctcggcagngncgnggaattcgtccagggaaggacagttctcttctttaggtacacacggtagggactatgattaaactacttgacagcggcacctctgtgacctcattttcgtgtgacacatgcagatctggaagccgccgtcaccgtgagtctcagttggctctctctcacggtcttgcctctgaaaatgcaactgcattgtgcacagaaatccttttctgggtaaaactgggtcttctataactgctgtccgtgtggcttcatgttcatggtgtgatgtgcatgtgtcagccaccagcaccaggtccctgttgggatgtgggagccccttgggctgtctcatcatttagcagttgtctttacagtggtcccatcctctgtaaagacacacagagccacatcacacatcctctatcctaggtggagcccggggtctgcn

SEQ ID NO: 27625 - DNA, 442 bp, Homo sapiens
  misc_feature (1)...(442): n = A,T,C or G
atttgagaccactcgatgacctctcgacagncnggnggaattcccgagatgtcgaggaagccagagtccagctctcccacggggggctgtgatccttcttcctggggagtcctgctgtccctgactaggggcacctgcccacctgtcagctgctcctccctcggctggtcctcctgggctctgatggccccaacatttctagctcttctcacccatagtgccccaagcttcatgcagctgcggcagctgcatgaacagactgagatagcggcttacatgtaaccggaagctgcagaaaaacatcttcagacagctgagacggctcccaggactcgtgcctggcacagacaccatctgcctggcagggcaaagaaaggcgtctgtgagtgtgggaggattccgagtctaacaccctgagcccagccaggaaggggccaggaag

SEQ ID NO: 27626 - DNA, 500 bp, Homo sapiens
  misc_feature (1)...(500): n = A,T,C or G
agtgacggggggnnngnnaaatcgagaaactgatcaccgtcgnggaantctgtcgagccgcggtgggaagaagaagtccaccaagacgtccaggtctgccaaagcaggagtcatctttcccgtggggcggatgctgcggtacatcaagaaaggccaccccaagtacaggattggagtgggggcacccgtgtacatggccgccgtcctggaatacctgacagcggagattctggagctggctggcaatgcagcgagagacaacaagaagggacgggtcacaccccggcacattctgctggctgtggccaatgatgaagagctgaatcagctgctaaaaggagtcaccatagccagtgggggtgtgttacccaacatccaccccgagttgctagcgaagaagcggggatccaaaggaaagttggaagccatcatcacaccacccccagccaaaaaggccaagtctccatcccagaagaagcctgtatctaacaaagcaggag

SEQ ID NO: 27627 - DNA, 448 bp, Homo sapiens
  misc_feature (1)...(448): n = A,T,C or G
ggagtgcccagccttctccccccaaataccccatgatacccttggaannccagcggactccgagaccagcggatctaggcaaaccctctttctcgaccacccacctaccattcttggaaccatggcggcagtggcggcggcctcggctgaactgctcatcatcggctggtacatcttccgcgtgctgctgcaggtgttcaggtactccctgcagaagctggcatacacggtgtcacggaccgggcggcaggtgttgggggagcgcaggcagcgagcccccaactgaggccccagctcccaaccctgggcggccgtatcatcaggtgctcctgtgcatctcggccaacacgggagccagtgccgcgcaggaatgaggggtcccctgtgttccctcgccagaggagcacttggcaaggtcagtgaggggccagtagacccccggagaagc

SEQ ID NO: 27628 - DNA, 457 bp, Homo sapiens
  misc_feature (1)...(457): n = A,T,C or G
tgggttnnnnnagttgagacactatcagnggttgaaatcgctaggccggagcccgggccggaggaagcaattccacttggtttgacaacttctgccactcccatgtcagatgacttgcacttcttaaagagattgctttataacactaagacatcctttctaaagattcaagtggacttgactaagctgagggtccacgaaataaaatatgacatgtgagctgtttttggaaaacgaagatggagagagcacttccccgtaacgaaagcaaagtggtaagcacagggtgagacccttttacacagaatggtggagagaaaagagaatgctgaaaagtggctcagatgcagagtgttctgtggagaaactgcagccccacttctgtttccctggagtctcccaatggatcattcaggagtgtcctatgtgagaattgagccaaggaagatactcatgn

SEQ ID NO: 27629 - DNA, 486 bp, Homo sapiens
  misc_feature (1)...(486): n = A,T,C or G
aagagggtnnnngnaatcgaagacctagagagcgntcnggaangcctcagagagatgaatggaatggagccgcatctcaggcagttgcaattcctgcaggccaggggagagaccaggaggaaagggcaggttatgccagaatcagggccaggtgtggaggtgtgccccaagtgatcctcccacctctcaagcctcaggagacaggaggatggcttgagccctanaggttgaggctgcagtgagctatgttcatgacactgcactccagccttggcaacagagtgagaccctgtcttcaaaaaacaaaaacaagccccagaatcagtgggtagaagactcggggcaggggagaagaccacccacctgctgctccttcagctggaaaagctggactgccccaggctgggaggaactctgtaaggactcactagaagcttctgaagtgatcaggccactggaggacaagttgagggctgggtcacaaaa

SEQ ID NO: 27630 - DNA, 483 bp, Homo sapiens
  misc_feature (1)...(483): n = A,T,C or G
ggccgccaatcgagaccntnnatcgtagaccctagtccgngtggnggaattcggggagacgggctgcaggggtgagggggaaccaggttggtcagggagttgaggagctgggctcacgcagggaggagaagggtgctttgcctggaggcagggggacaggcggggccgtgtcctgagggctttgggaagccttgggtgcgttgggtcctgacggtgctgaggtctaatttggttttaagggctcctcctagaggtcaagaggcaaacaggctgtgggagatgccagggaccccaggaggaggagggaagctccacactgaagccccagnctctctctttctttttctttttatttatttactttctgaagaaagagtttcactctgtcgcccggcccgcagtgcagcgatgccatcacagctcactgcagcctccagctcctgggctcaggcgatcctcctgcctcggcctcccgaaatgctg

SEQ ID NO: 27631 - DNA, 473 bp, Homo sapiens
  misc_feature (1)...(473): n = A,T,C or G
nattgagatcatagatcgtgtggcggaattccacaaccctggatttgatgcagctgggaaaccagcccactaacagaggctgcctcatcttcatgcaggcactgccagatgcagaagaggatgtctaggcaagagggccttaaactcccccatctccagtgatggggatcccctcaaaggacctacctggcagctgtcagaggaaggggatgagagacagagggccccaccaccctgtactaaagtttccacttggccttgtctttagcggcccaaggcaggggttgtcaaccccagtctgacttgccatgcaggggagagtgggtttggcacctgccttctcatccaggcccagggccagaggccagtggggaagagggtgggtcaggaaggatgaaggcaggcagggactgcccagggatagaacccagggtgggcctgggatcaggcggggtgcacacctgctccttgag

SEQ ID NO: 27632 - DNA, 461 bp, Homo sapiens
  misc_feature (1)...(461): n = A,T,C or G
gcccgccaatgaaaccctggatgatcgcgtcgnacncacggagannatactcttattgcaaaatggggtctgctatatattgttcatgtttctttattgcatgtgacatgaattatatgacattaaaaataatatgccttgaatcacactgattagacccagaaggatcattgagtttttggtggttttaaagatccaagaaagacctatctagcccaagtgtatgaatgagaagactgaagcccacagaagtgaactcagcaccagtgtctcaagaaccccagtactctggtttttttcttttttgagacggagtctcgctctgtcgcccaggctggagtgcagtggcgcgatctcggctcactgcaagctccgcctcccgggttcacgctattctcctgcctcagtctcccaagtagctgggactacaggcgcccgacaccatgcccggctaatttctt

SEQ ID NO: 27633 - DNA, 467 bp, Homo sapiens
  misc_feature (1)...(467): n = A,T,C or G
agcgtttannnnnnaattgagcccctgnnnanngcattgtagtcattagtcagtgcggtggaattccaggttcgaactctggccagtgcaggaggaccagacaacttagtcctgctgaatcctgagaagtacaaagccaagtcccgttccccagggtctccggtaggggaaggcactggatcgcctcccaagtggcagattggtgagcaggaatttgaagccctcatgcggatgctcgataatctgggctacagaactggctacccttatcgataccctgctctgagagagaagtctaaaaaatacagcgatgtggaggttcctgctagtgtcacaggttactcctttgctagtgacggtgattcgggcacttgctccccactcagacacagttttcagaagcagcagcgggagaagacaagatggctgaactctggccggggcgacgaagcttccgaggaagggcg

SEQ ID NO: 27634 - DNA, 461 bp, Homo sapiens
  misc_feature (1)...(461): n = A,T,C or G
agaggnnnnnnnnnnnnntttgagatcactagtccgtgttgtggaactcatggaagtgatgagaaactctcaggaaactctgttaaccattgtagaggtccttctatatgatccactctttgactggaccatgaatcctttgaaagctttgtatttacagcagaggccggaagatgaaactgagcttcaccctactctgaatgcagatgaccaagaatgcaaacgaaatctcagtgatattgaccagagtttcaacaaagtagctgaacgtgtcttaatgagactacaagagaaactgaaaggagtggaagaaggcactgtgctcagtgttggtggacaagtgaatttgctcatacagcaggccatagaccccaaaaatctcagccgacttttcccaggatggaaagcttgggtgtgatcttcagtatatgaattaccctttcattcagcctttagaaatt

SEQ ID NO: 27635 - DNA, 471 bp, Homo sapiens
  misc_feature (1)...(471): n = A,T,C or G
gccccgccatagagaccnttggnatagatgaccgtaggagagngcccagactgaagaggcgagcctgtggaactgtttaaggtcctgttcccaaattaataaaagtctttcattatggcattaaactctatttatttagtatttgaaacatggcgtacatgtatgtatttgtataaacatttgttacatctaaaatccacaacaggtaaacaatctgtgctttcttttgtgtacaagtttggggtttacatctggatattttggtgttgtggagactcaggctgtgaagctaatcagattgcctcatattaccataatagctgcgacagaagtgatttgctccttaaaggggctgttccttgcccagaaaaggagtcacacttttgaactaataaaccgggtgtcacggaatcaagagaaacacagctgacacgatggagaaggtatgtgcaggggactcctggagatccn

SEQ ID NO: 27636 - DNA, 464 bp, Homo sapiens
  misc_feature (1)...(464): n = A,T,C or G
gggcgcggccnccactgagancccatgagagtctagtaaagngcgcnggaantcaagaccagcctggccaacatggtgatgccccatctctaaaagaatacaaaaatttgctgggcctggtggcatgcacctgtggtcccagctacttgggaggctgatgcgagagaatggtttgggcctgtgaggcggaggttgcagtgagcccagatcctgccactgcactccagtctatgcgatagtgccagaccttgtctcaaaagagtaacaaaacagaatgaggagttataaaacccaggtacaaatcttatgattccaggtcacttggtgagactgaagcattctctactttgttgctgtcggctgtataatgatgatcttcatctacctaaatctatgaaattcctttttaagctgtgagcttcttagattccatagcagagatggtatactctatacttgaataa

SEQ ID NO: 27637 - DNA, 474 bp, Homo sapiens
  misc_feature (1)...(474): n = A,T,C or G
gccccgccactgatgccntcgnactgatgaccgtaggaagagcggnggaattctgaagataagagtactacttccagtagttttgtgaggattaaattaatgtaacagtgcttagcacatagtaacaaaatattagctacttgttttttttaaaacggagtttggcttttgtggcccaggctggagggcaggggcccaatctgggttaaccgaaacctgcacttttggggttaaagcaattttccggccccaccctcccgagtagcggggattacgggcatgccccaccacccccggttactttggtattttaagaaaagacggggtttctccatgggggccaggctgggcgggacctcccaccctcaggggaggcgcccgcctgggcctcccagggggcggggattacaagcgggagccaccgggcccggcctttanctactattatacatattataatttaaaaattattag

SEQ ID NO: 27638 - DNA, 464 bp, Homo sapiens
  misc_feature (1)...(464): n = A,T,C or G
ggaggnnnnnnnnnngnnttcgagancntannnnnnattgtagtcactagtccgtgtggtggaattccccgtgtcactggaggacgaggtctcccatagtatgaacgagatgattggaggctgttgcgtttgctcagacgagagaggctgggccgagaacccgctggtttattgcgacgggcacggctgcagcgtcgcggcgcatcatgcttgctatggcattgttcaagtacccactggaccgtggttttgcaggaaatgtgaatctcaggagagagcagccagagtgacttgagtcttgctctgtcaccctggctggagtgcagtggcgcagtctcggctcactgcaacctgcacctcccggattcaagcagttatcctgcctcagcctccccagtagctgggattataggcatgtgccaccactcctggcgaattttttgtatttttagtagagatggggt

SEQ ID NO: 27639 - DNA, 464 bp, Homo sapiens
  misc_feature (1)...(464): n = A,T,C or G
gccccccactgagaccntcgnactgacgccgtcgaaagaccnganagnnggaagcaaaacattccagattatgaggaaggccagaaagatctgggttatcctttttatagcacgcatttctttgtcttaattgctggtctgctttaaacttctcagctgtgtgtcaattctgcttacttatgggaaaacataaccttgtattgtgactgctctatgttggggcagaatctatattctattgtttggtgggtagaatacccttttatttctgcctgtccagatggagagctctcaatgggctgtaggctggagtcctctgtgccacttccagctgatgggaactggggggaacaacccacccctttttaagtatttggtatgggttagtcttaagattttattgagctggcccttaatgctatttgatgtatttatggcaggtatgtagaatttaatctgctgta

SEQ ID NO: 27640 - DNA, 464 bp, Homo sapiens
  misc_feature (1)...(464): n = A,T,C or G
agcaggcctgataccctggactgatggcgttgncagcgcngngcgngcgcgtgtgcgtgcctatgcttttctctgtgggcacatcaggatgcccctcggagagcatgtgcacgtgtccccacctgagcgagcgtgtgtgtgtgctcctctgcgtcccaggtttggacgtctagggtttggtgtgcctgtcttctgccctccctgagcccacagggtcagtcaatgtatcttctacgtgcctctccctctgccttctctcacagtgcccccggctccagagctcaggggtaggggttctcctgagggtgcaggggatccttctcatctcctggaccctccagggcactctggtccctattccccagctcctaggcagctgagccgggtcccttaggggaggtgaccaggagctttggtgcagggagctcttggtggggcaaagggctggacccctgccaggtctg

SEQ ID NO: 27641 - DNA, 474 bp, Homo sapiens
  misc_feature (1)...(474): n = A,T,C or G
agcccggccattgatgaccactggnatagatggccgttagtccggcaacagcacggccatccaggagctgttcaagcgcatctccgagcagttcacggttatgttccggcgcatggccttcctgcactggtacacgggcgagggcatggacgagatggagttcaccgaggccgagagcaacatgaacgacctggtgtccgagtaccagcagtaccaggacgccacggccgacgaacaaggggagttcgaggaggaggagggcgaggacgaggcttaaaaacttctcagatcaatcgtgcatccttagtgaacttctgttgtcctcaagcatggtctttctacttgtaaactatggtgctcagttttgcctctgttagaaattcacactgttgatgtaatgatgtggaactcctctaaaaattacagtattgtctgtgaaggtatctatactaataaaaaagcatgtgtagaaan

SEQ ID NO: 27642 - DNA, 486 bp, Homo sapiens
  misc_feature (1)...(486): n = A,T,C or G
ggatgtcccnnnnnagccgccaactgaaaccntcggatagatcacattaggacangcggnggaattcccaagatgtcgtgagagatctgagcttcacacccagtggcagtttgattttggtcttcgcgtcacgggataagactcttcgcatctgggacctgaataaacacggtaaacagattcaagtgttatcgggccacctgcagtgggtttactgctgttccatctccccagactgcagcatgctgtgctctgcagctggagagaagtcggtctttctatggagcatgaggtcctacacgttaattcggaagctagagggccatcaaagcagtgttgtctcttgtgacttctcccccgactctgccctgcttgtcacggcttcttacgataccaatgtgattatgtgggacccctacaccggcgaaaggctgaggtcactccagtaaggactgaatccctgctatgacttttttgtggggggac

SEQ ID NO: 27643 - DNA, 462 bp, Homo sapiens
  misc_feature (1)...(462): n = A,T,C or G
ggccccctgagaccctggctgatggcgctagcggcggcgnctggattaaacaccgtgctgaggcggcttcctatgctatctctcttccgaggttctcacagagttcaggttcccctccagactctttgcaccaaagctccctgtgaggaagattctttgtcctcagttcccatttctccttataaggatgagccctggaaatatctggaatcagaagaataccaggagcgatatggttctcgccccgtctgggctgactaccgccgcaaccacaagggtggtgtacccccacagcggactcggaagacatgtattcgtcggaataaagttgttgggaatccctgccccatctgtcgagatcacaagttgcatgttgactttaggaacgtgaagctcttggagcaatttgtctgcgcccacacgggtatcatcttctatgctccatacacaggagtctgtgtg

SEQ ID NO: 27644 - DNA, 483 bp, Homo sapiens
  misc_feature (1)...(483): n = A,T,C or G
ggaggggcnncnnagccgccaactgagaccntggactgagaccataggaagngcggnggaattccgacttggtgcccgcagccctgggcagcctgaccacagcccatattgcccagagtgtctggaggccttggtgaccaatgccagccagagtcctgcgggggtgggcccggccctccctggatctcctccctcctcccaggggttcagatgtggtggggtagggccctggaagtctcccaggtcttccctccctcctctgatggatggcttgcagggcagcccctggtaaccagcccagtcaggccccagccccgtttcttaagaaacttttagggaccctgcagctctggagtgggtggagggagggagctacgggcaggaggaagaattttgtagagctgccagcgctctcccaggttcacccacccaggcttcaccagccctgtgcgggctctgggggcagaggtggcagaaatggtg

SEQ ID NO: 27645 - DNA, 460 bp, Homo sapiens
  misc_feature (1)...(460): n = A,T,C or G
agcgccgccnnaacggaaactagagcntggcggnggcanncgagcaccaagacagacagccgggataaacccctgaaggatgtgatcatcgcagactgcggtaagatcgaggtggagaagccctttgccatcgccaaggagtagggcacagggacatctttctttgagtgaccgtctgtgcaggccctgtagtccgccacagggctctgagctgcactggccccggtgctggcatctggtggagcggacccactcccctcacattccacaggcccatggactcacttttgtaacaaactcctaccaacactgaccaataaaaaaaaatgtgggttttttttttttttaaaaaaaaaaaaaaaaaaaaaaaaaaaaaaaaatataaaaaaaaaaaaaaaaannnnngtctnnttattaaaaagaaaataantatggtaatatgttaatattggctggtttg

SEQ ID NO: 27646 - DNA, 451 bp, Homo sapiens
  misc_feature (1)...(451): n = A,T,C or G
natcgattgacgttcgactaggccgngcggnggaattcctctatcccggataggggcctctctcctctcatcgggcctgataagggattgtccaaggctgtgtgcatcctgcagagggaaggaagtcagctgggccacccgccatccaccttggcaagagctgggcccactctggcaggccagggtatcatctgcgtgctgctggcgagccacgaagggtgggtgggcggccatcaggctggcagctccagaccccagagggccagaagaactcaccccactgccctctggatgcaggtgttggggaacactgaggacaatcccccatctcccctcacccttgagcaagccctccctgcactctatgccacatgatcctgctggtctgatcacagctgtgctcactgatgcggctgctttatgactctgcccctgtgtccttggaggcagg

SEQ ID NO: 27647 - DNA, 452 bp, Homo sapiens
  misc_feature (1)...(452): n = A,T,C or G
cattgattagcattccaccgngcggngcaattcggcaagaggactgatggttactgggaatcttcttcatggccaggcttctgtgtgtcctctcacttaatcctccaacagcactgtgaggaaaatacagcatcccacctcacaggcgaggaagcttaagttgaaggaatgttaaattgcctgctctgagcctcacagccgggaggtgacagccccaggattggcggccagggtttgtctgcctttaaaacttatgtcatgtccttctgtgttatctcggtctgtacaggctgctacagcaaaataccatagcctgggtagtttatgaacaacagaaatttatttctcatagttctggagcctggaagtccaagatcaaggctctcgcaggttcagtgttcggtgaggacccacttccttattcatagacgtccccttctcactgtggcctg

SEQ ID NO: 27648 - DNA, 464 bp, Homo sapiens
  misc_feature (1)...(464): n = A,T,C or G
aggggaaananactgatgacattaggctgggcggcggaattcccagctgcagtctgcatgtgagaagcgagaacagatggagcggagactgcggacttggctggagagagagctggatgcactgagaacccagcagaaacatggaaatggccagccagccaacatgccggaatacaatgccccagccctcctggaacttgtgcgggagaaggaggagcggatcctggccctggaggccgacatgacaaagtgggagcagaagtacctggaggagagcaccatccgacactttgccatgaatgccgcagccactgcagcagctgagagggacaccacgatcatcaaccactcacggaatggcagctacggagagagctcgctggaggcccacatctggcaagaggaggaggaggtggtgcaggccaacagaaggtgtcaggacatggaatacactattaaaaatn

SEQ ID NO: 27649 - DNA, 472 bp, Homo sapiens
  misc_feature (1)...(472): n = A,T,C or G
aaagcgagaanaanatttgatncccctggatttgtagacctctgtacangcggnggaattcccagtcatgaaggtctacaacccagttagggcagaatggaggcaaatgaataatattcccttggtctcagagaccaacaactacagaattatcaagcatggccaaaaattgttgctcatcacctctcgcaccccacagtggaaaaagaaccgggtgactgtgtatgaatatgatattaggggagaccaatggattaatataggtaccacattaggcctcttgcagtttgattctaactttttttgcctctctgctcgtgtttatccttcctgccttgaacctggtcagagtttcctcactgaagaagaagaaataccaagtgagtctagcactgaatgggacttaggtggattcagtgagccagactctgagtcaggaagttcaagttctctttctgatgatgatttttgg

SEQ ID NO: 27650 - DNA, 447 bp, Homo sapiens
  misc_feature (1)...(447): n = A,T,C or G
nattgattgcattctccaggggggaattccagcggtccggctggagccgggcggctctcctccagctccttctcggcgtgaacctggtggtgatgccgcccacccaggcccggagtctgcgcttcgttaccttgctgtaccgccatggagaccgttcaccagtgaagacatatcccaaggacccctatcaggaagaagaatggccccaggggtttggtcagttaaccaaggaggggatgctacagcactgggaactgggccaggccctgcggcagcgctatcacggcttcctaaacacctcttatcaccggcaagaggtttatgtgcgaagcacagactttgaccggactctcatgagtgctgaggccaacctggctggactcttccctcccaacgggatgcagcgcttcaacccgaacatctcgtggcagcctattcctgtgcacn

SEQ ID NO: 27651 - DNA, 464 bp, Homo sapiens
  misc_feature (1)...(464): n = A,T,C or G
ccttgacgttcgattacaccagngcggnggaattcggactctgcctgggcatgttaggttaattctttgactccaagccttaaaatacttacatggagtcagcgctcacctcattcacacaattatcatagagctccctggacactgaacctctaaagggaaaaggtctaccctggagccaggagcatcagggttggcttgggagcatgagaggtgagcccagggctaggcctgggccaggccccggcagtactgctacttgggaggagccacttcacctttgtattagttattaaaaaatataatttgggctgggcgcagtggctcacgcctgtaatcccagcactttgggagtccgaggcatgcggatcacttgaggtcaggagttcgagaccaccctggccaatatggtgaaaccccatctctactaaaaatacaacaaagttagccgggcgtggtggcag

SEQ ID NO: 27652 - DNA, 467 bp, Homo sapiens
  misc_feature (1)...(467): n = A,T,C or G
aaggggaaaaaattgatcccctnnnctcgtagtcattagtccgtgcggnggaattccttaaataagccagtgtttttaagacagaatactacttgcatagtggacaataatatcttaaagaactgagcaggatgaaaagaatttgatagaaagcaggtttgaggagcacattggaggttggcaggtttcgaggctgcttgagaggacttgggccgatctgggctgggcttggacgtgaccctggcacccaggcaggtggatcccagctggggcttccattcacgactttctggtccctggcaggacagagcgggatgccaccagcttgtccaaagggaagttccaggagctcctggtgggcatcgttgtggagaatgacgctggccgcggcgagatcaacgagttgaagcaggtggaaggggaggcttcgtgcagcatccgcaaaggaaagctgattttcttctatt

SEQ ID NO: 27653 - DNA, 467 bp, Homo sapiens
  misc_feature (1)...(467): n = A,T,C or G
agggagaaaanttttgatgacattagtctggatggccgtattcggaaaatataggtaaatatatttttgactttggggtagtgaaagactccttaagccacaaaaagaatttaaaaagaaatgatgaacatacttgaccatatgaaaattagaacctaaatccataaaccttaagaaagtgaaatctaaactacaaactgggagaagagataaatagtctcaagactacatgaagaactctgataaatcaatgagaaaacaacctaataggaaaatagaaaaaaaaacatgcataggcatttcatggaagaagagatacaaaaggccaacaaacataaaaagaaatattctatttcgttagtaatcagggaaatgcaaatcaaaagtgcaatgaggtacattcagctggtaaattttcagaagtctgaaaagcctatactggtgagaatgtggatcaacaagatttc

SEQ ID NO: 27654 - DNA, 423 bp, Homo sapiens
  misc_feature (1)...(423): n = A,T,C or G
gggccgctgacgtggaaccatcgtcaccggaacccaagaggcggagggtcggtgacgtggaaccgtcacgcaaacccaagaggcggagggccgctgacgtggaaccatcattacccgaacccaagaggcggaggttgagctgagaagaggccagtgcactcaagcctgagcaataagaataaaaccgagtagaacaaaataaaaaattcaaaaaacaaaacccacactccaaaaactaacaaagaataaataaataatataaaaataaaatannaaaaaaaaaaaaaaaaaaaaaaaaaaaaaaaaaaaaaaaaaaaaaaaaaaaaaaaaaaaannaagggggccctttaaaataaaggggccctttaaaacccggggaaaaccccggggggggtttttttaaggcccccctttttgggttgc

SEQ ID NO: 27655 - DNA, 576 bp, Homo sapiens
  misc_feature (1)...(576): n = A,T,C or G
ggcgacgtttcgatcccctnnnnnnnnncnntttttgatcactatccgtgtggtggaattcgaaaatgcaatagatccagatagaagaatggtgttagcatgggatcagtgcaggacagagggaagcatgaagaccgtttcataactgaagtggagaatgatattgggaccacagaactgcaagtttggatacaaagattgttcacttgtgagttcagaaaccccatcttgttggttgcattgaccgttgcagtgcagagaggtcggttcatgaccatggtagagagcagagggtggcagatggcagcatagcaggcataggtgatggcagagagcaagcagccattggtgccccaagaaaaaatgaaaaagaaactctaggtgatataaccccacaccaagataggtttttatgaaacaggaaattctgcagcatcttgggcagtgactgaggagtaacatatatctaggaagaaaaaatgtccaaggaagaattacatggnggtacggaggcaagaatcagcattgattaccaacagcatcatcagattccctatcanggtcaggagataaatn

SEQ ID NO: 27656 - DNA, 468 bp, Homo sapiens
  misc_feature (1)...(468): n = A,T,C or G
aaggagaaaaaactgatncccctnnntttgatgacattagtccgngcggnggaattccaccacttcatctagacaccacagccaggcacatctgtcaggcttagttctcccatgcgccatcctcaagaggcaccagcactttatctgttgagcctttatgtggcaccaactgtgtgcactattacccggttttacagatgatggaggcccagaagcaggaggtggctggtgttaggtcacacagctaggaggcagcagaacggtggggcgctgcctgtgctcttaacccccaggccaagtcaccccatcaggcagtcaggagggctggcggcagggggtgatgtgggtgggaggtagtgccttcttggcattctcaccgcagcctgggtgccgggtgccactctgacctcagccatggcagggtcgggggatgccgatgggcgctgcacgggctctcagaggcccctc

SEQ ID NO: 27657 - DNA, 463 bp, Homo sapiens
  misc_feature (1)...(463): n = A,T,C or G
ggggaaaaaanactgatgacatctgtatgtgcggcggaattccggagaccctgggaatgggaggcctggagcgctgggtttctggaattgagagctcggtgctcttgtgggggtctccgtggggcaaactcaggatgctcccggccccggggcctggcagcactcgggattgagacctgggctgtccagagccctgtgctcacaggggtggtcatagaacgcccagggcccggggtcggcggcgcacggtccccagaagagtgaacatgcgtcaaggggactctcatcctggaatggcagactcggtctgttggatccctgggacctagggtttcagctcacgaggctttgcagagcaccagggtccccatggaatagagccggaggcaggaattaccctaagacctttggtctcccggatggagagcctggggcacaccagagtggctagagatccctctac

SEQ ID NO: 27658 - DNA, 465 bp, Homo sapiens
  misc_feature (1)...(465): n = A,T,C or G
agggaaaaannttcgaagacactagtctgtgtggcggaattccaggtttccttcaaaaccaacaagtcccacaaataactcgctcatgcttttttttgtacggaatagataattaagagtgaaggagttgaaacttttcttgttagtgtacaactcattttgcgccaattttcacaagtgtttgtctttgtctgaatgagaagtgagaaggtttttatactctgggatgcaaccgacatgttcaaatgtttgaaatcccacaatgttagaccaatcttaagtttcgtaagttatttcctttaagatatatattaaacagaaatctaagtagaactgcattgactaaccagtccctctggatggtggtgaacctgaagcatgctttaacctctaagactgtctaacacgcgtttcattcaatgtctccacagactgggtagcaaaaaaatcaccttttagttttag

SEQ ID NO: 27659 - DNA, 443 bp, Homo sapiens
  misc_feature (1)...(443): n = A,T,C or G
aattgaagaccactagaaagcgcggnggaattctgaagagtcgggagcagggaggacggctgggagccgaaagccggaccctgctggtcatagcgcaccctgacgatgaagccatgttttttgctcccacagtgctaggcttggcccgcctaaggcactgggtgtacctgctttgcttctctgcagttttccgtagggagctaagtgaatacaccgaaggtcttacctctgaacccctcacagcctagggacaggagcggccggcttacctggtgggttgggggacgtcggcagctcgcgtactacgccagcaggattgaggagcagagaaacagttgcagttggttgtattcagtacctgcatttccgttgggaactccacctgtacttgttattctgtggaacttttttttatttgtagaacgagcaagaatattgacctn

SEQ ID NO: 27660 - DNA, 447 bp, Homo sapiens
  misc_feature (1)...(447): n = A,T,C or G
attgacnnccctttgatgacccctagtccagtgcggtggaattccgggaaggctgtggtgctgatgggcaagaacaccatgatgcgcaaggccatccgagggcacctggaaaacaacccagctctggagaaactgctgcctcatatccgggggaatgtgggctttgtgttcaccaaggaggacctcactgagatcagggacatgttgctggccaataaggtgccagctgctgcccgtgctggtgccattgccccatgtgaagtcactgtgccagcccagaacactggtctcgggcccgagaagacctcctttttccaggctttaggtatcaccactaaaatctccaggggcaccattgaaatcctgagtgatgtgcagctgatcaagactggagacaaagtgggagccagcgaagccacgctgctgaacatgctcaacatctccccc

SEQ ID NO: 27661 - DNA, 449 bp, Homo sapiens
  misc_feature (1)...(449): n = A,T,C or G
nttgtccgatgaccatcagaccgngcggtggaattcctgcacttggccagcctgccccccggaccacactcttcagcggcatctcggaccgcatgctacaggacacggtgctggccgccggttgcaagcagatactggtgccttttcccccccagactgctgcttccccggatgagcagaaggtgtttgccctctgggagtctggagacatgagtgatcagcatcgacaggttttgcttgaaattttttccaaaaattaccgggtacgccgaaacatgatccagtctcggttgactcaagagtgtggagaagatctcagtaaacaggaggtggataaagtactaaaggactgctgtgtaagctatggtggcatgtggtaccttaaagggacagtacagtcttgacaatagtagcaaactactaacccagcaaatctaagcccaaggaag

SEQ ID NO: 27662 - DNA, 474 bp, Homo sapiens
  misc_feature (1)...(474): n = A,T,C or G
aacggagaaaagaaatcgatnncccttnnnncttgatgtccttagtccgngcggnggaattcctcgggttttagtctggggggcatgcctttgtttttcaccctccagccatggtgcatggtggtttctcattggtgatgaagtggagctttcaaaatgaatccatttcagtaaaaaaagtgggtcaactaaatacaaaatattaactaggtgacagtttatttggtgcatggagagggacgacatcacaaaggcagccctcaaattatgcaagcttggaaatcactgcctcatatctccttccagaatcaggagcaggcagcacccgtgtctcagcgcacaccctgtccttgtcttgcacctgatagtgaggcaggagaattgggtctggaggcagggaacctgaggccgattcctgctgactggataccagaggcaacctcttttcaacccctcctttttttgctggcagat

SEQ ID NO: 27663 - DNA, 441 bp, Homo sapiens
  misc_feature (1)...(441): n = A,T,C or G
attgatgaccatttgacagcgcggnggaattccacgattccctaataaatcatgtttccaaggcagagccacttattctcccgggccatgaattgccgtctgggtctagcactttgggtcggctcaagctttgtgccgtggctccctggggcacagtacaggatggcggactcccctcgcctggtctgtagaccccagcatttggaagggcacatggtggctccttgccacccatcagatgctccaagggcaggacctgctctggcaacccagtaggttcaggcaggaacttggcacacaggagctggtctcaggctgccccacaggcagggaatgactactagtgaccctgaggcctctggagaccagacagacggtccagcctggctctgcagcataaaacaatttgtcacacggactgtcagcaaacaacaatggcgg

SEQ ID NO: 27664 - DNA, 446 bp, Homo sapiens
  misc_feature (1)...(446): n = A,T,C or G
nttgaaaccccactgagtaccattagaccangcggnggaattcggtaaagaatgagaggacgcagcggctccactgcccctgccagttccctgtctgctgtcaaggaaggagagctggggcactgctgtgaactacacctgggagtgcccttatgctccaaggtacaggcactcccagaacagggctgaccctgcagctccccgggtgtgatgaactcccagggctgcgcaaacacccacctggacagcttggcaaactccaacgaggcctcaaggcaacacattacagcacagacctggcaattttataagctcctaacacccaggaagcggcatccagtgtccctggcctcaggcagagtgtggcctgggtggggctgggcacagccttgtaactgaaaactggacttgtttcttagcatctgagggcaggccctggtgcgtcn

SEQ ID NO: 27665 - DNA, 476 bp, Homo sapiens
gagggcccaatggagccatagttgacgcacattagtccaggcggtggaattcatccacacctcaatacatagatatgtattagagaaggaaaggaaaaatatttactcattaataataccaacacatgaaagtgatttcagagtatggagtcttgagtcaaaaacaaaggacccttcccggaagcttccttttttgcttcagtttttgaatttgactgaaggaaggtggaaatgatcactcgagcccctaatgaattctccttagtaaaatactggcgaggaagaatcaatcccagcaacaggatgatctgggaccagtcttcagatgttaattcccacttggccctactcttctcctttagaacgtttttcttgcaaaatataatttaatgcatttcagattccccttcctacctaaatagggccatagaataataattatctttcttatgggtcttggtatctaaattaggagg

SEQ ID NO: 27666 - DNA, 582 bp, Homo sapiens
  misc_feature (1)...(582): n = A,T,C or G
aggagacgaatttggatcacanttagnnggnnnnnanatttcgaaccactatcagtgtggtggaattcggactggtgggcaggctcccccatggctgacagaccacgatgtgcagatgctccgtctgttggcacagggggaggtggtggacaaagccagggtccccgcccatgggcaggtgctacaggttggcttctccactgaggctgcccttcaggacctgtcctctcccaggctcagccaactctgttcccaagggctctgtggcctgatcaagaggcctggggacctgcctgaggtcctgtccttccacgtagatcgtgtgctggggctgcgccggagcctacctgctgtggcccgccgcttccatagccccctcctgccctaccgatacacagacggtggagcaaggcctgtcatctggtgggcgcccgatgtgcagcacctgagcgacccagatgaggatcagaactctctggccttgggctggctgcagtatcangccctgctggcacacagctgcaactggccaggccaggccccgtgcccgggcattcaccataccgagtgggcacgcctggg

SEQ ID NO: 27667 - DNA, 465 bp, Homo sapiens
  misc_feature (1)...(465): n = A,T,C or G
ggggggaaannttttgtgtcactagtctgtgtggcggaattcgataattaagagtgaaggagttgaaacttttcttgttagtgtacaactcattttgcgccaattttcacaagtgtttgtctttgtctgaatgagaagtgagaaggtttttatactctgggatgcaaccgacatgttcaaatgtttgaaatcccacaatgttagaccaatcttaagtttcgtaagttatttcctttaagatatatattaaacagaaatctaagtagaactgcattgactaaccagtccctctggatggtggtgaacctgaagcatgctttaacctctaagactgtctaacacgcgtttcattcaatgtctccacagactgggtagcaaaaaatcaccttttagttttagtttttaatctaaagatgttagacagatgctgagtgtgcgttttctcaaccgcttcaacattgtaag

SEQ ID NO: 27668 - DNA, 446 bp, Homo sapiens
  misc_feature (1)...(446): n = A,T,C or G
ntttgaaaccccctcgatgacccctagtccangcggtggaattcccagagaggtggggatcctgcctaaggttgtctacgggggcacttggaggacctggcgtgctcagacccaacagcaaaggaactagaaagaaggacccagaacggcttgctttcctgcatctctgtgaagcctctctccttggccacagactgaactcgcagggagtgcagcaggaaggaacaaagacaggcaaacggcaacgtagcctgggctcactgtgctggggcacggcgggatcctccacagagaggaggggaccaattctggacagacagatgttgggaggatacagaggagatgccacttctcactcaccactaccagccagcctcagaaggccccagagagaccctgcaagaccacggagggagcgacacttgaatgtagaataggcagggggc

SEQ ID NO: 27669 - DNA, 518 bp, Homo sapiens
  misc_feature (1)...(518): n = A,T,C or G
acgcgcttctagcagacgctatagtggagagagctgcgactacacgtgggggatttgttgcatgtgctttatacctacccgctacaatggtgcaggcttcctagcccagcgcttatatatgacgctctgggacccctgcctgctgggtgtttcttaatgcaccaaccactttcgctggtgctgactgacgcacgtgctgtcatatttgcggacaagggcttgggatggaccctcagccccatggtacgccctgcccagtttccagttgccctgtccacttaccctaggtagccccccaccccatcagtgccgagtccttgtccctacctccagcttcctccagcctcaaaccgcctctggatctagctgtccttctccgagtggcacgcctgccccaggatgccccctttccctcccccccatgcccagagccccgcctgcctcagcgggtcaggccttcagaacactgccacccacccagttntataatcccgcttcctctccaggcaaccccaccc

SEQ ID NO: 27670 - DNA, 589 bp, Homo sapiens
  misc_feature (1)...(589): n = A,T,C or G
cgcgcatcgancnccnntnnnnattagaattactagtccagagtggnggaattcatcccacaggcagcaggcacacagcccatgggctggatccttccacactttcctgacagaccagaaccagagcatctcgaggcaactgttagaaatccagggacgagacaaacagagaagcgctggtgaagccaacatagagactgtcaatgtgtacactggagttcccacccccaccccccacccatcacttagcccctgcctccttcccccactcgttgtcttggcttgtgctttctcctctccccatcggggatccgagactctgccaggattcacatgccactgaagcccactcagtgccctctggtgaccacacataccattcccccggactcccacccagcaggcagctgtgaccgcagaagggcaggatgaagtgggccaaggtttgggacaggttgactgtgtaggtgacagggagggaaagatgatggccaggggaaagagcatcgtataggctaggggattgaactgtgaactgattcagtgtanataanaataaattaacagctagtagttcctgtcagttctg

SEQ ID NO: 27671 - DNA, 476 bp, Homo sapiens
  misc_feature (1)...(476): n = A,T,C or G
agcgggannnnnntttgctcgacctccatagtcagngcggtggaattcccgcaacagagccatggagaagagccacactcccttcagccatggcggccatttccccaccatcttctccaccaaccccaacctcctgctgatggagcgcgccagcacccgggaccgctggctgcacaagcccagctacactcgcttcaacctggacagccatcgctccacagagcttacaaatttctaccagatggtccagcagcatcggaagtactatcaagacaagacgggcacagtgcctcgagtcccctactttgcgatgcccgtgagggagccggaacggtaccccctccccaccgtcctgtgagtgcctgccctcccttcatctacgcagtcaagaaacgcacccatggggcacctgctctcggccaggcatgcacagcacacagactgagaaatgagttgaggatcttgccctaaaacgn

SEQ ID NO: 27672 - DNA, 575 bp, Homo sapiens
  misc_feature (1)...(575): n = A,T,C or G
ggaggcgacattcgatcactgtccgtgtggtggaattctcttgatgacccgctgctcttttggaaatgggtgacctgaagtgacactttttccacaattaacccaagttgtgttaatacttcaggtctgtttcccagacccagaaagctttacagaaaatcattgtaagacaatttattaatttgagaaagtcaccttgacagttctttgcacacaagttttacacctctctggattcgaagtttgtattgtattcatagttaaagggaatcgggtactttgcttgttgaataatgcactttaaaacaaggaaccgtatcaggccagcatggtggctcatgcctgtaatcccagcattttgggaggctcaggcagacaaatcgctctagctcagaagttgcagagcagcctgggcaacatggtgaaacccgtctctaccaaacagacaaaaagcagccaggcgtggtggcacatctgtggtcccagctacttgagaggctgagccaggaggatcgcttgagcccangaggcnggaggtgcagtgagctgagaatgcaccacttatttgcactcag

SEQ ID NO: 27673 - DNA, 540 bp, Homo sapiens
  misc_feature (1)...(540): n = A,T,C or G
nggttgcaactgatcactantcagtgtggtgcaattcccagtccccattntctggtaaggtttctaggaggtctgttaggtgtacatcctgcagcttattggcttaaaatgtactctccttttatgtggtctctttggggccgattgggagaaagagaaatcaatagtgcaactgttttgatactgaatattgacaagtgtctttttgaaataaagaaccagtccctccaaccctcagacctatttgacttttatttattaaaactaaatgtgctttctccacagaagctatgaggtttgggttaaaaatagcatctttgtgggtggtagcaacaggatttattctttattattattatttttgagatgaagtttcattcttgttgcctgggctggagtgtaatggctcgatctcggctcactgcaacctccgccttctggttcaagagattctcctgcctcagcctnccgagtagctgggattacaggcaccttgcaccatgcccgggntatttttatatttaagtagagacaggctcn

SEQ ID NO: 27674 - DNA, 491 bp, Homo sapiens
  misc_feature (1)...(491): n = A,T,C or G
ggataagacagagtggcggggnnnnnnnaatcgagacctcgagacattcggcgangcggnggaattccccctgcccaaccctgggagcttcgatgagctgcaccgtctatgcaaagatgtattcccagcacagatggagggagtgaagctcgttgtcaacaaggttctgagcagccatttccaggtggcgcacactatacacatgagtgccctgggcttgccgggatatcacctccatgcggcctatgcaggggattggcagctcagtcccactgaggtgttccccactgtggtaggggatatggacagcagtggcagcctgaacgcccaggtcttgctcctcttggcagagcggctccgagctaaggctgtcttccagacgcagcaggccaagttcctgacatggcagtttgatggcgagtatcggggagatgactacacagccactctgaccctaggaaatcctgacctgattggngagtcggtgatca

SEQ ID NO: 27675 - DNA, 459 bp, Homo sapiens
  misc_feature (1)...(459): n = A,T,C or G
gaggccaggcnaggcccctaagaggcactcgtantgatcgcgctccgananccnggnggaattcctatgatttcacgtgcaggtctaatttcaaagggctagtattagtactacttatcagatgtaattatgtttgggaaatgtacatagtcaaacagaagtgcctcattttagaaatgagtagtgctgatggcactggcacattacagaggaggcttgattaatactcattggtatattccagtagctatctctctcagttggtttttgatagaacagaggccagcaaactttctttgtaaaaggctggttagtaaattattgcaggccacctgtgtctttgtcatacattcttcttgctgttgtttagtttgttttttttcaaacaaccctctaaaaatgtaaaaaccatgtttagcttgcagctgtacaaaaactgcccaccagccagatgtgacg

SEQ ID NO: 27676 - DNA, 548 bp, Homo sapiens
  misc_feature (1)...(548): n = A,T,C or G
nttcgaacaatagtatcactattccagagnggagcgaattcactgtgcctcanttatgctgtacctgggagtgggcaggccctctcccatgtcaccatcaaaacccactgatgaaggctggtgggagtctgagggctgcacgcgggtatggtgagttcccctcagggattgtgctgagcgccttggcctggcttcttggctccgcccacctgctctccctgccaccaagttgtcttccccgggtggcatgtgccacttggctgcctcgtgcctgggcacagtggtgcctattatgggccctccaggtggctctggtgctcagcctgctgtgagcaggaacagctgagtcccaggggttcttgcacacagcagggctcgggtttgaatccaagctctgctgcttggtcgctgcatgagcttctgctgtgctgacctctctgggttgtctcgtcatgtgtaaagtgacaccagatacctacctcttagggctgccccgagaactaaatngaacatgtgcatgaaccacttaccaagtgcttgttgtctcn

SEQ ID NO: 27677 - DNA, 550 bp, Homo sapiens
  misc_feature (1)...(550): n = A,T,C or G
ntttcggaacattagtccagcgcggtggaattcgagaaagtttccattgtaaagaatactcaaatgccatttaaggaaatgggttcttctgcccctattctttggaatatttagggccaagttcttagtttttgacataaaaattttaaagtattctgttctgattgccgtttcaaacaattgactagaatttcagagcaattacatgagagtaataccattagaatttttaaattacccatagtcctatatgcctaacaagtatgttcatgcttacgtgttctcttcttatctttactgtgtgcatactttcttaataatgccacatggaaattgtttaagcaggaatactcctcaagataattttgtatgtttccttttttctttttaaggtatgtattgggtagaggagcattatatatggaacctctcacaaaacaggtgattattttcttattatactcaattntcaccctgaatagagtgttntgatttatgtaagtagatcgtaagtagatggctctcttaaagacattntagtgggtttttg

SEQ ID NO: 27678 - DNA, 461 bp, Homo sapiens
  misc_feature (1)...(461): n = A,T,C or G
gggcagcgcaatgaaaaccctcgaactgagatcatanacagngcggnggaattcgaagcacaaagaataacttgtccaagatcacagagtttaggaagtaaggaagcagggctttgagctttgcatcaagtgatgacccataaatgcaaatggaatacaacaggagtgggtccctaaagtcccacccagagaatgcccttctgccaaaaaatttcggattgaaacagcaaaaacacctaagcaactgatagtcaggtggttctctgatttaattgtttgaaagcagtcactggaagcaaagctatgtgactcagctttggtgatgtactccagctggagtctgacaggccaggtgcagtggctcgcacctgtggtcccagcactttgggaggctgaggcgggtggatcacctgaggtcgggagtttgagaccagtcttgccaacatgttgaaaccccgtct

SEQ ID NO: 27679 - DNA, 549 bp, Homo sapiens
  misc_feature (1)...(549): n = A,T,C or G
nttcgaacttccgatcnactagtccgagtggtgcaattcattgcctctgaacccagatggcaatccatcccggttctctctgagggccacgggcttgggtagtggaaagggtgtttgggaaattgttaaatcagttacccgtagtagagctatttcttgtacttctaagttttctagaagtggaaggattgtagtcatcctgaaaatgggtttacttcaaaatccctcagccttgttcttcacgactgtctatactgagagtgtcatgtttccacaaagggctgacacctgagcctggattttcactcatccctgagaagccctttccagtagggtgggcaattcccaacttccttgccacaagcttcccaggctttctcccctggaaaactccagcttgagtcccagatacactcatgggctgccctgggcagccagcattcattgtaagttccctctttgaaaactggtgtgtggggttcagttctgtgtctggcggggatagacagacagtaatctactgtgatctgtgctagctgtgaggcatcn

SEQ ID NO: 27680 - DNA, 450 bp, Homo sapiens
  misc_feature (1)...(450): n = A,T,C or G
ntttgacgcccaatagatgacccttagaccangcggnggaattcgtggtctggcgttagactgccgggagtagcacccagggctctgctcctgttccccgagaagggctgttctcacttgtcctccagcctcctacggagactgcaattagtgatgctgaacgtgcctcccctgtggggctaggaatgaaaagctatacaaacctttttctctgagatctttgcaaacccaggcgttttagaggaaagaacactggcctgggagtttaaagacctgttccctagtcttgattctgctgttggcttactgtgtcaccttgggcaggtctcgtcatctttgatgtctcacagttgcttcatctgttaaacagggagctcagtgtctgtttgtccagcttctcagagttgctgtgcagctcggatgtggcataggaaacagcagacacaggga

SEQ ID NO: 27681 - DNA, 436 bp, Homo sapiens
attttatgttaatctttgcatagttttcttctgaatacaaagtaacagaagatttgattttttaaaaatctctctttccaccatcctttggtgccgtcgtcaaggtgcggatgaatatcctgtctgatgttctcaagaggatcaacaatgctgaagagaggcaaaagacagattattactaggaggtgctccaaagacattctccggtttctaattgtgatgatgaagcatggttacattggtaaatttgacatcactgatgatcacagagctggggaaattgtcgtgaacctcacaggcatgttaaacaagtgtggaatgatcagccccagatttgatgtactcaaagttctagaaaaacggcagaataatctgcttccatcctgccagtttggtttcattgtactgacttcagccggcatcatggaccacgaag

SEQ ID NO: 27682 - DNA, 554 bp, Homo sapiens
  misc_feature (1)...(554): n = A,T,C or G
ngacggatggactganagcggtgcaattcctgacgtgaaacctaccgtagttacacagtaagtcagtcaaattcttggtttattggacagctgacagctgttaagaaggaccctatgttaaaggaaatggatacaatctaataacattaacaatagataatggtttttaaccattaacttccattgataatggttctgattagagcgcaagataactagtgaaacgagaattcccttatcccccttgcggggcatgcgacatgggtatggctcactcttttggtttccctgttgctcaaacccctacgaggagcatgcagacgggcaggtgcagaggccgtggggagcgcttctgggctctgacctcacggcagcgtctaaggatggctgtctgtgactcccgaatccctagtgggcgtctcttacagagtgctctttcagctttgccgtctgcagaaagattatgttaatcagctcgatagaccctctgccttattgcaagggcagtggccagtttaacagctttctgtatcccagttcttgcccagagacan

SEQ ID NO: 27683 - DNA, 472 bp, Homo sapiens
  misc_feature (1)...(472): n = A,T,C or G
agggccgcnnnncncnaccataggactctctgtagngncgngcaattcggngcatgactcttcctaagggatcctcacccttccactttcatgcaagaaggcccagttgccacagattatacaaccattacccaaaccactctgacagtctcctccagttccagcaatgcctagagacatgctccctgccctctccacagtgctgctccccacacctagcctttgttctggaaaccccagagagggctgggcttgactcatctcagggaatgtagcccctgggccctggcttaagccgacactcctgacctctctgttcaccctgagggctgtcttgaagcccgctacccactctgaggctcctaggaggtaccatgcttcccactctggggcctgcccctgcctagcagtctcccagctcccaacagcctggggaagctctgcacagagtgacctgagaccaggtacagga

SEQ ID NO: 27684 - DNA, 552 bp, Homo sapiens
  misc_feature (1)...(552): n = A,T,C or G
nnttcggaacattagtccagcgagtggcaattccgccggctgctgaggcagggcggcgaaaggtcagtcggccgagaggagtccgtggagccaccgtttcatagcctcaaggaaaggatcgggcgtgctcacgagccctctaacccatggcttaaacacccgcttcctaagcctggatggaatgatagggtatgcataaatgttcatgtgggctctggagtataccacgaactgaagtaaggtacatggacgtcttgaatattgtaactgagatgggcaagcctacacctttgcaaataaaggaggattgggaaagattaaggtacttcctaagcgtggctactccaatgaagctttagtatatgtactgaaagaagatcctctcatactgccacagccaagagataaggttgtaaatctttattgggagaagccgtcaaggacagttctgtgaaatgaaaggatctctggatcaccacanagtctggctcagtgactatggcttttgcaacactaaacattnctgtctcaagtcctgtagatggcttgaan

SEQ ID NO: 27685 - DNA, 545 bp, Homo sapiens
  misc_feature (1)...(545): n = A,T,C or G
ntttcgaaccctagtccagcgcggngcaattcattaagggaaaaaaagcanaaacagctttataaacacttgtgaaacaggggtaagtgtccgaagtcaagaccttctgggcccagtggaggtgctgggctgctccgggacaccatcaccacttcaccatccacaacatcctcaagagctgagcagccctgcacagaccctggggggcttcctgttccacaagctccactccctttttcctctccatctttgctgttgggcctcccctccaaatctgcctaacaaaggcagcacgatctttaatgcctgtgcagctttgtaagtggagccaggttactctgttttgaaagctgagattccctgtccagtctgggggaggaaaaattatccaatgtagcatggatggtttcactttcttgtccactcagacacatgctcctacttattaaatggatttattggatgcttcanaagtcctgatgtgtagtagcacanaagtccctgtanaaaaagaagtgcaaaatataaaaattctgagcagtctg

SEQ ID NO: 27686 - DNA, 551 bp, Homo sapiens
  misc_feature (1)...(551): n = A,T,C or G
ngacgatgactgancactantcagagnggngcaattccanccaggaagagctgctgcagcgtctgtgtacccaactcgaaggcctgcagagcacagtcacaggccacgtagaacgtgcccttgagactcggcacgagcaggaacagcggcagctggagcgagcactggctgaggggcagcagcggggagggcagctgcaggagcagctgacacaacagttgtcccaagcactgtcgtcagctgtagctgggcggctagagcgcagcatacgggatgagatcaagaagacagtccctccatgtgtctcaaggagtctggagcctatggcaggccaactgagcaactcagtggctaccaagctcacagctgtggagggcagcatgaaagagaacatctccaagctgctcaagtccaagaacttgactgatgccatcgcccgagcagctgcagacacattacaagggccgatgcaagctggctaccgcgaagcccttcagagtgtggtgtgcggcctttgagaaagctgccngccatgtccagcanatcaatgg

SEQ ID NO: 27687 - DNA, 547 bp, Homo sapiens
  misc_feature (1)...(547): n = A,T,C or G
ngcggagatattcgcggtcaattcgggaaggcgcangaaccctggcagcgggtgttctgggaaggctagtgacagcagatgtcatccaggaacagccacacacggttctccaggccgccgtcagcagctcaaggtggggtatgagtgagaagctgaggatctcgcagcttgttgctgagcaaggtgcaaccgggctcatgctgtcatcagcacaagacgggatggcaagggctttcagacgcatttccaagagtccagcaagccagggggaagatgatccctttgccgaagtgtaccctctagccaacttttgggagcgcttctgtttgcaaagcgctggggatgtgcctgtctctgtgtgacccacgaacgggaagggagagcactggagtaatgacacttctgctgctgctttgattctcaaggctgatctttaaaaccctcgccttgctgacaggtgctttaaaggcagtctgcatcttttcttcccttggtgtgggagagggaaacactttgatttgctganagctgtatggagtatatttgn

SEQ ID NO: 27688 - DNA, 468 bp, Homo sapiens
  misc_feature (1)...(468): n = A,T,C or G
aggttgttttaactgagaccnctgtcgangnccntgaanacnaaacggcaagtctgcatggcctggctcccactggcctccccagcatcctatccaactgtgctgcttcttgcctcgtgttgccttctgctgaaggacttttgcatgcatctgttagaacacgctttcctttttttctttgtctagtgaatacctactcatcattcagttctcagtgtaggcatcatctaaatcaggcttatttccttcagagcacttccctcggttctaattatacatttctctgtgactgattggtttgtctccctcccttcccagacgagctcaagagtagcagcagctgaatctgtttttaatcacgattgcatctctagcgcctagaaataaatgcacgtggtaggtgcccaataaatattcctcgagtgagtagatgatctttagtagccatcctgctactacatacagaca

SEQ ID NO: 27689 - DNA, 552 bp, Homo sapiens
  misc_feature (1)...(552): n = A,T,C or G
agcgaaggactgancactagctcagagtggtgcaattccctcacttcatccggcgactagcaccgcgtccggcagcgccagccctacactcgcccgcgccatggcctctgtctccgagctcgcctgcatctactcggccctcattctgcacgacgatgaggtgacagtcacggaggataagatcaatgccctcattaaagcagccggtgtaaatgttgagcctttatggcctggcttgtttgcaaaggccctggccaacgtcaacattgggagcctcatctgcaatgtaggggccggtggacctgctccagcagctggtgctgcaccagcaggaggtcctgccccctccactgctgctgctccagctgaggagaagaaagtggaagcgaagaaagaagaatccgaggagtctgatgatgacatgggctctggtctttttgactaaacctctcttataacatgttcaatanaaagctgaactttaaaannnnnnnnnnnnnnnnnnnnnnaannnnannnnnnannnnnnnaannnnncnggcgtgccgggca

SEQ ID NO: 27690 - DNA, 550 bp, Homo sapiens
  misc_feature (1)...(550): n = A,T,C or G
agcgaggactgangacactcagagagggcaattctttcagggagcaaacttanagtctcccttgctcggaagaagcctccaatgaacagtatgcggtgtggtctgccaccccgtgagggcagaggcatgccaccaccactccgtggaggtccaggaggcccaggaggtcctgggggacccatgggtcgcatgggaggccgtggaggagatagaggaggcttccctccaagaggaccccggggttcccgagggaacccctctggaggaggaaacgtccagcaccgagctggagactggcagtgtcccaatccgggttgtggaaaccagaacttcgcctggagaacagagtgcaaccagtgtaaggccccaaagcctgaaggcttcctcccgccaccctttccgcccccgggtggtgatcgtggcagaggtggccctggtggcatgcggngaggaagaggtggcctcatggatcgtggtggtcccggtggaatgttcataggtggccgtggtggagacagaggtggcttccgtggtggccggggcatggacn

SEQ ID NO: 27691 - DNA, 328 bp, Homo sapiens
  misc_feature (1)...(328): n = A,T,C or G
attggacnccaggagcacagcctccagccagcctgcactgggcacataggcaggtgcaccatagacctttggggaatgggacacggatgctggggagtggtttctgcaacatacaaggctgccgggctgcaagtcagtaccaggaccagccccattgtagaggggagaacctgggaacangaagtaaagtcactaccctcaaggacacaccgttacccatggtgggaccaggattcaaactcagactctctacttcatgctgcagcactcctctagtggtctccatgctggagactccttgaggacaacaccagggcctgatacccag

SEQ ID NO: 27692 - DNA, 549 bp, Homo sapiens
  misc_feature (1)...(549): n = A,T,C or G
ngcgagactgacacctatcagagtggngcaattcaactgagacaccctgcctgttagccctgtgagacccctaaccttggcccaagacccctttgattctctaatgagcacgaaagggggaatgcccctcccaggagtttatgggagaagggactgggccggctgcctcccaccgatgcacttgacctgacactccccatgtcctggagcgcacagcccttgtcggtgccccggcccctcccgcagcgttactgcctgtgtatagtataaatatatatattttctatatataagatgtataatataaggctccacaaatatatctgtgtgtgtgtgtgcgtgtgtgtgcggagaaggagcggccccatcctgcgcctgcactctagacccccccaccacctaggtaagtctcgagtgaatccagtggccccgtggcaccctcctttatgacatccatccatctgtggagaaccaagtgaaggtggtgacttctggtgacatantcataaagtgaagactcagaacccaccagcgaatgaaaaaagaaaa

SEQ ID NO: 27693 - DNA, 551 bp, Homo sapiens
  misc_feature (1)...(551): n = A,T,C or G
ngcgatggactgacaccactccagagtggngcaattcggctatttctgccgggcgctccgcgaagatgcagctcaagccgatggagatcaaccccgagatgctgaacaaagtgctgtcccggctgggggtcgccggccagtggcgcttcgtggacgtgctggggctggaagaggagtctctgggctcggtgccagcgcctgcctgcgcgctgctgctgctgtttcccctcacggcccagcatgagaacttcaggaaaaagcagattgaagagctgaagggacaagaagttagtcctaaagtgtacttcatgaagcagaccattgggaattcctgtggcacaatcggacttattcacgcagtggccaataatcaagacaaactgggatttgaggatgggtcagttctgaaacagtttctttctgaaacagagaaaatgtcccctgaagacagagcaaaatgctttgaaaagaatgaggccatacaggcagcccatgatgccgtggcacaagaaggccaatgtcgggtagatgacaaggtgaatntccatttt

SEQ ID NO: 27694 - DNA, 543 bp, Homo sapiens
  misc_feature (1)...(543): n = A,T,C or G
ngggagcgactgnagagcgtggaattcactcacactcctggcttcatgtggcattctctctgctcagtgatctcacttaaatctatatacaaagccttggtcccgtgaaaacactcgtgtgcccaccagcggccttgaagaggcaggtctgggccagatgctgggcaggaaaccccagcggcagatgggcctgtgtgcacctaacgtgatgctatgcatgtctgaccgacgatccctcgaccagaatcagattcaggagctcagtttctttttcacttgggtctctggattcctgtcatagggaaggtatatcaggaggggaagaggcctttctagaattttctttgagcaggtttacaatttagcttacatttttcgactgtgaacgtgaataggctggcttttgctttcttctttccagaccccacagtagagcacttttcacttatttgggggaggcttcaggggactgttctcaccttaactcagccagaaagatgccctagtgtgatcaagggtactcaggtggaggtagccctgggn

SEQ ID NO: 27695 - DNA, 486 bp, Homo sapiens
  misc_feature (1)...(486): n = A,T,C or G
ngggctggnccnnnnaaatgagaccattgagagcattngcagngcctcggannatccggctgcacgctctgcttggccttgccatgccggtggacctcagcaagtggtccgggtccttgagcctgcaagaagtggacgagcagccgcggcacccgctgcatgtcacctacgccggggcggcggtggacgagctgggcaaagtgctgacgcccacccaggttaagaatagacccaccagcatttcgtgggatggtcttgattcagggaagctctacaccttggtcctgacagacccggatgctcccagcaggaaggatcccaaatacagagaatggcatcatttcctggtggtcaacatgaagggcaatgacatcagcagtggcacagtcctctccgattatgtgggctcggggcctcccaagggcacaggcctccaccgctatgtctggctggtttacgagcaggacaggccgctaaagtgtgacg

SEQ ID NO: 27696 - DNA, 543 bp, Homo sapiens
  misc_feature (1)...(543): n = A,T,C or G
gggagcactgacacagtcagagaggngcaattcctggtaagcggcgaccgaggctgccagcagagcagacaccatcctgtgtctagggtccagcctgaaggttctaaagaagtacccacgcctctggtgcatgaccaagccccctagccggcggccgaagctttacatcgtgaacctgcagtggaccccgaaggatgactgggctgccctgaagctacatgggaagtgtgatgacgtcatgcggctcctcatggccgagctgggcttggagatccccgcctatagcaggtggcaggatcccattttctcactggcgactcccctgcgtgctggtgaagaaggcagccacagtcggaagtcgctgtgcagaagcagagaggaggccccgcctggcgaccggggtgcaccgcttagctcggcccccatcctaaggggctggtttggaggggctgcacaaaacgcacacaaagggaaaaagtgacgtaatcacgtgctcgatgaagaacagttgcacttntgcagatggcagtgtcacngtgaagg

SEQ ID NO: 27697 - DNA, 445 bp, Homo sapiens
  misc_feature (1)...(445): n = A,T,C or G
taagaggcttaggaganctgccgaaanccacgaactgcngaaggagcatatggcaaaggaggaggtcctgcaggatcctgttttgaagcatttcaaatcagccttctcatctgcggaaaccacagaattgagtggcaaatgtgtggtggctttggcaacaggtgaagtttgggggcagctggtaataagaaagggcatggaggatgtgtagtgcggtagcatccagtgcccagatctggctcgggagttggttgaggaacatgtcattcttttctctgctttttgaggcccaaggggtcagcattcccagtttgaggtctgagagccttaggagcaggctcctgggaagtgtggaaaaagtccaaggcccaagagaaagagctctccagggatcctgagctccagggctctcagcagtgccctgtccaactgtgcccaaaccttg

SEQ ID NO: 27698 - DNA, 450 bp, Homo sapiens
  misc_feature (1)...(450): n = A,T,C or G
nattgaagatcagttgaccagtgcggcggaattcgacggagcagaacaagcagcgaagaggccactcagggtggacccatgcagcccactgtccaggccctggcaacgctgagtagcagccggtgggcctggaatacgctgagagccagctggcccctgatctccaggtgacagcctcagaacctgttactactctgcccacagacattgtgttggaggacacccagccgttctctcagcccatggttggctcccccaacgtgtatcactccctgccctgcacgcctcacactggggctgaagacgctgagcaggctgtcggtcgcaagacacagagcagtgggcctgggctgcagaaaaatagtgagtgtgtggcactggtggcctggagccaaatttagcttgggtgagagttgacaatggtagttttccttcctcaagcccctctgt

SEQ ID NO: 27699 - DNA, 482 bp, Homo sapiens
  misc_feature (1)...(482): n = A,T,C or G
ccttgaatagcctagcatagngccgggcanttttggattcccaaagcgctccgatgtgtctgagctgtccagttctcccccaggaccctaccatcatgagccctacgtctgcaaacccgaagagcgctttcgggcaccccctattctccccccacatctcctccaggtcatcctgaacaaggacacggggatttcctgtgatccagctttgcttcctgagcccaatcacgtcatgctgaaccacctatacgcgctgtctatcaaggatggagtgatggtgctcancgcaacccaccggtacaagaagaagtacgtcaccaccttgttatacaagcccatatgaagagctgggggcggatggtggcccaggagacagcacaccaccaggctccacacgtgcatgctttccccaagagggaatggactgtacattgctcatttcacactcttcagaagacatttcatacctgccctggtcctgg

SEQ ID NO: 27700 - DNA, 463 bp, Homo sapiens
  misc_feature (1)...(463): n = A,T,C or G
gganaatcgatgccctgagnaccattcgacagngcggtggaattccgtccctcctgggcccttgacatccacctgggtgagggctttgtttcatgcctggttctgggtagccgctcactaagtctgtggatcaaatgaatgagtgaatataaatgttcaaatacatgagcatgtgagtcaatgacaatgtctccttggttctggggctgcgaaggtcttcgaaacccccaaatacattctttgggactgacagacctggagactgtctggatggtgtgtgacaggagggtggcctggttgctctggggccaggctggggaggtggatacccccaggcttgactaaggagaagcctgtgaaaaccaggctacaggggttgggtactgagtcagccacggctgtgatggctgaagagcttatgtctcttcgtgaaaagccaggatgggctcatgcctggggaggn

SEQ ID NO: 27701 - DNA, 456 bp, Homo sapiens
  misc_feature (1)...(456): n = A,T,C or G
natcgagnccatgaggncgntcgganggaaccgaaaggtcgctgtctttgaaaacaacgaaaacaggaaaatctgagcgcggagctgataggcgctccaggcaccgggctggactccaactggccagaagtggggtgggggtgggaggacagaaggatttggttccctgccggcaggaggctttggaactaaaaactaggggttgccacgaatcccggcttctgggagtagggattgaaagggaggaggggccgggcgcggtgcctcacgcctgtaatcccagcactttgagaggccgaggcagatggatcacctgaggtcaagagatccagaccatcctggccaacatggtgaaaccccgtctctactaaaaatagaagaaattatctggtcgtggtggcgcgcgcctgtagtcccagctactaagcaggctgaggcaggagaatcgcttgaact

SEQ ID NO: 27702 - DNA, 464 bp, Homo sapiens
  misc_feature (1)...(464): n = A,T,C or G
gccccgcaattgaaaacccctnnnnttttgatgacccatctatccgtgtggtggaattccaaactggctcctttattatgtaaagaataaagtgggctataaaacatgagaatatgcaggctgacccccaaaagcctgacacccttgaaaacccactcccccatgtctcagatggctttcatgggggcaggagaaaggatagtgaccttaagtcttctcccgtgacggtgacagctcgtttgccagctgttgctggaaccggccctggatttataggaaggcgtggaagttcaagactcaagatacttcctggatagagaataactggaaaggctcaagtaagtttttccgaagctctcgccttaggaggagttcagcctggaataagagcgtgtgttagttttgtcatcccacctaactacagattgaattaccctgataggtttttaagccattccagtgtg

SEQ ID NO: 27703 - DNA, 470 bp, Homo sapiens
  misc_feature (1)...(470): n = A,T,C or G
gacggaaccnnnnnaattgagncttgtagacattagtccatgcggtggaattccactgatagaaaaagggaaagaaaagaacagattaagtttccagaagcagtgagatgggagggcaagaagaccaagaaagatattgaaagggttttatattgagaattatgttcattctccttaattccttaacaatcaggcagccgcaaaacctggcaggagcttttggtaaaatgtccaaggcacataattgaaagaatcagtatctgttccccattgtttggaacaaatcttgaggagaatgaatctgtggagtgatgagctaggatatctggattgagatggcctaggaaaagtggtcctggttatgggttatggagagggctgcttttggggattatttataaagatcagactaggctagtcttaaaatatgtcagttcctgggctctctgaatcctacctggtttcttcag

SEQ ID NO: 27704 - DNA, 464 bp, Homo sapiens
  misc_feature (1)...(464): n = A,T,C or G
agagccagcnccctaatgtaaccgttgtgctcagcancgncnggnggaatncgaaggatgctcgaacttgcccaggactcaggcttcagcttcacaatttcgaggttaggaatgacatttccaaactgtcacctttgtagcgctgggtcaaagtctaaagaggacaaataaatagagacttctgtggcctcgttgtgcctattgaacaggagagctgcatgtcacaatcaatgagacctgcacagcttgtgaatcatcactgagactagttgtgtttttaatacctttaaaatgaagccacagcatctattctggaaatgtggcgtaggcttaaaaaccttgctccaaagaggatatcgtttcagccagcatgcagtgaatatctgtggctacacaaaaaaacaaactgtcccgaatgctggaggaggaaatatgacattgtgatgccaggcagttttctgtga

SEQ ID NO: 27705 - DNA, 458 bp, Homo sapiens
  misc_feature (1)...(458): n = A,T,C or G
ttggaagacatccgaaggcggnggttttagaacgtgcgganggcncngagctggacgtcgcggtgtgtcctctgtgcccactttctgagctagctagcgcaccgtcgagttaaagaggagaaggaaaacatgctgctctggtgcacgcctgagcgtcctccatcttccaggatggcagcaatggcgctgtgcggcctcaccaggcccacgaggagcagcagcgctcggcccggagcagcaggaaggcccctctgtggagcgcccgccgtctgctccggggtggttcagtcactgcttgttgacatcaacatggcaattgcactcatgtggactgggaccgtgcgagctgccgtgtgggttagtcgggtgccaggacaatgaaatactccagcacctgtggctgacgaatttgtttctacagaaataacagctggggacaactgcggtgatgatgtaaa

SEQ ID NO: 27706 - DNA, 470 bp, Homo sapiens
  misc_feature (1)...(470): n = A,T,C or G
gcaggctnnnnnnnaattgaaaaactgacgacattcgaccangcggtggaattccgtgagcttaggccgctggttttggtgatttttgtctgattgcaatgtctggacgtggtaagcaaggaggcaaagctcgcgccaaagcgaaatcccgctcttctcgcgctggtctccagttcccggtgggccgagtgcaccgcctgctccgtaaaggcaactacgcagagcgggttggggcaggcgcgccggtgtacctggcggcggtgttagagtacctgaccgccgagatcctggagctggccggcaacgcggctcgcgacaacaagaagactcgcatcatcccgcgccacttgcagctggccatccgcaacgacgaggagctcaacaaactgctaggccgggtgaccattgctcagggcggcgtccttcctaacatccaggccgtgcttctgcctaagaagaccgagagtcac

SEQ ID NO: 27707 - DNA, 467 bp, Homo sapiens
  misc_feature (1)...(467): n = A,T,C or G
tgacgacnnnnnnnttctgagacctgagaacgtgcgganggaaccgnnntngntttagtcccttgctcctgcttctttctacacacacatctaaagacggtgcggcttgctctgtcatgggttccgtctctctctgtggagaagcagctccacctctgggggggctcggggcagaggggcggtgtctcgtagcgggcggcagcgccagcgcccctctgtcaggctggggcaatcttggttttgtgtccaaaggtgaaggggtaggaggagggccctcagctggccctccccacacacaggacggcaggggcactgtgaggcttttcttattaaaatgaaaaaattgaaaaaaaaggacaaagagtcggtggcgctcctctgcagggcgttctgtgcagagcgaggcccaaggcgcagccctcagagggctgcaggcccaccctgcccagtgcccgccgccgtgcttn

SEQ ID NO: 27708 - DNA, 443 bp, Homo sapiens
  misc_feature (1)...(443): n = A,T,C or G
naccgatgacctacagcaatngcggnggacttcggaagatgaagaatggctttcccaggttgaaattgtaacacacactggaccccatagacgtctgtggatgggtccacagttccagttcaaaaccatccatccctcaggccaaaccacagttatctcatccagttcatctgtgttgcagtctcatggtccgagtgacacgccacagcctcttttggattttgatacagatgatcttgatctcaacagtctcaggatccagccagtccgctctgaccccgtcagcatgccagggtcatcccgtccagtctctgatcgaaggggagtttccacagtgattgatgctgcctcaggtacctttgacaggagcgtgaccttgctggaggtgtgcgggagctggcctgagggcttcgggctgcggcacatgtcctccatggagcaca

SEQ ID NO: 27709 - DNA, 443 bp, Homo sapiens
  misc_feature (1)...(443): n = A,T,C or G
catcgacaatcgatgactcttagtccgngcggtggaattcgctcatggctcctcagcatcatccagggccccccacagaccaggtagtttatgagctttacatggacgaaccactttcaatctatgtaccagcacttagaggtaggggccgttagcaccacttacagctgagaaaactgaggcacagagaggtgaaggtccttgctctaggtcacacagccaggaagcggcagagctggagttaaaagccaagccctctggcccagaggctgtgctgggaacggcaggtctcagtggtggacagtgagcacatgactgtcaccctggctcccagaactctgttttcttgggaatacttagctcccttctcccagtgtctactctaagggcactgaaaatgccctggaagcaggagagagggactggtagtctcaggaaaattc

SEQ ID NO: 27710 - DNA, 565 bp, Homo sapiens
  misc_feature (1)...(565): n = A,T,C or G
cttcgacttcgatcncctatccgcgnggtgcaattcgttgganaggaaagaaaagagttttaaatttgagctatttattataccattggtagaaatgtagattggtataacttttagataaatcaatttggcaggtcttattagaactttaacgagtcaatgaatgccatcccaagagtttatttttgagaattctcttaaggaattaattagagatgcaaccataggtttatctatgtgaatgtaagtcagtttattgatgaaagtttaaaaattgggaacaagctataaatccagcaatgagaggttacttaaagaaattaaatgtacttgatatcatgtttaatggtagaacaagatgtaagattataaatataacatgttcgcattgtgataaaagtatgtaagcttagaaatgacattggaagtaagtgcaaaatgttaattgtgatcatatgtggttagtgggattgttggaaattataattctttttggttcttcatgctttccataatttcttctttgaactttattacttttataatcagaatcttgcttcataag

SEQ ID NO: 27711 - DNA, 463 bp, Homo sapiens
  misc_feature (1)...(463): n = A,T,C or G
cattgacccccctnggnnatgatgaccatctgaacangcggnggaattcaccggtcacccgccaccccctttacatccagcagaggactcaggctgatgctgccagcaggccactgtggacaccagctagatatactgctgcagggaggccttctgctctaggatgggctgcaagatgggcctggccaccaggaatgcctgctgcttgtggctctccagtcccttcatcattcccagcaggtggaactcacgcttttcaattcagacacaggaatacattggtatccttctcaccctccactgcaggaaacatgagcaccgctcaatcagcttctacactggagcaggccatgttgtgctggcagctgcctgggctcaagcgcctgtcatgagcgcagcacttggcctaagaatgtcagccctgcagccaggctgcctatgttcagatcccagccttgccatt

SEQ ID NO: 27712 - DNA, 459 bp, Homo sapiens
  misc_feature (1)...(459): n = A,T,C or G
cattggactcgagtacactcggccgngccgnggaantttggattacaggcgcgagcaaccgcgcccttgctttcctcttaatcactgtagctctaccccgtggctattcctaggtaggtgccccctccccagcccaaccccaccggtttccttggaggaaaccatccatggtcgatggctgctgggccttgactctctgcccagcgcctctactgcatggatggggttcctgccctcgaagcagacatcttctttttctgactttccaaaagcagcggagaggcaggaggtgcgtcgtgaggtctgggtgcaggacctaggaagaagaggttacaaggaacctgcgccgggagcatgcggtgccctcgggacagacctagccccagggcccgtgggtgtcccttctttccagtggacattcccacccttttcatacagcccatagataaatgaagcagg

SEQ ID NO: 27713 - DNA, 565 bp, Homo sapiens
  misc_feature (1)...(565): n = A,T,C or G
natctgacttcagtcaccgtggnggaattcgtggacggcagacagctatatttagtggtgcctcgacactcacgaaccgccagcgtggcgcctggatcttgcccagctgccagctccccccaccaggactgtggttcctcagtttctcctgccagccccggctcatctcagggcaaagctatagacatggtagatctcatcggggaggttctcctgcctctcctcggccaggaggctgaggcctgcactgcagatgatcctgcggaccacgtcaaggtcccggcacacgctgctgtccacgtcgtccagaatcacgccctcctgggccatgttgtctttgatgacgatgatgccgttggggcggaggctgcccttgcagcgccgcaggaactcggccaggtgctgatcggtgaggtggcctggggagggcagaggcaaggttaccagggcaccatgcaagcggatgtcggcactggatgggatgtacttctcagccccgctgagcccctcatttgtgcccagcattntgtgtgcacacatggcctcattggctctcagtcccgag

SEQ ID NO: 27714 - DNA, 562 bp, Homo sapiens
  misc_feature (1)...(562): n = A,T,C or G
natcggacttcagtcccngtggnggaattccccattcccggtctgctaagtagccggtgtttttccttgacactgaggctaccgctagaccacggtccgcctggcaacgggcatcttcccagacgatggcgttaccgctagaccaaggagccctctggtggccctgtctgggcataacagaagcctcgcactcttgtcttctggtcactcctcactatgtcccctcagctcctatctctgtatggccttttttttcctaggttatgattatagagtgaggattattataatactggaataaagagtaattgctacaaactaatgattaatgatattcatatataatcatatctaagatctatatttggnataactattcttgttttatgttttattatactggaacagcttgtgtccttggtctcttgcctcggcacctgggtggcttgctgcccacatacaacaatgttcatatcctaaactccagaatctgtgaatatcttaggtaatgtgacaaaggaaaattaagatatagatagtgtcagggtaacaagcagctgcn

SEQ ID NO: 27715 - DNA, 456 bp, Homo sapiens
  misc_feature (1)...(456): n = A,T,C or G
ggggggcatgagcctntcggttttgagccatagacaggcggggaattcgatctgtgagtccattttcgtctgatggctactgcagtgcctctgagttggtaaaggccaggcctacagtggctggaatgtgaattcacactgnggaagggctcccatgggggaggaaatgacccttcttgctaagaggatctgcatcaagcgtgagtgactttgcaggcttctccagctgtttgccccggggctggagggctggggtttcctgcttccatctaggcaggaggaactcgcttccagcatgtgacagccatagctgcaggggcattacagtttaagaacagaggtcctgcagcttgttttgacctgttgatctagtaatggtaggacccaaatgaaaacatcttgaattttagttagaggtttagcactcatgtgagaggacagaactggagctgtttn

SEQ ID NO: 27716 - DNA, 469 bp, Homo sapiens
  misc_feature (1)...(469): n = A,T,C or G
agcccccncaagagggccggntnncnnncaactgatactatagtagacctctgnccatgcggnggaattcgcttgctagactccataggggtgggatccgctgagcaagaccatttggctccctggcatcagccccctttccaagagagtgaagggttctgtctcgctggcattccacgcagtacgaaaaaaaattcctgcagctagctcgatgtctggccaaacggccacctagttttgtggttgaaacccggacccctggtggtgtaggcacctgagggaatctcctggtctgtgggttgcgaagaccgtggaaaaagcgtagtttctgggctgggtagcacagtccctcaaggcttcccttggctaggggaggtagttccctaaccccttgcacttaccgggtgaggcaacaccccaccctgcttctgctcaccctccgtgggctacacccactgtctaaccagtc

SEQ ID NO: 27717 - DNA, 471 bp, Homo sapiens
  misc_feature (1)...(471): n = A,T,C or G
agcccccnncagagggcncnnnnnttctnnccccaaagtacatcagtacagcgcggaggaattcgncgcgaccctgctccggacctgacctgaattgcgaccccaacctggactgctcccctgaccgcaacccctacccccgcccaccagcatggcccggcacgtgttcctaacggggcccccaggttagagcctccacctggaaaacgtgaatgccgagttgggcagtatgtggtcgacctgacttcttttgagcagttggcactacccgtcttgaggaatgccgactgcagcagtggcccagggcaaagagtgtgcgtcatcgatgagattgggaagatggagctcttcagtcagcttttcattcaagctgttcgtcagacgctgtctaccccagggactataatccttggcacaatcccagttcctaaaggaaagccactggctcttgtagaagaaatcagaaacaga

SEQ ID NO: 27718 - DNA, 564 bp, Homo sapiens
  misc_feature (1)...(564): n = A,T,C or G
attcgaactctagtccccnggggcgattcccacccncttgccccattttgggtcgcctgggtcctcagtcctagcggatcctcagtcctagcggccaccgggtctgaaaggagcaagacgatgatcctggcgtcggtgctgaggagcggtcccgggggcgggcttccgctccggcccctcctgggacccgcactcgcgctccgggcccgctcgacgtcggccaccgacacacaccacgtggagatggctcgggagcgctccaagaccgtcacctccttttacaaccagtcggccatcgacgcggcagcggagaagccctcagtccgcctaacgcccaccatgatgctctacgctggccgctctcaggacggcagccaccttctgaaaagtgctcggtacctgcagcaagaacttccagtgaggattgctcaccgcatcaagggcttccgctgccttcctttcatcattggctgcaaccccaccatactggacgtgcatgagctatatatccgtgccttccagaagctgacagacttcccttcgatcaaggaccaggcggacgan

SEQ ID NO: 27719 - DNA, 556 bp, Homo sapiens
  misc_feature (1)...(556): n = A,T,C or G
cttcgacattcgatcactagtccagngnggnggaattcaacggatagtgagcttgtgcccctgcctaggtgcctgtgctgggtgtccacctgtgcccccacctgggtgccctatgctgacccaggaaaggccagacctgcccctccaaactccacagtatgggaccctggagggctaggccaaggccttctcatgcctccacctagaagctgaatagtgacgccctcccccaagcccacccagccgcacacaggcctagaggtaaccaataaagtattagggaaaggtgaaaaaaacacaacaaaacagaaaaaagaaaaaaccaaagaaataataaaagaaaaacatgagggcgtgcactggccgatcgccggccggcatccaccttatgagccggatctcacctgcagcaagaactccggttgtgattgctcaccgcaccattggtttctctccctgcgttcctcttgggtgcagggggcataatgttatgtatgatcatatataggaggggtgaggggctggcttgctccntccgnnnnngtcttttgcgcan

SEQ ID NO: 27720 - DNA, 475 bp, Homo sapiens
  misc_feature (1)...(475): n = A,T,C or G
agcgggnnnnnnntttgatcgacgatcttagtccgtngcgtggaattcgaaaaggggtgtggaaagtgaacctcagccgctgggaagtgggagccggaggagggggcggcggtcagtgccgggcggcttcgggcgtcccctataccagagtggtcatccccagctgtggggacattgtacaagaaagggttgtaggaggactgcgaggctgaagggtcacctcggtgaataacgacaacaggcttaggactcagggaaagaaacacccgggagaggaagttaaggacaattaagactttggcagccttcacgatggagaacctgtataccctcttacctctagattctgaaagcaaattaaggggcgttgaatggactggttttcaagcgcagaatgtagcagttcccgattcccttttccttagttcattgattctcaaaccttataatacatacaaatcactgaggagcccgt

SEQ ID NO: 27721 - DNA, 474 bp, Homo sapiens
  misc_feature (1)...(474): n = A,T,C or G
gcgggcnnnnnncctcgatagcactccttagngaggnggaattcgggggctggggcctggctggcctgcaaggtgaatgttatggggatgtagggcaaaggcatgctgggggcccagactctctgacctcgttgcttccctctccccacagcgggaatgcatatcagtccacgtgggccaagcgggagttcagattggcaatgcctgctgggagctcttctgcctggaacacggcatccaggcagacggcacttttgatgctcaagctagcaagatcaacgatgatgactccttcaccacctttttcagcgagactggcaatgggaagcatgtgccccgggccgtcatgatagatctggagcctactgtagtggatgaggttcgggcaggaacctaccgccagctcttccatccagagcagctgatcacaggaaaggaggatgcagccaacaactatgcccggggccactacac

SEQ ID NO: 27722 - DNA, 444 bp, Homo sapiens
  misc_feature (1)...(444): n = A,T,C or G
aatcgatgatcgtcagcaattgcggnggaattctgtttattttgtgtcgagagctcaaacagtgatcaaaatccaatccaacatcataaataccagaaaaggtcagggctgggctggtcataggatcaagcacacacagccgagctgaggttggcacttagtcaactccaaactcttcactagcaaacagcacagggggggacttggcaaggcccggcctcttggcgccccagtcacagaatggaggttcacatggctctgttgtttttgtcgaaggaggagaaatgccattttctcagcagtccttctccttgactcattagtgtagntggcaatgtggttactttttaacttctctgcaaatattcatagaaagagaaggggagtagaaggcaggagctgttaatgtacaccaagctcctattttttgcaggcctccacagg

SEQ ID NO: 27723 - DNA, 459 bp, Homo sapiens
  misc_feature (1)...(459): n = A,T,C or G
tggccatggcnnnnnnaatgagaactgaagacatngcacaggcggnggaaatcgaaaggcggaagcaaacaaccagctactgcccagctctttatcccttatttaggagcagaaagacaagacaccggtgttcctaccctacaaaacgccctgagcctggatggaactgacctggcatcctcttactaagggtaggggcaccaaccaaatgattcacactgacagcatgtgccacaaatctctaaatccccaggactcaaacctaggcagcacccaggaatggcagctctgtgttctgaggggattcccatcctctggtttgagatgccatcctgtgcctcacagctctccaaactggactacaatatgtaacatttattgttattgcaatacgcagcgttactgcattactgcaagctgaagtaatgccttatgtcctcagcatcttttcttcctaac

SEQ ID NO: 27724 - DNA, 566 bp, Homo sapiens
  misc_feature (1)...(566): n = A,T,C or G
attcggacttctagtccacngtggnggaattcttttcgcctcatgggcgcctcggccgccatggtcttcagcgccctgggcgctgcctatggcacagccaagagcggtaccggcattgcggccatgtctgtcatgcggccggagcagatcatgaagtccatcatcccagtggtcatggctggcatcatcgccatctacggcctggtggtggcagtcctcatcgccaactccctgaatgacgacatcagcctctacaagagcttcctccagctgggcgccggcctgagcgtgggcctgagcggcctggcagccggctttgccatcggcatcgtgggggacgctggcgtgcggngcaccgcccagcagccccgactattcgtgggcatgatcctgattctcatcttcgccgaggtgctcggcctctacggtctcatcgtcgccctcatcctctccacaaagtagaccctctccgagcccaccagccacagaatattatgtaaagaccacccctcctcattccagaacgaacagcctgacacatacgcacgggggnncgcgcccncagn

SEQ ID NO: 27725 - DNA, 564 bp, Homo sapiens
  misc_feature (1)...(564): n = A,T,C or G
natcgatatcgattcacngtggngcaatncgtctgctcctcactttgtgttgatggtgacttaggagaatgttccgattttccatgatctaagcaggccacgtttaaaataacatcaaggcaagcgtacgtgtcaccctctgtactgacatctcctcccctgaaatgcttttcagtttgacagcccgtttcctagacaagtgcacctggggtttcaggaactttgtgttttttcggagggggttggtggggaggtcgggatgcctgggatcccttcctggagaggcaggctgtctctggaaaaagcctccattgcccacccgccaggcggaaagtcaccctgttcccagcgcggtttcagcatttaattttaagggagctaaggaagcgcggcgcgccccctggtggtggtaagccgccaacgcacctgttggctgcaaccccaccggacgggtggtccggagggaggctggagcggngaggcgaggagggggctgtgagtcctcaaaggccctgggccaccacatttctggcagcgtttcccagacacccctctgctangccg

SEQ ID NO: 27726 - DNA, 458 bp, Homo sapiens
cactgatgactctagaattgacggcgtttgcctgcttcccagctcgacttcagctagctgtgtccccaggcctgggcccagggcgccctgcgggccagcgtggaggctgacacccacacagatggtgtggaccatgctgccttgtggagctgggagttggagacagccgccaccccacaggccgggctactggcagccacactcggctttttgcccagtggcagaagagaccagccctcctcccatgcccggtcaccatgggggtcaggttatttttgtagggggtctccctctcacactgcctcagtgctcacaaccttccagtgtggatgttacagggtggcccccattctaccgatgtgaaaactgaggcgccaggacacagtggctggcctgtcgctggatcagtagcagagccagagctgcctccgagcgccatgccgccctcaggaatcata

SEQ ID NO: 27727 - DNA, 465 bp, Homo sapiens
  misc_feature (1)...(465): n = A,T,C or G
aggggatgtgcggnnannnnnaaattgatgatcgttagaccttgcggnggaattcgtaccactaccagcaccaacggcaacagatgctgtgcctggagcggcataaagagccacccaaggagctggacacggcctcctcggatgaggagaatgaggacggagacttcacggtgtacgagtgcccgggcctggccccgaccggggaaatggaggtgcgcaaccctctgttcgaccacgccgcactgtccgcgcccctgccggcccccagctcaccgcctgcactgccatgacctggaggcagacagacgcccacctgctccccgacctcgaggcccccggggaggggcagggcctggagcttcccactaaaaacatgttttgatgctgtgtgcttttggctgggcctcgggctccaggccctgggaccccttgccagggagacccccgaacctttgtgccaggaca

SEQ ID NO: 27728 - DNA, 540 bp, Homo sapiens
  misc_feature (1)...(540): n = A,T,C or G
agggagcactgtgcaggcgtgtaattcattcaatgatcaaaaatacactggaccagatagtagactggtcccttgatcagaagcaccagcacatcagcatcacctggaaattgttcccagcctttgtctcctacctactaaattagaaactcttggtgggttccagtaatccatagcttaacaagccctgcagttaatactgatgtacactgatgtccaaaaactgctgtcatggactattgattgtattgaggattagtctcagttggaaagccaactacagaggcattttgaactttctttctttgcctctctatgtctctctgtcttttcctgtcttctgatttatctgtctttctttctctagtaaatggcactcaatataaaagtggtggagtcaatcttaaacttatttttattatgattggattgatacatgcacgaagtccctctgccctactccctattcaaggatattactcactgcacatcatanatctccatcatctgtcttaaagtttatgagtagattcatctacn

SEQ ID NO: 27729 - DNA, 480 bp, Homo sapiens
  misc_feature (1)...(480): n = A,T,C or G
agaggccaggggnngcccccncctagaagatcgtagtgcagtgtggaggaattccaccatagtaaatgccacaagggtagtcgaacacctctctggcccctagacctatctggggacaggctggctcagcctgtctccagggctgctgcggcccagccccgagcctgcctccctcttggcctctcatccattggctctgcagggcaggggtgaggcaggtttctgctcataagtgcttttggaagtcacctacctttttaacacagccgaactagtcccaacgcgtttgcaaatattcccctggtagcctacttccttacccccgaatattggtaagatcgagcaatggcttcaggacatgggttctcttctcctgtgatcattcaagtgctcactgcatgaagactggcttatctcagtgtttcaacctcaccagggctgtctcttggtccacacctcgctccctgttagtgccgtatg

SEQ ID NO: 27730 - DNA, 475 bp, Homo sapiens
  misc_feature (1)...(475): n = A,T,C or G
agggggannnnnntttgatcgacgtcactagtccatgtggtggaattccactcagaaggaggcctggtggagaaccacgtggacagcaccatgaacatgttgggcgggggaggcagtgctggccggaagcccctcaagtcgggtatgaaggagctggccgtgttccgggagaaggtcactgagcagcaccggcagatgggcaagggtggcaagcatcaccttggcctggaggagcccaagaagctgcgaccaccccctgccaggactccctgccaacaggaactggaccaggtcctggagcggatctccaccatgcgccttccggatgagcggggccctctggagcacctctactccctgcacatccccaactgtgacaagcatggcctgtacaacctcaaacagtgcaagatgtctctgaacgggcagcgtggggagtgctggtgtgtgaaccccaacaccgggaagctgatcc

SEQ ID NO: 27731 - DNA, 478 bp, Homo sapiens
  misc_feature (1)...(478): n = A,T,C or G
gaggggagacgccccccccatagagnccctcattgagaccctctgacagngcggnggaattccggcaaaccctctttctcgaccacccacctaccattcttggaaccatggcggcagtggcggcggcctcggctgaactgctcatcatcggctggtacatcttccgcgtgctgctgcaggtgttcaggtactccctgcagaagctggcatacacggtgtcgcggaccgggcggcaggtgttgggggagcgcaggcagcgagcccccaactgaggccccagctcccagccctgggcggccgtatcatcaggtgctcctgtgcatctcggacagcacgggagccagtgccgcgcaggaatgtggggtcccctgtgttccctcgccagaggagcacttggcaaggtcagtgaggggccagtagacccccggagaagcagtaccgacaatgacgaagataccagatcccttnnccagcccct

SEQ ID NO: 27732 - DNA, 468 bp, Homo sapiens
  misc_feature (1)...(468): n = A,T,C or G
aggggnnnncagagggcncnnnnttcttnncaactagtactatagtanagcgcggtggaattcggtgaaggtgtggcttcaagagaacctgctggctgtgggcatctttgggctgtgcacggcgctggtgcagatcctgggcctgaccttcgccatgaccatgtactgccaagtggtcaaggcagacacctactgcgcgtaggccgcccaccgcccgcttctctgccaaaaggacgcccacggggagatggccgcacccacagctgcctttcccaccaccagcctcggtgctctgccccatgctgggaggagggagggagggacaggtgcctggagcccccggaaccctgtttctggaaggccctggctcaggtggcttcagggcctccggaccccccctgggaggggtggccacgtgctggctgcggaacccanggcaggggtgggaggggcctccagcacttttta

SEQ ID NO: 27733 - DNA, 452 bp, Homo sapiens
  misc_feature (1)...(452): n = A,T,C or G
gggggaatgagaccatcgaaaactcgtgccctacgganagcctggnggaattcgtccctggatctcccactcagatgaattcttacgggcctgtggtggcccttcttacagcgtcccgtagtacccttgccatggacaccacaggacttcctgcacctggcatgctgcccttttgccatctctgggtaccggtgaccctagtggctgctggggctgcacagcctgctgcctccatggtcatgttcccccatctcccagctctgcaccaccattgcccccacagccaccgcacgtcacagtacatgccagctagcgatgggccccaggcgtacccagactacgcagaccagagcacatagagggcagcatttgggcagaatatgtgctggtcaataaatgtgtcagaaaatgagtaattttctgactgcacaaaaagtcttcatggtctccan

SEQ ID NO: 27734 - DNA, 502 bp, Homo sapiens
  misc_feature (1)...(502): n = A,T,C or G
gaagttaaggagnaannnntttgannccttcgtagacactagtcagtgcggtggaattctcagcatcctcaggaccaagttgttgcttaatttattgttttttaataactaatccagataaaaagttgtggggcttcagggtgacctgggcccaaaggttctgaagggcagttcctggcagccccaggcttgctgtgggaaggggccgtgccgtcactttctcatcattccatggggtgtgtctgcctgggccaactctgcatggagaggccagggctggggacagtccgcactctgccaccctcctgccccttccacccaccccagctctatgtctgtgtctgaattgtggatcgtgcagccatggttattgtggaactgtggaacctgcagccatagttatttgactatatcttgaccgagggcttgcagtgcaaagccaggccagtgttgcgcattacttacaataaaagggatcatttataaaaaaaaaaaaaaaaaa

SEQ ID NO: 27735 - DNA, 436 bp, Homo sapiens
  misc_feature (1)...(436): n = A,T,C or G
accggacctccgantangagaccattggaaaactgaacttctgactggactccatgctgtcgccactcctgggaacccgttggggaggctctgtttggcctcaggtccaacttgtttctgcaaacattttttaaaagattttctcttttaagaaattagaatgggtcctaggatggcccatgaggagttggccccaggccagtgtggccccgtgctgcccatgcccaccgtattccttggtggcccccacgctgccccacacttgatgtagtgtaaacacctgacttggggcattactttttgtgaagatgttggccaggcttccagaggccagagtgaggggccaggtacccttcgtggtggtccaaacacatccccagccctttcttcagaggccccagcaccatgtggctcatccagggctcacctactccag

SEQ ID NO: 27736 - DNA, 448 bp, Homo sapiens
  misc_feature (1)...(448): n = A,T,C or G
cgcctctaanaaaccgggactccgantatgagaccatcggaanagcggaggaagtatgtttggtgggtcagatcttcccttagtttctcctcttctgagggcatgttttgagcaggtttctgagcttggcttggattcagaagtgctgcctgtccggggagaccacccagctgcccagaacaggttcctctacgtgggcggtgccctgcatgccctacccactggcctcagggggctactccgcccttcaccccccttctccaaacctctgttttgggctgggctgagggagctgaccaagccccggggcaaagagcctgatgagactgtgcacagttttgcccagcgccgccttggacctgaggtggcgtctctagccatggacagtctctgccgtggagtgtttgcaggcaacagccgtgagctcagcatcaggtcctgctttccc

SEQ ID NO: 27737 - DNA, 460 bp, Homo sapiens
  misc_feature (1)...(460): n = A,T,C or G
ngccatnagnnngaatggagactatcgaaaactgagacctacggaacagcnggnggaattcccccaaagcacagaaatgctagttagacccacatggttggcagacctcccctcacccccaaatctaacagccgcctcatgtggccactcctggcccttccctgtcacgcctgtgggccaggcataccccagccactttgggaaacaatttgtaaccaactgcatggctataaagaagctggaggcctggtgcggtggctcgcgcctgtaatcccagcactttgggaggccaaggcaagtggatcacctgaggtcaggagttcgagaacagcctggccaacatggcgaaaccccatctctactaaaaatatagaaattaactgggcatggtgtcatgtgcctataatcccagctgcttgggaggctaaggcaggaaaatcacttgaacccgggaggcaaa

SEQ ID NO: 27738 - DNA, 443 bp, Homo sapiens
  misc_feature (1)...(443): n = A,T,C or G
gactgagacctccgaantaggagggcaattggacanactccccccgncccccgacgtccagcccgtgattgacaagctggccgagtatgtcgccaggaactgtctgaagttcgagaccagtgttcgtgccaagaatgatcaaagatttgagttcctgcagccgtggcaccagtataatgcttattatgagtttaagaagcagttcttcctccagaaagaagggggcgatagcatgcaggctgtgtctgcaccagaagaggctcccacagactctgctcccgagaagccaagtgatgctggggaggatggcgcgcctgaagacgcagccgaggtgggagcacgggcaggctcaggcgggaagaaggaggcatcgtccagtaagaccgtcccggacgggaagctggtgaaagcttcctttgcttcaataagctatgcaatcaaag

SEQ ID NO: 27739 - DNA, 439 bp, Homo sapiens
aggagaccggacctccgaatattggaccatctgagcccgccgccggtagctccacaggcctggcccggccactgttccttttatgctgagttgcctgtgacgacccatctggctgcggggactggcctagcaggcaggtcagggccttggaacgactctttagccttctgtcacctggagttgggaccctgcgcatccccatcaggggttctgtgctcatttactttttctgcgtgtacatcctgcgtgtacctcgttaaaggacctactaagctcatggccctgtcatgtttgggaaatgactaaatcttcattcttctcccttggacgccctcctggtttgggaagctgctgctcttgaatgggttttggaagttacacaaaatctccctctaaccacgggtctgtgtggcggcatgcacctggagtggcggggggg

SEQ ID NO: 27740 - DNA, 447 bp, Homo sapiens
agggggactgagactatcgaaaactcgaagcctcggaccagcggggaattgctctcaccccttgtgctgctctcgggccccctcgcgatggcgggcatcctgtttgaggatattttcgatgtgaaggatattgacccggagggcaagaagtttgaccgagtgtctcgactgcattgtgagagtgaatctttcaagatggatctaatcttagatgtaaacattcaaatttaccctgtagacttgggtgacaagtttcggttggtcatagctagtaccttgtatgaagatggtaccctggatgatggtgaatacaaccccactgatgataggccttccagggctgaccagtttgagtatgtaatgtatggaaaagtgtacaggattgagggagatgaaacttctactgaagcagcaacacgcctgctgagattgagagctgctgagtgg

SEQ ID NO: 27741 - DNA, 445 bp, Homo sapiens
  misc_feature (1)...(445): n = A,T,C or G
ggagtactggacctcngaaacntgggcattcgnannagnccgagcnganccccagctgccttcgataccagtgtcttagccccttttttgggattcctcattgagcatccacaaccccgcaagctccaacccagtccctccagggactcagagagcactatttctggagccaaggaggagactgtggccaccctcaccatgaccgaccgggggcccaatcctctctccacagtggtatccacagccacaggcaattatctcaaccgcctggtccccgccgggacctggaagcctgggacagcagggaacatctcccatgtgggcgagggggacaaaccgcagcacagagccaccatctgcctgagcaagatggatatcgcctgggtgatcctggccatcagcgagcccatctactcctgctctggcctgctgacggagtgctgaa

SEQ ID NO: 27742 - DNA, 458 bp, Homo sapiens
  misc_feature (1)...(458): n = A,T,C or G
nttagatagacatcataggcagngncgnggaannctggggctgcagcagagagaagagcactgggcccagacacgcaggaagaagagaggccattgtgggaaactgaggtgctgttaaaagaaaacccacagtgtcacggaaaccaggcatcagcagtagcagcctctcagcaggacaaggggccaacctagagtccccttttgctgtggtgactcccaagaactgtgatggctcacctgggggaaggttctagaagctcccagcagcagcactgccaccctcagaatgcaggtcttcaccaggcaacatcacattaggtaagagaatgcccctagtcattatgtggataggtgcttataccaaataccagggtcacagcccttgcaataacttgaccctcatccttgacaactctggagaacattacaaagcattatggctacaagctgtgttattc

SEQ ID NO: 27743 - DNA, 441 bp, Homo sapiens
  misc_feature (1)...(441): n = A,T,C or G
actgaaacccctgaagaacatctgaccagncnggnggaattcaccagggcggcgcgtggtctacgccgagtgacagagacgctcaggctgtgttcttaggatgaccgagtgggagacagcagcaccagcggtggcagagaccccagacatcaagctctttgggaagtggagcaccgatgatgtgcagatcaatgacatttccctgcaggattacattgcagtgaaggagaagtatgccaagtacctgcctcacagtgcaggacggtatgccgccaaacgcttccgcaaagctcagtgtcccattgtggagcgcctcactaactccatgatgatgcacggccgcaacaacggcaagaagctcatgactgtgcgcatcgtcaagcatgccttcgagatcatacacctgctcacaggcgagaaccctctgcaggtcctggtgaa

SEQ ID NO: 27744 - DNA, 435 bp, Homo sapiens
  misc_feature (1)...(435): n = A,T,C or G
actgatgacctactanacccttgaaaanacgnagaaggaanaagactcaagatggaaggggagccgctgtgcctgtggcaataccacttggatttgtcgacttcataccttcaagccttttccccggggcttttgattgtgtctgtgccccctttcttggcctctctgcagatgcccagtaggggctacctcatcctcgtgctgttcttgtgtggctttctgggcaataaggatcttgaatttcctttctaacactgtgcccggcaaggcggggagcattcctctgccctttgtcttgtgccaacctggaaaggtgcagtctagatttcagtgagaaccctgccagctgagccctgtgcatctactaccttgacacagagtgttttcccactaaaagctctgctctgctctcctggcccaagtaggggattccat

SEQ ID NO: 27745 - DNA, 439 bp, Homo sapiens
  misc_feature (1)...(439): n = A,T,C or G
actgatgaccactganngaccttgganagncnggggaattnaggaaaccctttgtaaaatctttgtgttttcactgcagnttagactgacttcttgtgctttgcacccctgtgtaaccgatggccagcaccatgagaggagtcaggccgcgactgtgcaggagatgactttcccagctttgctggcttcagaagcctttgtacataagagatgctgctacccaagcaccaaagacctgttaagcatgtgcactactgaccacgactctggtctttcctgttgttggcccctctggggctctacagaaacaggctgggttccaggagcccatctccccgctgtctccccctgccccgagtctggaagagggcaaggacacttccattcctctgtaccatggagtcctgcagccccttaacccctgcgtggcaactgtgtn

SEQ ID NO: 27746 - DNA, 438 bp, Homo sapiens
  misc_feature (1)...(438): n = A,T,C or G
atttgagacctccgtagcccctgaaaancggcatnngcgngctggggaccgacagtgtgggtgtgttaggaggatctgtatttagcacatttttgcctctggctaggacagggtggaaagggtggcgtggctacagcctgacccatgggcaccgtcctaccctttgttctgtgcttccgagtgtcatacatgtgctggggtctgtgggcccatgactcagacggtgagctctgaccttcctgagccagggctttgctgtagttgtgcctggctcatgagctctaggacaaggggaccgctccaggtctgcatctacggtgtggcagggcccttcggcactcttgtgcactagtgtcatctttcccattgaaatgactgtgaggaccagaatgtgcacatgcagatgggcagctacttgtctgccctgggcctttatan

SEQ ID NO: 27747 - DNA, 459 bp, Homo sapiens
  misc_feature (1)...(459): n = A,T,C or G
gaaagaanaanttttgagacatnctgcatgacatctgaacagncnggnggaattccgaggccaggatgtggggcgttatcaggtgtcctggagcctgtaccacaagagttcccacgcaggcacctatgaggttagattcttcgacgaggagtcctacagcctcctcaggaaggctcagaggaataacgaggacatttccatcatcccgcctctgtttacagtcagcgtggaccatcggggcacttggaacgggccctgggtgtccactgaggtgctggctgcggcgatcggccttgtgatctactacttggccttcagtgcgaagagccacatccaggcctgagggcggcaccccagccctgcccttgcttccttcaataaacatcacaggacctgggaaaaaaaaaaaaaaaaaaaaaaaaaaanggggcgccccttcaatttaaagggcccctttan

SEQ ID NO: 27748 - DNA, 466 bp, Homo sapiens
  misc_feature (1)...(466): n = A,T,C or G
tgaagacanaaagaaaaaaaanattgatgacatnctgagngcgtcggaanaaccgagcagngctctcggcatcggaccaaagcctgggcacaccctgcctctctcctcagagcaggtttcctgccgaggactggcctagagcaagcactggaaaagaggccctgccatacaccctgcgtacccactgccaggaccctctcagacaagcgtggcacagccatgctgaccttccatctggtgaaccaagtggcagccccaggggcctgccctgcaggtcacagctaaacaagtctggcagaagccacgcttgttccccatgtacctctagagaagcagaaaccaaagtccccctgtgccctgggagggtggggccgtctaatttattactgcccagcattccttccaacgggaagtagatgggcgactgctttgttcacacacatttgattaaaaataaacaaacagn

SEQ ID NO: 27749 - DNA, 439 bp, Homo sapiens
  misc_feature (1)...(439): n = A,T,C or G
actggatgaactnctaagagcgtgggggaanacggncgggnggcgggaggaaccgttacgggaactgaagttgcggattaagcctgattaagatgtttacctcccaaaagcaccgagacttcgtggcagagcccatgggggagaagccagtggggagcctggctgggattggtgaagtcctgggcaagaagctggaggaaaggggttttgacaaggcctatgttgtccttggccagtttctggtgctaaagaaagatgaagacctcttccgggaatggctgaaagacacttgtggcgccaacgccaagcagtcccgggactgcttcggatgccttcgagagtggtgcgacgccttcttgtgatgctctctgggaagctctcaatccccagccctcatccagagtttgcagccgagtagggactcctcccctgtcctctt

SEQ ID NO: 27750 - DNA, 463 bp, Homo sapiens
  misc_feature (1)...(463): n = A,T,C or G
agccagccaaatgatncccctnnaactgatgaccatagtacangcggtggaattcgactaatcatgtctaccagacttctagtgagaataaggggacttgatatccataaagcatttagagcagggtgtggcacatctcaactctaaatgaatgttacctgctcctgctgctactgctgtcaccatcatctaatcctcagggaacttcctcctcctttatcccatgtcactcacgtcttcaaactcttcctttctattgtgatcttgccccagtatttaaaaattgttttggctcatgcctgtaatctcaacactgggaggtcgaggtaggtggatcacttgaggtcaagagttggagaccagcctggccaacatgctgaaaccctgtctgtacaaaaatacaaaaatagctgggcatggtggcgcatgcctgtagtcccagctactagagcgactgaggcag

SEQ ID NO: 27751 - DNA, 454 bp, Homo sapiens
  misc_feature (1)...(454): n = A,T,C or G
cgaagacanancctgatgacatnctgatgacgtctgaacagcggnggaattccctagcccccatgaggttttttgagaccacgccccttgggagcatcctgaacatattttcatctgactgtaacaccatcgaccagcacatcccatccacgctggagtgcctgagccgctccaccctgctctgtgtctcagccctggccgtcatctcctatgtcacacctgtgttcctcgtggccctcttgcccctggccatcgtgtgctacttcatccagaagtacttccgggtggcgtccagggacctgcagcagctggatgacaccacccagcttccacttctctcacactttgccgaaaccgtagaaggactcaccaccatccgggccttcaggtatgaggcccggttccagcagaagcttctcgaatacacagactccaacaacattgcttccctctt

SEQ ID NO: 27752 - DNA, 440 bp, Homo sapiens
  misc_feature (1)...(440): n = A,T,C or G
atttgaagaccctgatagactctanacagncnggnggaattcggcgtgtgcctatagtcccagctactcaggagactgaggtgggtttatcacctgtgcccaaggaggtcgaggctgtagtgagccttgatcatgccaactgcactccagcctgggtgacagagtgagaccctgtcttgaaaaaaaaaaaaaaaggtttactttttttattttataaccagttttaaaagggcaaattttttgagtacgggagtgacatagtcaaacctttgtttttgggttaaccacctgccttgcgggagggagggtaaaaaaaaaaatgacaacgggggggtgacttaaaaggctgttaaatattaagggcgaaaggcaagggaacctcacctggaacaaacctgaggggatggaggggaaataatggtttgatggaaatgcccatg

SEQ ID NO: 27753 - DNA, 464 bp, Homo sapiens
  misc_feature (1)...(464): n = A,T,C or G
ggggctgccaaatagatgaccattagnattgagcggcggaattctctagcctttattcacttatttcttttttagagatagagtcttgctttgctgcccaggttggagtgcaatggtgcgatcatagctcactgcagcctgtaattcccaagttcaagtgatcctcccaccttagcctcccgagtagctgggactacaggtacatgccaccacacccggataatgtttttctacctttttttgtagagactgagtcttactatgttgcccaggctggtcttgaactcctagcctcaagttatcctcccaccttggcctcctgagtagctgggaccacaggcatgagccaccatgtccagctctatccagcctttaaagaagcagtttttactacagatagggaaactgtggcccagagaaagaaaggacttgtctgaggtcacccagctggacaccaatgccct

SEQ ID NO: 27754 - DNA, 463 bp, Homo sapiens
  misc_feature (1)...(463): n = A,T,C or G
aggcagccaatagagnnccntnggactgatgaccttagtccatgcggtggaattcgctccatggaggatggatgttctctggaggctgaggttgacacaggagcacgctaagggtgaaaggctttatgttgattccaggcccctgcacgtcaccagagcattggtggtctgtagccaggggctgtgtccaggttctgtcgcttactgctgtgcagacttgggtaagttacttcccctctctgaacctcatgttcctcatctgtaaaatgggatgacaatagctatggattcagttatatcctccttctatgctattgcatagaagtatctataccaaggtgtggacagtcaagccctcaatgaaaggaagctgtgatcgggattgtgactgagatggaatcagtaaccctagaagctgtgatgaagccaggtgaagcagtgccaccgagtgggtctctggagc

SEQ ID NO: 27755 - DNA, 444 bp, Homo sapiens
  misc_feature (1)...(444): n = A,T,C or G
gagccgctnnnnnncccaggctgcgcacatcgtcggncaattanggacgcagtccggagattccgggactgcccggctgctgcagcccgcaagcttctctctcctccccgcttcccctccgcactgcctgggctaaaggcggccaagctgaggctccgaaagaaaagggaaaattgcaacccttgcctacaaccagactgacagcataatttcttaggaatcaagaatcaatacagggttatttctttagattaaaccttaaaagcccccttggaggctgaagaagcagaggatagccatgcatacacttgaacgtgaaaaatggtcctctttcattggagaggtcttcctcttcagctaaaccgacagagtggtgaaaagaagaagggaccccttgttgaccaaaataatccagacaaatcaaatcggccctttccagcaagg

SEQ ID NO: 27756 - DNA, 494 bp, Homo sapiens
  misc_feature (1)...(494): n = A,T,C or G
aggggaaaaaatttgaacctgagtacacttgcnggaatccgccagatgggtaagaggcatttgtaattttaaaaatgtgaaacttgggtttggtgtttttttctatttgcctaaataagcaagccaggctgttgatattttagccagagaaatcggcaagccaagattaacccgaatctgaagtttagaatcttgagtttgcatctgcatcatatcatgctgttttgatgaggaaacatttgccactgaggagttggagggagggcaagacgacagtgttaagtcagatcatttaatggtttcccctaagccctggaaaaatatttgaaagaatggcagcagaaaggttaagaaagcaagccagatttactgcacaatatgcagtacccagtactactttaaatcccaagagaacagtgtgatgtctaatatatacaggtctatgaaaatactgtggaataagcccaggaaggttagatgtgtttgcaaataag

SEQ ID NO: 27757 - DNA, 442 bp, Homo sapiens
  misc_feature (1)...(442): n = A,T,C or G
tcttagnactttagcgnctggaanaacngnnggnatannacaagtgcacttgtttggtggtggaatgtcaactgagaagcttttctatggtttctcgtgcnagaaaactaacatcacatgtgggntatgtgattatttaacagtattaggggctccaaactatcaatatgggttgtatctctatgtatgtaattaatcattttgatcaacatttatagattgcaaggtacaaacttctcagctttgtacgtttattcctaagtatttcttactttaagttctctagcaaaaggaagtgtttttaaattttcttttaaaattgtttattggtaatgtgtggaaattcaagtaatttttggtgccgatattgtattgcgcaaatccactgaatttatttattcgttttgagggaagagagagaccctttcatattgttttatag

SEQ ID NO: 27758 - DNA, 478 bp, Homo sapiens
  misc_feature (1)...(478): n = A,T,C or G
ggagttgccaggntgnnnnaaactgagaccctttcgaggcgtggaancngacanatggagcgggaaattgctgagccactgtttgacctgaaagtgggtatggaacagctggtactgaatgccaccttccgctgcatcctggctaccctcctagcggtgggcaacttcctcaatggctcccagagcagcggctttgagctgagctacctggagaaggtgtcagaggtgaaggacacggtgcgtcgacagtcactgctacaccatctctgctccctagtgctccagacccggcctgagtcctctgacctctattcagaaatccctgccctgacccgctgtgccaaggtggactttgaacagctgactgagaacctggggcagctggagcgccggagccgggcagccgaggagagcctgcggagcttggccaagcatgagctggccccagccctgcgtgcccgcctcacccacttcctgg

SEQ ID NO: 27759 - DNA, 441 bp, Homo sapiens
  misc_feature (1)...(441): n = A,T,C or G
ngggattgatgactattagncagtgtggaggaactctgactggagcaggtataacgaggcccggcctcccaacaacggacagaagtgcacagagagcccctcggacgaggactacatcaagcagttccaagaggccagggaatattaaagagactgggatgaggtggaggacgctgcctctggttctggagcacacacgtgctgcactgacgtgccgactggcgccgagaccttcatagctgcggtcgtgtatatttgtatataccacatgagtatttctcatacattacgctaggggcgtgtgccacgcccaggggactgccttgtgaagccgccctcgccatctgcagagctccttgaaagtgcccctggggagcgatgtgggcagaaggatggggacaacttggaagccagaagaagaacctggaagccacagtgggt

SEQ ID NO: 27760 - DNA, 485 bp, Homo sapiens
  misc_feature (1)...(485): n = A,T,C or G
gggtgtttccggnnnnnnnnnaaatgaaaacccactcgagacataggaagngcgnggaattcgagcagcgtcatctctgaatttgagcaatggtgaaacggaatctgtgaaaaccatgattgtccatgatgatgtagaaagtgagccggccatgaccccatccaaggagggcactctaatcgtccgccaggtacccgtgtcttctctgttgtcagaggctgagcttctcctgtggtcattaacccacttgctcattcactcactcatgctgtttctccatcatcatctgttttcatgttaacaagtcccagagggtcaagtgtcgagtgtcgggggctagggaggcaggtgtgtactgcatgcccagaaggtagcgagtagtctccaccccacatcgctgctcctctgcatgtctgcggcagccctcattcaagcaccgcgctgagtctcacagtctatgtctgagcgggagagaagccacaggg

SEQ ID NO: 27761 - DNA, 446 bp, Homo sapiens
  misc_feature (1)...(446): n = A,T,C or G
gagcggcnnnnnnaaccgacagtcgagcacggccagncnggnggaattccgcctggcagggcagccagctggccaggggggcccgtctgggccagccacctggtgtccggtgagtccccctccagtttcccttgtgcaagcttccaccacacggcagggccaaggggtccccccaacacatttggactgaggctgaagtgaatgaagaaaataacgaacctgcattggtgtgtgtattagttgggggcactttcacttttgagtgatagaaatctaattcaaggccaagcatggagggctcatgtaatccctgagtgcctgtaatcccagtactttgggaggccagggcagatggattgcttgagctcaggagtttgagaccagccctgggcaacatagggagatcctgtatctacaaaaaatacaaaagttagatgggcatggtg

SEQ ID NO: 27762 - DNA, 484 bp, Homo sapiens
  misc_feature (1)...(484): n = A,T,C or G
agaagtgtgccgggntgnnnnnaaactgagacccctcngaggccgtggaanncgcgagagcggcaggggggcagccacgcagcaggaattttacgccaagaactcgcgctggaccgaaggtctcatctcggcctccaaggctgtgggctggggagccacacagctggtggaggcagctgacaaggtggtgcttcacacgggcaagtatgaggagctcatcgtctgctcccacgagatcgcagccagcacggcccagctggtggcggcctccaaggtgaaggccaacaagcacagcccccacctgagccgcctgcaggaatgttctcgcacagtcaatgagagggctgccaatgtggtggcctccaccaagtcaggccaggagcagattgaggacagagacaccatggatttctccggcctgtccctcatcaagctgaagaagcaagagatggagacgcaggtgcgtgtcctggagctggagaaa

SEQ ID NO: 27763 - DNA, 442 bp, Homo sapiens
  misc_feature (1)...(442): n = A,T,C or G
gagcggcnnnnnnttccatcntgcgacttcgtctnncnnttngnnngngcannaacatggaggcagaggaatcggagaaggccgcaacggagcatgagccgctggaagggacagaacacacactagatgcggaggaggagcaggaggaatccgaagaagcggcctgtggcagcaagaagcgggtagtgccaggtattgtgtacctgggccatatcccgccgcgcttccggcccctggacgtgcgcaaccttctcagcgcctatggcgaggtcggacgcgtcttctttcaggctgaggaccggttcgtgagacgcaagaagaaagcagcagcagctgccggaggaaaaaagcggtcctacaccaaggactacaccgagggatgggtggagttccgtgacaagcgcatagtcaagcgcgtggcggccagtctacacaacacgcg

SEQ ID NO: 27764 - DNA, 449 bp, Homo sapiens
  misc_feature (1)...(449): n = A,T,C or G
gaggggcccccnnacaccggaactcgngcanggaccagncnggnggaannncatttaaggatcgtggggacggggtccaccccaagaagaaagaaaggcccgtccacaggcccggctctgggccacgtgccccggaagcaggtgtgtccagagtcagctgagggctctccccacaccacccagcaggcgctggtgctccttctgcctcatgggaccagtccagcttccagccgctctggctcgagggtggtctgagcacttccttctgagtgggcttctctgggagctctccagtggcactgctggacctgcccacgtttctgtaaaatcaggatacgtggctttagtaagcagaccaagcgcttcgtggcagggaaagcagcgtgtggggaagtcactgaaaagtgctgcctaaggaagtttggaaatagtccccgttccagattgcc

SEQ ID NO: 27765 - DNA, 462 bp, Homo sapiens
  misc_feature (1)...(462): n = A,T,C or G
gggcgccaattgagcccttgaatgangaccttagtccangcggtggaattcggacattcacggaggtgggttcgacctccgggtcccccaccatgacaatgagctggcacagtcggaggcctactttgaaaacgactgctgggtgaggtacttcctgcacacaggccacctgaccattgcaggctgcaaaatgtcatagtcactaaaaaacttcatcaccattaaagatgccttgaaaaagcactcatcacggcagttgcggctgaccttcctcatgcactcgtggaaggacaccctggactactccagcaacaccatggagtcagcgcttcaatatgagaagttcttgaatgagtttttcttaaatgtgaaagatatccttcgcgctcctgttgacatcactggtcagtttgagaagtggggagaagaagaagcagaactgaataagaacttttatgacan

SEQ ID NO: 27766 - DNA, 442 bp, Homo sapiens
  misc_feature (1)...(442): n = A,T,C or G
tggcgctnnnnnnaacggacatcgcacaccagcggncaannncggnctgtgcagaaccccgccgtgtaaagaggcagaaaagttggtttggtttgcagtaacgctgcaactagaaaatatatgcacttcaggcttgttgaaacgaccaagactctgtgacgttaatttgggtctttgtcctggcagtgcctctgccagtcactgtcatcgttgtgtcccccacaactgtcctcttgctagctcggcccagctttgtccctggagcccgatgctacccctgtcagacagaggctgcggcctgggccagagacagggagtagctgctgcttgacggcgtctccactgtgcgattggcccggagccccgaacactcagagggagctagtcagggccggcgagcgcagccagaagccctggccagtgaggagctcacaggtcctcc

SEQ ID NO: 27767 - DNA, 217 bp, Homo sapiens
aaggattctgctggactctgccaggggtttcttgtgcactggcaccaagtgcgggtccggcagcttctgccccctgcataaccggaaagacagctaatgggtggggctgcgggggttacgtgcccacccccatacatttatttctggaaaaaatgcgcactgaataaaccggacaggcggtaaaaaaaaaaaaaaaaaaaaaaaagggctccgttgg

SEQ ID NO: 27768 - DNA, 452 bp, Homo sapiens
  misc_feature (1)...(452): n = A,T,C or G
gagccggnnnnnnnncaaaggatagcacacnatcgncnggngcgaattcgaccagggcggcgcgtggtctacgccgagtgacagagacgctcaggctgtgttctcaggatgaccgagtgggagacagcagcaccagcggtggcagagaccccagacatcaagctctttgggaagtggagcaccgatgatgtgcagatcaatgacatttccctgcaggattacattgcagtgaaggagaagtatgccaagtacctgcctcacagtgcaggacggtatgccgccaaacgcttccgcaaagctcagtgtcccattgtggagcgcctcactaactccatgatgatgcacggccgcaacaacggcaagaagctcatgactgtgcgcatcgtcaagcatgccttcgagatcatacacctgctcacaggcgagaaccctctgcaggtcctggtgaacgc

SEQ ID NO: 27769 - DNA, 477 bp, Homo sapiens
  misc_feature (1)...(477): n = A,T,C or G
ggaagttccgggnngnnnnaaactgagaccnatcgagaccgtggaanccaccccgactcctccttgctctgcgcttccagtgataagggtactgtccatatcttttctctcaaggatacccgcctcaaccgccgctccgcgtgagtaccccctccccaccctaccgtgtccctgtccccctgcccatttaccatacctgggcttagccagtgctgcctgcaggctggctcgcgtgggcaaggtggggcctatgattgggcagtacgtggactctcagtggagcctggcgagcttcactgtgcctgctgagtcagcttgcatctgcgccttcggtcgcaatacttccaagaacgtcaactctgtcattggtgagtgggaacagccccttggttgggggtactgcatggggcaaaggcctgcaggttggacctgaaaggattttacggccatgtgaggctcagcttcatcatcagtaag

SEQ ID NO: 27770 - DNA, 451 bp, Homo sapiens
  misc_feature (1)...(451): n = A,T,C or G
gagccggnnnnnnnnaaaaggatagcacacgtcgnctggngcaattccatcagaactgtggaccctgaagcatgtgttcagcagccaagccatgaggagaagggacatgcgagcagaggacaaagcttgagcacaggcagaagggcatgaaatgtgactggatccccaggcaggctggactggccagaaggcagaagcgcctggctggagggccacttggcaccagagggaggaggtgtttttgtgcagcgccaagaggctgggcttgattccataggaacaaggcgtacctttaagcagggagtgcttttgaggaagtgccaatggatgttggaaaggaatcattaaagtgaaaaagtaggcagtgagaactgttaggacatgaaaaataagagcctgaccaaggaagaaggcagatcacgaaatgtttcagacgtaggaaacaatggtt

SEQ ID NO: 27771 - DNA, 566 bp, Homo sapiens
  misc_feature (1)...(566): n = A,T,C or G
gacgcgnnaatcgatcacactcgatgtgctgtaattcccgagaccagcggatctcggcaaaccctctttctcgaccacccacctaccattcttggaaccatggcggcagtggcggcggcctcggctgaactgctcatcatcggctggtacatcttccgcgtgctgctgcaggtgttcaggtactccctgcagaagctggcatacacggtgtcgcggaccgggcggcaggtgttgggggagcgcaggcagcgagcccccaactgaggccccagctcccagccctgggcggccgtatcatcaggtgctcctgtgcatctcggccagcacgggagccagtgccgcgcaggaatgtggggtcccctgtgttccctcgccagaggagcacttggcaaggtcagtgaggggccagtagacccccggagaagcagtaccgacaatgacgaagataccagatcccttcccaacccctttgcaccggtcccactaaggggcanggtcgagagaggaggggggatagggggagcagacccctgagatctgggcatangcaccgcattctgatctgg

SEQ ID NO: 27772 - DNA, 460 bp, Homo sapiens
  misc_feature (1)...(460): n = A,T,C or G
ataccgtatacctccggaagngccgcggaannnnangactcatgtggctgttcaaatgtcagagcagcaattggttgagctcagagctgatatcaagcactttgttagtgaacgtaaatatgatgaggatctgggacgagtagcccggttcacctgtgatgtanagaccctaaagaagagcattgattcatttggacaagtgtctcatccaaagaacagctattcgaccagatcccgatgtagctcagttacatctgtgtccttgagtagcccaagtgatgcctctgctgcttcctcttccacctgtgcctctcctcccagccttacaagtgctaacaagaaaaactttgcaccgggagagactcctgcagccatagcaaactccagtggccagccctaccagccacttcgggaggtattgccagggaacagacgaggaggacagggctataggccacaa

SEQ ID NO: 27773 - DNA, 451 bp, Homo sapiens
  misc_feature (1)...(451): n = A,T,C or G
gccccccttggagacctcagaattgatggcgtatgcatngcatactaaggctcaaaactaaaagagatgtcagcattgttggatagaaatgtcacctatatggtatttgcctgttttaataactttgtaaggaattcttgctcttctaagggtgcctggcgcaaccgtgggcaagttactgctcctctttaaacctcgtggtggttattgaaacagatttattagaaggagagggtaggtgcagagctggagagccatgggtgaggcagcttgtgacctgcctagcagccgctgaccacctctccaacagaagcctagtcctgttcagagcagcactgtcactgcaagtccagccccctttgccaggggctccattccacccctttcctgcagggaggggtgccatgagtcttgcttttggctcatacaggagagagggaaggctgccagg

SEQ ID NO: 27774 - DNA, 565 bp, Homo sapiens
  misc_feature (1)...(565): n = A,T,C or G
cgcggcaaaggaaacccactgatgttctatcccgagnggngcaanncttgcattgttcctcatccgcctccttgctcgccgcagccgcctccgccgcgcgcctcctctgccgccgcttactccggcagctttatcgccagagtccctgaactctcgctttctttttaatcccctgcatcggatcaccggcgtgccccaccatgtcagacgcagccgtagacaccagctccgaaatcaccaccaaggacttaaaggagaagaaggaagttgtggaagaggcagaaaatggaagagacgcccctgctaacgggaatgctaatgaggaaaatggggagcaggaggctgacaatgaggtagacgaacaagaggaagaaggtggggaggaagaggaggaggaagaagaaggtgatggtgaggaagaggatggagatgaagatgaggaagctgagtcagctacgggcaagcgggcagctgaagatgatgaggatgacgatgtccataccaagaagcagaagaccgacgaggatgactagacagcataaaaggaaagttatactaaaaaaan

SEQ ID NO: 27775 - DNA, 570 bp, Homo sapiens
  misc_feature (1)...(570): n = A,T,C or G
ggcgagccnnaaatcgatcactcatcgatgngcggctaagnaccanaaccccttcagcaatggtggcagtccggcggccgaggctgtcagcggggaggcacgatttgcctattttccagcgtttagtgtgggagatactacggctgtgtccgtacagaccacagaccatagcttgcaggctggaggccagttctacgtcatgatgacgccccaggatgtgcttcagacaggaacacagaggacgatcgccccccggacacacccttactctccaaaaattgatggaaccagaacaccccgagatgagaggagaagagcccagcacaacgaagtggagcggaggcggagggacaagatcaacaactggatcgtccagctttcgaaaatcattccagactgtaacgcagacaacagcaagacgggagcgagtaaaggagggatcctgtccaaggcctgcgattacatccgggagttgcgccagaccaaccagcgcatgcaggagaccttcanagaggccgagcggctgcagatggacaacgagcttctgaggcagcagatcgaggagctgan

SEQ ID NO: 27776 - DNA, 444 bp, Homo sapiens
  misc_feature (1)...(444): n = A,T,C or G
ntttgagccttgaccggcgggtaattccctgttgcctcgtgaacgttagagcagcctccagaggcgggtttggtctgcacacctggttcgcgggtgacacagttgtgacttggcccaggtcagttgttggggcctggccagctgtgggtggtgaggttttctcggacgcttcatctgctctcgttcttgttcgaattccttctgcctaagaatgacagctttaaaagtgaaatggcagcacgtctccatcattacacagaatcccatgtgggaagaccctagtcggaggcccccacccttgcccggaactggactttggggcagcagcaaactgcagtgagtgtgagtcacacctgaggacaggtgggctgtcttcaggctcccaacaggtctgtcgcttaaggggctgaggaatggtggctggaatgccacggcctgcccacc

SEQ ID NO: 27777 - DNA, 457 bp, Homo sapiens
  misc_feature (1)...(457): n = A,T,C or G
attgaaaccctnnnnnnnncnnnattgatgacttttagaccgtgtggtggaattcccatcctcgttctgtgggagagaccagccttctggtgctgcagtcaggaatggagcttgacagcgctctggaagccccatcgcaggaagactctaatttgtccgaggagttgtctcactccgcctttggacaggccttctccaagattttacactgtcttgcccgcccggaggcacgacgaggcaatgtaaaagatgcagttcttaaagacctcggtgatctaatagaagccacagaatttgataggttatttgaggggactggtgcacggctccgcggaatgccggagacactggggcaggtagcaaaagccctggagaagtatgcagccccctccaaggaggaggaaggtggaggtgatgggcactccgaagcggccgagaaagcagcccaagttgggtg

SEQ ID NO: 27778 - DNA, 453 bp, Homo sapiens
  misc_feature (1)...(453): n = A,T,C or G
gattgatgaccatctgnccagngcggttggattcgcttttagatgcttctgggtgcccctcccctagggaaacacggagccactagcattggaacggtcagctgtgggtgaggtagctgttctgtagtcccaagctgaggctcctacctgctgaagactgggtagggactcacaggggatagagactgaattcctctccatatggtggctgcagcatgctagatatcctggcatagcaaccaggccctttgtgctttccccagctcaaggggtagtaaggatggtaccactgcagttgcaatggtagagagctgtgggttgtctctgggatttcctccatagagaaaggcagagccaccaccaactgcagtgttcaggcatggttagggtgtttgtgctgggagcccaggttgagaggcactgcccagtgaagattagtggagataggacctg

SEQ ID NO: 27779 - DNA, 454 bp, Homo sapiens
  misc_feature (1)...(454): n = A,T,C or G
attgatcccctnnnnnnnncnntttgacgtctcttagnccgtgtggtggaattcgccggggtctccggacagcatgagcgtgggcttcatcggcgctggccagctggcttttgccctggccaagggcttcacagcagcaggtaggcccccaggtgggggacggtgaggcccagtgggagagactggcctctttccacttctgcagggctgggggctgaaggtgggtgctgggtcacaaggcctgagtcctgcgggaactggcaacttctgtgtgtttggggctttacctgtgctgtctcactcttcttcctgggaatggggagggagggaagccaaagctagccatgaagaggaactgtttccggccgggcgcggtggctcacgcctgtaatcccagcactttgggaggccgaggcgggcggatcacgaggtcaggagatcgagaccatcctgg

SEQ ID NO: 27780 - DNA, 454 bp, Homo sapiens
  misc_feature (1)...(454): n = A,T,C or G
nattgatgaccattagaacagngcggtttgattcccacagaacatatggcttagctagccaattttaaatgtgctcaggacactacccttagaatacagttgggcaaaatcatctaacacaaatcctattttataataaagtattgaatatttcatgtaacttactgaaagctatactgaaagtggaaacacagtggttgtatgggtactcgaagtatggtttgtacagaatgcctgttgctctcatgccatcataaagtcgagaaatcctaagtcaaaccatcgcatgtctgggaccatctttagactaaattcaggaaacaagatatgttagaaatacggtgtcttcaaaatcatttcctttcccttttaaaaaataagaacgtaaggaaaagttaccccagatattgagacatctcagattatgggcaaaatttggtgtaggaataaaaan

SEQ ID NO: 27781 - DNA, 553 bp, Homo sapiens
  misc_feature (1)...(553): n = A,T,C or G
agtcccatccnaatggttnttatccagaggatggaattcggtggagcagaacccagggaccatgggcgcctccaggctctataccctggtgctggtcctgcagcctcagcgagttctcctgggcatgaaaaagcgaggcttcggggccggccgggggaatggctttgggggcaaagtgcaagaaggagagaccatcgaggatggggctaggagggagctgcaggaggagagcggtctgacagtggacgccctgcacaaggtgggccagatcgtgtttgagttcgtgggcgagcctgagctcatggacgtgcatgtcttctgcacagacagcatccaggggacccccgtggagagcgacgaaatgcgcccatgctggttccagctggatcagatccccttcaaggacatgtggcccgacgacagctactgggttccactcctgcttcagaagaagaaattccacgggtacttcaagttccagggtcaggacaccatcctggactacacactccgcgaggtggacactggtctaccggagcccagggccaccctn

SEQ ID NO: 27782 - DNA, 556 bp, Homo sapiens
  misc_feature (1)...(556): n = A,T,C or G
agcccagncccaatgatcccatcgcannnataganancctattgagagnggcggaattcgtcggctaaagctgtgttcccatatattgttatagacagctaaacccttcaactatgcaatgaatgttcgggcttttcacaagagcccgcctaactcaaaggagccttttcaaatccatttacagcatacttaaggtcatattttccctgaacaagcgcttacgtgatatgactctgttttccttgcttgttttttttcaaacggagaaacatcctgttttgcaaattggaccccaggctggaacttagcatctgaagttgccgcttgtgggctctgggggaaagtgtagccccggagaggtaactgaggacatgagcaaccagtgccagggagggtgggatttgccagatgccaaaatcaggggacgggtggtggtgtctgtcagacacacacaggtcgccagtgacttcacacacacctcatgtgagaaccatgccttttttagtgtgtcctatttcatacctgtacacacttcctcgtttagaatgagattact

SEQ ID NO: 27783 - DNA, 448 bp, Homo sapiens
aatcgacgaccatctgactttgatggcgtattcgataaccctcacctgaagaacctctatgaggggctggtcatgactgaagtccatatccagaaggtgttcacaaagcatggcttgctcaagttgaaccctgtcggagccaagttcgacccttatgaacatgaggccttgttccacacaccggttgaggggaaggagccaggcacagtggccctagttagcaaagtggggtacaagctgcatgggcgcactctgagacccgccctggtgggggtggtgaaggaagcttatctgctgttgatggggtgggtgtttttaaactcactcgatgtaactctcaaggctggttcattgtttctcatctatgagtacgtgtgaccttttcccacaccttattggaaaccttaagtaaccagtggctaaacagaaaagccggttgcccaactgc

SEQ ID NO: 27784 - DNA, 486 bp, Homo sapiens
  misc_feature (1)...(486): n = A,T,C or G
cgggtttccngggggggnnnaactgaaaccctttcgagatcctaggaagngcggnggaattcgccagagctaggaacagctccaagatggtctcagccaacagttctgagccctgtctgggtcccctccccttcccagggactcaggaggaagctttggcccctcttcccagagagaaagagcccacagagccggaggcactgtcccagggctcctggggagcttctgggtggggagatgctgggttgggtgtcgatcactggtcactgtcgcccattctctgctttcggggagcaggggaatgtatacagtttgaaagacagggctcagctcccctgctggactgaggaagtcgaggcccagggagggagaactggggtctgtctcctccatctgtcaccctccttggtaaaatttgtgagggtcctggagccacttctcacccacgccacacctacctcggctgggccttggccactgcaacag

SEQ ID NO: 27785 - DNA, 459 bp, Homo sapiens
  misc_feature (1)...(459): n = A,T,C or G
nattganncccctngnnnnnnnnnnnattgacgacccctagnccgtgtggtggaattcactctgcggaccagcagcgtgacctcaccctggatctggtgctgccacgaggcccagaccacttcagctgggcatcgcctgactgagaactctgggccttagagcaggccccgaactgtggtcgccaggcccaggaggcgactgcatggtggagagggagctggggcgcatggggaagcaggtccctactatcaaccgggagtttggggtcctcccctgaagtaggcaaggactgcacgtttctttctctcctgattctcggntttcctttgagtcttctggagctgccttctcatcaggtgcactcttcatggaaagcaactcttgcccctacctcttctgggcgcagggagtaagttactgctaaattaaattaaatgtgtgccaggccgggtgcggtg

SEQ ID NO: 27786 - DNA, 457 bp, Homo sapiens
  misc_feature (1)...(457): n = A,T,C or G
gaaactgatgcttcgcananaactgagaccttcgnanagngcggnggaattcggccgttttattctgcaaaccgaaacttgggtcatgtgacctgatgggattatgtgactccctccaggtgcccgagacaaggttgatatttccaaaatattttggtgatttagtgggacaagcaaatgacagaataccggagaaggcagggatcgtgggtgtcaggagccagaggggagggggacagatgtgctgtgtacaggacaaggtgtcaggtgactccttcccagcagggcctcgcagatgcacaagcacggagctggtgggttttgcccaagaaaggtcacgcggcacatgcagggattggaactcccaggccagggctctaggtcgctcccaccttttcatgtttctttctgtggccatgggtatagtggaaagacataaagctaaagccaactttta

SEQ ID NO: 27787 - DNA, 447 bp, Homo sapiens
  misc_feature (1)...(447): n = A,T,C or G
gttgagacattanccaggcggttagatcacctgtttctagccaaactttctagatactactggtgtcaaagatgaaggtcatgtgcagccatgtaagattagcccaaggagccagctcaaaccatgcacatccagggcccagcttggaattcatgttctggaggccttggctgggaggcagaatctgtgaattttaaaaacactttcatgaatccaaagcacatgaaggtttaagagtctggtaaaggcaaaattttggggttatgtgttaagaaagggctggaacaagagtcggcaaaggaaacagaggaaggacagagaggtagggggaaaagagaaatgtgcagcagctgcagctcttccaggaaccctgaggatgagggctgggcagacacatcattaggtaaaggctttaaatgaggacgtgcgtggngaacctagccctgc

SEQ ID NO: 27788 - DNA, 461 bp, Homo sapiens
  misc_feature (1)...(461): n = A,T,C or G
gcccgccactgatnaccnctaggccatggcggcgctagtagacnccagccattctggaggacctggaacccggaaccatggacagtgtccgctcatgtgcctttggacatttcttcaggcctgacaatttcatctttggtcagagtggggccggcaacaactgggccaagggtcactacacggagggggcggagctggtggattcggtcctggatgtggtgcggaaggagtgtgaaaactgcgactgcctgcagggcttccagctgacccactcgctggggggcggcacgggctccggcatgggcacgttgctcatcagcaaggtgcgtgaggagtatcccgaccgcatcatgaacaccttcagcgtcgtgccctcacccaaggtgtcagacacggtggtggagccctacaacgccacgctgtccatccaccagctggtggagaacacggatgagacctac

SEQ ID NO: 27789 - DNA, 491 bp, Homo sapiens
  misc_feature (1)...(491): n = A,T,C or G
tggggtcnnnnnnaatgagattagtagaaccgtgggagaggcgggagaccgtgtggttagaatacatatgtcccttttaccaagagaagagatcactgcaaagattattccagtactccaaaatgcttttttgccgtaaaaatgtggtttagcaagcaaaagaagtaagaaaaacagagatacgaaagggaatatattatgtagttattttgagtgtctttatttcttatttttattttggagacagggtctgcctctgtcacccaggctggagtgcagtggcacaatatggctcactgcagcctcaaactcctggactcaagcgatcctcccacctcagcctcctgaatagctgggactactggcatgtgccactgcacccagttaatttttgagtgtctattaaaaagagaaataaatataaaatccggatgtcttcaaaggttccaaaattgtcaccatgaattggttggaattctgtctttttccct

SEQ ID NO: 27790 - DNA, 462 bp, Homo sapiens
  misc_feature (1)...(462): n = A,T,C or G
agcagccactgataccntcgnactangatcatcggacagngcggaggaattcgttgactgtgtaagtgacagggagggaaagatgatggccatgttaaagagcatcgtttaggctaggggattgaactgtggactgattcagtgtaaataaaaataaattaacaggtagtagttcctgtcagttctgttggaagcagcccactccctcacttttactccttcctccaaccctcaatcagagctacttacagccaggcaggatggggctttccccaaagcaattggccgtttgtccagtggcagacaatggtggctacagcctttgtgcttttaagagtgggctgggattgtggagactgcccaggggcttggctttgtcagaacttgtacaatcttcttttgatgaaattatctgaactcaacatctagcacatagaatgtgttcaacaaatgcttgttgaa

SEQ ID NO: 27791 - DNA, 457 bp, Homo sapiens
  misc_feature (1)...(457): n = A,T,C or G
cgccccccctaagnacctcgnactgacgccctcgnacaggcaaaccnnnctgggcctctgatggaggaggacctggacggctcctcgggctttctgtttcccttttatgacgcggacaccagcatgctctacgtgggggggaagggagatggcaacatccgctactacgaggtgagcgccgacaagcctcacctgagctacctgactgagtaccgctcctataacccacagaaggggatcggtgtcatgccaaagagaggactcgacgtgtcctcctgcgagatcttccgcttctacaagctgatcacaaccaaaagcctcatcgagcccatctccatgattgtgccccggcggtcagaatcctaccaagaggacatataccctccaacagcaggggcccagccctccctgacggcccaggagtggctcagcgggatgaatcgagacccaatcctgg

SEQ ID NO: 27792 - DNA, 460 bp, Homo sapiens
  misc_feature (1)...(460): n = A,T,C or G
aggcctcccaactaagacactcgattgatcgccgtagnaccaccctggngacctgtcgagttgccgcttcctggatgacaaccaaatcatcaccttttctggggatactcacctgtgccctgtgggacattgagacaggccagcagacagtgggttttgctggacacagaggggatgtgatgtccctgtccctggcccccgatggccgcacgtttgtgtcaggcgcctgtgatgcctctatcaagctgtgggacgtgcgggattccatgtgccgacagaccttcatcggccatgaatccgacatcaatgcagtggctttcttccccaacggctacgccttcaccaccggctctgacgacgccacgtgccgcctcttcgacctgcgggccgatcaggagctcctcatgtactcccatgacaacatcatctgtggcatcacctctgttgccttctcgcgcag

SEQ ID NO: 27793 - DNA, 472 bp, Homo sapiens
  misc_feature (1)...(472): n = A,T,C or G
tgggggtnnaagnattttgataccttagccgngctgatgacctctgtaatgagaatgagcagcatggaatttagccctaatgtggggaaggtaacagtctactgacagaagataataagcctgttatctatagtcttgtgttttgccagtaggggtacagagacctagggctttagatttttgtgatgatattctttctctagaccactacccacctaaaattttgaaattttgatggttttgaaaagatatgcacctcttggtagccacaagagaatctgggcctgaaacatgatatagcatgtaaccctaggtaatctgttaactttaatcttcattgtgaacctcgtaattcttgatataccttgtcattggctcatgacatatttattgttgtgatgcatctgccattgaatgtacgctgctgataaagacatacctgaaactgtgtaatttttagagaaaaagaggg

SEQ ID NO: 27794 - DNA, 469 bp, Homo sapiens
  misc_feature (1)...(469): n = A,T,C or G
gggagttccnnnnaggccccccactgagaccctcggctgatcgccgcagnacaccccgaaatcctatctctactcttgggaaaggtatcaaatttcacctgccccttttgtatttaaactcatccctctctcttactcagcagttacccttttacttgttgatgtttttattgggtttattatgtagctatctggggatgtggtatttatccagattcttttgcataatcttatccttgtctttcttaggttgggagggagctgggagtctctcatccgcacttagtaaagcggagcctaagtggctgctcatttggtgctttaaatagtagctgtgctggttcaatctaagaagaagggggcccagctttagctcttttccttacttgggcacctcattcagttttgatgcccacaatactgagtatctcccttgccctttaagtcaggctgccagatgggacctcac

SEQ ID NO: 27795 - DNA, 453 bp, Homo sapiens
  misc_feature (1)...(453): n = A,T,C or G
aaagatgacccttagacattgaggccgatttcaggntcggntcagggcagaggctggggatgctaacaagatgagagggggcaatctgggggtaatggcatttctcacaaagtccactcggctgatgtgccatagttgtggaagttcctgcatctggcagaacacctggcgcatgctggagatgttgatgcaagccaggacagccttgaggcagaggaggtgggctgactacctcgatgtcctggaatacagctacccctcccagccatgctcatgcctcctctgctccttaccttgggcagatagtaaaagaagggccccagccacagcagcaccgacaggaccactgtgcaggagaagaggcctgccagctagagaaaaggaggaacaggagcaaaaaaggaagagagcctcccacccccacatgagagctggtcttcctgcccactctgg

SEQ ID NO: 27796 - DNA, 407 bp, Homo sapiens
  misc_feature (1)...(407): n = A,T,C or G
ctaatttagtctcctcaagtgaaaaacaggagtaatgtttcgttgcactttgaaagatctgcttcaaggcataactcgtgtagttgtctggtttcagggatagctgtttgaattgtcattctaaagtaggtcatcaggttcacttatccgaccttaatctgggataaaggttttggtatttgcccacttctagatagaatgaatgaaaacaacacaagcgttttatgagcactctttatcagaaaggtatttcctggaccagaaatgggcaatagttacaatagttgatcctctgttctggaagctttgaaatttatcagagaatgaagtcattcagtacatctgataaagttttgttgttgttgttgttgttgttgttgttgttttaattgggcaaccctcagaan

SEQ ID NO: 27797 - DNA, 475 bp, Homo sapiens
  misc_feature (1)...(475): n = A,T,C or G
ggagttccngnnttgggggacctgatgccctcngnnattgaggaccttagtccatgtggtggaattcccggtggggagattcgtggggacacggggggagaggacactgctgctcccggtcggttcagcttcagcccggagcccacgctcgaggacatccgccgcctccatgctgagtttgctgcggaacgagactgggaacagttccatcagcctcggaatctcctcctggccttggttggggaagtgggggagctggcagaactctttcagtggaaaaccgatggggaacctggcccccaaggctggtcccccagggaacgggcagcccttcaagaggagcttagtgacgtcctcatctacctggtggcattagcagcccgctgccgtgtggatctgccgctagcagtgctctccaaaatggacatcaaccggcgacgctacccagcccatctggcccgcagctcttcccgcn

SEQ ID NO: 27798 - DNA, 456 bp, Homo sapiens
  misc_feature (1)...(456): n = A,T,C or G
caatgaggacantcngtagngacgngcaattcgncccttgcagagggggctggggcacttagagccccagcagagggtcattaacagccttacctggaagaggggacctgctgtggacctgggcaccttctcttgcagggtgagttctgcagtcagggtgtccgtgagggcctcatcgtgggcttcgtccactctatgtgccagacggctcagagcttctgcgacagccctggggagaaggggggtgccacaccacctgccctgctcctgctgctctcccgcctctgcctggactacgagacggccaccatctcctacatcctcactctcactgatgaacagtttctggtgcaggatcagttcccagtgacgcccgtgagcacgctgtgtgcagaggccagggaaacggcgcggcggctgctgacccactacgtgaaggtgcagggcctggtcata

SEQ ID NO: 27799 - DNA, 460 bp, Homo sapiens
  misc_feature (1)...(460): n = A,T,C or G
ggccccaattgangacccttagncattgtggtcgatttccagcggcaccttccctttcaacgaggatgaggacatcaatgaccagatccagaacgccgccttcatgtacccggccagcccctggagccacatctcagctggagccattgacctcatcaacaacctgctgcaggtgaagatgcgcaaacgctacagcgtggacaaatctctcagccacccctggttacaggagtaccagacgtggctggacctccgagagctggaggggaagatgggagagcgatacatcacgcatgagagtgacgacgcgcgctgggagcagtttgcagcagagcatccgctgcctgggtctgggctgcccacggacagggatctcggtggggcctgtccaccacaggaccacgacatgcaggggctggcggagcgcatcagtgttctctgaggtcctgtgccctcgtcc

SEQ ID NO: 27800 - DNA, 456 bp, Homo sapiens
  misc_feature (1)...(456): n = A,T,C or G
gggccggncnncccccctgagnatcatagatcnacctggcggaattccccagctactcgggaggctgaggcaggggaatcgcttgaactcaggaggcggaggttgtagtgagccaagattgtgccactgcactccacactccagcctgggcaacagagcgagattgtcaaaaaagaaaacaagatcctgaaacatttcttcaaagaattacagagaattgtaatggagatgaaatatggctttaccagtgtgatcctaaagacaaagcagagtgaaagtgatgcctaccaagaaacggagtggctccagtcaaagcaaaagcagaccagtcaagagcaaaggtcatagcaacagtttttttttgaatgctcagggcattttgcttgctgactttctttaggaccaaagaatgaaaacatctgcttattacaagagtgttttgagaaagttagctan

SEQ ID NO: 27801 - DNA, 561 bp, Homo sapiens
  misc_feature (1)...(561): n = A,T,C or G
aatcgacttctgatcaccgtgggcaatccttctccgacacccctgctctagtccttgccacacatgccctgggttgtcacctctctgggaagcactagcctgactggttgtcagaggtccatattcctgccctgcctcagtccctaatttgctttttgagtctggacaagccatctctcctctttatgctcgtgtttctggaggaggtagagagtatcaaaggtctcggttagctctgaaagtcagagatttaaaaggcccctagaatggaaagctcagggcgaagggctcctgtctgtcctttgctgttttatatctctgctatgaagaactgtacctggcctgtacatgctcagtaaatgtttgttgaatgaatgcacgtttctaaatcacaaactggcagaaggggggtgggcctttctcaaactctgtctctggacgttcaccagcccctccctccaggacccttttccccctttgctttgggtaggttcgcacatctaaggaggagaagaagcatgagatacatctggtacagaagctggggaggagcttgttcan

SEQ ID NO: 27802 - DNA, 451 bp, Homo sapiens
  misc_feature (1)...(451): n = A,T,C or G
aggcacgggnccccactatgntccattgacctncgcacangcggnggaattnngagctatgacggcgcgcgggactccgagccgcttcttggccagcgttctccacaacggactgggtcgctatgtgcagcagctgcagcgtctgagcttcagcgtcagccgcgacggcgcctcgtctcgcggcgccagggagttcgtggagcgggaggtgatcgacttcgcccgacggaatccaggggtcgtaatatatgtaaactcgcgtccgtgctgcgtgcccagagtagtggccgaataccttaacggggctgtgcgcgaggagagcatccactgcaagtcggtcgaggagatctcgacgctggtgcagaagctggccgaccagtcgggcttggacgtgatccgcatccgcaagcccttccacaccgacaaccctagcatccagggccagtggcan

SEQ ID NO: 27803 - DNA, 502 bp, Homo sapiens
  misc_feature (1)...(502): n = A,T,C or G
agggcggggnnnnnncctcgaagacccctcgagagccactnggaantcgctgcatggagcttcattcctgaactggtcaccctgtgtctagtcttgttttctgcaatccatcctgctctccagcagcctcaatacttctaaaattgtccctgcccctggtgctctcctgatccaactgccatggctccctggggccatcaggagaaggctcaagctgctggcactcctccttccacaccccacacccttccccacccttgcggcctccctggctttctcccttcccctttctgcactagtttgcagttcaggagcttggggtgcagagaacctggatctagtcttagctctggcaccctttgctgtgtggacttgagtcaattcctgtcccctcttcccaggggagagggagaaggtggcttctaagggatatcctgagagccggtgactcaagtgcagggaggaaccttctgtgggtccatgttcccttctcaaaggcttg

SEQ ID NO: 27804 - DNA, 452 bp, Homo sapiens
  misc_feature (1)...(452): n = A,T,C or G
tttgatccgtgagcatcggccgngccgntgaanttcccggntcgagcggccccttctgagactcacagcacccctttccttcctcttttcccttctcctccctcagcccctcattctcctggggagtctgcagagggctctgggactcactgccccatgtgaaatccaggcgtcagctgtttcctatgcaagggcaggaaagtggtctccagcccttgctccactcatgcctgggggcctggggctgagtggtatccctacctggcctccccctggcctctgggcctccagcgctgggtttgtcgagtgagagagagagaggagcttgggttgcttccctgtccccgccccctctgtggcattgtccctcccactcttatttttctaccaattgctatttttccgaacaatccttgtagagtatgtaccatccataggcaggagggcctcgc

SEQ ID NO: 27805 - DNA, 464 bp, Homo sapiens
  misc_feature (1)...(464): n = A,T,C or G
cattgacgtcgattacnccagngcggnggaattcgccttgggacggcagggatggcgaggtgagtgcccgggagggaagctgtgcgggctgcagtcctggtttactctcttgagcctgtgcatctctgcacctggagtcaagtccttcccatcagacctcagccctggtgcacccgtgggccttttaagaggttcttctctgaagacccttcatcttccttatcacaagtttaagtgctgcatggcatttgatactcttgacagccaagatacatttcagtagtaaggttgctttcctgattattaccttaaagtgaacatttaacctggaattcatttactttatcttagaaaaatagaaaatgatagctttgaaattagcacttatttctgtactgttgtgtcccaccctcctcaaaaggacacgttcaagtggcttccagtgttaaaatggtgagtgatgt

SEQ ID NO: 27806 - DNA, 462 bp, Homo sapiens
  misc_feature (1)...(462): n = A,T,C or G
gggtgcaggggggcccngcactgatnnnccattgangatcatcgcancnncnggnggaattnggngagcacctgtagcagatacagggttccagttttcacagaaattcccctcctcgccctcctggaaataatggaaacccctccacgcgcctgcacagaaccctctgtgcagcagaacgagactgggagctggagtgcatggcccgctcttggccacaggggcccaactctcctcagcctcagggccctggagaggccccaccctccctgggtctggcttgagagcccacctggccaaagggaaacctcgcacccccacgcgctcctggcccctggaatatcttggtgactaagaagggaaaggactgcatttctctctcctctgctgcacgaatccccattgggagagagagtgttgaagaggacactcangtccctaggcggagctcctgccacaccc

SEQ ID NO: 27807 - DNA, 503 bp, Homo sapiens
  misc_feature (1)...(503): n = A,T,C or G
gtgacgggggnnnnnaactgagacccactgagaccctaggcagngncgtggaattccccggctcgagccggtccagcctcggtgagcacacacgccctccctgtctctcgccttcgcttccctgcatctgcgctgattgtgctggagaagaaatacatccacccaccctcctttgatgatgtccactgagcaaatgcagccactggaagtctcagaagacagactggacaagctagaccctcgttgcagccacttagatgatctttcagaccagttcattaaggactgtgatctcaaaaagaagcctagaaagggaaaaaatgtacaggccaccctgaatgttgagtcagaccaaaaaaaaccaaggaggaaagatacaccggcgctgcacatcccacctttcataccaggtgtgttttcagaacatttaattaaaagatacgatgttcaagagagacatccaaagggcaaaatgatccctgttcttcataacactgacctgg

SEQ ID NO: 27808 - DNA, 459 bp, Homo sapiens
  misc_feature (1)...(459): n = A,T,C or G
aggggccggggggccccccctgattnntccctttgatccttgcaccgncnggnggaattcaatttttggatttttgtagagatggggcttcaccatgttggcctggctggtcttcaactcctgacctcaagtgatccacccacctccacctcccaaagtgctgggattacaagtgtgaaccaccgctgagtaatcctttcaggacaggaatctgatcatgttatcccattttgcttaaaagttttccctgacatccctgaggccatgaggccttccatcccacccaggcattctttctgctcctggggtgtgccacaggcccctccccatgggccccaggcattttcctctgccttgaaagctttcctccactctgcctggtttatgccaacccttggacctccacctaggcgtccccctcagaaaagcccttccttgcctccctgggtggtctgggct

SEQ ID NO: 27809 - DNA, 507 bp, Homo sapiens
  misc_feature (1)...(507): n = A,T,C or G
agggggcgcngngnnngnnaatcgagnaccaatcgcagaccctaggcagtgtggtggaattccagctggagaggccaagagacagactctggcctggagccttcggaaggcaccggccctgcagaccacttcagacttcctacctccatggccggaagaggaagcttggtgtggatctaagcggtggcatttgtgatcatttctcaccgcagccacagtagatggaggcaacacccgtgggtgtttgagggatggatgagtggaagcatgcgtgtggtggaggccactgcaccgtccaattccagacagtcccgaggaacgcccgctggcagccctgcctcggctgttgagtcattatgtgatcttgggcaagtatgaacctctgcttcaccacctgtgaattcatggacaggactcagtggtctttatcggtctttccaggccctcaagtcctggagggcactgtgggagtgtgaggcggagccctggagtcccgcggatggagaa

SEQ ID NO: 27810 - DNA, 499 bp, Homo sapiens
  misc_feature (1)...(499): n = A,T,C or G
ggggcgggnnnnnnnnttcgagaccactggacagtccgttggaattcgaatagtctgcctggaatccctgcagatcttggggccggaggccagtccaacccttggagcaggaagaaacgcaaagttgtcaagaaccaagtcgagctgcctcagagccggcccgcagtagctgcagactccgcccgcgacgtgtgcgcgcttctctgggccagagcgagcctgttttgtgctcgggttaagagatttgtcccagctataccatgggccgcactcgggaagctggctgcgtggccgctggtgtggttatcggggctggtgcctgctactgtgtatacagactggcttggggaagagacgagaacgagaaaatctgggacgaagacgaggagtctacggacacctcagagattggggttgagactgtgaaaggagctaaaactaacgctggggcagggtctggggccaaacttcagggtgattcagaggtcaagcctgaggt

SEQ ID NO: 27811 - DNA, 451 bp, Homo sapiens
  misc_feature (1)...(451): n = A,T,C or G
ggtccggcnncccccctaatantccatgagagcctgcgcaannncaggngggaggctggcatccaggtcttggctctgccctgagaccttggacaaacccttccccctctctgggcacccttctgcccacaccagtttgcagagcggagtctgagaccctttccacctcccctacaagtgccctcgggtctgtcctccccgtctggaccctcccagccactatcccttgctggaaggctcagctctttggggggtctggggtgacctccccacctcctggaaaactttagggtatttttgcgcaaactccttcagggttgggggactctgaaggaaacgggacacaaccttaagctgttttcttagcccctcagccagctgccattagcttggctcttaaagggccaggcctccttttctgccctctagcagggaggttttccaactgttg

SEQ ID NO: 27812 - DNA, 458 bp, Homo sapiens
  misc_feature (1)...(458): n = A,T,C or G
ngggccagggggccccccctgatnntccccttggtngcccgcnacgncnggnggaattcgggtatgtagcatggtagatgggtataaagcctgggttattactcagagatactcatcaacaaaacaaaatctttgggttcatttgtgtataccttggctacacgaaataatctttttccattttcacaggaagttcatcagcagaggaaatggtcactctcttggttcaggcgggcctctttgacactgccatatcactctgtcagacttttaagcttcccttaacgccagtctttgaagggcttgccttcaagtatgtataaaattatttttttatagtcttttctaatgcaaatatattatcctcttgctcagtgtgaaacagtcgtcataagccaagtagcccatatatcatttatgatttgaagaagtgttttgtttaatccatccaagcattc

SEQ ID NO: 27813 - DNA, 462 bp, Homo sapiens
  misc_feature (1)...(462): n = A,T,C or G
nattgacgtcgatctacccagngcggnggaattcgaaagatgcgtgaagactgtcctgcacttggtgcattcatatggtttttctccagcagaaactttcttgtgcaggaactgatgagaaagaaatgagttcattaaaaaccaagggaaggaatgatgccatcctcacctactgaggccaggttccggaaggtctccagcatcacatctctgtagaggtccctctgagcagaatccagcaaagcccactcctccagggtgaagtccacagccacatcctcaaagaccactgagtcctaagacaaaccacacaggtgtgcaggaggattggagacactgaaagtactggggaactggactcaattcataaattcaaacaagattctgtggtgtcccaacacctcctctatgacgcgaatgttagatcttttacttattcacaatcacttcctagtaaacttn

SEQ ID NO: 27814 - DNA, 461 bp, Homo sapiens
  misc_feature (1)...(461): n = A,T,C or G
agagcngcnnncaactgagactagagcntgtgcggnggcatncatagaagcttctggccttcacgcgtcagaaggcacccgtggctgccccttacttctgcctcccagcgttttgtagacattcttctcctgagttccccctgccccccacccaccgccctgttgtttccctaagtgccgtttgtagaattaaaagataccgtggacacttagaggaggcagaaatacaggtattcctacaaactgggtcccctgcaggaaaaaacgtgcccttcagagtgccagaaagctagcctgggggacgggcctggggctggggtgggcaggagtcctcgctgcacctgcagccttggggcccctgccgtgcctatgctgcagtcactgactccttagacctgtgcctagtctcctactgaagggctaccccatgcttctgatgctcattacacaccagctacggg

SEQ ID NO: 27815 - DNA, 498 bp, Homo sapiens
  misc_feature (1)...(498): n = A,T,C or G
ngggcgggnnnnnnnaatcgagacccatcgacagccccgtggaattcgctggatgacgagggtcgccagcaagcgtgtggtctgcctgagacttccgtggggctctcggcagttctgtaggctgaccccagtgctttttttgtagctggaaaagggaaccccggcaccagatgaggatgcggcctcttttgtcctaattctcttttccttttctaagagacaaaccaggctagtgggatgttatcctgacacagggaccagaccagctctggcgaaaggtgagggctgtcctttctggccaggcatttcctaaaatgtgtttgggtattttgtggggtgaatttgctgggaatctcccatgtagtcatggaaaccttgtccctcacagcctanaaacaaagatgttcaggttcagtttgcctgccagtctgccacctggctagaaagtgactgtcccaggtctgctgtgaggagtggcctggtttatgggaggggttc

SEQ ID NO: 27816 - DNA, 438 bp, Homo sapiens
  misc_feature (1)...(438): n = A,T,C or G
nttcgaagaccttagtccgtgtggtggaattccttacaatcacggcagaaggtacctcttcacagggacccaggagagggaatgagcgcaagcaggggaaatgccagacacttatgaaaccatcagatctcatgagactcactatcaccataacagcatttgggaaattgccccaatcattcaattacctctacctggtcctgcccttgatgtgtggggattattacaattcgaggtgtaatttgggtggggacacagagccaaaccatatcagtaggtcagggaccatctgtacatatatatttagatacattatccaggatggaccctgtacatctcctccccacatcagtgagtcatataagtctgtcagttctataaagctagacgtaagtatgttgataattttactatgacagctgatatacatatactccn

SEQ ID NO: 27817 - DNA, 463 bp, Homo sapiens
  misc_feature (1)...(463): n = A,T,C or G
agagccgccccctacagtttaagttggctcagtcacgncnggnggaattcaaagaagatgcggtaatcgccgcctgatctccacatggtgaacacatttctcttaccaacacctccttgactggtcggtcttcagcaccgggggtgggcaggcaggtgttctgtgttgacgagaattgcacaggctaaacacaaacacggaaccagagtgagaacacctcactcacggcagcccaggctgctccctaccaggtgacggagcgcgccggggctgtgggtgccaggggctgagtgctagggactcgtcatgagtggggatccccacgttcctgtcactgctgtcaaacagaaggtaaacagtcttatgaatgtatttccttaggaaaacttgtaaaaacttttattaggatatctatttaatactgaactttggcctactttgtgatagactataaacaaattgg

SEQ ID NO: 27818 - DNA, 461 bp, Homo sapiens
  misc_feature (1)...(461): n = A,T,C or G
cctcgatttcgatgacccttagacagngcggtggaattcccagcaggctgcttcctactcttcccaacctgctgcctatgtggcacagccagccacagctgctgcctatgccagccagccagcagcctacgccgcacaagccactaccccaatggctggctcctatggggcccagccggttgtgcagacccagctgaatagttacggggcccaagcatcaatgggcctttcaggctcctatggggctcagtcggctgctgcggccactggctcctatggtgccgcagcagcctacggggcccaaccttctgccaccctggcagctccttaccgcactcagtcatcagcctcattggctgcttcctatgctgcccagcagcatccccaggctgctgcctcctaccgcggccagccaggcaatgcctacgatggggcaggtcagccgtctgcagcctacctgn

SEQ ID NO: 27819 - DNA, 457 bp, Homo sapiens
  misc_feature (1)...(457): n = A,T,C or G
aatcgtagacattagaccgngcggnggtttacccccagacctggaacggcaggctccttgcggcaaccttcaccctcatcggtgtctccttcttcgcgctgcctgcaggcatcttggggtctgggtttgccctgaaggttcaggagcagcacaggcagaagcactttgagaagaggcggaacccggcagcaggcctgatccagtcggcctggagattctacgccaccaacctctcgcgcacagacctgcactccacgtggcagtactacgagcgaacggtcaccgtgcccatgtacaggtaccgccgccgggcacctgccaccaagcaactgtttcattttttattttccatttgttcttaaaccccactttttgttgttcattattttgattgattttttttctttaaaatgtatttttcccccnnnnnnnnnnnnnnnnnnnnnnnnnnnnnnnn

SEQ ID NO: 27820 - DNA, 506 bp, Homo sapiens
  misc_feature (1)...(506): n = A,T,C or G
aggggcggggnnnnnnnnccttgaaanccnactcgagaccactatgcagngtggtggaattccccggctcgagcggccctgtcttccggatctgttcacccgtcccctggaccggcaccgccacagagggtcagagtgttggcacctgtcttccggatctgttcacccgtcccctggaccggcaccgccacagagggtcagagtgttggcacctgtcttccggatctgttcacccctcccctggatcggcaccggcacagagggtcagagtgttggcacctgtcttctggatctgttcacccgtcccctggaccggcaccgccacagagggtcagagtgttggcacctgtcttccggatctgttcacccctcgcctggaccggcaccggcacagagggtcagagtgttggcacctgtcttccggatctgttcacccctcccctggaccggcaccgccacagagggtcagagtgttggcacctgtcttccggatctgttcacccctt

SEQ ID NO: 27821 - DNA, 458 bp, Homo sapiens
  misc_feature (1)...(458): n = A,T,C or G
agcgccannnaatcggttttcagtagcanctacgacagagcggnggaantcggcgctggatgctgctgctgttccagcttcctaggtgtggaaactgaatttccaattgattaaacaggtgtgctgagtaaacgcacaggctgagattcgaattatcctcccccgacgaggatggagccttcgctgtcttccttgatcgccacgtttctttgcgagccgatgaaggaaagcgtgaggaatgataaggccctggagactggagaacgcgagcttatcgctgtctcacatgcgcacggcttatacgttgagagctcacaggcccacttgcataaccactttcttgatagcggggttacagcttgagagcatggggctttgtgcacgggcagacctaaagactactcctgggtctgctactggccattgtgacaccctaagtcatttcccctattctgagg

SEQ ID NO: 27822 - DNA, 459 bp, Homo sapiens
  misc_feature (1)...(459): n = A,T,C or G
ctcgatttcgatgaccttagtccangtggtggaattcgcttcctcaggccggcttcgcccgccaaggagccaaggagaagcagctgttaaaggagggcaacgctttcaacgtgtcatccttcgtactccgggccatgatgagcggccagtactggcccgagggcgacgaggtctaccacgccgagctcaccgtgcccgtcctgcttgtccacggcatgcacgataagtttgtgccggtggaggaagaccagcgcatggccgagatcctgctcctggcattcctgaagctcatcgacgagggcagccacatggtgatgctggaatgccctgagacggtcaacacgctgctccacgaattcctgctctgggagcccgagccctcgcccaaggctctaccggagccactgccggcgcctccagaagacaagaagtagccgctgggccggcggggcatcgctt

SEQ ID NO: 27823 - DNA, 458 bp, Homo sapiens
  misc_feature (1)...(458): n = A,T,C or G
agagtncnnncaatgagactacagcntttgcggnggcattcgaaggatctcgagagccatggatggtgcaggcgggaccctcgagctgcagcatctccggtgacccggggttgccgaggaggtggagaccagcacaggtggtccggcccgggcgcctccgaatccgggggtggtcaagacggatccccaaggctgaggtcggcagtcccggggactcgcagctgttgagcctgtggagacgcggccccgtgaccgaggcacccttcagcaacccgggggcagcgttccagagactgaacttctcaaatcactgcttcaacagcttttaaaaatctggacctagttactcctgtcatctatgtgtaaagatttagaaaaaaaatcccaaacccaagggtgggcagccgcgaggatgtacagctcctggcagtgtgcgctcacccggagacctgaggtca

SEQ ID NO: 27824 - DNA, 463 bp, Homo sapiens
  misc_feature (1)...(463): n = A,T,C or G
aattgatgacactgngannncnnnnattgatgtctcttagtccgtgtggtggaattcggctgagcattacaagatcccacccctggggaagcactactcccagcgctgggcccaggaggacctgctggaggagcagaaggatggggcccgggcagcggctgtggctgacaagaagaaaggcctcatggggccactgaccgaactggacactaaagatgtggatgccctgctgaagaagtctgaggcccagcatgaacagccggaagatggatgcccctttggtgccctgacgcagcgcctcctgcaggccctggtggaggaaaatattatttcccctatggaggattctcctattcctgacatgtctgggaaagaatcaggggctgacggggcaagcacctcccctcgcaatcagaacaagcccttcagtgtgccgcatactaagtccctggagagccgcatn

SEQ ID NO: 27825 - DNA, 459 bp, Homo sapiens
  misc_feature (1)...(459): n = A,T,C or G
ntttgagttcctctacccgngcggnggaattctaggagcaacctttatgtaacaactagaaaggattggtactagaaaggactagagtactagaaaggtactaaaaaggactaggaagtctagtccagtgtctgattcttggtggacctcacctaagacagtgaataatgtctctgctccctcagaatttaggtggctggaagaaaaatggtactctatttagtaaattttagttgtgcaaacaaaagaaacacctctttgctcttggaagcttgcctccttttttccctggaccagagttatttttttgctaattggatcactctctgttgaagttgggttggagcacaaagaccaacttaaaggcctctgaggaagtatacagcccctatgtccaaatccaaaccttggaatcttacctcccttgtcagcataatggtacagcaagcccttttatgg

SEQ ID NO: 27826 - DNA, 456 bp, Homo sapiens
  misc_feature (1)...(456): n = A,T,C or G
aattgatgacatctgaccangcggnggtagatggacggatcgcaggcgagattacgaggcgaggctcgcgcgcccgcccccgccctggcccccagtgcccacccggtcggcccggcacagccatgatcaaggcgatcctaatcttcaacaaccacgggaagccgcggctctccaagttctaccagccctacagtgaagatacacaacagcaaatcatcagggagactttccatttggtatctaagagagatgaaaatgtttgtaatttcctagaaggaggattgtatttgtggaaacattagacaaatgttttgaaaatgtctgtgagctggatttgattttccatgtagacaaggttcacaatattcttgcagaaatggtgatggggggaatggtattggagacaaatatgaatgagattgttacacaaattgatgcacaaaataagctggnaat

SEQ ID NO: 27827 - DNA, 462 bp, Homo sapiens
  misc_feature (1)...(462): n = A,T,C or G
nattgatncccctcgnnnnncnnnntttgatgacccttagtccgtgtggtggaattacacagaatcgtgtttgctgtgagaaagcctgggcaaaagaccagagatgtgacactgagtggcaagttcagggaacagggactcctcctgcagagccaggctaacagggtgccacagaggatgggtgaacaggggagggcccaggagtcagggaaggaccaggtcagaaagccccttccccagttgcaggccctgagcttgcagtgaggaagcctgttgctaggcgactggttgcccctggcaacaagccccactcctgcccttgctccctccccagctggggctcctcttgaaagcacttgctttcttaaaggggccgcactcccttgccacctgcaggggtgtgacctccgccctctctccaaaggtcagactccccgatttgcccctgaaaggctgtgtgac

SEQ ID NO: 27828 - DNA, 462 bp, Homo sapiens
  misc_feature (1)...(462): n = A,T,C or G
ctcgatttcgatgacncttagcccagngcggtggaattcggcagaggaccactgccggatgaagcctgggcccaggcggatggagggggacagccgtggtggggctgggggcgaggcctcggaccctgagtcagcagcctcctccctcagcggagcgtccgaagaaggcagtgccagtgagaggaggcggcagaagcagaagggaggtgctagtcggaggcgctttgggaagcccaaggcccgggagaggcagcgagtgaaggacgccgacggggtcctctgccggtacaagaagatcctgggcaccttccagaagctcaagagcatgtcgcgggccttcgagcaccaccgcgtggacaggaacaccgtggcgctgaccacgcccatcgccgagctgctcattgtggcccccgagaagctggccgaggtgggcgagttcgacccctccaaggagcgcctgct

SEQ ID NO: 27829 - DNA, 451 bp, Homo sapiens
  misc_feature (1)...(451): n = A,T,C or G
attgaccccctnnnttttgatgtcttttatacagtgnggnggaattcggagaaccaacggactaagaatagtaaagatgattttaaatttagttgcgaatgtgagcttttgataacgcagagggaaacttggcttgaatcttgagaccttgggcaagttactgagtttataagcttctgtttcctcatctgtaaaatggaattaataatatctgactttcaaggcagtcgtgaagtgtgaaggagataatttatgtaaagtacctaatacagtgcctaatacattggaggtgctacaatggaagatattattattataattgtttggtatgtggacattggggtagagtgagagagcacagactttatagtagaagattatatttgattcctagctacactacatagttgtgtgttcttaggcaaatcaattaatctctctgagatagtat

SEQ ID NO: 27830 - DNA, 458 bp, Homo sapiens
  misc_feature (1)...(458): n = A,T,C or G
agcgccgccccctaagtattcgtttggctcncnacgncngnggaattccgattaggcctcttgcagggtgctgagagcagatcccatagntggtgtctatttctctgctctttccataccagctgatggctggatccacaaggccgtagtcctgggctctgggatgcacattattgaagagacacaagtgttcagggagtcccagtctgtggaaaatctagtcatctctctattgcaggtagcccttctctgtgacccttaatatatccttgctgaaatacgaagagggagtggggaggttgggcagaggctgtgtatctgtatgagtggggacgctgccgaccaactgtcctatctggctcccagcacagcctctatgtgggggctcctagcggagtcatccagctaccactctccagctgctcccgctaccgatcctgctatgactgcatcttggc

SEQ ID NO: 27831 - DNA, 570 bp, Homo sapiens
  misc_feature (1)...(570): n = A,T,C or G
cgccctcgacnccntnnntttagaacnactatccagagggtggaattcgattgggatcctggttttcagaaatgattggagtgatttatgtaagttgggaggggttttttgatggggttggtaaggtcttacgttaaaggaaaggtatacagagataaatattggtacttgagtcattagctttcaaagaagcctggggtaatggaggaaaggtaagaattgattctgacagaatcttgagatgggcagaattaacatctggaagaggtcacagtgtcctgatttaccttacctgtgtccaggatggccaggccatgttatgggatctcaacgaaggcaaacacctttacacgctagatggtggggacatcatcaacgccctgtgcttcagccctaaccgctactggctgtgtgctgccacaggccccagcatcaagatctgggatttagagggaaagatcattgtagatgaactgaagcaagaagtatcagtacagcagcaggcagaccaccccaggcacctcctgcctgtctgtgatgccaaactctgttgtgctacacgacacctgn

SEQ ID NO: 27832 - DNA, 473 bp, Homo sapiens
  misc_feature (1)...(473): n = A,T,C or G
atcgaccccntggnnatagtagaccttagtcagagcggaggaattccggccccatcttgtggaccagggggccatgctgctcaatgtctcaggccacgtcaaggagagcgggcaggtgctggccaagcagcacaccttccgtctgcgcaccccagacctctccctcacgttactgggagcagcagtggttggccaggagtgtgaagtacagattgtcttcaagaacccccttcccgtcaccctcaccaatgtcgtcttccggctcgaaggctctgggttacagaggcccaagatcctcaacgttggggacattggaggcaatgaaacagtgacactgcgccagtcgtttgtgcctgtgcgaccaggcccccgccagctcattgccagcttggacagcccacagctctcccaggtgcacggtgtcatccaggtggatgtggccccagcccctggggatggggcttcttctcaac

SEQ ID NO: 27833 - DNA, 440 bp, Homo sapiens
  misc_feature (1)...(440): n = A,T,C or G
attggatgntcccttagtccagngtggnggaattcgggttgccgaggcaggtgccaggtcagcgggtcctcggtgcctggcggatcctccaatcctctagctccctggaggcttagcggacagcgactggggatcccgggaaggagacgggagtcagggaagttagtatggatcctgggcagcgagattcagggaggatgccgtagggtcgctgatcccgactcttggggacccacttagctccttgtctgctcgagctccgtaagggttgggaggagccagctcaggcggggttgggggcgtcttcctcgcgggccctgtgcagggtcttgtaatggaagttacacgcagggcacagagtataggggaggggaaagatccttctggccttcggtggagaagtagcatcctgggcgcgtgcacagtctcccctcaggggn

SEQ ID NO: 27834 - DNA, 458 bp, Homo sapiens
  misc_feature (1)...(458): n = A,T,C or G
aggcgtgcnnncactgagactacagcatgngcggnggcattcggaatgcctgtgctggggccaggggttcagggaggagtggatggcacagtgctgtcatcccttctcctcccctctccccactcccggagctgaggctgcatcagaccctggtagggaggggtgccgcagccactaacggtatgtgctctccttcagccctctcccttcggagggacgtggtcttgcccactgtccttttgcctccatgctgaggtcggtgctgtatttcagagggagggtccttttcattctccttgctttgtatttaaggactggggcatagcatgggggcagtcccccagacctcttcattccccctcctgtggtgagggctaggtgtgatcaacacttttcttctccattcccttcctgcttttttcatggggggggatccaccaggtcatctaggctctggc

SEQ ID NO: 27835 - DNA, 459 bp, Homo sapiens
  misc_feature (1)...(459): n = A,T,C or G
agaggcgnnnttattgattcgtagnctcngcnccgncnggnggaatncgangcctttcggcgcgccgccgcccggcgccgcgggactgggagactgtttatttacgggagagtcggcatctcccgcgcgtgtggagggaaatccgggaccccaggcttgagagaagggccaggactgagaacggggaaccaggagagccctaagggcagcctttagggactgaggagggaggcaccggggaccctgaggccaaagaggccctgagactggaggttgcggatgacacggggcagagttgcatctcggaggaaagtagtcattcgtgggggcgtgtcccgggtcctggcggattgactgagaggatggcaggagatggcaaaggttggcttccagggagaggttacagaggagggagtcagttcttctctgagggtcgtangtgagaaggacgtcttgact

SEQ ID NO: 27836 - DNA, 459 bp, Homo sapiens
  misc_feature (1)...(459): n = A,T,C or G
agcggtgcnnttaatagtactaagcntggcggnggcanncagctgagcgcggaaggtgcgggcaagagccgcgggtctggagagcaggactggttcaacatgcccaagaccgtgcgcgacacgctgctggcgctgcaccagcacggccactcggggcccttcgagagcaagtttaagaaggagccggccctgactgcaggcaggttgttgggtttcgatgccaacggggccaacgggtctaaagcagttgcaagaacagcaaggaaaaggaagccctctccagaaccagaaggtgaagtcgggccccctaagatcaacggagaggcccagccgtggctgtccacatccacagaggggctcaagatccccatgactcctacatcctcttttgtgtctccgccaccacccactggcttacctcatttcaaccggaccacaccgnctgaagcgctcagaatg

SEQ ID NO: 27837 - DNA, 452 bp, Homo sapiens
attgacgactctagtccatgtggtggaattccttgcgctgctggccgacgaatttgcccttgaggacttctgcagcagcctcttcgatggcttcttcctcaccgcctctccaaggaaggagaacgtgcaccggcacgcgctgcggctcctcattcacctgcaccccagggtggccccatctaagctggaggcgttgcagaaggccctggagcctacaggccagagcggagaggcagtgaaggagctttactcccagctcggcgagaagctggaacagctggatcaccggaagcccagcccggcacaggctgcggagacgccggccctggagctgcccctccccagcgtgcccgcccctgccccgctctgagggccctccagacctgctcgggtgctggggccatgccgagtcgcggccctgctcagccggaagaggctcccggacctggatg

SEQ ID NO: 27838 - DNA, 453 bp, Homo sapiens
  misc_feature (1)...(453): n = A,T,C or G
attganncctcgagaccatagtccagtgcggnggaattcgggaaggtgagatggaggttttggtcttattgggtgtgaggaagcaacgtgtgtgtgtgcgcgcgcccttttgtgcagtgagagagagagagagattgcacacatgtgtctctgtagtcatgtggccaggtgggactatgtaggtaacagattgctcgtgtctgatttggtacaagcatgtttgttttcctctgtgttcgtgtgagtgtttactcaacaaatgtttattggacacactcagagagagggagtgtgcacacgtgcgtgtgtgttgctatccagcacgtggaccgggctcccagaagagctggcattgtgtctgagcagagctgggtccccccaaaacttgggctggcccagggcccaccagcagctgatgttgcctcctctcctgtcctggcagtagcttctggg

SEQ ID NO: 27839 - DNA, 485 bp, Homo sapiens
  misc_feature (1)...(485): n = A,T,C or G
cgccccccatcgagcnccntnnnnnatagtagaccctagtccangtggtggaattccccagatcctgtgcaggatgaggtccagggggtgaccctgctgcccaccacaaagcagctgctgcacctgtgcctgcaagatggtggcagtcctccagggcctggggatctggccgaggagaggactgagttcctgcacagccagaactcgctgtcaccacgcagctctctgtcggatgaggccccagtcctgcccaacaccaccccggacctcctcctggccaccacagccaagccatcagtacccagtgctgacagtgagacacccctgacccaggacaggccaggcagtcccagtggctctgaggacaagggcaacccggcgccggagctgagggcctcctttctgccacgtaccttgtctctgcggaactccatcagcaggatcatgtcggaggcgggcagtgggaccctggaggacgagtggcn

SEQ ID NO: 27840 - DNA, 590 bp, Homo sapiens
  misc_feature (1)...(590): n = A,T,C or G
cgctcatcgacccccctnnnnattggatcactattccagagnnggggaattcggagcagcgtcacgggcgcccggcccgttaaaacgctgctggctggagccacctccctccctgcagcccgcaacgggaatggagtaaagggagacccgtcgacctggccacggggatcagcgatggaattaaagcaatctttgtccacccatctggaagccgagaagcctctgaggcgctatggggcggtggaggagacggcttggaaaacggagagactggggagaaatcagctggacatcatctccatggcggagacaaccatgatgccagaggagattgagctggagatggcaaaaattcagcgtctccgggaagtcttggtccgccgggagtctgagctcaggttcatgatggatgacatccagctctgcaaggacatcatggacttgaagcaggagctgcagaacttggtcgccatcccagaaaaagaaaaaccaaactgcagaagcagagagaggatgagctaatccagaagatccacaaactggtgcagaagagagacttnctggtggacgatgcngaggtcgagcggntn

SEQ ID NO: 27841 - DNA, 581 bp, Homo sapiens
  misc_feature (1)...(581): n = A,T,C or G
cgccatcgacccccctnnnnataggaacaccagtccagagaggagcaattcggactaaattaccttgacaaggtacaaagggaaaagggtatcctgctgagtgacctgatcatcgggtccgctggagcaagcacttgggagccagggcaggcaggcccacccagggcttgctcacagacacagcagcctcctggttcccagtgtctggggctcagccgcctcccccgagtcccacaagcccaccaatgtcctgcataaaggtgcagcctgggcctttctctacacagctgcccaggaacaaggcacttcgtttacaaggaggagacatctgtcagagaagccccaaagccccaattccaggggcccagagagacacgtccctgctcctggctgcgccgctgccgggttcactgactgcctcagcagctcgctgggactgcttcctctgatggggctctggagagctgggaacagggcaactgctgggctctgctacctttctcaactngctctttgatccaaaccactttcgactggnggctggtgtctggacttgctgtaccagcacgttcctttcttgn

SEQ ID NO: 27842 - DNA, 483 bp, Homo sapiens
  misc_feature (1)...(483): n = A,T,C or G
ggccgcgttgagnnccntngnnaatagtagactctaggccangcggnggaattcaagaggaggacgaagaggaagaagcagcagcaggtaaagatggagacaagagccccatgtcctcactacagatctccaatgaaaagaacctggaacctggcaaacagatcagcagatcttcaggggagcagcaaaacaaaggacgcatagtgtcaccatcgttactgtcagaagaacccctggccccctccagcatagatgctgaaagcaatggagaacagcctgaggagctgaccctggaggaagaaagccctgtgtctcagctctttgagctagagattgaagctttgcccctggataccccttcctctgtggagacggacatttcctcttccaggaagcaatcagaggagcccttcaccactgtcttaaagaatggagcaggcatggtctcttctacttccttcaatggaggcgtctctcctcacc

SEQ ID NO: 27843 - DNA, 451 bp, Homo sapiens
  misc_feature (1)...(451): n = A,T,C or G
attgagactctagnacgtgcggnggaattccagcaaacacacaggctcgtgatggctccacggcaagatgcatggacgtgcacagcattcctgaaggctgcttcctgttcttcccatccatagggaggccttcagggagtccctggacatcgtgctccagtgccccactcactggcctcagcatggcctgcacggatggggcctcctgcctctcctgcttctgcagcactgcccggggaagtgaggggctcagaagacccaaaccctgttctcatgaaccaatgggaagtgacagagaagggtgaggaggtgccctgtgagacaccacaggggagaaattctctttcttggacctattgaacttttctttgtctcgagtgaacactttatttgtggcctgaatttctggtaaaaatgactttttttttcccctgagacggagacttagttg

SEQ ID NO: 27844 - DNA, 452 bp, Homo sapiens
attgaaccctcgagacatctagacagtgcggtggaattcgtcatgtctcctggcaatcgcaaccatccattctacgtgcccctgggggcagtggtcccggggctcctgggttacaatgtcccggccctgtacagcagcgatccagctgcccgggagagggaacgggaagcccgtgaacgagacctccgtgaccgcctcaagcctggctttgaggtgaagcctagtgagctggaacccctacatggggtccctgggccgggcttggatccctttccccgacatgggggcctggctctgcagcctggcccacctggcctgcaccctttcccctttcatccgagcctggggcccctggagcgagaacgtctagcgctggcagctgggccagccctgcggcctgacatgtcctatgctgagcggctggcagctgataggcagcacgcagaaagggt

SEQ ID NO: 27845 - DNA, 472 bp, Homo sapiens
  misc_feature (1)...(472): n = A,T,C or G
cccccatgagaccctancagatgaggcattccgnctgcagccgcgccggccgccagcgccccggcgcgctccggctcggccatggagctgccagctgttggcgagcacgtcttcgcggtggagagcatcgagaagaagcggatccgcaagggcagagtggagtatctggtgaaatggagaggctggtcgcccaaatataacacgtgggaaccggaggagaacatcctggaccccaggctgctgatcgccttccagaacagggaacggcaggagcagctgatgggatatcggaagagagggccgaagcccaaaccgctagtggtgcaggtgcctacctttgcccgtcgttccaatgtcctgaccggcctccaggactcctccactgacaaccgtgccaagctggatttgggcgcgcaggggaagggccaggggcatcagtacgagctcaacagcaagaagcaccaccagtacn

SEQ ID NO: 27846 - DNA, 597 bp, Homo sapiens
  misc_feature (1)...(597): n = A,T,C or G
ccacgccatcganncctntnnnnataggaacacctatccagagaggngcaattccatgtctcaggcttccagcctgtaggccagccacctgacacaaggcaagccaacacttactcccctgagctagtggggcccagagagaatattctcactggtcacaaagccaagctttcagtacataaaacaagtgaaagaagaatctcatcttgtttttgcttcagggactcacaacaaaggttgtctaaacagacaccagtctggtgagaagtgtgcactcaccagtccatgaggccagctcgaacacaggactataggccctagagctgggttcccccttgtagcatatgacacaaaagataaagacaaaggaaaacaatgaccatctctgggaagaatgggatcaaatagaaaacaagaatacttgaaacagaaaatgccaaagttgccatacccaaagaatgacttcacacaaatattntctcctgctaacgtaagtgtagaaagaaaaaaagacaagagactcatcagtcttgcttcaagcagaccctgcaggcagagatctangacactgaagtgtaagaaattctaccctctgtg

SEQ ID NO: 27847 - DNA, 472 bp, Homo sapiens
  misc_feature (1)...(472): n = A,T,C or G
ggntagtnnnaattgaaacccttactgacgacactagtcagtgcggtggaattcatttctgcaggtggattctgcaggggtgtggggccgtggacaggctgaggctcaaggaaggtggtcctcagctcggctggccgggcagcccctcctccgctgtggcccgcctcaaacgggctggtgcatcctcctcttggccacagagggcagcatcgcccgccccttcccccaaatgctgcttgcagcacccaccctaaagccccctccaaatagccatacttagcctcagcaggagcctggcctgtaacttataaagtgcacctcgcccccgcaagccccagccccgaggaccgtccatggaccttatttttatatgagattaataaagatgtttgcnnnnnnnannnnnnnnnnnnnaaaaaaaaaaaaaantnnntnnaaaaannnnnnngggaaaaaaaagaaattggtttta

SEQ ID NO: 27848 - DNA, 481 bp, Homo sapiens
  misc_feature (1)...(481): n = A,T,C or G
ggtgtgcccnccagccgcccactgatgacatcggactgatggcgctagaccaagccancaaaagccaggggatccagaaaaaacacagacagccaagagagaaactgtgggaaaaagcctaaaggttgagagccacaccatctanaagcttcctgcctgtggtgcggcacagaaacaaggagagtcagcaattaccagccagccaaggtcctggaagctgacgtagagctcgtgccgacggcagacctgccggccgtgggagccgtggacgtcatctgcagggacagaaggggcaaggtcttttctggggttcctactgtgtgcagctactatggggtaccagggtgggggatgccctgatgagcacatttgtcaaataaatgaatgacaggaaaaaaaaaaaaaaaaaaaaaaaaaaaaaaannnnnnnnnaaaaaaaaaaaaaaaaaaaaaaaaaaaaaaaaaaaaaaaataaanaaaa

SEQ ID NO: 27849 - DNA, 438 bp, Homo sapiens
atgagtcattgtcagcttgaggacctctgtacgcgttgggcatctcatacccatcagagctgagtatgcaaaaagagacaattaactaatttccataaagtggcaagacatttccatgagagaagagatccacagttgcttttattcctggtggactaataggagaagagaaaccagcccaacttttggtggctgcatatgagctggcaggaaggattagaatctcaaggagctccagacaaaagtctgcatctgtctgcccactcttttccagggaccttcactaaatgcacagggtacagtgccaaatgatggaatcagagcagctttgctgaactaatttaccctgagatatgagggactttttttaaggacaaggcagagggctgctgaagtctaggggtagagcaggagagaggaaagaaatccctttgaggg

SEQ ID NO: 27850 - DNA, 482 bp, Homo sapiens
  misc_feature (1)...(482): n = A,T,C or G
gcccccatcgacnccntnnnnnatagagnactctagtccagngcggtggaattcgcggatttcaatcttgctgactttgagtgtgaagaagacccatttgataatctggagttaaaaactattgatgagaaggaagagctgagaaatattctggtaggaaccactggacccattatggctcagttattggacaataacttgcccaggggaggctctgggtctgtgttacaggatgaggaggtcctggcatccttggaacgggcaaccctagatttcaagcctcttcataaacccaatggctttataaccttaccacagttgggcaactgtgaaaagatgtcactgtcttccaaagtgtccctcccccctatacctgcagtaagcaatatcaaatccctgtctttccccaaacttgactctgatgacagcaatcagaagacagccaagctggcgagcactttccatagcacatcctgcctccg

SEQ ID NO: 27851 - DNA, 477 bp, Homo sapiens
cccccccatcgagaccctaggcatttgagggcattcggagagaacccctaccgctgtccccactgcccctttgcctgcagcagcctgggcaacctgaggcggcatcagcgtacccacgcagggccccccactcctccctgcccgacctgtggcttccgctgctgtactccacgaccagcccggcctcccagtcccacagagcaggagggggcggtgccccggcgacctgaagatgctctgctccttccagatttgagcctccatgtgccaccagcctctgcccctttgccactcactatcccaaccacctggcccggcacatgaagacacacagtggtgagaagcccttccgctgcgcccgctgtccttatgcctctgctcatctggataacctgaaacggcaccagcgcgtccatacaggagagaagccctacaagtgccccctctgcccttatgcctgtggcaatctggccaacc

SEQ ID NO: 27852 - DNA, 481 bp, Homo sapiens
  misc_feature (1)...(481): n = A,T,C or G
gcccccatcgccccccttnnnnatagtagaccctagtccatgcggtggaattcgaggaactcctggtgcctttctgagcctgcgtgggagaaccccaattctagcactccaggaaactgtgggagagtgtggggcaggctccgtcctccctgggagacccctccagccaccgggtgccacttaatgccaacagcccttaccaaagctgggagccccattgccccggcagctctggcctgtggttccagaagctgagaaaactccactggggcttgcagaatccagggttcacctaagctgcacagttcctgcagctttgccagccccctgaaagtcttgtgtaccccacctctgaagatgctgggggaggcagctgggatgggagccagccccatgcctgtctgtgaccccacagtgggtgagagcccgtcacagtcctgggtgtggctgctctggaagaattaggaggcagccataataa

SEQ ID NO: 27853 - DNA, 449 bp, Homo sapiens
  misc_feature (1)...(449): n = A,T,C or G
aaagaagatctttagtccgtgcggnggaattccccgcgatggctggcactacggagagagtgagaagaccaagatgcggggctggtttcccttctcctacacccgggtcttggacagcgatggcagtgacaggctgcacatgagcctgcagcaagggaagagcagcagcacgggcaacctcctggacaaggacgacctggccatcccaccccccgattacggcgccgcctcccgggccttccccgcccagacggccagcggcttcaagcagaggccctacagtgtggccgtgcccgccttctcccagggcctggatgactatggagcgcggtccatgagcaggtaaggggactttcagacctgtctttgggaccgtgggtgggtgtgaagaggccgggtggggcangtccctctgctaggacctggggccacctcttttcctttagggc

SEQ ID NO: 27854 - DNA, 571 bp, Homo sapiens
  misc_feature (1)...(571): n = A,T,C or G
agggagagggcccccccnccaattgattnccaatccgaaannatcaanacccctcgcagngnggcggaattcgtcattctctgtcaaagnttgtctgcctaagaacctcctacttactctgcactccgtggcgcactttcttcatttcccctcagccttattcccccttccccatcctcttgactctgagttcacttcactgcagtgaaactaatgaggtgctgctgcttttctcaaagccccagatttcccctcctctttcttgccatggcatccagtcctttctcattgcaaccacttggaagtctggcccctgagcctgcttcttcacatgggagctagtattctcagcccatggggagaaacggaggcctgaatacaggcggtcacctaaggtggtgcgtacagtgttgggccacatgtctagtggtgccaggactgagagatcacttacctccaccggttacccaggaggtaacagagactgatccacaatgttcctgaggtgtcttgggcacccataggcaggtgacttctggcttaaggcagggttcaagaggctgngcactcn

SEQ ID NO: 27855 - DNA, 553 bp, Homo sapiens
  misc_feature (1)...(553): n = A,T,C or G
ggatgggcccnnnnaaatgatcccatccagaggttggaatccctggttccgacaggtggtacagggtttactctcagaaacctacctggaagcccatcggattgtgaagatgaacaagagtgaggatgatgagtctggggctggagagctcaccagggaggagctgaggcaaattgcagaggaggatttctacgaaaagctggcagcttcaatcgccccagaaatatacgggcatgaagatgtgaagaaggcactgctgctcctgctagtcgggggtgtggaccagtctcctcgaggcatgaaaatccggggcaacatcaacatctgtctgatgggggatcctggtgtggccaagtctcagctcctgtcatacattgatcgactggcgcctcgcagccagtacacaacaggccggggctcctcaggagtggggcttacggcagctgtgctgagagactccgtgagtggagaactgaccttanagggtggngccctggtgctggctgaccanggtgtgtgctgcattgatgangtcgacaagatggctgaggcc

SEQ ID NO: 27856 - DNA, 485 bp, Homo sapiens
  misc_feature (1)...(485): n = A,T,C or G
gcccccgcttcgagacccntngnnaatagtagaccctagtccaagtggtggagagtggagccatgaccaaggacctggcgggctgcattcacggcctcagcaatgtgaagctgaacgagcacttcctgaacaccacggacttcctcgacaccatcaagagcaacctggacagagccctgggcaggcagtagggggaggcgccacccatggctgcagtggaggggccagggctgagccggcgggtcctcctgagcgcggcagagggtgagcctcacagcccctctctggaggcctttctaggggatgtttttttataagccagatgtttttaaaagcatatgtgtgtttcccctcatggtgacgtgaggcaggagcagtgcgttttacctcagccagtcagtatgttttgcatactgtaatttatattgcccttggaacacatggtgccatatttagctactaaaaagctcttcacaaaaaaaaaa

SEQ ID NO: 27857 - DNA, 469 bp, Homo sapiens
  misc_feature (1)...(469): n = A,T,C or G
gccaggccatgataccntcgnactgatgacattagnacangcggnggaattcgagcctaggccctctgtgagatgtgtcaccatttcttggacactatatgagacatttcccctcggattagagatgctcaacctgcatcaacaaatctaaagcctgcatctggctaccctggggcgagtcctgtttacagtgcctattcctggagctcgcctctttttgccttttgtttgattatgtgatgtattacttttcccagcaggccagtgctagcatactggaagagggatttaataagctggcacccttgatgctatgctcctaatccaaccttatttgcctcattggccatttccattatggtggcagccctccattccagccacagcagcccctcagcgtcccccagtcacactgtccccattgctgctcatctgtgcctttgtccatctacaatgcccttatttcact

SEQ ID NO: 27858 - DNA, 463 bp, Homo sapiens
  misc_feature (1)...(463): n = A,T,C or G
cactgaaaccntcggactgacgccnttcgnaagngcggnggaantcagttattatgaaaatctagcagtctgggtcctttgagaaggctttaaaaaagcaattttcttatgagccatgtgtgattttgaagactcatttccactgagaaattatttggaagttcctatggttagctctgttaaggaatgtaaaaatttatagggggtgtagggttatcaatttgaaagccagtagaaaatctgctcaagttacttcttgaggatcatctgtattttacaaaaagaagcacaagaagcatccaatctttatacttcttgtgactttttttcccctgcattttactttgtaatatatcggctttataattttaaaatacactggccgggcgcagtggcccacacctatagtcccagcactttgggaggccgaggcaggtgggtcacttaaggccgggagttcatg

SEQ ID NO: 27859 - DNA, 455 bp, Homo sapiens
  misc_feature (1)...(455): n = A,T,C or G
cctgacaccttcgnatgacggcgtagcaggcacagagcagctgcaggcatggtccctggagccgagccttcaccacgcactcgttttagttcggatgttggaacctggtcccagcttgagttcctgcctttcccaccacaaattatcaactggttgatgtgtacactaattacatttcaggaggacttaatgctatttatgttgtgcctctgcaggcaaagcccttaataaatattttacatcctttctaatgacaatgaatggaattaatcactcaacaggtatagtattacgactcatgtttactttttaaaatgatttagaccgattttcagattttatttcgttatgattaaagatgtctcatgtacttggaaaagtgagcatttttttttttttttgaattccactttcaaaccaggcttaaggccaatgacttttttatttttgaagtc

SEQ ID NO: 27860 - DNA, 462 bp, Homo sapiens
  misc_feature (1)...(462): n = A,T,C or G
cccgttagaccccccactgangaccntcgcacangcggnggaanncggagcattcatcacaagtttcctagagagaggagacaaatcggtgttccattgactttatgagccagggtaaaggcaccctttggaattactgatttcaaagattaataaagtaattctatttttattttcttttttttccctttactaatttcccaacaatcaatattcacaaacaggactgaagtagaaccagttttttattttactttgtggctgtgcaattttttaaacattttagaaatgtgagctgtaaagagatgttttatttttacatttcatttcagcagatggtgggtccaggctattcccaaaggcagctcctgcacctggggagcgggcatgtgcagatgtctccgttatcagccctcgacaggcaggctcactcacagcgtgggcctccagtggcttgagccc

SEQ ID NO: 27861 - DNA, 446 bp, Homo sapiens
  misc_feature (1)...(446): n = A,T,C or G
actgagatcgtagnccagtgcggnggaattcccaagttgtcagatttctctgctgatagaacgctgcatagtatcttctagccctaaaaatgaccaggttgggcatgagttaacaggatattgtggcaaaaggaattttctgcttagaaaagtaaatgtagataaacctaaactccaccctgtactgagccttaggctagggactcatgtgtaaagatgacttttctccccagatatcttgtcattgacaggccttcctagtctggtagtcctacatttgggtgttctcctgagagtgagaaaaaacccaaggtcatgacaagattcctggcaggtgacagacttcattatgattctgactctagactgaccccatcaagatagtcgtttccgtcagtgaacagatgctgaaagccttgccattacaaaggagacaactgagttcn

SEQ ID NO: 27862 - DNA, 449 bp, Homo sapiens
  misc_feature (1)...(449): n = A,T,C or G
natcgcgaacagatagaaactcggccgagtggtggaattctttggagagagcggcggagaataatgtcttccacttggtggccactgtgtgctcccaggaggaaccagtccagcctctcctgcgggaaggtctgggcccgtcacgggacagccagcagcgtgtccgacgtaatctccgcgcctcggctcgggaggtccggcaggagggccgctaccgggtgctttccagccgccgatccttggggaccacctcgagcggccaggagtccgagtacacgccggggaacccagaagccgccgggaactcgggctttcagttgttagaccttgtgcacgaggagggagaacctgaagccgtctctgcaggctcctgcaaaacatctgacccagatgtgatcctctgcaattctgtagagttgatccgtgagcgattgactgtgtctgaggan

SEQ ID NO: 27863 - DNA, 474 bp, Homo sapiens
  misc_feature (1)...(474): n = A,T,C or G
ccgcccccccngnnnnnttagagatcgtantncgtgnggaggaattcgtaaggcctcagctcattctatctggcccagtctctgtgtccacttgacttaaccatgtggccatgttaattccatcttgaaggcagggagaggtcatgggcagccccactcccccttatggcactctgatgtccccagtcacggctctgggtctctctccacagccttacgacagtctgcctacctcacagacctgcttcttccagctgaggctgcccccgtactccagccagctggtcatggccgagcgcctgcgctatgccatcaacaactgccgctcaatcgacatggacaactacatgctctcgagaaacgtggacaacgccgagggctccgacactgactactgaccgtgcgggtgctctcaccctcccttctctccctcaataatgctcacttctgatttgatgttgatatacttttatg

SEQ ID NO: 27864 - DNA, 480 bp, Homo sapiens
  misc_feature (1)...(480): n = A,T,C or G
tggatgacnnnncctcgatagcactcgttcgtngcgnggaattccactgagcaatggtaactgcacctgggcagctcctccctgtgcccccagcctcagcccaacttcttacccgaaagcatcactgccttggcccctccctcccggctgcccccatcacctctactgtctcctccctgggctaagcaggggagaagcgggctgggggtagcctggatgtgggccaagtccactgtcctccttggcggcaaaagcccattgaagaagaaccagcccagcctgccccctatcttgtcctggaatatttttggggttggaactcaaaaaaaaaaaaaaaaaaaccaatcttttctccaaaaaaaaaaaaaaaaaaaaaaaaaaaaaaaaaaaaaaaaaaaaaaaaaaaaaaaaaaaaaaaaaaaaaaaaanannannnncnncnncaaaaaaaanaannnnnncccccacacgccccgcgcc

SEQ ID NO: 27865 - DNA, 472 bp, Homo sapiens
  misc_feature (1)...(472): n = A,T,C or G
tgggggnnnnnngctaggacctcgtcagngcgngcaatnctggggacgctgtccacatgcagggaatgcagttggtgaaatggaagctaaatgctcattttcctcagtgggaagctgtggcttgaagatgactgtaaactctctttacgcctcttcaatcttgacaggccccagggctgctaagctaatatggcagaagggacactgtgccagatgcaggcccaggccttaagagactggcagcttcccctctctgtctctggaaacctacctgcccttctgtaaggaagcccaagcagctctggagaagcccttatggaggggcccactctcagcccacagccagcaccagttgggcagccacgcagacccccaacctgcaagccaggcccgctgaggcctcattacacacaggcagtcccatcagccctgcccagatggcagttttgtgatcaaaatatagacgatagag

SEQ ID NO: 27866 - DNA, 448 bp, Homo sapiens
  misc_feature (1)...(448): n = A,T,C or G
nctcgagatcagtagtccagtgcgatggacatttgtttagtaaatcccttcagtatttatccctcctttccccacagcagctttctttcctgtcaactagaaaggagcaggatgtaataaatacattttggtgtgactaggccacaccaactcttaatcatctcccattttccttagacatttaaatttcaaggcaggtaccctctgtgtactcagaaatttgaagaagttatttggttttccaaaatgcacactgcgggttattgatttgttctttacaactattgttctcatatttctcacactaaataaatctctatgagagcttcttgacttggccatttatttcttggacactctcatgttcttgttcacccatgcaggcaccccaccaaagtacatatcttccttccagtaataatttttaattacaaaataaacatccact

SEQ ID NO: 27867 - DNA, 467 bp, Homo sapiens
  misc_feature (1)...(467): n = A,T,C or G
gaaaaaaattagatnacactnntttgatgacattagtacangcggtggaattcgtctgacaagcagaggcatgagctgggtccaggccaccctactggcccgaggcctctgtagggcctggggaggcacctgcggggccgccctcacaggaacctccatctctcaggtccctcgccagctccctcggggcctccactgcagcgcagctgcccatagctctgaacagtccctggttcccagcccaccggaaccccggcagaggcccaccaaggctctggtgccctttgaggacctgtttgggcaggcgcctggtggggaacgggacaaggcgagcttcctgcagacggtgcagaaatttgcggagcacagcgtgcgtaagcggggccacattgacttcatctacctggccctgcgcaagatgcgggagtatggtgtcgagcgggacctggctgtgtacaaccagctgc

SEQ ID NO: 27868 - DNA, 573 bp, Homo sapiens
  misc_feature (1)...(573): n = A,T,C or G
aggcgcgnnnacttgatcacagctcgaaggacacgtcagagnggagcaacncatccattgatcactgacgtactgcatggccagcccctgctccgtatcctgtcattagccttggagcaaggtcagccctctttttgggcaaggttaaattcttgccttccctcttgttgccgttgcttctgttcctggaggagctcctggcacagtgatggggtctcaggcctccaccttactgcacgatgaagagtttgaggagatcaagaaggagactggcttttcccacagtcaaatcacacgcctgtacagccggttcagcaacctggacaaaggagagaacaggacgatttccaggggattccagaacttgccatcaacccagtgggggactggatcatcaatgccttccttccagagggagaggaccaggtaaacttccgtggattcctgcaaactctggctcatttccaaaccattgaggataatgaanagagcanaagtgtgaatggaccttgaccactcaacagccgaagcaacaaactggcagttgctttcgactatatgatttggataaan

SEQ ID NO: 27869 - DNA, 480 bp, Homo sapiens
  misc_feature (1)...(480): n = A,T,C or G
agtattccnnnnnnaatcgagnccctcgagnaccattcggccagngcggnggaattcaatgcaacagtgacgggagatggcgcctaatgggagggctccaccctcatgaatggattaatgccaattatgaaagggcttaaggcttcgatttctatctgttgctctttcactcttgcactctcctgcacatttaccttcctccattggataacaacacaaagcccccataagatgtggagcccttgatcttggaattttcagcctccagaactataagaaataaatctctgtattaattacccaatctcagttattctgttatagcagcccaagatggactaagacgggggaacgcacaccatgggaaaccatgagaagactcaattaggaggtgttaggatctggggcttgattggatgatttggaaaatggagctggggtgctgagcggttctattatcagagatgttcaaaccagagt

SEQ ID NO: 27870 - DNA, 456 bp, Homo sapiens
  misc_feature (1)...(456): n = A,T,C or G
attgtagacattaggtagagcggcgtaattctgattttcagggtgaaaaacaatgctgaaagctgaaggaagcagcaaaaagactttattctcttactcaaaggcagngaggcagggctgggaggctggaagaaatctctcaagacgtacagaagacacagtttcatggtgggtgggtacgtgtgggagtgaaggagaggggaggaatcatgttgcaagtgtccaactgtccccttggtgctgtgaggttttcccagcctgtactaagcacccaaactgtcaagcgctccctttctacctactaccttgagaacacctgaaaccctgcctacggcaccccccaaccccggcccccgccgtcggtgaagcaggggtcctctggacctacaagaggcagggacaggaagggagcagggtctttctagcaaagtcagtagtgatgcggggtcaaactac

SEQ ID NO: 27871 - DNA, 463 bp, Homo sapiens
  misc_feature (1)...(463): n = A,T,C or G
aatagataaccnctnntttgatgcaccattagtccagngcggtggaattccaggaagccatctcagtcccttccccagctgggtcagtttgctttcctgtgcccccactgccctccatgttggccccaaagcactgactgttcacccccacgaggctgagctcgctggtgctggtcctgtgacctgctctctcaagtttctggtaggctttaatgagcgtgtgacctgggccacgtcctgtggcgtttgttctcctaggccaaccccttcaaggagcgaatctgcagggtcttctccacatccccagccaaagacagccttagctttgaggacttcctggatctcctcagtgtgttcagtgacacagccacgccagacatcaagtcccattatgccttccgcatctttgactttgatgatgacggaaccttgaacagagaagacctgagccggctggtgaact

SEQ ID NO: 27872 - DNA, 454 bp, Homo sapiens
  misc_feature (1)...(454): n = A,T,C or G
gagccagcncgcgcctaatgaagtcttcgactgacgcctttcganccncggccgaggcccacaggtgctgcccttgctgctgctggtcgggcacccatttgcgtgaggggtttcagcctgtcccggggttgcctgaggcagagcaagacgggttctcacccctgacttctggaggcttcccttgaagctctgtgcaaaaggtgggagacagagctggacctgcaggggtggtcccgccacaaccctgcgtgtggaccctggcaggggggggtgccaggcccctggaaagcaggggttaccgttacgaggctgtggtccggggcaagccaagtacgaagcagcagccatcgcgggctgcatcatcccccagccaggtccccaccaggcctatctcccagcgtttgtctaataaacgcacccctcctaaaacaaaaaaaaaaaaaaaaaaaaaaan

SEQ ID NO: 27873 - DNA, 471 bp, Homo sapiens
  misc_feature (1)...(471): n = A,T,C or G
gagaggcgcccatgaagccntcgattgagcacattagacagngcggnggaattcggccagaggaaaggccagcaggtcctagactgcaagcagcacagggtccacctgcttgagcaaagcgtgaccagtgagtaggaacttgggccatgcaggatcacccagagccgggggagcaaggggcatctgcctgccacccagcttgggctggtgccctctgcacagctctgctgtcagcctgggcaggtctcctgccacctctcatagtagcagcatactgctgctctgcgtgagaaggcagttcctccactagaccccaagcccattcttagagagatgtgctggcccaggcctctcatttgcttcttcagggacaggctggcctctggcccacatgtcaagggcctttgcagcagggcttctggaaaccatgtccattcattgggaagatccagcccacatgcccttgtgcct

SEQ ID NO: 27874 - DNA, 559 bp, Homo sapiens
  misc_feature (1)...(559): n = A,T,C or G
gcgggtnnaatcgaacactagttcagagtggcgcaattcgttatctcctcagatggccagtttgccctctcaggctcctgggatggaaccctgcgcctctgggatctcacaacgggcaccaccacgaggcgatttgtgggccataccaaggatgtgctgagtgtggccttctcctctgacaaccggcagattgtctctggatctcgagataaaaccatcaagctatggaataccctgggtgtgtgcaaatacactgtccaggatgagagccactcagagtgggtgtcttgtgtccgcttctcgcccaacagcagcaaccctatcatcgtctcctgtggctgggacaagctggtcaaggtatggaacctggctaactgcaagctgaagaccaaccacattggccacacaggctatctgaacacggtgactgtctctccagatggatccctctgtgcttctggaggcaaggatggccaggccatgttatgggatctcaacgaaggcaaacacctttacacgctagatggtggngacatcatcaacgccctgtgcttcagcn

SEQ ID NO: 27875 - DNA, 561 bp, Homo sapiens
  misc_feature (1)...(561): n = A,T,C or G
ggaggcnnnattgaaacccactgatcactactccgagnggngcaannccgcgaagatgcagctcaagccgatggagatcaaccccgagatgctgaacaaagtgctgtctccggctgggtgtcgccggccagtggcgcttcgtggacgtgctggggctggaagaggagtctctgggctcggtgccagcgcctgcctgcgcgctgctgctgctgtttcccctcacggcccagcatgagaacttcaggaaaaagcagattgaagagctgaagggacaagaagttagtcctaaagtgtacttcatgaagcagaccattgggaattcctgtggcacaatcggacttattcacgcagtggccaataatcaagacaaactgggatttgaggatggatcagttctgaaacagtttctttctgaaacagagaaaatgtcccctgaagacagagcanaatgctttgaaaagaatgaggccatacaggcagcccatgatgccgtggcacaggaaggccaatgtcgggtagatgaacaggtgaatttccattttattctgtttaacaacgtgn

SEQ ID NO: 27876 - DNA, 452 bp, Homo sapiens
  misc_feature (1)...(452): n = A,T,C or G
gggagactgagnccatcgaaaactgagaccatctgacagnctggnggaattcacagaggaatgaagtcttcatgtacagacttgggtgaccctcaaaggcacattacagagaaatatgtattgcatgatcttatttttactaaaaatcaccccctcaagatccaggcatacgtgttttatgtaagaagaatgtacggagggaaatatttcatatcatacacagcatatagatgtcatctgaattgttatagcaagcattcgatacttttataaatcaaataactgaaatggaaaaaaaaactgggaagaggagggtgaattgtgaagtcaaaaaatcatgagagagatgacaaattcaggaaggtttggggctgcggttttgagtctgctaagcagactgatctcctggcacccacagcatcctccgtgagagaccctaaaccacagagtgg

SEQ ID NO: 27877 - DNA, 453 bp, Homo sapiens
tttgagacattaggtagagcgccgtaattcaaggcgtgcccaggtgagggggtttccctccagaatgaacggcgccatatgaggatgaggagagaaggctgtgggcgccctgaggctgctgcagccacttggtgtcccagagccacgtatggggccctggagacagcctgagtggggacacctgggtgcctgttgcatcctcatgggtcccaggactcaacccaagcgttccctgtaacaacctaactgcagttgccccacagctgatatttttctctttttgtttttagttggcgtaaaataatggtacatatttataggtgcagtgtgatatttcaacacatatatacaaacaatgtgtggtgatcaaatcagagtagtctgcacacccatcgcctcaacattgatcatttctctgtgttgggaacgctcaagatcctctcttccaagttt

SEQ ID NO: 27878 - DNA, 418 bp, Homo sapiens
  misc_feature (1)...(418): n = A,T,C or G
gactncctccaccagggcctttgctggacctcctcatctaaatttggtgtcctgggctctgctcccctgggcannctctatccatcctttccttcccagcgcctgtgagtgtgtgagtgagtcctgtctctcccctctataccgctagcttcgtgaaggcaggttccttgtcccctttagtcactgctgtatttccagtggccaacacagtgcccacccagagccagctcagagcagagtaaacctctgtggaatgagtgggcgagtggggtgctcagccctcaacacagaccccgcagccacggctcccctccctgcagatcgggctcctgacaaccatggccatcctcctgcatgagatcccccatgaggtgggcgactttgccatcctgctccgggccggctttgaccgatggag

SEQ ID NO: 27879 - DNA, 437 bp, Homo sapiens
  misc_feature (1)...(437): n = A,T,C or G
nctcgacggaccttagtccagtttggtggcattcctcccctccagctgacctgccctgtcctctccagctgtccccacaagcagagccctgaggggtggggaccagctggccacatggtgctgcttttcaggttaggggagaggtggccctgagggacagcccagctctgagtctcagtcgctgatcactgccagggaggctcaggctgccatggctccaggctccctcccctgcctaggggcaaagtccatcgggtcctgggcctcagcttcccttcccacattcctccggccccaggagcaaccccttgggctaggtctgaccccaggtgtccctctggaaggggctggctggtgccctatttccagccaccccagcagctagggaggcaaagcaggctgcagtcagtccctcaagccagcgatgcatgtttggg

SEQ ID NO: 27880 - DNA, 443 bp, Homo sapiens
  misc_feature (1)...(443): n = A,T,C or G
nattgattgtcccttananattttgatgacatttagaccatcgcggnggaattcctcggcccatttgaagaccaggaagttgatcaatcccgaggctgctgagagactgtggcgcgattgggacagtcgccagggatggctgagcgtgaagatgcagcgggtgtccgggctgctctcctggacgctgagcagagtcctgtggctctccggcctctctgagccgggagctgcccggcagccccggatcatggaagagaaagcgctagaggtttatgatttgattagaactatccgggacccagaaaagcccaatactttagaagaactggaagtggtctcggaaagttgtgtggaagttcaggagataaatgaagaagaatatctggttattatcaggttcacgccaacagtacctcattgctctttggcgactcttattgggg

SEQ ID NO: 27881 - DNA, 458 bp, Homo sapiens
  misc_feature (1)...(458): n = A,T,C or G
atagatncccctnntttgtagacattagtcagtgcggtggaattcctgcttctccctcactgctaagtcccctgcgcgcaactgggcgtctttacgaggactgcggggccagttctgcggcgggctgggctcgggctcagtgacacgtgtgttgctgtgagcctgggtggtcgccctgtgaccaggcacctgcttgagaggaacacatccctaaacccatcacagggggagatttggggactcttggtgctaccgaggccgcggcccccacttcactgccagctccaggacggagcatttacatctctccctggcacgccaaaggcggggggtgagtcaggcagattctctgcaagtggcacacacacatttatttgcaatggatttggctaggggaggcataggttaaactggaatttctcttggccagcgacaacggagctctccctcaggtactg

SEQ ID NO: 27882 - DNA, 458 bp, Homo sapiens
  misc_feature (1)...(458): n = A,T,C or G
aaagttagacgatcggtaggccacngncgnggaattcccagaccccaccgtcgcagtcgccaccacctcagtccatccttggtaccggcaatgggcttcgtatcctccagtgcacttgtaactgacttggacacggaatactaagaactcacttctgtcctcatcccagtcgcgccggcggtgaccatctcggctcttttgggcttaactgccgctcctctggactctgtctgactttgggggcaccatggaccaaagtgggatggagattcctgtgaccctcatcattaaagcaccgaatcagaaatacagtgaccagactattagctgcttcttgaactggaccgcggggaaactaaaaacgcatctatctaacgtttaccctagcaaaccagtaagtgtgtaaaagctgggggcagctgctctgaccagcagcttttcgtgccgtgtaccctcct

SEQ ID NO: 27883 - DNA, 454 bp, Homo sapiens
  misc_feature (1)...(454): n = A,T,C or G
ctttgattagtgacgactggcacgngccgnggaannntaggagggctacagcccacatcccaccccctcgtccaatcccataatccatgttgaaatttgaggtcacgtggcctcccaggcctgactggccaacctacagcattgacgccaacttggctgtgaaggaagaggaaaggatctggccttgtggtcactggcatctgagccctgctgatggctgtggctctcgggcatgcttgggagagcagggggctcgggctgcctggcctggttgcacagaaggcaagagctggggctcatggtgctctgagctggcctggaccctgtcaggatgggccccacctcagaaccaaactcactgtccccactgtggcatgagggcagtggagcaccatgtttgagggcgaagggcagagcgtttgtgtgttctggggagggaaggaaaaggtgttgg

SEQ ID NO: 27884 - DNA, 440 bp, Homo sapiens
  misc_feature (1)...(440): n = A,T,C or G
agggacccctttgaagaccttanctgatggcctttagtcagccgggcaggaagagcccacagcaagggctgtttccaagctgagattgtgcctgtgaccaccactgtccatgatgacaagggcaccaagaggagcatcactgtgacccaggatgagggtatccgccccagcaccaccatggagggcctggccaaactgaagcctgccttcaagaaagatggttctaccacagctggtgagactggtccggggtaggggtatgagaaagcaggccatggccatgctgggtgctgtactctgggaacctggaatagaccaggcccctctgcaaagtagaagtgggagggctgggatctcctcatccccaccccgatgccttcttaccccaacagtttgcccctaagaaactctatccaggtgagtgatggggcagctgccat

SEQ ID NO: 27885 - DNA, 457 bp, Homo sapiens
  misc_feature (1)...(457): n = A,T,C or G
aattgaactgatnagcataggcaagngcggnggaanttagcaggatggattcaagggaaacctacattaaggaaaattgctgtgaattatgaaaacaccaagtttgaataagaggatcatggagaaaaaatgagaccctaaaaagtttctagagagagaaaacaaaagatcagaaatgaaagcggggccaggcgcggtggctcgtgcctgtaatcccagcactttgggaggctgaggcgggtggatcatgaggtcaggagttcgagaccagcccgcccaatatggtgaaaccccgtctctcctgaaaaaaaaaaaaacccaaaatttacccaggcttgggggcgcatgcctgtaatcccagctactaaagaggctgaggcaggaaaatcacttgaatccctgaggcaaaggttgcagtgagctgaaatcgcaccactgcactccagcctgggcgaca

SEQ ID NO: 27886 - DNA, 440 bp, Homo sapiens
  misc_feature (1)...(440): n = A,T,C or G
aganatgnntttgacgacctcatttgatggcgccaattccagcgggttgctggttttcattcattggccccggagccgcccctggatttccatcttttgtggcgcgaaaataaccctttgctccctcgttggttttgttgaggatgaggggtgggactgtgttcccctctgctcgctctcgtttttcctgccctttaacagctcgcccccagccccaacccccaaggaagaaagagggaggtaacgctgaggaagggtggaaagcagttctgcgtccgtgggtggagcccgccccttggctgaccgcatggtgcccgcacggtcccttcccttcccccagcgtccagcgcccggaggttctggatttgcgccatgctcagcagctggagtcacatcttcgtttccctgcccatttccaacatcttagagttgatgcgtcc

SEQ ID NO: 27887 - DNA, 458 bp, Homo sapiens
  misc_feature (1)...(458): n = A,T,C or G
tgaagtgaagggaaaaanaacctgatgtcctctgtcagngcggnggaattccggcaccgccccaggaccccgtccgcaggagcagcacagcaggcagctgcaggagcagtgggaggagctgtcgagtcaggtacgtgcaggagatgggagggcctgtctcttggttcctctcggaagtcctgcccttgtcctcgcccttgttgcctccccgtccctgtctcccctgacacccgttcctccagaagcccggtaaaccccgcccttacaagccccgcccctagctcttctactacggaggggaactgcagagccagaagagcacggagcagcaactcgcagcccaattggtgacgctgcagaatgaactggagctggcggagaccaaatgcgccttgcaggaggagaagctgcagcaggacgcgctgcagacagcggaggcctgggccatattccaggag

SEQ ID NO: 27888 - DNA, 501 bp, Homo sapiens
  misc_feature (1)...(501): n = A,T,C or G
ggatggcagggngnnnnnnnaatcgaganactgagaccgtcgngaagngcganggaattcgcatgatactatttttgcttttcatgtaatgtataagtattcgcagaagctgcttgtttatgtttgtgttccatgtatgaaaatggtgtaaacagggtccatgtatttccccagtgagagttgctgatcttttggctgtaattaccaagtgcttgaggttggggtggctggaaatgaatatcaagcttttcggtgcctggagccaactttgtccaaataaaagagctttgtactgtgaaggaattttactaagtaaattttgtttaaaaaatccacgtgaattaaaggaaaggaaatgaagaagaagattgtatcaatacgatgatctaaatcagtgttctgcaacttttctacccagtcatcagtgggagtgaatcattatgaatgtggggaagggagtgaggggagacccccttcttgactcagcagtggtgacggtcg

SEQ ID NO: 27889 - DNA, 461 bp, Homo sapiens
  misc_feature (1)...(461): n = A,T,C or G
agaggggnnnnnnnnnnnnnattgtagtccctagtccgtgttgtggaactccgatcctgaaatttcagctcaggaaaagccctgtttcccattaacctgttctgtcccccttgaagtggtggggctaaaacgagaagagtgctgcctatttgggagattgggaccaggcctgagaggcatgatgtttgggtagcatcttcccaacacttgcaattagcactgttctcagatcacaggccttgacagcatttactgacaagcactgctggtgtgtggtttttagttacggtacttatttgcccgtttgcaacttatcatgcaatgggtgattatttcgtacttcagaaattggctgtatgttttgtgaagcctataggatctgttatttttagtttgatttagcataactggtctctttgaattccactttcctttggcttcaaatgtggagagctcagcat

SEQ ID NO: 27890 - DNA, 499 bp, Homo sapiens
  misc_feature (1)...(499): n = A,T,C or G
gatgggagggnnnnnnnnaatcgtagacctcgatcacngtggnggaattccagccatatccagaaggaagaggagccgcgttccgtggctcacacctgtaaccccaccagtttgggaggccgaggcgggcggatcacctgaggctgaggccgggggtttgagaccagcctgaccaatatggagaaaccccgtctctactaaaaatacaaaattagccgggagtggtggcgcatgcctgtaattccagctactcgggaggctgaggcaggagagtcgcttgaacccgggaggcggaggttgcggtgagccgagatcgcgccattgcactctagcctgggcaacaagagggaaaactccgtctaaaaagaataagagggttacaagtagcctgaattttcctctcttcaaatagggacttctcaaagaaggtgaatctataatagtggtgtagattcagatataaggacacgtatttggcgtaaaggagaggcaaagttag

SEQ ID NO: 27891 - DNA, 439 bp, Homo sapiens
  misc_feature (1)...(439): n = A,T,C or G
nttgaagacccctattcgagtgcggtggaattccggcgctggactccgcagcctctctctggccgtcaacgccaacgtgggggacgccgcggttcaagagttggctcggaactgcccagaactccaccaccttgacctcaccggctgcctccgcgtcggaagcgacggtgtcaggacattggccgagtactgccccgtgctgcgttcgctgcgggtgcggcactgccaccatgtggcggagtccagcctgagccgcttgcggaagcgcggcgtggacatcgacgtggagccgccgctgcaccaggccctggtgctgctgcaggatatggcgggcttcgcaccttttgtcaacctgcaggtctgacccgcctgccaatcggagcacagctggaccgtgtggctggggcctgacactgagctgtagggaaactgaactgtg

SEQ ID NO: 27892 - DNA, 470 bp, Homo sapiens
  misc_feature (1)...(470): n = A,T,C or G
agaggnntnnnnnnnnngnnatcgagacccctnnnnannnattgtagatccctagnccagtgcggtggaattcccttccctgagtgcgggctgaggccagagtcaccttttctgtggctggctctaccttcctgtccctgaggttaaacggtgcccatcctgccatcctcaaacgacagaggagcttttctggaatttcaaaccattgctcttagtcccaagctaggcttaaacctggaatctacaagccaaaagtccctccctgcctgagggcagtaccctccattgggcacagtccagacccaagtcaaagatgccccattccttgcgcctcagccctcagttccttcatttccaccaggccgtgccttgtttgagtttttcctcccagtgagactgccccacggagacagaggaaagggctggctccccctccccaggctggagaccccccccaactccaggaaagn

SEQ ID NO: 27893 - DNA, 501 bp, Homo sapiens
  misc_feature (1)...(501): n = A,T,C or G
tgagttnaggggnnnnnnnaatcgtagactctgatnactgtggngaaggagcaggtggcggaggtgcgcgccaagctggaggagcaggcccagcagatacgcctgcaggccgaggccttccaggcccgcctcaagagctggttcgagcccctggtggaagacatgcagcgccagtgggccgggctggtggagaaggtgcaggctgccgtgggcaccagcgccgcccctgtgcccagcgacaatcactgaacgccgaagcctgcagccatgcgaccccacgccaccccgtgcctcctgcctccgcgcagcctgcagcgggagaccctgtccccgccccagccgtcctcctggggtggaccctagtttaataaagattcaccaagtttcacgccccnnanaaaaaaaaaaaaaaaaaaaaaaaaaaaaaaggggggggccctttaaattaaaggggccctttaaaacccggtgaaaacccctgggggggctttttattggcca

SEQ ID NO: 27894 - DNA, 446 bp, Homo sapiens
  misc_feature (1)...(446): n = A,T,C or G
gaaaataaattgtagacactgttgagggccgtggaataacactggaccccaaggacaacaggggcccattctggaacttcagcagctctgtagtaggctgggaggctgcaagagcgagtgcggagctgggtgacagcaacgccccccttcctccagcctggagccaacgtgcgctgccgtgagccccaccaaggcgagagagagcaggcgccagagtcagatcctcggccaggtttcaagggcttttcttgggtagaagaaagcgcctcattcttttccaggcatataaggacgaacccacgggaaaagctgcggttctccaggagtctggttgttcctcgcagccgggacggaatgctcaagtctgtcaccacacagctgtcagccaagggaggtgcanagctggaggtggaagggagtcgtcttcttagcttgacctttgaagg

SEQ ID NO: 27895 - DNA, 458 bp, Homo sapiens
  misc_feature (1)...(458): n = A,T,C or G
aagggnnnnnnnnnngnnatcgagaccatagacagngttgtagaactcttttttttaagggtaagttatttatttaagccatctcctgccacaagcaaagggatgggagaccagtataccattcatcatttgatacaagtaaagaaggtgagcttaaggtcccatatactttttctggtccatgtgcanagtaacggtccaaaccagtgctgtggtccctggtgcccgggtagtggtccagattctctttattcatcttcgtagccagttggaagtggattcacatgagggttatggaatagagtatggttaccatctccccagggaaacggcttggtcctgatgcggagatgggggtaggcgatgaactcgggtctctcgtgctctgcgcggcgcgaattcaggtacacattcagtatgctgactgccaccccggggagcgcgacgaagaaggtgag

SEQ ID NO: 27896 - DNA, 502 bp, Homo sapiens
  misc_feature (1)...(502): n = A,T,C or G
aggatgcnagggcngnnnnnactggagnactgagttcgtctcgaggagaccggaaagnttagagcaaattggttattattttaaaatcaataaaacttttaaaagtactaagacatcttctaagaggggagtggacagagggcctggtggcagctcacagtttcttttctgacctttggtctcacccaccaagtgtcccacctgagtgcccaccttgcccacctgaggtaatgccctggggctccaccagtccagatccacagggcgcagccatgtgggagtggcggctgattgttacccagtagtgttgatagcacattattcataacagccaaagagaggaagcaacccaaatgtccattagctgataaatggataaatgaaatatggtacgtccgaagaatggaatatcattcacccatgaaaaagaacgaagtccagcaccaaaacgtgctacaacatggatgaacttcgatgactttgtgccacatgaaagaagaag

SEQ ID NO: 27897 - DNA, 449 bp, Homo sapiens
  misc_feature (1)...(449): n = A,T,C or G
aggcgccgnnnnnnaaccgaagcttgangcacggacagncnggnggaattcnaaacgcttgagcccaggagttcaagaccagcctagagaacatatggagaccctgtcttcacaaaaaataaaaaagtcagccaagcgtggtggtgtgtgcctgtagttacttaggaggctgaggcaggacgatcgcttaagcccaggagtttgaggctgtggtgagctacaattgcgccactgcacgccagcctggctacagaacgagaccctgcctctctaaaaaaaaaaaaaaaaaatttttagacgtaagctttttatttacagaaatggagggattgaccttagtgtaaaaaaacgtggggctgacagtacccgcaaaaaccccccgaatgaagggaactggggatctgtttacctggcttgggagtgggttggggcctcattctccactgttt

SEQ ID NO: 27898 - DNA, 551 bp, Homo sapiens
  misc_feature (1)...(551): n = A,T,C or G
ggtttgccnnnagggacnnnnnggttgannncccctcgatccactatccgtgtggtggaattaaaggggcccagaggtcttcctggcttaaagggacacaatggattgcaaggtctgcctggtatcgctggtcaccatggtgatcaaggtgctcctggctccgtgggtcctgctggtcctaggggccctgctggtccttctggccctgctggaaaagatggtcgcactggacatcctggtacagttggacctgctggcattcgaggccctcagggtcaccaaggccctgctggcccccctggtccccctggccctcctggacctccaggtgtaagcggtggtggttatgactttggttacgatggagacttctacagggctgaccagcctcgctcagcaccttctctcagacccaaggactatgaagttgatgctactctgaagtctctcaacaaccagattgagacccttcttactcctgaaggctctagaaagaacccagctcgcacatgccgtgacttgagactcagccacccagagtggagcagtgn

SEQ ID NO: 27899 - DNA, 463 bp, Homo sapiens
  misc_feature (1)...(463): n = A,T,C or G
gaggnnnnnnnnnnnntttgagnccntnnnnnnnattgtagacactagnccagtgcggtggaattctgatgatggcgctgagcaagaccttcgggcagaagcctgtgaagttccagctggaggacgacggccagttctacatgatcggatccgaggtgggaaactacctccgtatgttccgaggttctgtggacaacagataccccttactttggaggcgactagccactgtggaagagaggaaaaaaatagttgcatcatcacatgggaaaaaaacaaaacctaacactaaggatcacggatacacgactctagccaccagtgtgaccctgttaaaagcctcggaagtggaagagattctggatggcaacgatgagaagtacaaggctgtgtccatcagcacagagccccccacctacctcagggaacagaaggccaagaggaacagccagtgggtacccan

SEQ ID NO: 27900 - DNA, 459 bp, Homo sapiens
  misc_feature (1)...(459): n = A,T,C or G
gagcgnnnnnnnnnnngnnatcgagatcactagtccangttgtagaactctagatgaggaccccggagaacctagagctaactaacccccaggagtttggcagcagttgggctgcagttgagtgcccagacaccctcgatcctcgggatatgtgtgtcctgaatcctctccgagaaccatttgccaagaaggagtgcagcatcctgctcagtgaggtgtttgagatctgccaccctgtggttgatgtcacttggttttactcaaactgcctgacagacacatgtggctgcagccagggtggtgactgtgagtgcttctgtgccagcgtctccgcttatgcccaccagtgttgccagcatggggtggctgttgactggcgaaccccccgcctctgccgtgagtgtcccagacaatcacctgaggggacagagtagagtgtcacctgtgggcatgccctat

SEQ ID NO: 27901 - DNA, 479 bp, Homo sapiens
  misc_feature (1)...(479): n = A,T,C or G
cccccccagccnnnccccnnttcgagatcgtatnccatgtggaggaattcgacatcctcatcccacctgaggggatcccaggctcggcccagcaggtgatccaggtggacagggacacaatcctagtcagctttgaacgctgtgtgaggattgtcaacatgcagggcgagcccacggccacactggcacctgagctgacctttgatttccccatcgagactgtggtgtgcctgcaggacagtgtgctggccttctggagccatgggatgcaaggccgaagcctggataccaatgaggtgacccaggagatcacagatgaaacaaggatcttccgagtgcttggggcccacagagacatcatcctggagagcattcccactgacaacccagaggcgcacagcaacctctacatcctcacgggccaccagagcacctactaagagcagcgggcctgtccaggggctccccgccccacccca

SEQ ID NO: 27902 - DNA, 475 bp, Homo sapiens
  misc_feature (1)...(475): n = A,T,C or G
cgccccccatagatnaccataggactgatggcggtagtacagcccagaagtctcagaggcacctcacgccagccatcgcggagagctcagagggccgtccccaccctgcctcctccctgctgctttgcattcacttccttggccagagtcaggggacagggagagagctccacactgtaaccactgggtctgggctccatcctgcgcccaaagacatccacccagacctcattatttcttgctctatcattctgtttcaataaagacatttggaataaacgagccnaaaaaaaaaaaaaaaaaaaaaaaaaaaaaaaaaaaaaaaaaaaaaaaaaaaaaaaaaaaaaaaaaaaannnnaaaaaaaaaaaaaaaaaaaaaaaaaaaaaaaaaaaaaaaaaaaaaaaaaaaaannnnnnnnnnnnnnnnnnnnnttttntttttnnnnnnnnnnnnccccaannnaaaataaatgtt

SEQ ID NO: 27903 - DNA, 490 bp, Homo sapiens
  misc_feature (1)...(490): n = A,T,C or G
aggagggcccnncnnagcccgccnactgatnaccntcggactgatgaccntaggacagngcggnggaattccctgaggtaaaggccgcgcttgggtgtccctgggtggtcgggttcccgagttgggatgggcggaaggctgaacctccagcttgagccggacaagccgattcccagcgttgagagggtagagatgaactgtgtgtgaggccaaactggatcggtcaacatggtcttccccctccccactccccaggagcccatcatggcgacgccccctaagcggcgggcggtggaggccacgggggagaaagtgctgcgctacgagaccttcatcagtgacgtgctgcagcgggacttgcgaaaggtgctggaccatcgagacaaggtatatgagcagctggccaaataccttcaactgagaaatgtcattgagcgactccaggaagctaagcactcggagttatatatgcaggtggatttgggctgtn

SEQ ID NO: 27904 - DNA, 473 bp, Homo sapiens
  misc_feature (1)...(473): n = A,T,C or G
tgggnaaccnnnccggatggccatccttagngcggnggaattcctgcagccagtctctctgcctcaataagccaaccatgtctttcaaggattacatccaagagaggagtgacccagtggagcaaggcaaaccagttatacctgcagctgtgctggccggcttcacaggaagtggacctattcagctgtggcagtttctcctggagctgctatcagacaaatcctgccagtcattcatcagctggactggagacggatgggagtttaagctcgccgaccccgatgaggtggcccgccggtggggaaagaggaaaaataagcccaagatgaactacgagaagctgagccggggcttacgctactattacgacaagaacatcatccacaagacgtcggggaagcgctacgtgtaccgcttcgtgtgcgacctccagaacttgctggggttcacgcccgaggaactgcacgccatc

SEQ ID NO: 27905 - DNA, 555 bp, Homo sapiens
  misc_feature (1)...(555): n = A,T,C or G
aggttcccnnnaggggnnnnnnnatcgaaacacatttcgaaccactatccatgtggtggaattccccggctcgagcggctagtctttaagatgcgcttctatcgtttgctgcaaatccgagcagaagccctcctggcggcaggcagccatgtgatcattctgggtgacctgaatacagcccaccgccccattgaccactgggatgcagtcaaccttggatgctttgaagaggacccagggcgcaagtggatggacagcttgctcaataactttgggggggccagcctgcctctcatgtagggcccttcatcgatagctaccgctgcttccaaccaaagcaggagggggccttcacctgctggtcagcagtcactggcgcccgccatctcaactatggctcccggcttgactatgtgctgggggacaggaccctggtcatagacacctttcaggcctctttcctgctgcctgaggtgatgggctctgaccactgccctgtgggtgcagtcttgagtgtgtcctctgtgcctgcaaaacagtgcccacctctgtgcc

SEQ ID NO: 27906 - DNA, 474 bp, Homo sapiens
  misc_feature (1)...(474): n = A,T,C or G
agcgcgcccnnnnttcgatcgacatcgttagtgcggnggaattcctgattctacattatggtgtgttgtacaattatttcattatatattacaaggtaataataatagaaataaaatccacagtaaatgcaatgtgcttgaatcatcctgaaaccacgtcccctccccagtggtccgtggaaaaattatcttccccaaaactggtccctggtgccaaaaaggttggggactgctgctctaggggttggggagggcagatggcttgggccatcaccaggcaggttttatagcagatggtgggggtgccctgcctatagctcctctaaataacgactctggtgcacactagccagctttgccagtggccgaccctctgtctttctgcctgaggactatagcttgtcactggtgcctcctttgccagcctctggcaggcctgaagggctggagaatgaacacatacttggagcaacn

SEQ ID NO: 27907 - DNA, 480 bp, Homo sapiens
  misc_feature (1)...(480): n = A,T,C or G
ctttgagtagcatancncgngncgnggaannccaggaggctgcaaaagtaagggccggaccgcaggctgtgctcgcttccggaagtgtgctttgcgacaacatgcttgcggacctcggcttaatcggaaccataggcgaggatgacgaggtgccggtggagcccgagtctgactccggggacgaggaagaggaggggcccattgtgctgggcagacgacaaaaagctttggggaagaaccgcagtgctgatttcaaccctgatttcgttttcactgagaaggaggggacgtacgatggcagctgggccctggctgatgtcatgagccaactcaagaagaagagggcagccactacattagatgagaagattgagaaagttcgaaagaaaaggaaaacagaggataaagaagccaagtctgggaagttggaaaaggagaaagaagcaaaggaaggctctgaaccaaaggagcaggaagacc

SEQ ID NO: 27908 - DNA, 475 bp, Homo sapiens
  misc_feature (1)...(475): n = A,T,C or G
agcgaaaaaannnntttggtcgacgtccctagtccgtgtggtggaattcagtgagcacgctcattttttttccattttagacaaataatgcatgataagtataaatgtgtcatgagcacactgttttctctgtagaaataacaaaggccctggatacagtagaatgtctggccttacttttctgtaaactgcggccactttgtcctttatctgagtggttaatttctatgaactgctggacagctgatttgaccgaggcttcttggctctgcaccgggtgataattctacctgggcagcaggccacgcgtgagagcagcttccccgaacctctctcatcccctcagtttgggcacagtccagcaggagaatatttaaaactgggtttggtttaaaatgcacataacagacagaaatgcagataagctttgccataagaaacgcacagatgacttcagataaaagtttcgccagaa

SEQ ID NO: 27909 - DNA, 473 bp, Homo sapiens
  misc_feature (1)...(473): n = A,T,C or G
cgggcaccnnnnnttcgatcgcactccttagtgcggnggaattccagattgtttgaagcaggggaagggaggtggagtgtatttccttgcccaggcctggcacaggcagccaggaggaccagcctcacttaaggataaagacctatgctgagaagagctcctgtgagtgacgctggcactggcttcccgcctcactctacttccccagaccaggtgttcggctgccagttggaatcactctgccagcgggaaggagacacggtgcccagctttttgcggctctgcattgctgctgtggataaaagaggtctagatgtggatggcatttatcgggtgagcgggaacttggcagtggtccagaagcttcgctttctggtggacagagagcgtgcggtcacctccgatgggaggtatgtgttcccagaacagccaggacaagaaggtcggttagatttggacagtactgagtggga

SEQ ID NO: 27910 - DNA, 470 bp, Homo sapiens
  misc_feature (1)...(470): n = A,T,C or G
tgggttntnnaaactaggacctacttagtgccgtggaattcgggtctgcagcggaggcctcagcaacctgctcttccgctgctcgctcccggaccacctgcccagcgttggcgaggagccccgggaggtgcttctgcggctgtacggagccatcttgcaggtgagggggttgtgagcgccgcancaccagtggctttagggcctgtcgcttacgcgatgcgggtagtattgttcccgttgcgcagttgaggacaccgaggttcacggtctgagtaacacctcattacaccgaagcctgggcctgtattcccagagctttgggaggctgaggcgagaggatcacttgagcacaggagttcgagaccagcctggacaacatagtgagacccccatctctaaataaaaatagaccaacgctaaagcctgtgctccagagcctccaggcaattggatcagaagtcgcagctctg

SEQ ID NO: 27911 - DNA, 479 bp, Homo sapiens
  misc_feature (1)...(479): n = A,T,C or G
agcgatgtacnnnnnaccgtaagacactacgtcagngacgngcaattccatttgcaatgtgaccatcagtgacctgtacgcagggatgctgcactccatgagccgtctgttgagcacaaagccatcaagcatcatctccaccaaaacgttcatcatgcaaaactggaactgcaggaggaggcacagatataagagcaggatgaacaaaacatattgcaaaggagccagacgttctcagaggagctccaaggagaacttcataccctgctctgagcctgtgaaagggacaggggcattaagagattgcaagaacgtattatatgtttcttgccgtaagacaggtttaaaattggaaaaagcttttcttgaagtcaacagaccccaaatccataagttagatccaagttggaaggagcgcaaagtgacaccctcgaagtattcttccttgatttacttcgactccagngcaacatataatc

SEQ ID NO: 27912 - DNA, 484 bp, Homo sapiens
  misc_feature (1)...(484): n = A,T,C or G
cttcgattgcgtancctaggccangccgnggaattctttggagtcccttggagtgccttgttgggtatatttctctgccattcaggaggcacgaatgtggaggacttctcgtgacctggtcgtgatgtggcactcagtgcatgtccacagctaatggaaaaacacgaggactcgggtaatggttcttcctctcagtctttctattcctaacttttcacacatccagatggttccacactagtgcaaatgcctcactctcctgagaaacccagaaagaagagtggctggctcacaaccatggggttagcccctgctgggctgggagtcggggtggcggccaagaggaaaggcacaaaggggtgagccgaggtgctgcctaactgattttctgctgtgcagagctaatgccgacatttcatgtcaacttccccggntctctggggtctcctctcctctgagcagccacatagaacattccccacat

SEQ ID NO: 27913 - DNA, 472 bp, Homo sapiens
  misc_feature (1)...(472): n = A,T,C or G
ntttgagacctgaggcccntcggnggaatccgccgctttttattttatttatttacccaaatttgaactagtctgttgggttgggggaaggaggtggctgctacccccaagccttcccagtgctgacaaccccgggggcaggcgagggcgcccagtccctcaccatcggctgcacatcgcgccctcgggccctgccatgtccctggtgctactgacctctcaaggcttcctccaatctggggtcgggggaccctgggaggtgctttacagaccgctaataaaagacgatctgcgtgaacgccaaaaaaaaaaaaaaaaaaaaaaaaaagaaaaaaaaaaaaaaaaaannaaaaaaaaaaannnaaaaaaaannnnnnttttnnaanaaaaaannnanggaggggggaaaanannnnnnnnaannnnntttttaaaggaaaggaggccaggcctatgtgcttaaaagacagaa

SEQ ID NO: 27914 - DNA, 467 bp, Homo sapiens
  misc_feature (1)...(467): n = A,T,C or G
agggagaaaannctcgagaccactagtctgtgcggcggaattccatgcgccacgcactgggtggtggaatcagtggctggagggacgacccttgctctccaggctgataaccttttccgttgttccgccgacacccaccttctgctccccaggccacccaacttgggcacctccctgggcccagaactgccttccattcaatggggaacccttctatccccaagaaccccttccctgcttgcaccctggagagaacagattgactcccatcaactcaacgctggcggaaagacagggaccgaaccctggcgtcaggcctggtcattgcctcctcagcactccctcctgggaggccttaactctagagggaggggtgggtggaacctgggggcaccttgttcaccctgtccccactccccacagatttaggaactaaatgattgcctctggaactattcttctagacn

SEQ ID NO: 27915 - DNA, 468 bp, Homo sapiens
  misc_feature (1)...(468): n = A,T,C or G
agggaaaaaaaattgaanccctnnnctcgcgatccctagtcagtgtggtggaattcgctgattcccatgttgaaccccgatggtgtggtccggggacactaccgcacagactcacgtggagtgaatctgaaccgtcagtacctgaagcctgatgccgtcctgcacccggccatctatggggccaaagctgtgcttctctaccaccatgtgcactctcgtctgaactcccagagttcctctgagcaccagcccagttcctgtctccctcctgatgctcctgtttctgacctggagaaagccaacaatctccaaaatgaagctcagtgtgggcactcagctgacaggcataacgctgaagcctggaaacaaacagagccagcagaacagaagctcaacagtgtgtggattatgccacaacagtctgcggggcttgaagagtcagcccctgataccatcccccccaaagag

SEQ ID NO: 27916 - DNA, 485 bp, Homo sapiens
  misc_feature (1)...(485): n = A,T,C or G
catcgaatcgcgtatcactaggccangncgnggaattctacctgttcactatttagctacacctagcagatgcccattatcaagataataattaccaacggtaaagttaaacatctgcttgttccagactcatctcctgcaagccatgtcccgggatagcagcagaggcttccccatctctccccccgtccacgttggccaagggcagggcaatgcccccctctacagggatcccaccagccagggagggagatgcagggctaacgcaaaagctgattgttcagagtaactagaagctgagccctactgacttcggacctttggggaaatccgtttttaaatcccgagcccactttcttctgtggtaagctaaggctgcggaacaggatggaacaggttggaaaggagcagaggctataagttgggtgtggggacgcagcactctggagcaggggcctggcaaacccaaggacaaatatcagctt

SEQ ID NO: 27917 - DNA, 479 bp, Homo sapiens
  misc_feature (1)...(479): n = A,T,C or G
catcgattacactacncaggcgggaattcagatggctagcccacagagtttggagtcctcagtgtgctgagcaaacgtggagacaccatttccctcctctagacctcatcttggagagagagatgttggatggggccatctattccagctttattcacacaaatcatgtctgttggcctggaaattggaaaaccagttaaaccaaaaacatgatattaagaaaacaggcaggctcaccatagtaaaaatgctgaaagccaaagacaaaattgggagaacaaaagaaaagcgtcttgtcacatacagaaggtccctgataaagttagtagctgccctcatcagaaaccaggcccaggcagtggggacacatccagagtgctgaaagaacctcccccaggtcatcctatccccaagagtgatgcccggcagcattcccagctcaaggctaatggttcacggaagccaggaatcaaactgcn

SEQ ID NO: 27918 - DNA, 474 bp, Homo sapiens
  misc_feature (1)...(474): n = A,T,C or G
gcgacannnnnnttttgtcgacctcactaggccangnggnggaattcacctggctcatcacacttgcaggcctgttccctaaggggccccagccaaggagctgagcgaggctgtctggcttgggggagatctgacagcccagacctttctacggctggcagcagagaaacaaagtctggacccactccatgctctgccctcagacctggccaggtgatgctctgggggcagcatctccccaccgagagaagcgggctcctaatgaggtgggaaagccacggcaggcagcgagcagcccaggccagctttctgcatggatggtcagtctcttgccctcaaacactacagcaaacaagctacccctgccagtcctagacaacttgggtacatctggggacctagcagttaggcttgactttgaggagaggctgtgatgtttatgatccctgaataaagctactccttggagaaaan

SEQ ID NO: 27919 - DNA, 471 bp, Homo sapiens
  misc_feature (1)...(471): n = A,T,C or G
ggggaganaaaaattgannccccttnntttgtagatcactagtccatgcggtggaattcgattgtttttaacctctgacattctgattcaggttattgcatttctctctccactgtctctgatcttcctggccaaatttctcaagaaggcagacacaagagacagcagacaagcctgcctgggtgagcgctagccctttcgggccggtttcttcgtgctgggaacctaggaggtcgttgtgggattcagccacggtgagcctgtgtggaggccactgagttctgcattcctaaaggaactctatccccgcgggagaggaaaatagcactgcagggacttggttacgcaggctacacggcaggcagccctgtgcctaaatgcactgggttatttgtacctcagaaatgtctttggcctagtacaaaagttctcggctacaaaagagtgatcactgaggaccctaattatttt

SEQ ID NO: 27920 - DNA, 485 bp, Homo sapiens
  misc_feature (1)...(485): n = A,T,C or G
ctttggcttgcgtccactaggccangnggnggaattccctgcttctgtgcacctgctgcaggctctttttatgaaggctttcatgaattttagtatgtaatacgcactgacgacacatgatgcttggatgacagatgagaggggatggctgagtcctgtggctggcccgtgatgccaggtggcccatgtgcccagggcgcctgcagggctgctacagggacctggtcaggaggtgcacatggtgccctgccctcacccaccctctgtgtttccccttctttgaaaaggtagaagagaaaggaatattttaaacctttttggcttaaacagaattttagcatcagaactagctttctgggattggaggcgaaccatcaaggtggtccctctccagtctggacacgatgccagcaaggatgacgtcctgccacctcctggagttaccctggcctcctagggtccctttttctgatgaagcttacttc

SEQ ID NO: 27921 - DNA, 464 bp, Homo sapiens
  misc_feature (1)...(464): n = A,T,C or G
agggagaaanntttgagacactagtctgtgcggcggaattcgagagaaagcaggtcactggtttgccaccaccacgcccatcattggcaaaggcatcatgtttgccatcaaagaagggcgggtgaccacgggcgtgtccagcatcgccagcgaagatagccgcaaggtggcatctgtgctgaacaacgcctactacctggacaagatgcactacagcatcgagggcaaggacacccactactttgtgaagattggctcagccgatggcgacctggtcacactaggcaccaccattggccgcaaggtgctagagagcggggtgaacgtgaccgtgtcccagcccacgctgctggtcaacggcaggactcgaaggttcacgaacattgagttccagtactccacgctgctgctcagcatccgctatggcctcacccccgacaccctggacgaagagaaggcccgcg

SEQ ID NO: 27922 - DNA, 476 bp, Homo sapiens
  misc_feature (1)...(476): n = A,T,C or G
aggcgatgaaaagnaattgatnccccctngnncncgatgcacactagtccgtgcggtggaattccaccatgggatgtactctgagcgcagaggagagagccgccctcgagcggagcaaggcgattgagaaaaacctcaaagaggatggcatcagcgccgccaaagacgtgaaattactcctgctcggggctggagaatcaggaaaaagcaccattgtgaagcagatgaagatcatccatgaagatggcttctccggagaagacgtgaaacagtacaagcctgttgtctacagcaacactatccagtccctggcagccatcgtccgggccatggacactttgggcatcgaatatggtgataaggagagaaaggctgacgccaagatggtgtgtgatgtggtgagtcggatggaagacaccgagcccttctctgcagagctgctttctgccatgatgcggctctggggcgactcanga

SEQ ID NO: 27923 - DNA, 465 bp, Homo sapiens
  misc_feature (1)...(465): n = A,T,C or G
ggcggtannnnaactgagaccntaggatgtgcggcggaanncgcatggaggacgacgcaccccacaagagaagtgagaccctgcagctgagggagcatcatggcaggccaaggatgcccattcggtcctgaaacgattccctcgtgccaatgagttcctggaggagctgcgccagggcaccatcgagcgagagtgcatggaggagatctgcagctacgaggaggtcaaggaagtgtttgagaacaaagagaaaacgatggagttctggaaagggtacccaaatgcagtctactctgtccgagacccctcgcagagctcagatgccatgtatgtggtggtaccccttctgggggtggcactgctgattgtcatcgccttgttcatcatctggaggtgccagctgcagaaagcgacccgtcaccacccctcctatgctcagaaccggtacctagccagtcgcgccgg

SEQ ID NO: 27924 - DNA, 478 bp, Homo sapiens
  misc_feature (1)...(478): n = A,T,C or G
agggtttccaggnnnnnnnaactgagaccnctcgcaggcgtggaancaacacacccctcctttatcagtctgaaagtactgtttgcctcactagaattctgtgtcataagaacccccagacttgcatggcctcactgtgacagctggatctcagctccctgtgacccctctgaggcagtcaaggcaggtgtccttatcccctttgtgtctgacgcccccaacaaccctcagggtcaatgattcactagaaggattcacagaacgttactgtttattatagcaaaaggacacagattaaaataagcaaaggaaaaaggtgcttgggacacagtccaggagaggccagctgtgagctgcccgccgtcctgacctgaaggagacaccagtgcacttaattctgtcggcaacaactgtgccagtgtgcacataacaccacctgccagggaagcccccgagccttaaggtccagggcttctcn

SEQ ID NO: 27925 - DNA, 468 bp, Homo sapiens
  misc_feature (1)...(468): n = A,T,C or G
gggagaaagaattgatcccctngntttgtagacatctgaccgngcggnggaattcggcagcttacaactgtgcgggagagggccagacagccatggtcaccttccgaactggacggcggcccaaacccgagatcatggccagcaaagagcagcagatccagagagacgaccctggagccagtccccagagcagcagccagccagaccacggccgcctctcccccccagaagctcccgacaggcccaccatctccacggcctccgagacctcagtgtacgtgacctggattccccgtgggaatggtgggttcccaatccagtccttccgtgtggagtacaagaagctaaagaaagtgggagactggattctggccaccagcgccatccccccatcgcggctgtccgtggagatcacgggcctagagaaaggcacctcctacaagtttcgagtccgggctctgaacatgg

SEQ ID NO: 27926 - DNA, 483 bp, Homo sapiens
  misc_feature (1)...(483): n = A,T,C or G
catcgatagcctgcatangcggggaccntcctggtcgtcagccccacgtcgccggcctggaggggcgaagaggacgagggggccaatgttttctccggggacattggctccctggattatcaagagtttgtagttgacattgaatccaggctgaggatggaaggtgtggaacttaaagaagaatggcaagatgaagattttccgatacctttaccagaagatgatagtattgaagcagatatactagctataactggaccagaggaccagcctggctcactagaagttaatggaaataaagtgagaaagaaactaatggctccagacattagcctgacactggatcctagtgatggctctgtattgtcagatgatttggatgaaagtggggagattgacttagatggcttagacacaccgtcagagaatagtaatgagtttgagtgggaggtaaatggttcactggttttaatctgatctttn

SEQ ID NO: 27927 - DNA, 464 bp, Homo sapiens
  misc_feature (1)...(464): n = A,T,C or G
aggggaaaannttttgagacactaggctgtgcggcgtaattccatttgaaagccttttctgttttgatttgttttttatcccatacccatagtgtcccaagaacagagtcatgtacaatctggtttcagcaaaggactaaagaaatttgcatacccacagttatacttcatgcaacttgcctcctactaaattaacttggtagcaatctaactagttatttattctgcactgtaagtactgataatgccactaacccttgcatttcacatttattacttcaaattcctataacaatctgataagattggtactactgtctgtcactttacattttaatagactaagtatcaaaatatttgtccaaggttgctaggctagttagagataaagcctgggaattggaaacatatacctgactcaaaagctctttgtccaggagtcctcaatggctagtcccagccct

SEQ ID NO: 27928 - DNA, 456 bp, Homo sapiens
  misc_feature (1)...(456): n = A,T,C or G
ggcagggnccngcctgatnncccctttgagctncgcaccgngcggnggaattncacaagggcattcaggagctctatggggcctctcctgacattgaccttggcaccggccccacccccacgctgggccctgtcactcgtgagatctgcaaacaggacattgtatttgatggcatcgctcagatccgtggtgagatcttcttcttcaaggaccggttcatttggcggactgtgacgccacgtgacaagcccatggggcccctgctggtggccacattctggcctgagctcccggaaaagattgatgcggtatacgaggccccacaggaggagaaggctgtgttctttgcagggaatgaatactggatctactcagccagcaccctggagcgagggtaccccaagccactgaccagcctgggactgccccctgatgtccagcgagtggatgccgcct

SEQ ID NO: 27929 - DNA, 468 bp, Homo sapiens
  misc_feature (1)...(468): n = A,T,C or G
aggaaaaatgntttgannccctnnncctgatgacattagtccatgcggtggaattcccagaatctgtctcaaattacactagtaagacaactagaatatgccaaaaataaataaacttaagcactaaattatctgagatcctactgtatacagataataacgatgactgcatatttttaaactgtgaacacattatcctattaatcctgctcaggtaacccacctttgtaatgtgaatattctttcccagtaatataaagaggtagacagtttcttaagctgttagaatgcagtgaatcctcccaggccctgaagtccagttgaatggaaatctgcctgggccagggcagccgccggccttccccctggttctcacagccaaggtcctcaggtggcaagttcagggaagcaggcagactgacccagagtggggcagacccgctccactgccaaccccaggtgctggtg

SEQ ID NO: 27930 - DNA, 494 bp, Homo sapiens
  misc_feature (1)...(494): n = A,T,C or G
ggagggggnnnnnnnnnattcgagaaactgagaactgtggnggaagtccacgggaagggaaggtggaagtactcgccggggccacctgcggctgcggggctgcctcgtgcggagggatctgggcgaaggcggcgcgtgattggccgctctgtgttcgtgacgctcatccgtgatgcttccgcgtgtcggaggaccaggtgccacctcaagagagaggccgtgggcggcgagccgcgggcgtttactcttagcagaagctcacctgtaagttttgagaacttagaaaccgatgccttccctctcatcagtcgtgaggcgcagtctcctggccgctgggttcgttcctccttgacatctctggagacgcatcgaggagctattgttctctggcgtcggaggttgcgctgtgtccgcggcgttgagggccccttgctaactggaacacggggaaggcggccctgtgaggtttagtgaactcaatcaaagaggtcctg

SEQ ID NO: 27931 - DNA, 544 bp, Homo sapiens
  misc_feature (1)...(544): n = A,T,C or G
agggttnncctgacactagtcaggtgcgcaattcaacagctttctataaggtggtctggccactgaagcgtgtcgggaatgtcggngggcccggngttacagctgcagcagaaatcctctcccacgcctcagctcttctctgttgcacagaatgttttctgcagcctttcagacctaaagttctagggttctggcacgtgtgttgggagggggtggggggttgctttgttttaacccctgcccttctcccacccctcagcaaaagacgatgccacattgtcaggaaaacgaatgcagtcactctccctgaataagtaactgcgacccgtgggaggagatgccggggacctgggccgcgctgcccaggacctctgctgtgtctcgcccaccctgtgccctggcgccgctgcaacagcccctcatggccaggagccccccatgggctggngcctcctcttcatcttgcacacaaatattgtttggggatggggggggactgggggaagggaacttctttcttgagaagaaagatcacgacagcatn

SEQ ID NO: 27932 - DNA, 466 bp, Homo sapiens
  misc_feature (1)...(466): n = A,T,C or G
agggataaaannttcgatgacactagncctgtgtggcgtaattcgctggggaagctgccgcccacgggctctgccccttccagctggagccgcccgtgcctccaggggccaagaggatgatgtcgtggcctccattctcgtttctatgcagccccatagtccaaggacacccagtccacatctaccatatagcaagtttagtaagggaaggcagcatacgtcccagggacagtgggtttggatctgtctagaacagcggtttgtggctgtggcccagctccgagagtgatatttgctctggtaggtgagggcctgagggtacatttctccacctgtgccccctcatgttcacagaggatttcagcagctgcaactgcgcacgccaggtggggaagggtgggggtgggcctggttgccccatgttaggaaatcactaccagtcaggtggggctggggctgggtggac

SEQ ID NO: 27933 - DNA, 472 bp, Homo sapiens
  misc_feature (1)...(472): n = A,T,C or G
aaggcgagaaaaannctcgtagacattngntttgtagacctctgtccangcggnggaattcgtgccagctaccgccatctacttcactgcctatgaccaactgaaggccttcctgtgtggtcgagccctgacctctgacctctacgcacccatggtggctggcgcgctggcccgcctgggcaccgtgactgtgatcagccccctggagcttatgcggacaaagctgcaggctcagcatgtgtcgtaccgggagctgggtgcctgtgttcgaactgcagtggctcagggtggctggcgctcactgtggctgggctggggccccactgcccttcgagatgtgcccttctcaggtggctgcagtgctgactctaccctttgacgtggtaaagacccaacgccaggtcgctctgggagcgatggaggctgtgagaggtgagggcccagattgccgtggcaggggacaggtggggtn

SEQ ID NO: 27934 - DNA, 466 bp, Homo sapiens
  misc_feature (1)...(466): n = A,T,C or G
aaggggaanannnttcgaagacactgtctgtgtggcggaattccacctctccacctgggaaacacatacacacacgtatgcatgtacccacatgcctgtggatgtgtacacgtgcacacacaaacacaccccggcctttccccgcctctcctcccaaactcctgatatctataatactatcagacaggttgtatgtcttctaaattattattactaaattccttgtaggagccttagcatttagaatggaatttagaggtctgtactttatctcccacctcaatctgagctcttccccaaggggagggactatgattccatctccctgtggatgtccaaataggatctagaggaagactgagctaaattatcagagattcaatgacttttgtgctcttccttcctcaaagtaatattggcaatttggaggtcttcagagaggagaaacattcttcaggtatcatct

SEQ ID NO: 27935 - DNA, 457 bp, Homo sapiens
  misc_feature (1)...(457): n = A,T,C or G
gggatannnnnaatgagaccatatccgngcgttggaattcgtctgtagtggatggatgggggatacccacctttctgaagcgtgccctttctcccatcttaaggggctctcctccctcaccctcctagagaaaaggtgcacttccttaactctttctactcggggccctaagtgacggtcctaagtgggatggctctccttctcccaagctgcagtactggggaagggctgcgcgcttttcctggaaagggaggccacagattctttgccatgggggctctcttgcccagaccccaaatccaaggtccctcaccctgcctgccccttcctcccagcttcctggcagcatcgtctggtcggtgaaagccatagcatggacaccccatggggagcttgtcttggggagggttctgggcggaagctggcacgcatacagcaccctctaccctccgcggag

SEQ ID NO: 27936 - DNA, 559 bp, Homo sapiens
  misc_feature (1)...(559): n = A,T,C or G
agtggttnnnaatcgaacactagttcagaggcgcaattaagtgcccctggtactcgccgcagtcaggaggccatgcttgctaccacccagtcctgcctcctgcgcagcggtttccactgaagtcaccccttttattagagacctctgaaaacgtatctcccgtgtctctgttccaaagcacgtctttgtctgcactcctggggtcccagagggactagtgacacagtctgagtgtgctgtccctgtcacagcagcaggggctcagcagagaggaccctcccctcctgaatctgcctcgatccggaaaaggctcgcctggctcctcccatcccagctcccagccctcctcacaccagcagccccagaccttctgggcagcaagccagagacacattctcaggtgtcctgggattcagactcaacccggagggtcacggagtgggggcttccgtacagcagcctcaggcggcactcccagccatgactcctgggaacaagcctggnggtagggacccccgggcacctttttctggcctgaccagtttttngtcatgctgan

SEQ ID NO: 27937 - DNA, 477 bp, Homo sapiens
  misc_feature (1)...(477): n = A,T,C or G
cccccccgcccngnnnnnnttagagatccgtgtgcagtgtggaggaattcctgtaacaaagacccatgtgatgctgggggcagagacagaggagaagctgtttgatgcccccttgtccatcagcaagagagagcagctggaacagcaggtcccagagaactacttctatgtgccagacctgggccaggtgcctgagattgatgttccgtcctacctgcctgacctgcccggcattgccaacgacctcatgtacagtgccgacctgggccccggcattgccccctctgcccctggcaccattccggaactgcccaccttccacactgaggtagccgagcctctcaaggcagacctacaagatggggtactaacagcaccaccaccacccccaccgcccccaccacctcccccagctcctgaggtgctggccagtgcatccccactcccaccctcaaccgcggcccctgtaggccaagg

SEQ ID NO: 27938 - DNA, 555 bp, Homo sapiens
  misc_feature (1)...(555): n = A,T,C or G
agcggtgcnnnaattgaaacccccctcgaacacctatccgtgtggngcaattcgtggacaggcaagcggcagggctggtgctgagtcactccacagtgtcgaatctactatctgcaggatgccagggacaccagataaagatgtggtccaggccgggcatggtggctcacacctgtaatcccagcactttgggaggttgaggcaggaggatcactcgaggccaggagttcaagaccagcctgggcaatatagcaagccccatctctaattaaaaaaaaaaaaagacatggcccttatctagaggagaaacagagagcaagggtagagaagccctcaaagaaactgggtctccaaaaaacacagtcctgcccccgcccaagcacccccacaatagctttttattccctggggacctcccagctgtgatggccgccagcctctgcactcttcctgctaatggccttggcccctttttctgggggcaacggcttcctggcacgactctccactggaagttttggtgtgggtcacgagacggacctggagcctgttttt

SEQ ID NO: 27939 - DNA, 565 bp, Homo sapiens
  misc_feature (1)...(565): n = A,T,C or G
cggagatacnnaaggggaaccnaaggggcnnnnaattgaaaccccctcgatccactatccagtgtggtgcaattcctcaagtatactgtatattctttgcttttagttaaaaaagtaaaacattttagctaaattaaaaagcactcaggtgataattatgtaggaaaaacaatcttgccaaataatgaattcatcctaggatgtgtagacaataatctgcttgaatatttttatatttcacctcctccccacctttccctaagcaaagtttaaacgcagatagagagttcagagttgatgctggatgttcagattcctaagtggggagagagtttggacatctcactcaaaagtacatcagaaaaacaggaaatccgtgattttataccagaactcagcaggcattggctcctagaaatcaagttagaaagttttcacccagggagtaagtcccattcatttcaacacgtcctgaggcctctggttggtcttggaaagtgttgtgcagtangacctgctcccctgaaggacggngccaaccagccactggctttcctgcccaggc

SEQ ID NO: 27940 - DNA, 556 bp, Homo sapiens
  misc_feature (1)...(556): n = A,T,C or G
agcggttnnnaatcgatcactctccagagggcgcaantccacccatctcggcctcccagagtgctgggattacaggcgtgagccactgcccccggcctctccttgatgttttaggtgggaatgttttggctggttgggatgggctagttctgctaaggtgcttcagtcccttttctggccatttgttttgggaattcactgggtgacacaggaaagaaagccaccttggactccagggtgactccagggccagagcggtgccatgtttagtaggtcagtgccacaggtaggggacaggcggctgaagtcttgcatacagtttgtgaccaggcaaaggattacagcctcactccttaatgtatatgtttttcacgtttactcacagtgagaataccttgtacatttggctttgtacttttactctttgtgatataaatttttcatctggtattctttaactgccaagttttgagttaaacctactgggaatatttggcagcagaacacattaaattcttgtattcctcagtgaaaataaaaagaagcactatcgggg

SEQ ID NO: 27941 - DNA, 560 bp, Homo sapiens
  misc_feature (1)...(560): n = A,T,C or G
gacgagcnnaattgaaaccccctctgatcactactccgagnggngcaantcgaggcctgctctgttcaccttgtgtgctgggaatgagctcttctactgcctcctctacctgttccatttctctgagggacctttagttggctctgtgggactgttccggatgggcctctgggtcactgcccccatcgccttgctgaagtcgctcatcagcgtcatccacctgatcacggccgcccgcaacatggctgccctggacgcagcagaccgcgccaagaagaagtgacgctggagccccgggtcctggctgcccacctgccctgggagtcttgctgtgccacacagctccccaccccctgctaggaggtcccagtctcacgccttcctcatgtgttggtctacctgctgggatgggggtcagcctctctttggtgacgtcacgtttctctgggatcctgaggacccgngcctcanatcagggaggatacgcgggaggccccctccatccangcnngtgctctggnngtgccgggaccggcagtgtcacaccctgcctgctcagt

SEQ ID NO: 27942 - DNA, 554 bp, Homo sapiens
  misc_feature (1)...(554): n = A,T,C or G
agcgtgtnnnttcgatcactgtccgagnggcgcaanncatgagacgntggtaaaatcccagtttgttgcttgtatggctacttgtcattcacttacaaaaattgaaggagtgctctctggtgatccacttgatctgaaaatgtttgaggctattggatggattctggaagaagcaactgaagaagaaacagcacttcataatcgaattatgcccacagtggttcgtcctcccaaacaactgcttcctgaatctacccctgcaggaaaccaagaaatggagctgtttgaacttccagctacttatgagataggaattgttcgccagttcccattttcttctgctttgcaacgtatgagtgtggttgccagggtgctgggggataggaaaatggacgcctacatgaaaggagcgcccgaggccattgccggtctctgtaaacctgaaacagttcctgtcgatnttcaaaacgttttggaagacttcactaaacagggcttccgtgtgattgctcttgacacagaaaattggggcaaaactgacatggctataaacn

SEQ ID NO: 27943 - DNA, 473 bp, Homo sapiens
  misc_feature (1)...(473): n = A,T,C or G
agaaggtcccnnnnnnattgannccctgatgnactactagacagngcggtggaattcccaaaatcaggggatcgcagcggctacagcagccccggctccccaggcactcccggttgccgctcccgcaccccgtcccttccaaccccacccacccgggagcccaagaaggtggcagtggtccgtactccacccaagtcgccgtcttccgccaagagccgcctgcagacagcccccgtgcccatgccagacctgaagaatgtcaagtccaagatcggctccactgagaacctgaagcaccagccgggaggcgggaaggtgcaaatagtctacaaaccagttgacctgagcaaggtgacctccaagtgtggctcattaggcaacatccatcataaaccaggaggtggccaggtggaagtaaaatctgagaagcttgacttcaaggacagagtccagtcgaagattgggtccctgga

SEQ ID NO: 27944 - DNA, 558 bp, Homo sapiens
  misc_feature (1)...(558): n = A,T,C or G
agcggttnnncctcgancacagttcgagtggcgcaattcgtcagtgtttgaccagaaaagcttgggaaggaagcgctgtctgtgctcacggacagaggcggccggcgccggaggcattccatcctttctgtagggaaaggagcctttatttactattttgtatttatatttgatgaataagtatataaacagagacgtgtacacagatgccaatcacctaccaaaccaaacacgaggaccgccctccctggttctgggggcccctcaaggccaagctcacccctcaagtgctctcacactcgggacctaattcaagtaaaaaccctttctccttcctggggcctcggctcctggagggctggagggtctcgtctgaggacgggaggaggctctcgctggacgtctggcctgtgcgctggtggacggatgcctacgtggttntggaggacccgatgaccaggcgtcctgcgagtccgcccgctggcctgcagcacccaccttcgacttggctgtggacggnttgtgcaagtgcatnctgcanggctggctgtgcgcacn

SEQ ID NO: 27945 - DNA, 486 bp, Homo sapiens
  misc_feature (1)...(486): n = A,T,C or G
ggcgggtaaanagantttgatagcactagtccangtttgtagacattagtccatgcggtggaattccacatacaaaatggaaagaaactataaatgtactagaaaaaaattggagaatttttaaaattatcatgtaatagggaaggtctatctcaggggaagaaagaaaaaaagaaatccagaggctatgaagataaaactttatacatttaactaagttaaaatttacattttcttcaaggcaaaaaccatacaagtagataaatgagcaaatgacacaaaagaattcacagaagaagacatgtaaaagacttttgagcatgaagagatgcttagtcaaggaaagcaaattcaaacagcaatgtaacctccttattaccttattaacctgcttattacagagagcgagactgtgataacagactgtaggtctgtgctgcctgctgcagtgcatctccccatgctcttggtgctcccatacacgcn

SEQ ID NO: 27946 - DNA, 560 bp, Homo sapiens
  misc_feature (1)...(560): n = A,T,C or G
agacgtgcnnnaattgaaaccccttcgaacacctatccgagnggngcgaattcaaatgacacattatcttcagtgtataaaatattcatttatgtgaagtttcttggaaaggctacactactattactggtttccgtctgatgtttgagatctgttgattttatgcttttcttacaggcctttcattatgatctttgggaaggaatcaataaaatgatagggcctacttcattaggtgtggttcattcctattcatgctccctggaagaacaagaatgctgaattttgaaatttaatattgtatgaattagcatcagggagaggtggagaaaaatacaaaactaaaagtcatgcttattgtgttcagtgtgcccttctccagagggccactggcttataggaaaggattgctgctctaccagttgaccaggagatggcacgccaggacattaagacactggagttttgtttcgtttttttttttttttgaaagggagtctccttctcttgacaggaagaaaaccggggnngaannnnnntaattcaaaccctttttcccg

SEQ ID NO: 27947 - DNA, 558 bp, Homo sapiens
  misc_feature (1)...(558): n = A,T,C or G
agcgtgtnncatcgatcactctccgagnggcgcaantcgctgacacagatggtgtccaagggcttcctaggtcgtaaatctgggaagggcttttacatctatcaggagggtgtgaagaggaaggatttgaattctgacatggatagtattttagcgagtctgaagctgcctcctaagtctgaagtctcatcagacgaagacatccagttccgcctggtgacaagatttgtgaatgaggcagtcatgtgcctgcaagaggggatcttggccacacctgcagagggagacatcggagccgtctttgggcttggcttcccgccttgtctgggagggcctttccgctttgtggatctgtatggcgcccagaagatagtggaccggctcaagaaatatgaagctgcctatggaaaacagttcaccccatgccagctgctagctgaccatgctaacagccctaacaagaagttctaccagtgagcaggcctcatgcctcgctcagtcagtgcactaaccccagctgccggcagtgctggttctccaacagagtggtgtctnaan

SEQ ID NO: 27948 - DNA, 564 bp, Homo sapiens
  misc_feature (1)...(564): n = A,T,C or G
agacggcnnaattgaaacccattcgaacnactactccgagnggngcaattcctttggaagacgcacgggtggagtttgccagaagaaaggctgtgccagggccgtgtttggctacaggggctgccggggctcttggctctgcagcgagaaagacacagcccagcagggctggagacgcccatgtccagcaggcgcaggcctggcaacacggtccccagagtcctgagcagcagttaggtgcatggagagggtatcacctggtggccacagtcccccttctcacctcagcaatgatccccaaagtgagaggtggctcccccggcccccaccaccctcagcagccccaccccactcaaccctgagggtccccagggtcctgatgaagacctccgaccccagcgccaggctcctcggagcccaacagtcccaagggggcagtgctgaggggtacagccctgtgccctgaccagccccggcacctgccatgctggttcccggaatgaatcagctgctgactgtctccagaaaggctggaaaggatgcttgcaggtgacccgaggtgca

SEQ ID NO: 27949 - DNA, 447 bp, Homo sapiens
  misc_feature (1)...(447): n = A,T,C or G
ggagtcantttgaagacatagttgaggacgcttagaccangnggtggaattccttattatgtggtgggatgagtcccttcactcttcttttacaaaatttcctagttattctctcacatctattcttccacataaactttaaattgtgcccagtcctccaccccctgtcccattcccacccccaaattctgggctctgtcattccctgtgccatcatcttccccccattgtaattactgtccactcagggctgtgaaatagactatgttctataaagagggacaaaaagggcatcctgatcttgagagaagcctgctgttcctcccatcatttcacctgccccctaagcccaggagttgtcatgagaggtcaccaggcccccactcaatctcagcttgggaaccaaagtcacccaccttggttgtgttggggtggacccgccatctg

SEQ ID NO: 27950 - DNA, 471 bp, Homo sapiens
  misc_feature (1)...(471): n = A,T,C or G
agagcgtgtccnnncccttgagnaccattgataaccgtggnggaangncggcgacaaagagaagcaaggccagtaccaccgggacgagggctggaagtggggtggctgctccgccgacatccgctacggcatcggcttcgccaaggtctttgtggatgcccgggagatcaagcagaatgcccggactctcatgaacttgcacaacaacgaggcaggccgaaagatcctggaggagaacatgaagctggaatgtaagtgccacggcgtgtcaggctcgtgcaccaccaagacgtgctggaccacactgccacagtttcgggagctgggctacgtgctcaaggacaagtacaacgaggccgttcacgtggagcctgtgcgtgccagccgcaacaagcggcccaccttcctgaagatcaagaagccactgtcgtaccgcaagcccatggacacggacctggtgtacatcgagan

SEQ ID NO: 27951 - DNA, 453 bp, Homo sapiens
  misc_feature (1)...(453): n = A,T,C or G
cttcgcccccctnnnnnattgatgtcccttagtccagcgtggtggaattccatccagggttccatgaaagttacccagggtcctcatgtccttccttagagcctgagtggtgtgaggtgacaggtctctctctccactgcccctttctggtttaaaaaaatggtgcttgatgagggaaggtagactcttccctaggactgacgagttacggctgccagatgcctgcatgggaagaggtggacatctgcatcttccattggtggtcaaggatgggtgtgggagaaccacacctagtgcaagcctggtactcagtaaatatttgttgaaatgaatgataagagcattggtccccaagccagagagccagaagccatcacctaatgaccgccccttccttccggtctacaagagctctcaaggctgggtctgccaccactctgctttgcccaagtg

SEQ ID NO: 27952 - DNA, 549 bp, Homo sapiens
  misc_feature (1)...(549): n = A,T,C or G
gcgatgcgactgatactatcagagnggnctaattcagtaaacacatcccagcagggacacaaacacatacacacgcagacacacacacagacacacacacagtatatacatcccgacagggacagacacacacacacatgcaccgtggacacatcccattggggacacacacacacacacacacacacacacacacacagggtgaacacatcccagcaggggtgagatgcatctgagtcaggcaagaaagctgacccccacctgggcaggtgacccagggcagccgacccccacctgggcaagagagtagcgtcttcccaactctactggaagcgggatggtcagaaacctgaaaagcgcaaggatcccatgctggaccccaccctaagagactgctggtggggtgggggtcacccaagaagaagatttgtctggcgcctgcatgggcaagtggtgttacagccgcgccaccagctactctgtgtgttagactctatanactgccccgacctaatctttaccagtataagtctcttccaggcccggggn

SEQ ID NO: 27953 - DNA, 545 bp, Homo sapiens
  misc_feature (1)...(545): n = A,T,C or G
ncggagcataggtcaggcgtgcaattcgcctactctagtgcagacactgggaatgcaaaactaaataagattactacacataggaaattagttttaaaatatatgaacctatatgttaccccaagccatttctgctgtctagggtcatattaaataaacctaaaccctaatccatatgttggcccttcacatattgaaaatagcttatagtggagaatcatataaaagaattgaatggagcagccatccaagtataatgaagattcatctggagggcagacttcaattaaacccccacaacggatactcagccaaggaaatggagaaaatatatagatattttgtatccagatttaaattatatctgctaatcacaaggtagtggcacaaagatcagggccaaaagtgttttgctcaggtagctaggacatatagaacagcctgagaagatggataacttctcagacttcatgagttaactgtgcaagctggtaacgtatctgtccgccagtgatacccattggactgagggagtacattagctg

SEQ ID NO: 27954 - DNA, 469 bp, Homo sapiens
  misc_feature (1)...(469): n = A,T,C or G
ntttgagacattatanagngcctgatgaccactataccgtgcggnggaattcggctgatggcggttctttcctatctcattacccgctatgggcctgggagccctgtgtctggatctgagtgctcctgagctggcttcagctgcagaactctcagtccctcatcagatcgagactctatttcccccgtcagtctgggggcttcacaagggcaggagagccctccatcactgacttccagatcagggaccctgccaagtagggactgtcttctcagccagccatttattagtctaatattccttcactaaattccaactctatgtctggacctgtgttaggcacttcagataccacacgagtaagacaagggccctgcaggggtggtcctttggtggaaagctggtcttaagggttgggcttgtgaataggcagggtcagattccagggcatggctctggactcagctgn

SEQ ID NO: 27955 - DNA, 574 bp, Homo sapiens
  misc_feature (1)...(574): n = A,T,C or G
cgccccagcccccccccccttcgaccccctnccnnnnnattgatanccntctcagagnggcggaattcccaatctcatggtcttcttgagcttggccgccctccacgccccatgctgggcttggtcggttctggggtctacctctctggcttcatccctcccacagtttcgagggtttccctgtgctcaggcccctggcagccgccccctgtgcagaccactgggcagatccagctgacctccaggggcacttcctcggctcatcactgggccggtgctctgcagaatgagctgtgagagccactgtggctggccagagggtgccactcacagtcacttcagactcacaggagccttcgtcccgacccctgcattcatctgtgttctgttttatgttttttcccagtcacctgagctgcaggccttgggcaccccagactcctccctcctgtcacccttatcctcaccccagcacctttacgtctgccccaggctccatttccccctcttctgcctggatcanaccacccttgacttttcctgggtctntcgtgcaacagcctagctccggccg

SEQ ID NO: 27956 - DNA, 557 bp, Homo sapiens
  misc_feature (1)...(557): n = A,T,C or G
cagccccccccaattgttccctttgcannggatgatttccgtgaaccagagcgagggaatgttgggctggagttgcccacagcaactgtgaggggttcgaccttaacggagggcgacagcgggctctcgagagggtgtatccccacgcttcgggacgaggtcgcgcaccgcgcagaaaccggaaggctcctggcggtggactgcgccctcacagccctacgctgagagagaatcggcgtgagtctccgccctcagagcctacgacaactctccagactccgccggagcaggcgcagggggcgtggccttggtggcaccacccccaacagagcctggtcagtgctgaagactgcgtcagtctggctctgccgccccgcccactgaagccgatagctggagcaaagctcggtcgggcgtcttccggggtcgtcacgtccggttgccaaggtgactggctcgctaaagcccaacccttatgatgcaatccaatggcaagtgatatttgctatcttttctttcgggatcaggaacanatcgcanaagaaagctctcccgac

SEQ ID NO: 27957 - DNA, 542 bp, Homo sapiens
  misc_feature (1)...(542): n = A,T,C or G
gggatgccctgtaggcgtgcaattccttccgccttaagaaggtggcggccagggatgaggaggcccctaagcaagtgcggaatggagccggggggcggagatgccagcctcactttgcatggtctccagaaccgctcccacggcaagataaagctgcgaaagagaaagtctaccttgtacttcaacacccaggagaagagcgccaggcgccgcggggatcttcttggagaaaatatttatctgctcttgtttaccatagctttacgaatattaaactgctttttagtgcagacaagttttgttccagatgaatactggcagtctcttgaagtttcacatcacatggttttcaattatggttatttgacttgggaatggacagagagactgaggagttacacttatcccttaatctttgcaagcatttacaagattcttcatcttttaaggaaagatagagtcagttgctgatttggattcctagacttgcccaagcacttctgtctgctgtagcagatgtgagactttactcattantgaag

SEQ ID NO: 27958 - DNA, 545 bp, Homo sapiens
  misc_feature (1)...(545): n = A,T,C or G
gcgatcactgatgacactccagagtggtgcaattcatgtgaatganatggacactttcagggaaatacgaatgaataatattgaccaaaacaaacttacaagtggtcaatgttgtatccttttacatccaaaaggtgctagaaccagcaagattttatgtacaatcctgaaggaatagataattcctatttctttttttgtttttttgagacggagtcttgctctgtcacccaggctatagtgcagtggcgcgatctcgactcactgcgggctccacctcccgggttcacgccattctcctgcctcaacctcccaagtagctgggattacaggcgcccgccaccacgcccagctatttttttttggtattttttagtagagatggggtttcctcctgttggccaggatggtctcgatctcctgatcttgagatccgcccgcctcggcctcccaaagagtgataattcctatttcttaagaataaatgagattacagattgagctaggtgattactcaacacattttatgaaagagaataagcacn

SEQ ID NO: 27959 - DNA, 592 bp, Homo sapiens
  misc_feature (1)...(592): n = A,T,C or G
ctccgttctcaaccttctcatacatctactcttgcgcatcagtactatataagtaataatactccactatctctatcctctcaccctanacacaggcggcacncaancccccanaatcgagnacctctttgtaagagctctggaacangcggnggaaaaccagccggcgccgagggggaccagataaacgccagcacgaacgaggattacgcgggataaatgttcgatggtggcctgagctgggatactacctaaaaagatgtaaaggactattatactaaaattggagaggacgctgactgtacaataaaaatggaacccaacactggacgggcaagagggtttgggtttatcctgttcaaagatgcagccagtgtggagaaggtcctagaccagaaggagcacaggctggatggccgtgtcattgaccctaaaaaggccatggctatgaagaaggacccggtgaagaaaatcttcgttgggggtctgaatcctgaagccactgaggaaaagatcagggagtactttggcgaagttggggagattgaggccattgaattgccaatggatccaaagttgaacaaaagacgag

SEQ ID NO: 27960 - DNA, 534 bp, Homo sapiens
  misc_feature (1)...(534): n = A,T,C or G
ggagcacttaggcggcaatccggtcgagcggcgctttttttttacacagttgcgcaaggtaagtttattatccccattttagagatgaagactctaaagggaggctcagggaggtgagtgacttgcccaaggtcacactaccagtaagtggcagagctgagtctacactgcaggcttctctgggggcaaagctcctctctgcctgctagctaacttctcttgtaacccaggagaagaactgtagagccttcttccttcactttcctccagtgaggacattccctgtctttcgggtcttggtacatttttccttcttccagctaaatcagccacattcttgctcccccagatgcattataggatggggccagctttctccctcccttcttcacttcctccctccctccattttctccggagagaccaagcagcaaagggctgcctcagtcccctgggaaaaccccaagccctggtcctcggctcatgggctccatggcctgctcagcttgcagtcttagcttgtgggagagaaan

SEQ ID NO: 27961 - DNA, 457 bp, Homo sapiens
  misc_feature (1)...(457): n = A,T,C or G
attgtagaccctagttagagcgccgtaattcgngtacccgaggggtaatgattaaatgataaagataagaaaagcgcccatgtaacactaactgccattctacaggtatttcccttactacctaaggaattgtaaccattgctcagacattgtaggatttaactatgttgaaaactacaggagaggccgggcgcagtggctcacgcctgtaatcccagcactttgggaggccaaggcgggcagatcacgaggtcaggagattgagaccatcctggctaacgtggtgaaaccccgcctctactaaaaatacaaaaaattagccaagcgtggtgctgggcgcctgtagtcccagtaactcangaggctgaggcaggagaatggcgtgaacccgggaggcggaggttgcagtgagccgagattgtgccactgcactccagcctgggtgacagagcaagan

SEQ ID NO: 27962 - DNA, 457 bp, Homo sapiens
atagatgtcatctgttcgagcgccgtaattcacagacatttgggggaccacaccagtacattgtaaaagcaggaaacaattgagaattacctgagttttatgttggtaggagaaatgcctatggaatatggcaaatcgtttctctgagacttcctccctagtaattacatatttgttctcaaaaacaaatgccagaaggaagaagcagatttaatagtgcattttacaaggcaccattaatctctaagaagaacaattaaaatgtctcagcaatcatggttcactgtatatcttttctatcttcttagaagtaatatatggctggaaatgggcataccaaaatatgtcaaggaagtggaattgcgttcattagatttcaccagtaattattttagttagcttcacagatctctcttccttgcttgttcttgagagcgaagctttttaataagaagaa

SEQ ID NO: 27963 - DNA, 538 bp, Homo sapiens
  misc_feature (1)...(538): n = A,T,C or G
ngggaggcctgaagacggtcaattcaccgcgcgctgaaaccagagccgcgctctacagggtccagagtgaggcccacagagtggatggaacccctgagccacacagctggtcagagaatggcacagacacaacccaggcctccatctactcgacagacctcaccacgagcctactatgtgctgggtgtggtccccaccctctgggatctcctgcgaccacgctgagtgccgaggacaggagccctgtctacacctgtgtgtccccttctcccctccaggaccagcccagcagaggctcaggagcccagaggacaacagtccctgcagtgcgccttccatccactgggaggcacaagaccagtctgaacagcaaagggagcaggaggatggggctacagggaaagggtcctggctggaggcctgtgggcaggcagggctgttctgagccctctggagaggagctagttgacagcttggtctatggttgcaggagggcacagtcccctgaatgccacgggtctacaccccagacctgatt

SEQ ID NO: 27964 - DNA, 489 bp, Homo sapiens
  misc_feature (1)...(489): n = A,T,C or G
tggggnnnnnaagggagggccnnnnccttgatnnncactgatgatcattagtccagngcggnggaattcagtgcctgcaccacagtgctggtggctgtgcacctgtttgcgctcatgatcagcacctgcatcctgcccaacatcgaggcggtgagcaacgtgcacaatctcaactcggtcaaggagtccccccatgagcgcatgcaccgccacatcgagctggcctgggccttctccaccgtcatcggcacgctgctcttcctagctgaggtggtgctgctctgctgggtcaagttcttgcccctcaagaagcagccaggccagccaagacccaccagcaagccccccgccagtggcgcagcagccaacgtcagcaccagcggcatcaccccgggccaggcagctgccatcgcctcgaccaccatcatggtgcccttcggcctgatctttatcgtcttcgccgtccacttctaccgctcactaggtagn

SEQ ID NO: 27965 - DNA, 559 bp, Homo sapiens
  misc_feature (1)...(559): n = A,T,C or G
tggagagtnnngnnnncatgaaacctatccagnnggatgattaccactcagacggccagaggccaggcccccggcttcgcgctgcccgagctggagcacaacctgcagctgctcatcgacctcacggagcaggagatcatccagaatgaccggcaggggcagtatgagcgggacatggtggtcaacctcttccatgagctggagaagatgaccgaggtcctggaccacgaggagcgggtcatctcgaacctcagcaaggtcctggagatggtggaggagtgcgagcggcggatgcagcccgactgcagcaaccccctcaccctggacgagtgtgcccgcatcttcgaaaccctgcaggacaagtactatgaggagtacaggatgtccgaccgtgtggaccttgctgtggccatcgtctatccactcatgaaggagtacttcaaggagtgggatcctctcaaagactgcacttatggcaccgagatcatctctaagtggaacagcctcctagagaatgaccagctcttgttccatggcggacaggacctcttagcagatg

SEQ ID NO: 27966 - DNA, 543 bp, Homo sapiens
  misc_feature (1)...(543): n = A,T,C or G
caactgaaantcctcggagggtcancgcctctgaccatntccgacctctcatcttatctacgcagccatcgccttctccatcacctcctgcatctttacctatatccatttacagcttgcctgagtggccagcgcgggacggggtgggcgcaagaccgagcggggagggaaagggaaaacggggctcggcattttgtgttttagaacagcgctgcacccccttcatgtagctttcgatgcttgtttctttccgtctttgttgtcactatctttgtctatcagtacgaaagtacaaagtagctgccggcaatgaaataggggtgctgtttgcacctgcaggttaggggtggaggcgtttagaattttggggtgtgattgagccccgtttataattagaatgcccctggacccctaccactctgtgacgtgggggcacgcgcagggatcccatcattttgtgtttggggagctcagagtgcgcccaatcttggaatctttaagggatgagccagacccagacccgcgggcttctaggagagggtc

SEQ ID NO: 27967 - DNA, 559 bp, Homo sapiens
  misc_feature (1)...(559): n = A,T,C or G
caatagaacacccctcgaannnnccnnnnnttcgaaccactatccaagtggtgcaattccccttaagcctanagcctgtgcctgagccttccctggtgaacaccagtcccctgtgttatcattatgctggtgtccataaatcgaacctggccctttttcctcttcatctctctggatcctcccaaccaccctctgaagcaggtggtcttgtttccacttcacagggaagaaactgagctcagagagggaaagagacctgcccagggtcagccagctagggaaatggcagagctgagatttaaagccatgaccactgctggcagagctggtatcagatcatcttagggttgtttaaagccttccacaggcggagcgcggtggctcacgcctggaatcccagcactctgggaggctgaggtgggtggaccacctgagatcaggagtttgagaccagcctggccaacgtggtgaaaccccatctctacaaaaatacagaaattagctgngtgcctgtaatcccagctactcgggaggctgaggcaggagaatggcttgagcc

SEQ ID NO: 27968 - DNA, 452 bp, Homo sapiens
  misc_feature (1)...(452): n = A,T,C or G
nattgagccatgacgacatcgacagtgcggggaattaaataacccaaatgcccattaataaagaataaataaaaaatattgcagttggccaggcacagtggctcatgcctgtggtctcagcactttgggaggccgaggcaggcggatcacgaggtcaggagttcaagaccagcctggccaacatagtgaaaccccgtttctactaaaaatacaaaaaattagccaggcgtggtggcggatgcctgtaatcccagctactcgggagtctgaggcaggagaatcgcttgaacccaggaagcggaggttacagtgagcggacatcgcgccactgcactccagcctgggcgacagtgcaagactccatctctctctctctctctctctctatatatatatatagcggcatattcatatgagtactacttaactacgaaaaagaacagacaactgag

SEQ ID NO: 27969 - DNA, 452 bp, Homo sapiens
  misc_feature (1)...(452): n = A,T,C or G
natcgagacctgaggcccgtgcggnggaactcgccatgaccagggagctggacatcttcgcggggaacacgacccttatcgacgaggacttgtatcgcctctggctcgatggttactcggcgaccgacgcggtggccctgcgggcgcgctcgggaatcctggagcagactggcgccaccgcagcggtgctgcagagcgacaccatggaccattaccgcaccttccacatgctcgagcggctgctgcatgcgccgcccaagctactgcaccagctcatcttccagattccgccctcccggcaggcactactcatcgagaggtactatgcctttgatgaggcctttgttcgggaggtgctgggcaagaagctgtccacaggcaccaagaaagacctggatgacatcagcaccaaaacaggcatcaccctcaagagctgccggagacagggacta

SEQ ID NO: 27970 - DNA, 452 bp, Homo sapiens
  misc_feature (1)...(452): n = A,T,C or G
tattgatgactatctgactttgctnggcgtatncnccatccatagcagcagctactgggacacactctcgccagacctctcttaccatcagccagctggctgaggaaaagaaggaagagaagacctggaaggggagcataggattgctgctggggaaggagcaccatgagcatgcctctgccccactgctgccacccccacccacctcagcactgtcctccatagcctccactacggcagccagcagtgcccacgccaagacaggcagcaaggacagcagcacacagactgacaagagtgccgagctcttctggcccagcatggcctcccttcccagccgcggccggctgagcacgacccctgctcacagccccgtcctgaaacacccagcggccaaagggaccgcagagaaactggagaactctcctggccatgggaagtcgnctgaccac

SEQ ID NO: 27971 - DNA, 496 bp, Homo sapiens
  misc_feature (1)...(496): n = A,T,C or G
agggagggnnnnnnnnnatcgagaccatgatcaccgtggtggaattcagtaaatggtagctcggaagggtcaaaagagtccgcggtttcgccgcgtgagttgctttttgcggctggggaggtctacgcttctagagcttgagccagcggggcgaccctgcagtggcaggactcggcaccgcgccctccaccgccggttggtggcctgcgtgacagtttcctcccgtcgacatcgaaaggaagccggacgtgggcgggcagagagcttcatcgcagtaggaatggcagccccatctatgaaggaaagacaggtctgctggggggcccgggatgagtactggaagtgtttagatgagaacttagaggatgcttctcaatgcaagaagttaagaagctctttcgaatcaagttgtccccaacagtggataaaatattttgataaaagaagagactacttataattcaaagaaaaatttgaagcaggacaatttgagcct

SEQ ID NO: 27972 - DNA, 458 bp, Homo sapiens
  misc_feature (1)...(458): n = A,T,C or G
nattgaaaatttcgaagactattagtnccagtgcggtggaattcccgactcaaacgcccaggtcctggtcaacggccccgacatggctctggctaagcttctattatgccatgcgggaagcatgaatagccagagtgtcccatatcagcgatatgcttccccatggactgcatgtaccacactgtgcgtttgatatcaaaggagaagaatgaatgtgtcattgccacggaggtgtaatgctatagcctacctggacatccctgctcagccccgcggctggaccttccttctgcattgtttacattgcatcctggatgggacgtttttcatatgcaacgtgctgctctcaggaggaggagggaatggcaggaaccggacagactgtgaacttgccaagagatgcaatacccttccacacctttgggtgtctgtctggcatcagattggcagctgcacca

SEQ ID NO: 27973 - DNA, 500 bp, Homo sapiens
  misc_feature (1)...(500): n = A,T,C or G
ggggagggggccnngnnaattgannccatgcagaccctagtcagtgtggtggaattctctcggtccaccagctggtggaaaacacagatgaaacctactgcattgacaacgaggccctgtatgacatctgcttccgcaccctgaagctgaccacccccacctacggggacctcaaccacctggtgtcggccaccatgagcggggtcaccacctgcctgcgcttcccgggccagctgaacgcagacctgcgcaagctggcggtgaacatggtgcccttccctcgcctgcacttcttcatgcccggcttcgcgcccctgaccagccggggcagccagcagtaccgggcgctcacggtgcccgagctcacccagcagatgttcgactccaagaacatgatggccgcctgcgacccgcgccacggncgctacctgacggtggctgccatcttccggngccgcatgtccatgaaggaggtggacgagcagatgctcaacgtgcan

SEQ ID NO: 27974 - DNA, 460 bp, Homo sapiens
  misc_feature (1)...(460): n = A,T,C or G
natagatgaccatctgcccattttgaggccattcgcataacccnggattgaatctacattttggcagaagttaaacattcccacataatgtcaaaattatacatcatgcagttctgtttttttgtttgttttattttgttttgtttttgagtctggctctgtcacccaggctggagtgcagtggcgtgatctgcaacctctgccccccgggttcaagcgattctcctgcctcagcctcccgagtagctgagattacaggtgcgcgccaccacacttggctaatttttgtattattagtagagacggggtttcagcatgttggctaggccgttctctcctgacctcagggtgatcagcccacctcggcctcacaaagtgctgggattacaggcgtgagccaccttgcccagcccacatcatacagtttgaaatgaaactttgccacaaccagcctttgctg

SEQ ID NO: 27975 - DNA, 462 bp, Homo sapiens
  misc_feature (1)...(462): n = A,T,C or G
ctcgaccccctcnnnnnnatgatgtcccttataccangcggnggaattcggctgttcattctcctgaacacagcctgccactttaaggaaaacatatgacactatttgttgctggcgaaatttacattttcaagtgaatagcagaattctggacacttgccaccaccaccaagaccttcatagcttcccttaactttgagacatgggtgttcagaggtttttcacgtgagatggcgttagcagcgcagttttgtgatactgcctgaagacatgccgacagtgcccagatctcttctattggtgagccagcttttcccacacggccaagttctgatgttgaaccattgccaggtgggtgaagatccattgacagtgagaggtgggcccgtgggcttcagtgcagccaggcgcagaaggctggttcatgagtgtccagctccgccaggtagctagctcaccacc

SEQ ID NO: 27976 - DNA, 497 bp, Homo sapiens
  misc_feature (1)...(497): n = A,T,C or G
agggagggggccggnnnattgagacctcgatacctacggaagngcggggaantcgcccccaactctggctgtgtttctgcaggatgagaaggcgcgcattgaagcattgggtggctttgtgtctcacatggactgctggagagtcaacgggaccctggccgtctccagagccatcggtgagagccaaagaggccgacccaagtgggagaaggtctctcggaagcccaggcctcgagtgtggcccgcggctcaccaggggttcagggaggcagtgtgatgggccgagggggatttgtcatgcactggggtgataccctcgtagtgtgaagggaacagggcagattcagagactgcagcaccagtgtctgagtgtaagatacactgtatgttattatctcacctaaaacagctcctacaaatctcatagaaacctgtggctcaccaccctatgggctggaagtagagctttcaatattccggagatgaggtttatcctg

SEQ ID NO: 27977 - DNA, 496 bp, Homo sapiens
  misc_feature (1)...(496): n = A,T,C or G
ggggaggggggnnnnnncctgagaccatgagcacgtgcgggaantccggcgtcacaggcccggatggcgaggactacagcccgtgggctgaccgcaaggctgcccagcccaaatccctgtctcctccgcagtctcagagcaagctcagcgactcctactccaacacactccccgtgcgcaagagcgtgaccccaaaaaacagctatgccaccaccgagaacaagactctgcctcgctcgagctccatggcagccggcctggagcgcaatggccgtatgcgggtgaaggccatcttctcccacgctgctggggacaacagcaccctcctgagcttcaaggagggtgacctcattaccctgctggtgcctgaggcccgcgatggctggcactacggagagagtgagaagaccaagatgcggggctggtttcccttctcctacacccgggtcttggacagcgatggcagtgacaggctgcacatgagcctgcagcaagg

SEQ ID NO: 27978 - DNA, 444 bp, Homo sapiens
  misc_feature (1)...(444): n = A,T,C or G
nttcgaagcccctttgagaacccctantccatgcggnggaattactacatcccccaggccaacgactgcctggtcttaaaggaacaatggattcgagctaagtatgagagacgggaatttatggctgatggggaaaccatctcgctcccaggtaaccgagaaggattcctgtggaagcgaggaagggacaactcacagtttctgagaaggaagtttgtacttctggcaagagaaggcctcctgaagtacttcacaaaggaacagggtaaaagccccaaagctgtcatcagcattaaggacttgaatgccaccttccagacagagaagatagggcacccccatgggctgcagatcacctacaggagagatggccacaccaggaacctgtttgtgtatcatgaaagtgggaaggagatagtggactggttcaatgccctccgtgca

SEQ ID NO: 27979 - DNA, 445 bp, Homo sapiens
  misc_feature (1)...(445): n = A,T,C or G
tttgaatgatagcactcgcgagggcnttncantcctccgtccgtctgtaccgcaccctcggactgcgccaaggcccccgccgtcgttccagcgccgcgcanccaccgccncccccgggggtgtccttaggggcggcggacgaccgcgtccacctcgcaggtgcgccagaactaccaccaggactcagaggccggcatcaaccgccagatcaacctggagctctacgcctcctacgtttacctgtccatggcttactactttgaccgcgatgacgtggctttgaagaactttgccaaatactttcttcaccaatctcatgaggagagggaacatgctgagaaactgatgaagctgcagaaccaacgaggtgggcgaatcttccttcaggatatcaagaaaccacactgtgatgactgggagagcgggctgaatgcaatggagtgtg

SEQ ID NO: 27980 - DNA, 491 bp, Homo sapiens
  misc_feature (1)...(491): n = A,T,C or G
agagagaggggcngnnnattgagaccctgagaccctcggcaggcgggaattaagtcaacagatttgactaaatgacaatgcaacctacatgtggtcagaataatgatacatgactaatgctatattgattttataaatcaaggcactgcagacacaaaagtagttaggaaaaatgataagcttaaggaaggtggtaagttttttttgtttgcctgtttgttatttgagatggagttttgctcttgtcacccaggctggagtgcaatggtgagatctcggctcattgcaacctccacctcccaggttcaagcaattctcctgccttacccttctaagcagctgggattacaggctctgactaccttgcccagccttgtctttttcatcttcctttgaaaaaaaaaaaaacattcctcctgttctggaccccttcttcataaatgcatgaagcctccaccttccagtccctcaaaagtgatgctaaacggggg

SEQ ID NO: 27981 - DNA, 441 bp, Homo sapiens
  misc_feature (1)...(441): n = A,T,C or G
ntttgtagaccattggacagcgcggaggaattcgaattccacccaggctgttgtctgcctggccttcaatgacagtgtgctgggctagcctgtgacccctcgggactgcctggtgcaggtggtggcagctggagggacccatgcagcacccaggtcagagcagaccctcccctgccggcctgcgccagctggacctgatggccccctgtggcgccttgacctgctgggccaggctgccctgggactctcagcccccagttgcttatccagatgtgacagagctcgacccaagccaggctgcacactcctggactgggctagcctgcactgcctgggaaagtcggccgagggcccaaagctgctgaggggtctgaggctggtgcccacccccaagctagtgcgttctctgcccctccctgcccgcgtttcaaggcctcggtn

SEQ ID NO: 27982 - DNA, 498 bp, Homo sapiens
  misc_feature (1)...(498): n = A,T,C or G
ggggcgggnnnnnnnnnaatcgagatcctcgagcaccgtggtggaattccccccaaccccaccgtttggggtgagaagcagaatctgtgcttccccagtctccttgccccagacaaccagcatgtaagacccttcccgcttcaccattccgattcctgtcccctttggggtacttgggggagactctggctcccaggatctgttccctatttcagtgccttcctaggacacaggggactccttgacgctccccaggctttctgtgcccaggcctctgtccccagcggtgaggttgcagtgagtgaaggagaggaggtgatctgttctccctccccttctgcccatctccagcatcttcttccccttccctggccctgcagggccttctccagctccctttggttagtccctggccatccctcctgtcctggatcccttctccctaactgcaaaatgcctgcagcttccagctccttcgtccctgatcctcaagcggnt

SEQ ID NO: 27983 - DNA, 458 bp, Homo sapiens
  misc_feature (1)...(458): n = A,T,C or G
catcgaactcgatagcataggcaagngcggnggaanttgcccgtctaaatttttgtatttttagtagagacggggtttcaccatgttggtcaggctggtctctacctcccgacctcagatgatccacccgcttcggcctcccaaagtgctggggttacaggcgtgagccaccgcgcccggcctgtaatcatattttcaaaggtgcctttgactcttaaaaagtcaattgtttggggcaacccactcgggtccccttccaccctgtgtaagctttgttctttcgctcttcacaataaatcttgctgctgctcaaaaaaaaaaaaaaaaataaattgtttgaaagggagctgggattatcttcatatttgggttgagggaggttggctgtaaagggacgtctacctttgacaggcatttattgcatttttttttatttttacagggaaaccaaaaaagtt

SEQ ID NO: 27984 - DNA, 497 bp, Homo sapiens
  misc_feature (1)...(497): n = A,T,C or G
ccccccgcgnnnnaattgaaacctttcgagancctaggcagtgtggtggaattcggcccctccacccagcagccccagtgtgcttccgccactggtggaggataatggtgggcttcagaagggtgaccagaggcaggtcatccccataccaagtccaccagctaagtaccttcttccagaggtgacggtgcttgactatggaaagaaatgtgtggtcattgatttagatgaaacattggtgcacagttcgtttaagcctattagtaatgctgattttattgttccggttgaaatcgatggaactatacatcaggtgtatgtgctgaagcggccacatgtggacgagttcctccagaggatggggcagctttttgaatgtgtgctctttactgccagcttggccaagtatgcagaccctgtggctgacctcctagaccgctggggtgtgttccgggcccggctcttcagagaatcatgtgtttttcatcgtgggaacc

SEQ ID NO: 27985 - DNA, 471 bp, Homo sapiens
  misc_feature (1)...(471): n = A,T,C or G
ngagcggtgcnnncactgaganccanngataacatgagnacagngcggnggaattccataggccggacactcaccatctcgcctaccagcaggccagacactccggagagccctgggccccccagcgtgcagcccacactgctggacatggacatggaggggcagaaccaagacagcacagtgcccctgtgcggggcccacggctcccactaaggcctgcccaccaccgcccgcctgggcagccatgaatgtagcgccccaggccctgccccagcccgccatgccacaaggtgggggaggccctgcgcaggatgttcactctatttattggggaaggagggaggggggggacacttaacttattcctttgtaccccagggggtggagccctgtgcccaccctgcactggggggagggtgggcagggatactcacggacagggcatcatgggggatttggcacaaaatggag

SEQ ID NO: 27986 - DNA, 477 bp, Homo sapiens
  misc_feature (1)...(477): n = A,T,C or G
gagaggccctttatgagccatcgtaagcgcgcagtagtccgngcggtggaattcctgttattgtaagaaggggctggtttggcctcctcttgctctctctacccctctctgagcccttgagccgtgggatgacacagccagaaggcccttgccaggttccggtccctccaccttggacctcccagcctcccgaacgttgagccaatacatctctgctcattgtaaattacctagtcttgggcattgtgttacagcagcaaaaagcagcctacggcagtcaccgtgctaacacctgcagcagcctgcggcggtcaccgtgctaacacgtgcagcagcctgtgtggctcaggccagtcagcttcccctggaagcaagtgtgaggtcgtcgcctctggaagtgctagcggagggtgatctcccggaggaaatcagagtggtgttctactagaaggccgatgactcctgcgtaaagggccn

SEQ ID NO: 27987 - DNA, 482 bp, Homo sapiens
  misc_feature (1)...(482): n = A,T,C or G
agaggtttccaggntgnnnnaaactgaaactcatcgagaccgtggaannnagcagancaaggatgtgtttgccgtgtatggcatcgcggtcgaccctcgccatctcttcctggttgctgattatatgtgcttcgagggtgtttacaagccactgaatcgctttgggatccggtcaaactcttccccgctacagcagatgacatttgaaaccagcttccagtttctgaagcaagccaccatgctgggatcccacgatgagctgaggtctccttctgcctgccttgtggtcgggaaggtcgtcaggggcgggacaggcctgttcgagctcaagcagcctctgagatagcagctaccccggcaccatctgcccagctccaaggacccttggtgagggcgtggcccagcctgccttctgcatgagaggaccaggagactggaatccagggcagttccaagtgacagtacagagcacagcagcgacn

SEQ ID NO: 27988 - DNA, 460 bp, Homo sapiens
  misc_feature (1)...(460): n = A,T,C or G
gagggtccnnccctgagagcatgaaatctggcggaanncncgagaccagcctggccaaatggtgaaacaccgtctctgctgaaaatacaaaaattagccgggcatggtggtgcgcgcctgcaatcccagctactcgggaggctgagcaggagaatcacttgggaggcagaggctgcagtgagccgagattgcgccactgcactccagcctgggcaacagagcaagaaatagcaaccactatttctggtctgggaatagcatatgcaaaggccccgaggtaagggagagtgtggcccttttgggaaactaagtggaattttgtctaactgatgtactgggctggagagaggagcagagagaggtgacgctcaacagggaggcaggaccccatccctccgcagaccttggagtgtggagaggctcagatgggaactctgaggggctgccttctggcattagc

SEQ ID NO: 27989 - DNA, 461 bp, Homo sapiens
  misc_feature (1)...(461): n = A,T,C or G
cgcnatggcnnnnnnaatggagactgangtctatcgcacagngcggnggaattctggagatgctagagcggaagccctttgtcagctgcagccctgccacataggagtttttgttacaacctgacccactgttctttcaggggccaggcccagaccaggagggcagcacccacgcctggcagaaacggcgctcttcagacgacgcagggcctggatcctggaagcccccaccaccgacccgaagcaccaaaccaagcttcagcgccatgcgcagagcataggccacatggcacatagctgaagagagtgcccccaaccacagatgccagagtcccagcccagcctcccaagatggggaagaggagaaggaggggaccctcttcccagagaggacacttccagataggaatgccaagctacaggaccccgctctagctgcatgggctgccaagccagaggct

SEQ ID NO: 27990 - DNA, 456 bp, Homo sapiens
  misc_feature (1)...(456): n = A,T,C or G
attcgagatcgatagcataggcaagngcggnggaantttctgcatcgcttatccgtttattagccggaccaagattgcacagctaaagtctggcagagactccacggtatgactgtcctcactgggcctgtccacagtgcgagcgactcctgaggggaacagcgcggagttcaggagtccaagcacaaagcggtcttttacattccaacctgttgcctgccagccctttctggattactgatagaaaatcatgcaaaacctcccaacctttctaaggacaagactactgtggattcaagtgctttaatgactatttatgcgttgactgtgagaatagggagcagtgccatgggacatttctaggtgtagagaaagaagaaactgcaatggaaaaatttgtatgatttccatttatttcagaaagtttgtatgtaacaattacccgagagtcatttt

SEQ ID NO: 27991 - DNA, 465 bp, Homo sapiens
  misc_feature (1)...(465): n = A,T,C or G
gggaggtnncnnaaactgagaccttgataacngcggcgaaanccctccctgattgaccggagacgcaccccaggaagctcagcccggagccagaaacgggaggcccgcctggacaaggtgctgtcggacatgaagagacacaagaagctggaggagcagatccttcgtaccgggagggacctcttcagcctggactcggaggaccccagccccgccagccccccactccgatcctccgggagtagtctcttccctcggcagcggaaatactgattcccactgctcctgcctctagggtgcagtgtccgtacctgctggagcctgggccctccttccccagcccagacattgagaaacttgggaagaagagagaaacctcaagctcccaaacagcacgttgcgggaaagaggaagagagagtgtgagtgtgtgtgcgtgttttttctattgaacacctgtagagtg

SEQ ID NO: 27992 - DNA, 465 bp, Homo sapiens
  misc_feature (1)...(465): n = A,T,C or G
gagtattgatctaccaggggggaattcctgccctaactgtcccccatccctccctgagcccagaactggaagaagttcgggaactcagagtttgacccccccggacccaatgtggccaccaccactgtcagtgacgatgtctctatgacgttcatcaccagcaaagaggacctgaactgccaggaggaggaggaccctatgaacaaactcaagggccagaagatcgtgtcctgccgcatctgcaagggcgaccactggaccacccgctgcccctacaaggatacgctggggcccatgcagaaggagctggccgagcagctgggcctgtctactggcgagaaggagaagctgccgggaggtgtgggggtgggagggtcctgctgtcagtgcacgggttctgtccccactgctgccttcgtgctgtcatctcccgcacgacagtgcagcgggtttgatggtgccagn

SEQ ID NO: 27993 - DNA, 474 bp, Homo sapiens
  misc_feature (1)...(474): n = A,T,C or G
agacgaaatcgnctcgtntacactatccgtgtggtggaattcttgacatttgtggacattttaacaagattctgttttgagcccaccaagttgcttttcccatcttttcactctgccctaatatagcatggaatgctgcttggtgctgttcccttgtcttcctggttgttctccctgcttctttctttctccctttcctttcctctctctgtttttctctgttgctttctcagatttgcttatgccctccccctccccacctcctttccttctcccatttttaaaatgcatggacatcttagttttttgagcatgttttgatctgcaggctaaggtggtttaaaactctgagaggcttaattatttatcttggtttctgggatggaagcagaacccatagtctatttactctctcccagggagaaaaaggaaccttgccaaattgagggtgagagggggtggtgcttgctcccn

SEQ ID NO: 27994 - DNA, 441 bp, Homo sapiens
  misc_feature (1)...(441): n = A,T,C or G
nactgagactgacgccatngcggnggacttcaaaccaggggctttcacccctaaaatgaataggacttcacaaagtgaatacgatttctcatcgcagatgcaaaacaaatgctagaggacactgcccttcacttcctgcatttcaggagacagtaaagggttacagctcctcatcacttcagatatctgttgccatagagaaggagtggtgtgtagtgtgagttttgttaacctcgagtcctcaaggacctgggtttctctcctcaggtcccgggagaaaaatagcattcagcctgcaggttccaacacaccagggcaggtatcatcaccgcagactgcactggaaagaaattcatggcatttcttttatggagttgagagtggtcttggcgttttttgagagatgccgggagattaggggctggggctacccttgcacan

SEQ ID NO: 27995 - DNA, 443 bp, Homo sapiens
  misc_feature (1)...(443): n = A,T,C or G
naccgatgactgacagccattgcggnggacttccttccttgtcgggtggcctcagtccttcgccgtccctcgccgtccttcgccatttcacgctaccgcaccccatctctcgaaatctgcagacatcttgatttttcccacgctgtctgtcaggtctccgccgccactcgacgccagggcgccgggtgagtccacagcagggcgcatggtcggctccactctcaccatcgggggaaactgaggccccggggaaggcggccagagaggtcaggccctgtccttggtgcagtgtctcgtcctctttgccggagtgagccccccaggattcgcgtgtcctcgggaaagacactggcaggccttgtgggctgtgctgcacctcggacggcttcgcaccagccagcgccctctctctcctgcagcactctgatctgcaccccctgagg

SEQ ID NO: 27996 - DNA, 479 bp, Homo sapiens
  misc_feature (1)...(479): n = A,T,C or G
cccccccgcccaggggnnnttagantttcgagancactatgcagngaggnggaattcatgaaacacttgggctacctggggtacaccagtggtctctctctgacctgcatgctgtttttccttgtttcggtcatctacaagaagttccaacttggctgtgctataggccacaatgaaacagcaatggagagtgaagctctcgtgggactccccagccaaggactcaacagcagctgtgaggcccagatgttcacagttgactcacagatgtcctacacagtgcccattatggcttttgcttttgtctgccaccctgaggtgctgcccatctatacggagctctgccggccctccaagcgcaggatgcaggccgtggccaacgtgtccattggggccatgttctgcatgtatgggctcacagcaacctttggatacctcaccttctacagcagtgtgaaggcggagatgctgcacatgtn

SEQ ID NO: 27997 - DNA, 466 bp, Homo sapiens
  misc_feature (1)...(466): n = A,T,C or G
agtgcggtnnnnnaaactgaggaccttagtaacngcggnggaanccctggacacagccatcacgctgggcagctgtgaggttaaaacagaaagtctgggctgtggggaggctgagaattgagatgcatgtatgagatgagtcacgagggccaagtggtgtgtgtgagaaagcaggcacagcaccactaaacactaaggagatttcaggggagttacgggtggagggaggacatcagatctaccctggaagttaaacgtgtttcgagtgcattaaatactatgggccacagacgccttgtctccatatctactcttttataaatgaagtaaagttcttgggaaatacttttctcactctaaagctcacaatctatcttgcaaaaaatattttaaattccatctcaaataagccagggtgaaaagggagcctgtgcaccagacactgccagccttgcctggctctcgc

SEQ ID NO: 27998 - DNA, 467 bp, Homo sapiens
  misc_feature (1)...(467): n = A,T,C or G
agtgcggtccnnncaactgaggacccatgagatctgcgcaangcggnggaantcctggacacagccatcacgctgggcagctgtgaggttaaaacagaatgtctgggctgtggggaggctgagaattgagatgcatgtatgagatgagtcacgagggccaagtggtgtgtgtgagaaagcaggcactgcaccactaaacactaaggagatttcaggggagttacgggtggagggaggacatcagatctaccctggaagttaaacgtgtttcgagtgcattaaatactatgggccacagacgccttgactccatatctactcttttataaatgaagtaaagttcttgggaaatacttttttcactctaaagctcacaatctatcttgcaaaaaatattttatattccatctcaaataagccagggtgaaaagggagcctgtgcaccagacactgtcagtcttgcctgg

SEQ ID NO: 27999 - DNA, 451 bp, Homo sapiens
  misc_feature (1)...(451): n = A,T,C or G
nactgagacctccgganaatcgtaggctccggacagncnggnggaattccgaacggacacactccggtgagaaaccttacatgtgctttgagtgtgggcgatgtttcagccagaagtcaaacctcatcatacaccagaggacacactcaggggaaaagccttacgtgtgccgggaatgtggcaaaggcttcagccagaagtcagctgtcgtgagacaccagaggacacacttggaggagaagaccatcgtgtgcagtgactgtggcctgggcttcagcgacaggtcaaacctcatctcccaccagaggacgcactctggggagaagccctacgcctgcaaggagtgtgggcgatgcttcaggcagaggaccacccttgtcaaccaccagaggacacactcaaaggagaagccctatgtgtgcggggtgtgtgggcacagcttcagccagag

SEQ ID NO: 28000 - DNA, 467 bp, Homo sapiens
  misc_feature (1)...(467): n = A,T,C or G
aggaggtttcccncaatgagaccccatgagatcctagcacangcggnggaantcggaagaggcgatgtgagctgggaagggggcaagtgtccgggacacccacacccctgtattctcctccgaaccccttcatgcccaaatcccggaaactccagcgtgtctccagccgtgttggtaccattttcagatttcatcttcctaaactggaaatgtcaatgagaggaaattaacacccccaagagctgcagtgagcaaatgcattgagcttgggtcaggacaattccatttggggaccagagatggacggtcactcatcctatggagatgacagacaaccttctgtgccttcatcaagctggttgtgtacccaccatgtccctggcgacaggatgggaaagaaaaagccctaattaaggatcgtcagaaaccacagttggaggaggacggcagagacagtttacctcccn

SEQ ID NO: 28001 - DNA, 433 bp, Homo sapiens
  misc_feature (1)...(433): n = A,T,C or G
atttgagacactganacccttggaaanccnngaccaattatatcttattggttgggatatcactggaaactggaacctttgtttagcaattttaatattgaaataagaaatagttcttttatattgtgtcatttggacactttcaagtacaaaatggtaataataacttggattgaggcagaaacacctattttatggctatctatctaaacatcttaaaatggccttctctgtaatacactttcttttaaaagacttcactaaatctatctttaaaaggaaaaacaaaagggagaggttgaaaatgcgcgagctgccctgcactgtgtgatgctccctccccgggagacgtggacgggggacgaggcacccgcagacgcccttctgctcactcgctcctctgtgcattcagcgagccacttgccacagatgg

SEQ ID NO: 28002 - DNA, 474 bp, Homo sapiens
  misc_feature (1)...(474): n = A,T,C or G
gagagggcgcccatggagcccttngatagagcattattagtcagngcggtggaattcgctgggtgaccctttgccagacgaaaagagctggtcgagagagaagcgcttggcaggagctctctgcgggacctaagctccgtggctgctcgggatccctacgtccgctgctgctgaaggagcagaggggaggacgccagcggttgcttactggagcctggaggaaaatggaaacatcattccctagaaacagttgaagttgacagacctagaggttgacaaaaggacacgacactaggttttttgggatcctcaacagattggataatgctcatctgcattgatgagggagttcctgctcactcagtctattgatgaatttgcattgtcatgtttcgaaataccattccaaagacctgcaaataaggggaggtgaatgacaagaagatggtgcagaaaggaatctaagaaataaaa

SEQ ID NO: 28003 - DNA, 461 bp, Homo sapiens
  misc_feature (1)...(461): n = A,T,C or G
agaggccaggccnaggcgccctaccgaggccctcngnacggagcgcgtcgnancagcagcagcacctccttccaaggcttcctcatcttcatctggtactggtccatgcggctgcaggttcggggtggcccctcccctgtgaagagcaacggagacagcgccaggctccccatcagctcgggcagcacctcgtccagccgcatctaggcctccagcccacctgcccatgtgatgaagcagagatgcggcctcgtcgcacactgcctgtggcccccgagccaggcccagccccaggccagtcagccgcagactttggaaagcccaacgaccatggagagatgggccgttgccatggtggacggactcccgggctgggcttttgaattggccttggggactactcggctctcactcagctcccacgggactcagaagcgcgccgccatgctgcctatggtact

SEQ ID NO: 28004 - DNA, 455 bp, Homo sapiens
  misc_feature (1)...(455): n = A,T,C or G
ggattatgagaccatcgcaannctacngtttggcttcggacagncnggnggaattcttcaaagctgcgaagatagaaggacaagaccaatgtttaaactgattaatctttttcaagacaggcatttcagaagcataatggggggtgaaatgcgtgttcctagctcagtgctcctgacttggtggtagtggagtgacaaaaccattcatttatttattcccaatactgggagtcatggaacagccttcataaggtggcatccaagcagcacaatgtccctcctgttcctgagcatttccgcatccctgcatcagtgagcagtatcactagcaggagctcagaggcttgtaatggaaggcagggacatcaccctatagggacagcagaactgcagggtgaccataggggctggccggggaccaggcataggtgaccagctttccgggtgtgccttgg

SEQ ID NO: 28005 - DNA, 446 bp, Homo sapiens
  misc_feature (1)...(446): n = A,T,C or G
agaaactgaagctccagaagntattagaacacttgaaaccacagacnatagagaaagctcgcctggaactgaatgaaaaccccgattttttacatcaggatatttagcaagtcagggacatgatcatcaccaggcctgacattggatttttacgtacagatgatgccttcatcctgagatttctccgagccaggaagtttcaccaagcggatgcctttagactcctggctcagtatttccagtaccgccagctaaacctggacatgttcaaaaacttcaaggcagatgatcccggcattaagagggctctgatcgatgggttccccggggtgctggaaaaccgagaccattacggcaggaagattcttttgctgtttgcagccaattgggatcagagtaggaactccttcacagacatccttcgtgccatcctgctgtcattgaag

SEQ ID NO: 28006 - DNA, 552 bp, Homo sapiens
  misc_feature (1)...(552): n = A,T,C or G
gacgtgcnnaattganccctttcgatcactatccganggggaattcggggctgctgtcagcccacaggattcctgtgaggacaccacatgttcatagttgttaaaccatcttgctaactcattgcctgatgttcagatctcccggctcagctggtgtctgtggaggacaggatttatgtttcagagagggcatgagcccagatgatgcctcaagactcaggttctaggagagaaagcagtgcttcagggactttgactgcccccgcccgaaatgcagtcgccatctgcaggtaaacagagctggagctggtgctgccggaaaagaaagaggagggctctccggcagcctgcggcttcctcaaggacttcccaggccaggcgctgtggctcacgcctgtaatcccagcactttgggaggccgaggcgggcagatcatgaggtcaggagatcgagaccatccttggctacacagtgaaaccccatctcttctaaaaatacccaaattatccangcgtaatggcggcgccctgaatcccccctccttcggaggtt

SEQ ID NO: 28007 - DNA, 545 bp, Homo sapiens
  misc_feature (1)...(545): n = A,T,C or G
nttcggaccatagtccagcgtggtggaattccgcccctgcagagacttcgagcagcctactcgggacgggctgggcagtgacaacattggcagtcggatgctgcaggccatgggctggaaagagggcagcggcctgggccgcaagaagcagggcattgtaacgcctatcgaggcccaaacacgggtgcggggctccggcctgggtgcacggggcagctcctacggggtcacctcaaccgagtcctacaaggagacactgcacaagacaatggtgacccgcttcaacgaggcccagtgagcagcttcaagagcaacttctccacatgttgggtgtccatcctggggcagggaaggacagagtgttggatggctgggacggngccttgctcttgtcggccagcccactccccagccagagagggcttgaccaaatcannatgaggtggtgactnttgttggaanatgggctgggatcacgtnctgttttgtatanaagctgannagctgcnnnnnnnnntnannaantnnannntaaaattgggtta

SEQ ID NO: 28008 - DNA, 454 bp, Homo sapiens
  misc_feature (1)...(454): n = A,T,C or G
gggagtaagagacctttcgnaaactcggaccctacgganagncnggnggaattccactcctcccgatgctgtcccccgcgcccggaggccgtttcaattctctgggattttcccggcttgggagcggagcggccggtcggaagaacctcgggtgctggcgcgcctgaagttgcagaccagactgaaatgtgcgagacatgtgcctttttcttaggaaaggccccaggtaccagaaaggttttcagcgcgccgacctacggggctaagagggctgaaataagaaccagtgactgagcgccgggaggtttaaggtttatggaagatgttcatcgcgccgtaccctactagaggtttggggacgtgggacacagcccctgcgttcccgccgcggaccccgtgataaatacacagacacacaaaatcactaccgccttgaatctggacagctacctca

SEQ ID NO: 28009 - DNA, 455 bp, Homo sapiens
  misc_feature (1)...(455): n = A,T,C or G
naatgagaccctcggannnnctacnttttangcccagtacagncnggnggaanncgctggctcctctcctccctctggtgtccagatatgtgtgggtgctcttgcccctaatcatgccttgagttccttgccactcctgtgcctctggctcttcctgcagtcctggcccctctcctgttccatatcgcccattcctgccgggtggctcctggaacacaaacctctctgtgtccaaacccgaacttccccacccaggccaactgcccctacacattaatccccttaaccacagagcttgttgtctgtctctgtgctgactgaaggcttcctctgtcaaggctggaatgctgccctttcacttgcccaccactgctgctccaggccttcccttccccacacctgccagccctgcccattccagattccacaggcttgtgaagagagatggggcctgg

SEQ ID NO: 28010 - DNA, 435 bp, Homo sapiens
  misc_feature (1)...(435): n = A,T,C or G
attgangaccttagtcattgaggtcgtctatccagcgtggtggaattcgcttttccttcatctgaacacagaaggagccacggtctggaaagtgtgcctgttcttcccgggagtggggaggccggtgtgagttttgatcttccagctcaggcagacaccttacacagtgcaaacaagagccgtgtcaagatgagagggaagcgtagaccgcagacccgtgcagctaggcggctggctgctcaggagtccagcgaggctgaggacatgagcgtccccagaggacccattgcacagtgggctgatggcgccatttccccaaatggccatcggccacagctcagagcagccagtggagaagacagcactgaggaggccctggcagctgccgctgcaccttgggaaggtggtcctgtgcctggagtggacacaagcccc

SEQ ID NO: 28011 - DNA, 463 bp, Homo sapiens
  misc_feature (1)...(463): n = A,T,C or G
aggccgaggccnncaatgagnntcatgaggatcatagacangcggnggaattcacccgttcgagaagggcccgctgagccctcgcttccgtggggagcatgcgctgcgccggtacccatccggggaggagcgttgcattgcctgcaagctctgcgaggccatctgccccgcccaggccatcaccatcgaggctgagccaagagctgatggcagccgccggaccacccgctatgacatcgacatgaccaagtgcatctactgcggcttctgccaggaggcctgtcccgtggatgccatcgtcgagggccccaactttgagttctccacggagacccatgaggagctgctgtacaacaaggagaagttgctcaacaacggngacaagtgggaggccgagatcgccgccaacatccaggctgactacttgtatcggtgacgccccaccggcccgcagcccctgctg

SEQ ID NO: 28012 - DNA, 456 bp, Homo sapiens
  misc_feature (1)...(456): n = A,T,C or G
agaaattgataccatcgnaannncacttggaagcttcggacagncnggnggaattntgcaggtgtactctgccagagaatccaaacaatcttaccctccagtactggaatgaccacaacatcgtgacagcagaagtccactgggctaacctgactgtcagtgaatgccaggagatgcatggagagttcatgggatctgcgtgcggccatcatggaccctacactcctgatgtcctcttttggtcctgtattctctttttcaccaccttcatcctctcaagcaccttaaagacgtttaagacgagccgttatttcccaaccagaatggagtcttgctctgtcgcctggctggagtgcggtggtgtgatcttggctcactgcaacctccgcctcctcccgagtagctgggactacaggcacgcaccaccacagccagctaatttttgtatttttagta

SEQ ID NO: 28013 - DNA, 451 bp, Homo sapiens
  misc_feature (1)...(451): n = A,T,C or G
ngaaaatcggtnacctccagnacagncaactggaatcattgaaaaaacannncntcattntgatcattaatatactgaattagtgtagagtagattaataaaatctgaggaatcacatttatttgatcaaagtgaattctccctttacacatgaaaaaacatctttgccttattttatttatttatttttgagacggagtctcgctctgtcgcctaggctagagtgcagtggcacgatctcggctcactgcaacctccacctccctggttcaagcgattcccccgtctcagcctccggagtagctgggattacaggcatacgccaccacacgcggctgatttttttgtatttttagtagagacggggtttctccattttggccagactggtcttgaactcctgacctcaggcgatcctcccacctcagcctcccaaagtgctgggataacg

SEQ ID NO: 28014 - DNA, 437 bp, Homo sapiens
  misc_feature (1)...(437): n = A,T,C or G
attgaagacaattattgagngcggtggaattcgcagcgcgagaaagtgaaggacgaggagatggaggtcaccttcagctactgggacggctcgggccaccggcgcacggtgcgggtgcgcaagggcaacacggtgcagcagttcctgaagaaggcgctgcaggggctgcgcaaggacttcctggagctgcgctccgccggcgtggagcagctcatgttcatcaaggaggacctcatcctgccgcactaccacaccttctacgacttcaccatcgccagggcgaggggcaagagcgggccgctcttcagcttcgatgtgcacgatgacgtgcgcctgctcagcgacgccaccatggagaaggacgagtcgcacgcgggcaaggtggtgctgcgcagctggtacgagaagaacaagcacatcttccccgccagccgctg

SEQ ID NO: 28015 - DNA, 444 bp, Homo sapiens
  misc_feature (1)...(444): n = A,T,C or G
ggaatgagacctccgacancactgnagctacgtagancncaccggacaggactggcattactctaacatctgtcctacggcttcattttatgggatgtttgaggattattcctatgaagtgacattggaatttggggatgtggctatgttcagatgccaaataaacttggatagaaatcatttttcctgtgtgtgtttacagttaggaacgtggggctgtgaggggctccctggacatgaccctggagctgtcggcccttgttcagtggtcagatgcgcttcagacctcccagagtgctgcccgcacactcagtcacagccccatgcgcacctcaacgccactgctcagaagtccagtgtaattcctcaggcagcatgtcctagagcaggccatgagaggtgtgaggtacagactttgttgtgaggttacatgtaggcttctgg

SEQ ID NO: 28016 - DNA, 455 bp, Homo sapiens
  misc_feature (1)...(455): n = A,T,C or G
gaaaccgagaccttcgnannncacttggaggcttcggacagncnggnggaattngggaggacccggccagaaaagctgcccacaggcggtggcgtgggagccgagacttcaggtggggggcatgccgggaagcttcacatttgtgaatagtggcgttgacccttcttcactgtggttgtgactggcaggagatacgcagcagctacagggaccctgcccagctgcaggttgggcttatttctatctccttttaattcacctgcccccagagttttaggcaatgccttgcccagaatttgggttttaatatccatagatttctagtttttccccttgtagtagttttagagggaaagtgatattgggagcagacacaggaggcaaaaccagtgggtggccgaggagccagcgctgtagccatgaacgctttcaggaaggaaaggaagagcagtcag

SEQ ID NO: 28017 - DNA, 433 bp, Homo sapiens
  misc_feature (1)...(433): n = A,T,C or G
nattgatgacccttagaccagttggtggcattcccaaactgttcctttctcacggttccgcaccagcctggctgtgtacagctcatcaagccactgagctaatcggggtggggtgcttgtccatcaaagcagtcagcacatagcccagcgaggagccatccggaccagacccgcctgccaggggcgctccagccgcctgccgcctccgtgggctggggccagctgggagcagaggcctggcccctccaaggcgtcccgcagtggagcaggctgagtggctgtgctgaccttgggctttccatgggaaccacactgtgcttcaacttgaacattcatcccagctgcaaaggagcaaagaacctgtgtcatccttgtctgtccagaagctgccatctctctcccatgcacatccgggagataacgccgctagtgg

SEQ ID NO: 28018 - DNA, 436 bp, Homo sapiens
  misc_feature (1)...(436): n = A,T,C or G
attgatgccctnggnnnnactgatgacatttagaccangnggnggaattcgcggcccatgaatgccttcatggtgtggtcccgcggtcagcggcgcaagatggcccaggagaaccccaagatgcacaactcggagatcagcaagcgcctgggcgccgagtggaaacttttgtcggagacggagaagcggccgttcatcgacgaggctaagcggctgcgagcgctgcacatgaaggagcacccggattataaataccggccccggcggaaaaccaagacgctcatgaagaaggataagtacacgctgcccggcgggctgctggcccccggcggcaatagcatggcgagcggggtcggggtgggcgccggcctgggcgcgggcgtgaaccagcgcatggacagttacgcgcacatgaacggctggagcaacggcagct

SEQ ID NO: 28019 - DNA, 437 bp, Homo sapiens
  misc_feature (1)...(437): n = A,T,C or G
atcgatgcccctngnnnnatcgacgacncctagtccatgtggtggaattcctttgccgtcggcgagtacaacaaagccagcaacgacatgtaccacagccgcgcgctgcaggtggtgcgcgcccgcaagcagatcgtagctggggtgaactacttcttggacgtggagctgggccgaaccacgtgtaccaagacccagcccaacttggacaactgccccttccatgaccagccacatctgaaaaggaaagcattctgctctttccagatctacgctgtgccttggcagggcacaatgaccttgtcgaaatccacctgtcaggacgcctaggggtctgtaccgggctggcctgtgcctatcacctcttatgcacacctcccaccccctgtattcccacccctggactggtggcccctgccttggggaaggtctccccn

SEQ ID NO: 28020 - DNA, 542 bp, Homo sapiens
  misc_feature (1)...(542): n = A,T,C or G
nattgaaacccctttccagagnggcgtagaaccacctagctaaggtctgctgagaacctagctcaagggaagctcttctcacttcccttccgtcctcatttgaattggntgttttgggatatttcataagttgttgttttccaattgattaaaaatgacaactagtgcaagatcttcagtgaagtaaggcctgctgtcccattacactggcacccttggagcccaagtgcccatctgccatggcactcaccagccagtctattaagaataatcaaggccaggcttcccctgtgctgtgctctctcagggcaagatccatgcccgtttttgctcatcactgtatctattcctccaagctcagggaaggtgctcagtaactgttggctgccaactggagacacactggcaccccctcttgcaccgacgcgtgctctcagtggccccttgtctttcagaacacccagtgcatcccagaaggcttggagagctactacgcggagcaagacttcagtgcccgggagaaaatntacacagtcataaan

SEQ ID NO: 28021 - DNA, 433 bp, Homo sapiens
aacgatgacctcagacagttcgatggcattcgtgaccacgggacagacgatcctctgaggtttccaggaagacccccgccctaatcctctgaaggtcggaggtcacaggtcaaagccgagaacagaagctggggtggggcacacagaggtggaaagaggggcctgagcatcgggcggccaccagcagggtcccctcctggccacaaggacgctcccgttccagtccccggaagagggtggctgcagccaccccggggatgaccagcagaggtcctcacggcctgcggcccggggagacctgagactcctaagctgagcacgtcagcgtctctacctccaccgcagacagaaagaccgggcggacccaagactgcaagctcaagccctggcggcagggcagcggggcctgtgagggccgagggtggacgctgct

SEQ ID NO: 28022 - DNA, 464 bp, Homo sapiens
  misc_feature (1)...(464): n = A,T,C or G
ccttgcgttcgattacccangcggnggaattccaagccaagcgtttggtggtgcatgaggggagccctgtgaccagcatctcagcctggtcctgggtcagccgcgaggcccgggatccctcactgctcatcaatgcttgcctcaacaagttgctgctctacagggtggtagacaacgaggggaccctgcagctgaagagaagcttccccatcgagcagagctcacatcctgtgcgcagcatcttctgtcccctcatgtccttccgccagggggcctgcgtggtgacgggcagtgaggacatgtgcgtgcacttctttgatgtggagcgggcggccaaggctgctgtcaacaagctgcagggccacagtgcacctgtgcttgatgtcagcttcaactgcgacgagagcctactggcctccagtgacgccagcggcatggtcatcgtctggaggcgggagcagaan

SEQ ID NO: 28023 - DNA, 460 bp, Homo sapiens
  misc_feature (1)...(460): n = A,T,C or G
agcgccgcccccaatgagactgagggcatctgcacgngcgnggaattcttatgtcttccacggggttgagtcgggccataggggtgagcagctgcctggaagagttctgggaagtataaccctccattttttcttgttttataatctctttgtttaataataagtagaagaaataatttaaatgaactgcttagccctgctctgaataaccttttttggaattagattttagttgattttttaaagaatacagcccaacacttgttttttacattttaagagttgtagaagttgttcctaacttggggactggacctaccctctaggagggagttgttaatggggctcttttagcccactgatgcttacttaggccggagagcaggggacacggtgctaggttccctcgtgcagtgcctggtgctctcaaattgtctcanaaggaccaagaggaaaagag

SEQ ID NO: 28024 - DNA, 454 bp, Homo sapiens
  misc_feature (1)...(454): n = A,T,C or G
catagacgactctcggatttgacggcgctagncgccagcgaacacagagcagctagaggctcctcctctgctggcttagggtcagaagtacctcacagtggttgtggacatggaagagttgtgtcaacacaacgctttgtccccgctccgggagatgagtcagatggtggcttgagttgtcacttggtcccctccgcccctcgggtggccccctttgccacgtccccttagcttagtgatcaggtgtgagagtggccatttccttacctttgatccctgtaaagcagaaaggactcctttgacaggcgacaaactactgtggtgagcagaatgatttcctttttcaagacaacacctgcctggcttctattaatgtgtgctggccatgatattgccccaaatccgccccactgaagtgttccctaaggaacagcatttctctgctcctcagtcn

SEQ ID NO: 28025 - DNA, 388 bp, Homo sapiens
  misc_feature (1)...(388): n = A,T,C or G
caagccttggcccggtgacacctgcagccctcacttctgtcatcccaggacacttgaggcccaaggagatggagtggagaatgggctcgggtacatgggagccagaagccagatggacttggtcaagtgtcggtcacttggagcctccagtgtgcgtcagggtctgtgggcaggggacagggcgtgggtgggggccgaggctggcacgcccctctgccctcaccgtcttggtgacctggcctcggcccctcccccaagtctcttctgtgcaaggcccgcctcggcctcggcagctggttcctgtcccgttttctgtgtctgaaagtttacaggttgtggtgcatcagcccaaactcacaggcgttgtgttttttttttctttaatttn

SEQ ID NO: 28026 - DNA, 545 bp, Homo sapiens
  misc_feature (1)...(545): n = A,T,C or G
ntagatcccccctccnnnnnncattgatanccntcgcagngnggcggaattccctgagctgcctcctgacctgccacccccagcccgccgcagtcccatggacagtcttctgcacccccgggagcgccctggatccactgcctccgagagctcagcctctctgggcagtgagtgggacctctcagaatcttctctcagcaacctgagtcttcgccgttcctcagagcgcctcagtgacacccctggatccttccagtcaccttccctggaagtgaggataacccctcccacacagatgtgcttgaacacacatagcacacactcaccctgtccaaggcangagatggggaggaggtgggaggggctggggaaggggcatgggctccagagtgctggcggccagacagcacctacttcccgactctccctgcccacagattctgctgttcagctgctccctgtgccgtgcctgtgattcgctggtgtatgatgaggaaatcatggctggctgggcacctgatgactctaacctcaacacaacctgg

SEQ ID NO: 28027 - DNA, 443 bp, Homo sapiens
  misc_feature (1)...(443): n = A,T,C or G
gattgatgaccctcggnacagcttgatgacacttagtccagcgtggcggaattcgagaaattaacactttaaaaaaggtatatagtgttatgatttgaagtcttaaaataaaacaccatggcatgcatagtttttggaagccaaacaaattctaaatacactggtattcaaacttttaagatgtagagatttagtaattcattagtattaattattgaataattgctacttatgttttagtgtcagtttttattcattgatccagtcctgcagaagagactttggaagcattaactgcatcttgcatttcaactcaggagaagttcattttaattactaaggagtagttgcaaaataggttcaaggccactcccaaaataaacctaccaagtttgagaagtgaaaattacactttttgctattattctaatttttaaacttcn

SEQ ID NO: 28028 - DNA, 537 bp, Homo sapiens
  misc_feature (1)...(537): n = A,T,C or G
nttagtatccctattccagagtggcgtagatcggcagtcacaggatcccagcccggcctttgtgggactgaggtggcgctgagtgggagagcagcaggcgatgcgcgaaaggcgggacttggaggttctggatgttcctgtggataacctcaaggagcacgggacctgggacatgactgcccccagcattccttctggcggcagacagagtttgtcagttcgccaacatcctgctttcatgagaacagtttgctgtttgctcacagagcctccagtggtatactgagttggtcacgaccctcattccttcggcctccaacatctccccttttgtttttgcattaattgaataaaggtaatttcaggctgtgcnnnnnanaaaaaaaaaaaaaaaaaaaaaaaaaaaaaaaaaaaaaaaaaaaaaanannnnnnnnnnnnnnnnnnnnnnnnnnnnnnnnnnnnnnnnnanaaaaaaaaaaannnnnnannnnnnnaaaannnnnnnnnttttttttttaaaacaaactttgggggct

SEQ ID NO: 28029 - DNA, 535 bp, Homo sapiens
  misc_feature (1)...(535): n = A,T,C or G
nttgaacactttccaggggctttgacgacatacagagtactcctttctggactatgtgatgggaggctgtcagatcaacttcactgtgggcgtggacttcactggctccaatggagacccctcctcacctgactccctacactacctgagtccaacaggggtcaatgagtacctgatggcactgtggagtgtgggcagcgtggttcaggactatgactcgtgagtacctgcttctctgggctatacccgctccctgcagatgcttcagcctctgagcttacagtcccctcactgccttttgcccaatacactgtcctcccacagagacaagctgttccctgcatttggatttggggcccaggttccccctgactggcaggtgagctccctctctttctgccactcctgttttcagtttcagggtcctgattttgggggatgtggtaaatttacttgctacttggcactcagctttaagaggagatgcagggttggattcctgcaggcacgtagacagcaagtgctcaggactccn

SEQ ID NO: 28030 - DNA, 444 bp, Homo sapiens
  misc_feature (1)...(444): n = A,T,C or G
naggggcccccnnnaaacggaactggagcacggcccgncggggaattcgctctaatatgttgcccaagctgatctcaaactcgtggctcaactgattctcccgcttcaaccttgagtagctgggacgacagatacatgctactgcgcccagctaggttaaggttctgtatactctgtctttctaaagcaattccctggaaattttctcaacgttggttataactgaatgcttgggaagggaggggcagcccttcaacaggaaaaggggactgcccaaatcttaaatgcacagtcgagattctcttggagctagcaatggttctcaggttagtgagcatttagcttgcctgctgcagaatttgacccagatgggggtgtttttcaggtctctcacaaatgagacaagcgaaacaattgtctccttttattctctttggtgcattg

SEQ ID NO: 28031 - DNA, 451 bp, Homo sapiens
  misc_feature (1)...(451): n = A,T,C or G
agaggccggnnnnnnccttggaagttgngcaccgcacagncnggnggaattccggcggcggagattgtccgcagtgactacactcatggcaggtcccctgtggcggaccgcagcatttgtgcagagacacaggacaggcctcttggtgggttcctgtgcaggcctgtttggagttccagtctcgtaccacctcttcccggatcccgtggtccaatggctctaccagtactggcctcagggccagccagctccgctccctccacagctgcagagcctcttccaagaggtgctacaggacataggtgttccttcaggccattgctacaagcccttcaccaccttcaccttccagcctgtgagtgcaggcttcccaagactccctgctggggctgtggtgggcatccctgccagtttcttgggagacctagtgatcaacactaaccatcccgtg

SEQ ID NO: 28032 - DNA, 448 bp, Homo sapiens
  misc_feature (1)...(448): n = A,T,C or G
gagggcgnnnnnnnnaaccgactgcaagcatcgacggggcaannnggngagnggnggcggctgcggcagtagggacagcaggagcagtggtgctgtcagcgcggccgtcggagacatgggagacccggggtcggaaataatagaatctgtccctccagctggccctgaggcatctgagtcaacaacggatgaaaatgaagacgacattcagtttgtcagtattctgtttcctaaaatgccaaaacgacagggtgattttttgcattttttaaatgtgaagaaggtgaaaacagacacagaaaataatgaagtgagcaaaaatcactgcagattgtctaaggcaaaggaaccacatttcgagtatattgaacaaccaatcattgaagaaaagccatcactttcatcaaagaaagaaatagataatcttgtgcttccagattgttggaag

SEQ ID NO: 28033 - DNA, 549 bp, Homo sapiens
  misc_feature (1)...(549): n = A,T,C or G
cttcgacccccctnnnnnnnnncnatggagancccattgcagngnggcggaattcatgggggcaaggggccggttccttgcggngctgagcaacaaagtagtatcagtgttcggtggctccactggaactacgcagagccagaccagcgggaccacagaatgggctgaggcggcggcggctgtttggataaagtcaacagcgggacgtggggcgtgacgccgacctgaggatatctgggctttgggctgtatgatcattgagatggccactggaaatccctatcttcctagtagttctgatttggatttactccataaaattgttttgaaagtgggcaatttgtcacctcacttgcagaatatcttttccaagagccccatttttgctggggtagttcttcctcaagttcaacaccccaaaaatgcaagaaaaaaatatccaaagcttaatggattgttggcagatatagttcatgcttggttacaaattgatcctgctgacaggatatcatctagtgatcttttgcatcatgagtattttactagaga

SEQ ID NO: 28034 - DNA, 542 bp, Homo sapiens
  misc_feature (1)...(542): n = A,T,C or G
nattgaaaccccatcgagnnggcgttagaccactatatatatatatctctaattgcctttatatttaggcggtatgagttctccctaagcgtgagttggctctgccctgcacaggcacccaaacagtcctacctaatgtcacttcaccaggaaatgagaggacatggtacagtgtgggagacagcactaacacgtgctgaataactactgtgtaccaagctatgagctcggtgcttgttactgttaactcatttaacccccacaactcatctacaaagttggcattaaaatccccaagtcactcagtgagccatgggacctgaatccgaacctagtttatctggagccataatctgggctcctcccatttttccatactgctttccaaaagcattgcggttcactctttggatggaaccagtcccgttccgtatgctgtgatctatccctgccgaggaattcctccgaggctccaactccgcagccggagaagctgctctctggcctccgcgggcagagctctgcttatgacttcgtcttcn

SEQ ID NO: 28035 - DNA, 559 bp, Homo sapiens
  misc_feature (1)...(559): n = A,T,C or G
nattcgaatccactantcagagaggtggaattcggttggtagaacagagctcaagaatggatttgccatcatccggcccccaggacacgcacgccgaggaatccacagccatgggattctgcttcttcaactctgtagccatcaccgcaaaactcccacagcagaagttgaacgtgggcaaggtcctcatcgtggactgggacattcaccatggcaatggcacccagcaggcgttctacaatgacccctctgtgctctacatctctctgcatcgctatgacaacgggaacttctttccaggctctggggctcctgaagaggttggtggaggaccaggcgtggggtacaatgtgaacgtggcatggacaggaggtgtggacccccccattggagacgtggagtaccttacagccttcaggacagtggtgatgcccattgcccacgagttctcacctgatgtggtcctagtctccgccgggtttgatgcttgtgaaggacatctgtctcctctgggtggctactctgtcacccgncagatgttttggccacttgaccangc

SEQ ID NO: 28036 - DNA, 443 bp, Homo sapiens
  misc_feature (1)...(443): n = A,T,C or G
gggtgcgnnnnnnnnccccagctgcgnacatctgcgggcaattantnatttcctttgctttcttcctctcccctgctgctgagcacgctcatagccctgaaggtgtgtatgaggtgctcccaattctgggaaaccacctcagccgctgctggagctctggctgccacctcctcggctatgccatggacaccatcttcctgtcagctgaagagcctgcccacaccctggtcaaggcattcatccttcctgcctgctcagctacaggctgggtctgccccatatgcaaaccaattgcaacaatcaccttaaaacatttgatctcccacatactcttcttcccataaaaaataagactaccttctataatggagaagctacaaaaccccaaaacgttggtcttgccaatgtttttgtaaaacaaccatttagtgtttacttgctgt

SEQ ID NO: 28037 - DNA, 451 bp, Homo sapiens
  misc_feature (1)...(451): n = A,T,C or G
naagcggcccccnnnacaaagggacttcgngcacggaccgncngnggaattctgcctgtgccagccagcttggttgcccccacgcctcatccattgcttcattcttttattcaacaaatgtgtctgcttcttaaacacatatattgtgtctggcaaggtgatcctgaagggggggaagaggcgtgtcctcaagccaggctgagagggtgagagaattgggagagaagagaaagccagtggtgttctgagcagcagaagccaggacccagacaaaggctcagcccgctcccaacctgacagcctggggccaccccgggcatgggatggcttcctactgtcaagtgcctgctgtgtgccaggcacagggccaagggtgtgggatgcagccatgagcaagacagcgctcccgatacagccagaatccatgggcactggctgtgcccaggctggg

SEQ ID NO: 28038 - DNA, 550 bp, Homo sapiens
  misc_feature (1)...(550): n = A,T,C or G
acttctatgtagcctaaatgaaccataccatacccatattccctctgtccttctgcaagcagtatttcagggggangcccgcacgcccccccaattgatggacatcagcattagacggcggaanncngcacagaaagaattaaacccactaattncatctgattactaattgttaaaaaaaataaaaaaaaaaagatagtttctatccttctatccatgccaaatactttcaaaatttgtacatgaccatccagacatccatctctcctgtagggctcagctctctgtcctctagggtaaggctggctgggtattcttgcaccctgtgctgggcaggccacacttcaccaggccccccaggagccccaccaggaggcaccgcatgatctccatattctacacgcgtaaactgagacacagaagctgatcaccttgctcggggtcctgtgactagtaggagtggggctggggtcgcgagccaggcagagtggggtttgggcctctgccctgaccagcctgcctcctggtagttgcctccctattcaggttt

SEQ ID NO: 28039 - DNA, 448 bp, Homo sapiens
  misc_feature (1)...(448): n = A,T,C or G
tgggccgnnnnncaccgggacttgngcancgcanagncnggnggaattcgnatttagcccaccatcttgacctaaccttctctttctccacttttaatgtctataaataaccatctactaatctacttataatatgtctaacgatggatcatttctctcctcctcatcttcttcatcatcgtcaccagtagcagtagtactatttcgtgattgagggatcaccacagagtaagaagtgctcacaaaaatgttccatcaacatctcaaataatgagacagaaaaatcaaggcatggcttcatttaaaaaatgtaattgagagtatgaaatgtactagctatgtaccttctcagaccactttttttgagacagggtcttgctgtgttgcccagggtgcagtgcagtggcacgatcatggcccattgtgtgacctcctcacacctcttcag

SEQ ID NO: 28040 - DNA, 448 bp, Homo sapiens
  misc_feature (1)...(448): n = A,T,C or G
gagggggcnnnnnnnaaccgactgcagagctncgtcggngcaannncgngacctggccagctgccgcgactgggaggagcgccggaacgccgaggcccagcaatccctctgtgagagcgagcgggcacgagtccgggctgcacggaagcacatcctggtgtgggccccgaggcatagcccccctccagactggcatctccctctgccacaggagaaggacgagtgacaagcatccctgccattggcctgagcagcttcctcagtctgtttcaagttgctgttgcacagccctggggactgtgaccagcctacacagtctggagggtccctgtgagctcttgctcacaggaacatggagcaggacattgctagccctactttgccacccctcacctgcatgcaagataccctgacactgcgatgttctgcaggacaattgcaccgctat

SEQ ID NO: 28041 - DNA, 489 bp, Homo sapiens
  misc_feature (1)...(489): n = A,T,C or G
gggggccggggnaatcgagaatagaggcccnttgcnggaattccttaccctttcacacagatcacctgcctgccgcagggctgatgaggatgggtgaggagcgcagccactgggtgtcatgcactgtgggggttctcccaccttctgcccctcctcaggttccttgctgcttctctcctctcccaactgtggcacgctgagggctcaggcacaggaccgctcctctggggcagcctccaataacccttggacaacctccactttttcatcttcagccctgaccactccctggggcccatagccttacatccatctgcccccagcccaaacacttctgcaaacactagaaaaggaggtagcccgtgtgccctcctgcaccgcctcctccactcctgtcttggagaggctttcccgtgggcccagcaacccccttacctttggcacttgccctgattctctggccagcttcctacaacctctccttttcan

SEQ ID NO: 28042 - DNA, 490 bp, Homo sapiens
  misc_feature (1)...(490): n = A,T,C or G
cggcggctnnnnnnnaatcgagattcataggccgtgnggnggaattcaggatcaaggtgaaaaggagaaccccatgcgggaacttcgcatccgcaaactctgtctcaacatctgtgttggggagagtggagacagactgacgcgagcagccaaggtgttggagcagctcacagggcagacccctgtgttttccaaagctagatacactgtcagatcctttggcatccggagaaatgaaaagattgctgtccactgcacagttcgaggggccaaggcagaagaaatcttggagaagggtctaaaggtgcgggagtatgagttaagaaaaaacaacttctcagatactggaaactttggttttgggatccaggaacacatcgatctgggtatcaaatatgacccaagcattggtatctacggcctggacttctatgtggtgctgggtaggccaggtttcagcatcgcagacaagaagcgcaggacaggctgt

SEQ ID NO: 28043 - DNA, 461 bp, Homo sapiens
  misc_feature (1)...(461): n = A,T,C or G
nctaganncccctcgtagacactagtccatgcggtggaattcgtagctggctaaagacttgttttattaatgctccacaggagcagagacagacagagagacatagtgagccttgaaccaaacacctgtattccaacattttacacagcggtctgggcaccctgtgcctaggagagccagctacgtgtctacctgagtctgacctgggccaggggctgttatcttgggaaagccagaatgtcattaagaaagggacaaataggcagttgcttgtgtagcaaggcagccaccaggttgctcaaagggggttctgcataaaccaacatattttgttgttgcttccagggcagcagaagaagcctttgtaaatgacattgacgagtcgtccccaggcactgagtgggaacgggtggcccggctgtgtgactttaaccccaagtctagcaagcaggccaaagatg

SEQ ID NO: 28044 - DNA, 491 bp, Homo sapiens
  misc_feature (1)...(491): n = A,T,C or G
ccccccgcccnnnnnaattgagaatcgtagaccctaggccgagnggngaagtcactgagcgctgaggccggccaggcccgacacctacactctcaccagctttggcacccaccaaggacaggcagaagccggacaggggcccttccccacaccggggagagctgctcggacaggccccctcccggccgaagctgtcccttaatgctggtccttcagaccctgcccgaactcccacctctccatggcctgcctagccaggctggcactgccactcacactcggccccagggcccaggagggacagtgcctggagcctgggccaggcccagcccatctgtgtgtgtgtatgtgcgtgtgatgctacctctcctcccgtccctctccaggggccccgcatacacacggccatgcacgcacacactgggcctgggccagggccccagagctcctgcctgagctggaccttatgcaaacatttctgtgcctgctgn

SEQ ID NO: 28045 - DNA, 451 bp, Homo sapiens
  misc_feature (1)...(451): n = A,T,C or G
ggagccggcnnnnnncaacggatcgagcntcatcgtctggncgaattcctgacatgaaaagatctccaagacagtgttaagtaaagaaagcatagtgtagagcaacatgtacagtgtttgtgtaaaataaagccttacaaaaccaaactttatatgaaaatgcttaagaatgtctggaaggcgacatgcctaactgatggcaggggttacttctagggagggacggaggattgggggaaagcagtcaggaaggaggcttttgtttttcacttgaaataatgaatttgcttcatattgtttacagtgtcagtgcattttcatgaatattattacaacaaaataagcaaaatcaaaaatttttccaatttagaaaaagcaagatgtcattcttcttctctcactgcaagtacagaaacgtgggttgaaactgcagctcttttttctgcaactg

SEQ ID NO: 28046 - DNA, 462 bp, Homo sapiens
  misc_feature (1)...(462): n = A,T,C or G
nttagaaaancactgatgaccactagtccagagcggnggaattcgtggaagtgacatcgtctttaaaccctgcgtggcaatccctgacgcaccgccgggatgcccagggaagacagggcgacctggaagtccaactacttccttaagatcatccaactattggatgattatccgaaatgtttcattgtgggagcagacaatgtgggctccaagcagatgcagcagatccgcatgtcccttcgcgggaaggctgtggtgctgatgggcaagaacaccatgatgcgcaaggccatccgagggcacctggaaaacaacccagctctggagaaactgctgcctcatatccgggggaatgtgggctttgtgttcaccaaggaggacctcactgagatcagggacatgttgctggccaataaggtgccatctgctagccgtgctggtgccattgccccatgtgaagtc

SEQ ID NO: 28047 - DNA, 443 bp, Homo sapiens
  misc_feature (1)...(443): n = A,T,C or G
gagcggcnnnnnnaaccgagctacgacaccagcgggcaannccgagacctgcgcaagctggcggtgaacatggtgcccttccctcgcctgcacttcttcatgcccggcttcgcgcccctgaccagccggggcagccagcagtaccgggcgctcacggtgcccgagctcacccagcagatgttcgactccaagaacatgatggccgcctgcgacccgcgccacggccgctacctgacggtggctgccatcttccggggccgcatgtccatgaaggaggtggacgagcagatgctcaacgtgcagaacaagaacagcagctacttcgtggagtggatccccaacaacgtgaagacggccgtgtgcgacatcccgccccgcggcctgaagatgtcggccaccttcatcggcaacagcacggccatccaggagctgttcaagcgcat

SEQ ID NO: 28048 - DNA, 477 bp, Homo sapiens
  misc_feature (1)...(477): n = A,T,C or G
ggggnatcgagacctctagtcactgtggnggaattcctctgctgtggcaggaaaaaagtttgagtcaagacagaacaacaattctgtgaatttaaagtggagggtaggatggttctggggcgcagttgaaggggaagaagtacacatcactgaatgaaggagtggaagcctatggtgaatggcagggtttggccatgaagcaaatcagatttggattttacggacggtcactcagtgaaactgacacgcctgcaaagcgggaaatggaggacgaataaacaggtgatgtgttccagcagcagacaggagggccttctaagaacacacctgctcctttacccaggacctcttcctacaactccagcagacattctcatgtagaaacccacaatgtgatttcatcacattctgactccacattctgacaccacattctgactccacattctggctgctgacattgcagtcccagtcaan

SEQ ID NO: 28049 - DNA, 489 bp, Homo sapiens
  misc_feature (1)...(489): n = A,T,C or G
ggtgcggggnnnnnnnaatcgagaatagtgtcactgtggnggaattcggacttagtgttatgcaaggtccttacagcgaaacggccagctttgcagccctctcagggggcacgctgagtggcggcattctctccagtggcaagggaaaatatagcaggttagaagttcaagccgatgtccaaaaggaaatttttcccaaagacacagccagtcttggtgcaattagtgacaacgcaagcactcgtgctatggccggttccataatcagttcctacaacccacaggacagagaatgcaacaatatggaaatccaagtggacattgaagccaaaccaagccactatcagctggtgagtggaagcagcacggaggactcgctccatgttcatgctcagatggcagagaatgaagaaaaaagtagtggtggcggaggcagtgaaaaggatcccccctgcagacaccaaagctgtgaacagaaagactgcctgn

SEQ ID NO: 28050 - DNA, 487 bp, Homo sapiens
  misc_feature (1)...(487): n = A,T,C or G
ggcggatccggggnattgannaatcggagaccctagtcagngngcnggaattctcaccgccttcggcgccagcctcttcatgcccccaagccatgagccgacagcggatgtaaactacatcgtcatgctgacatgtgctgtgtgcctggtgacctacatggtcatggccgccatcctgcagaagctggaccagttggatgccagccggggccgcgccatccccttctgtgggcagcggggccgcttcaagtacgagatcctcgtcaagacaggctggggccggggctcaggtaccacggcccacgtgggcatcatgctgtatggggtggacagccggagtggccaccggcacctggacggcgacagagccttccactgcaacagtctggacatcttccggatcgccaccccgcacagcctgggtagcgtgtggaagatccgagtgtggcacgacaacaaagggctcagccctgcctggttcctgcag

SEQ ID NO: 28051 - DNA, 493 bp, Homo sapiens
  misc_feature (1)...(493): n = A,T,C or G
ggagcnggnnnnngnnnaatcgagaaatcgagnaactctaggccagagtgcgtggaattctggcccgctcaccttcctcacccctcctctgacccacccatggtgccagggccgaagctgacctttagctccctcctgccccttgctagggtctgagccaagcccctcgactccctcactgtgttgacacttggcactttgctggccccgagaaaggtcgatgacacagccgcaaatctaatccacgtagttcccatttactccttaatctgattgatgttccctcttgcactgaataatacatgcctctctcaggtaagccattttataaaacaagaagataaaaagcactgttgaggcagtgtttgcttttgccgagctggtgtccgacagctccctgggtgtccggggtgggagagctgttgacagaagctctccgggccctcaggggcttagatcccacttgagtcgtaagccttcttgcttttgataa

SEQ ID NO: 28052 - DNA, 417 bp, Homo sapiens
gatcctgaccactgcctgggctaggggtgtcacttcctagaaagggaagggaactctgggtctaacggagtccactcctgggcccactgtgcctctcccctcagtgtcccttctgacagtgactcctctctctccagcgctgcctgtttcttccccctcctctaagctactcttccttgagccctccctggctgcttcctctcgctcatccgtcagatgcaatctgtgggccgcccctctcccctggccgctaagcagcctccattgatttccgctcgtgtttataggatttccacttagccgtgatcagtagttaagcacaggaaaatcccttgccaccccccctcccttggtcgatgccattgattctgccagcggctcctaaaccgccttacagctgagttagaagatgaagag

SEQ ID NO: 28053 - DNA, 488 bp, Homo sapiens
  misc_feature (1)...(488): n = A,T,C or G
ngcggccggggnnnnnnaatcgagaatatagtcactgtggnggaattctccaatgaggcctgccttttgtccttggtagtaggcagtccacagtgtaaccagctacaggggaagtatttactttgatagccacttgaccttgatcaagtcaggtgactcatttctggataacatttttgagagtatactgagccaggcaccttgaggatacgaaagtggattatagtttccattctggagaaactcacagtccagtaagttaaacaatcacaagaacaagtttccagcaatgagagtgattacagccactgagtggtgaaatctgagaaatgcaaagcctgccgcctataaatacctacatttatcgcctgggcatatacctaaaattccaccatgagaaatatatttatatgaaattagaaactacccagaaattgtgcgtccaaataaaaattcccacaagaaataaggatggctaatagttttaa

SEQ ID NO: 28054 - DNA, 487 bp, Homo sapiens
  misc_feature (1)...(487): n = A,T,C or G
gcgggcccnnnnnaattgaaaatcgtagaccctagtcagngnggnggaattcggaaggagtcagagagctgtgactgtctccagggcttccagctgacccactctctggggggcggcacggggtccgggatgggcaccctgctcatcagcaagatccgggaagagtacccagaccgcatcatgaacaccttcagcgtcatgccctcacccaaggtgtcagacacggtggtggagccctacaacgccaccctctcggtccaccagctggtggaaaacacagatgaaacctactgcattgacaacgaggccctgtatgacatctgcttccgcaccctgaagctgaccacccccacctacggggacctcaaccacctggtgtcggccaccatgagcggggtcaccacctgcctgcgcttcccgggccagctgaacgcagacctgcgcaagctggcggtgaacatggtgcccttccctcgcctgcacttct

SEQ ID NO: 28055 - DNA, 487 bp, Homo sapiens
  misc_feature (1)...(487): n = A,T,C or G
agaaggggnnnnnnnnnttcgagatatctagtccctgtggnggaattcgtctgctcctctgattccttcaacgaggacatcgctgcctttgccaagcaggttcgctctgagaggcccctcttctcctccaacccagaactggacaatctggtgagacccgagccctcccccacaccccctcctccaatgggtctccttccctgacgccccatccctggggttggtggggggggtgcagagagaaggccacctggtccatgtccccaaaccgtcatgattgttgcccacgtgccgtgtggtacagcctagagtctgagaacgggacccatggcccgagttcaaatcccagctctgccactcaccagctctgtgacccagggcaagtcactctgcatctccgtgccttggtgtcccgtctgtgaagagtggctggtagtaatgtctgtcttggagggctgctggggggtttaatgagtgaatgcgattn

SEQ ID NO: 28056 - DNA, 485 bp, Homo sapiens
  misc_feature (1)...(485): n = A,T,C or G
cggggtannnnnnaatcgagaactataggccctgtgcnggaattccagggatacctcacagcttggccatttgaggcaaaggcagcttcccgagctgatgctaaagaagacagactttcccttcctcccagcagcagcagtgcagagcccgcctggagggatgtgggggctgtgcagggtgcagcgctcaggtggatcctgggaagcagcctctggatgctgagtggagggagccactgagcacagcaaggcaccaaagcccctggagaaaccgccagggcgaggtgcgaccatcatcaggatcaaagcagacggggcgtgggtggggaggggctctgggaccagaccccccacactactgcgtctttgtttctatcagtctttgtagaagcaggtggtggtggaaattccagcaggtgggtcccgcagaggccctgaggcctcacttttcggatcttctgtcccagatcctgctccctccctgg

SEQ ID NO: 28057 - DNA, 489 bp, Homo sapiens
  misc_feature (1)...(489): n = A,T,C or G
tgccgatccnnnnnaattgagnaactgaagtccctagtcagngtggnggaattcatgatggggagacgcctggaagctcacagaacttgggtctggctggctcctgcccgtgacgccttgcccagcagcaaggtgcgcaacatggctgccagccccgcctcccacccccaccccgagtcctgagctcactttcaccttctccatcccctgccgtgggggccacagccacacctcaccgcccagtccagctgtctccagaaggggacaggcagtccgcggtctctggacaatcaactcaaggtacgcccactgcaaggcctccctcccaccgcggcccctgcctggccacctggcctctctgcaccagggtgacaaggggtcctcgtctgccccccaatgctccagggccagtcctaaggagctgagggtctgaggacgcagggagggtggaggtgtcctgaggctgatggacagtgaccgccactggcn

SEQ ID NO: 28058 - DNA, 467 bp, Homo sapiens
  misc_feature (1)...(467): n = A,T,C or G
gcancttcnataccgaaatcctctntganggcnctcgnannancagagngggaaaaagggagagttcaggacacctggtccccagctccccattgcctggggcagcagtttctcaatttctccttgtgcctcccctcttccaggtgccaaatagccataacctggtcttggaactgttatgtggcctctctggggtccaggtttcctggtcaagcctgggaatgccagggaggaaagggggtctggctacagcgaccctggtcttaggcaaggggaacatttctccctggagagtcaggtcctatcctgtgctgccctgtctgcccagcccagggcgatgcctggaagcctactgacattgcagggagtcagcctcgcccccaccccctactggttttccaatgttttgactggagggcaaaattttactactactcatctttttggagaccagggctgccctgctg

SEQ ID NO: 28059 - DNA, 447 bp, Homo sapiens
  misc_feature (1)...(447): n = A,T,C or G
ngggttgtagacatctgtccangtggaggcctttctgctcagcgacactgcgtgggacgcagagcttgcagtggtgagagagcagcgcaaccgtctgtgtgaccttctgggcgtacccaggccccagctggtgccccagcctggtgcctgctgaagccagtcctggagcccatacctcacccctgcctggtgaggatgtcttgttcctgagggaggccggtgtggaaagcctcgcacagtggtgcctccagctgttgaagggtagcgctggcccttggaggctggcactagctgacagcttttcctctctgcacctgcgctctggtgacttggggtggacgcctctgccttcacttgaacacaaatgtgcttcctataaaatcatgtaccaagaanaaaaannaaanaaaaaaaaaaaanaaaaaaaaaaaaaanaaaaaattggcg

SEQ ID NO: 28060 - DNA, 477 bp, Homo sapiens
  misc_feature (1)...(477): n = A,T,C or G
gagagtgcccaaatggncccctcgatagatgcatattagtcagngcggtggaattcagaaggataagcgcagagagcaaacgttgctctctagcctcccccaacctccagttcctctcttgcttcccctgctggccaaacttcatactgtccaccaggggagactgccccccgactctgctaggccctcactaacgcggtggtccccgacctaaggacgcagatgcacttcccgaggcacatgcgggcgcaacaaggtaactgcgctccaggcgtggaaccccagtcctgagcgatgtgaaaccaaccccaagcgggctgtgctcacagtttgggaaaaaggaatgtctctgatccccccatatccacccctcccccaacccttgaggacagattcgggtaccgcaaaaccgccaggcacagaagggaggagagctgggacggacaggctactcccggggaggggatcacctccacg

SEQ ID NO: 28061 - DNA, 477 bp, Homo sapiens
  misc_feature (1)...(477): n = A,T,C or G
cccccgcccccnnnnnnattgagatcgtagacagtgcggcggaattcggnggagaagctgaacctcggcactgactcggacagctcacctcagaagagctcgcgggattctccttccagcccatcgagcctgagctcccccgtccaggaatccactgctcccgagctgccttcggagacccaggagaccccaggccccgccctgtgcagccctctgaggaagtcacctctgaccctccaagatttcaagttcctggcggagctgggccggggtcattttgggaaggtgctcctctccgaattccagcccagtggggagctgttcgccatcaaggctctgaagaaaggggacattgtggcccgaaacgaggtggacagcctgatgtgtgagaagcggatattggcggcagtgaccagtgcgggacaccccttcctggagaacctcttcggctgtttccagacaccggagcacgtgtgg

SEQ ID NO: 28062 - DNA, 485 bp, Homo sapiens
  misc_feature (1)...(485): n = A,T,C or G
gcggggtnnnnnnaatcgaganatctagtcacngtggnggaattcgtagcagatttgaaatgggcaaaggtttggaatgtgccagcaagggcagcctggtcttcctgcttgccagggacccactacaagcaggctgtgccccagagaagaatggagaacgcagataactgacgggggctccaagaagcgagaaacctgggcggacctcagcccagcccacatcccagaacccggaggccaggggcttggccaggtggaggtcggccctagccctgtgagcgtgagactcggccaccaagctttaaggtcgtcgttatgcagcactgttgtggcaaaagccgactgatacacctgccctggcacttggggatacagggaaacggatgtggtgaattgaagatgatgccacacgtcccctggtgtgccgaggtaaaggcttgggaacgctgggaagagggaggaaagagccagaaggttagcgcgag

SEQ ID NO: 28063 - DNA, 456 bp, Homo sapiens
  misc_feature (1)...(456): n = A,T,C or G
aatgatgtcctccgaaanncnnatttgatgtcttctgaccgncnggnggaattccactgccgctttgcttgcccacctgtttgctttttctcacaggttttatttatttgaatgatcgttgcatttgaatactgtagccatggtgagtgagcagtagaagacttcctttctgcaccttcatagttaagggttcatcttctcaagaaataaagttgggctgggttgtttcaattctgtagatcacctagaaactaggtaacaaggcccttggatcacaatgagcacattgcaggtctttggaaatgctgggaaggggttacattcaagtaactgctgacgtccttcctctctgtcagacccatgttggcctgtaattatatttttctgaatctaaaaacaaatagaaatttctgatatcttttcagtctccttcttttctttccattcatcacttag

SEQ ID NO: 28064 - DNA, 449 bp, Homo sapiens
  misc_feature (1)...(449): n = A,T,C or G
gggccggnnccccaatgagatcatganaccctgggaanncnngaggcgacactttgatgatgggaggaggatgaaggctagatgacttggagaatgccgaagaggaaggccaggagaatgtcgagatcctcccctctggggagcgaccgcaggccaaccagaagcgaatcaccacaccatacatgaccaagtacgagcgagcccgcgtgctgggcacccgagcgctccagattgcgatgtgtgcccctgtgatggtggagctggagggggagacagatcctctgctcattgccatgaaggaactcaaggcccgaaagatccccatcatcattcgccgttacctgccagatgggagctatgaagactggggggtggacgagctcatcatcaccgactgagctggagtcatcttcctgcccttgccccatgcccaattttcattctcactt

SEQ ID NO: 28065 - DNA, 461 bp, Homo sapiens
  misc_feature (1)...(461): n = A,T,C or G
aatgataacatggcaananccntatttaagcattcagaaagacnggnggaattctactgactgaataaccacttttaaaggaatgtgaaatttaaataatagacattttgagatatacaaatatattatatatttttctgagatttttgatatctcaatctgcagccattcttcaggtcgtagcatttggagcaaaaaaaaaaaaaaaaaaaaaaaaaaaaaaaaaaaaaaggggtttcttttttttgcaaaaaaaaaaaaaaatttttttttttttttttaaagggccctttgatatagaaaaaaaatcaggggggaaagctgggcctatttttttttgtagcacaatgtaaaattctctattttcttaaccaaaaactttttttttatattagtaaaatgttatgtgagaaaaaacacaaatgtgggcgtccaaaaaaaaataacacaccccccccccc

SEQ ID NO: 28066 - DNA, 452 bp, Homo sapiens
  misc_feature (1)...(452): n = A,T,C or G
aggcaggggnnccccaatgagactaactgatatcctgnggaanncaggnnnanacagaggagggtcagccatagaagaggagaggatttctctggggccagacagtgtgttgtttattccacagagactccaagcaccccaagtactgcatcgagctgagcgcccagcctgtgggacttatccgggtacacaaggtcctagtggtgggcagcacccaagacagcctgcatggcttcacccacaaggtgcagcccccagcaagcagcagcccctccacgcctatgtccctagcccccacttggcaagagagtcctctggcttccccaccccagaaaccgttctttccactgtaagccctgagccctccacagacgctggctgttccctgccaggggaagaagctgtggacagtgcagatgcccgcagccatcctgaccatgaacctcctggag

SEQ ID NO: 28067 - DNA, 456 bp, Homo sapiens
  misc_feature (1)...(456): n = A,T,C or G
gggcagggggcccgcactgatnccaactgagtatcatcgcacagncnggnggaattcggcgtcggaatcaggaaatcagaagatagcagcttggcaccacgtggcacacatcccctatacacacactggatctcattccagcaccgcggagacctgggcaatgtccgtgctgatgctgacggccgcgccatcttcagaatggaggatgagcagctgaaggtgtgggatgtgattggccgcagcctgattattgatgagggagaagatgacctgggccggggaggccatcccttatccaagatcacagggaactccggggagaggttggcctgtggcatcattgcacgctccgctggccttttccagaaccccaagcagatctgctcttgcgatggcctcaccatctgggaggagcgaggccggcccatcgctggcaagggccgaaaggagtcagcn

SEQ ID NO: 28068 - DNA, 450 bp, Homo sapiens
  misc_feature (1)...(450): n = A,T,C or G
attgagacatctgaccgngcggttggattctcctcaaatgtcaccgatttcttcctatgcaggaaatgagcagacccatcaataagaaatttctcagcctggccgaaaatggttggccccacgaagccacgacaactggaggcaaagagggttgctcaacgccccgcctcattggaaaaccaaatcagatctgggacctatatagcgtggcggaggcggggcgatgattgtcgcgctcgcacccactgcagctgcgcacagtcgcatttctttccccgcccctgagaccctgcagcaccatctgtcatggcggctgggctgtttggtttgagcgctcgccgtcttttggcggcagcggcgacgcgagggctcccggccgcccgcgtccgctgggaatctagcttctccaggactgtggtcgccccgtccgctgtggcgggaaagcgcccn

SEQ ID NO: 28069 - DNA, 469 bp, Homo sapiens
  misc_feature (1)...(469): n = A,T,C or G
gagagccccaatgagacattagatagagcgctgtaattcgccctggtgcagacaagacttagccatcagcatcagcaaagccatcaacacccaggaggcccccgtgaaggagaagcacgcccggcgcatcattctgggcacacaccacgagaagggggctttcaccttctggtcctatgccattgggctgccgctgcccagcagctccattctcagctggaagttctgccacgtcctccacaaggtccttcgagacgggcaccccaatgtgctgcatgactgccagcggtaccgcagcaacatccgggagattggagacctgtggggacatttgcatgaccgctacggacagctggtgaatgtctacaccaagctgctgctgaccaagatctccttccacctcaagcatccccagtttcccgcgggcctggaggtgacagatganggtactgagaaggcagctgggacc

SEQ ID NO: 28070 - DNA, 453 bp, Homo sapiens
  misc_feature (1)...(453): n = A,T,C or G
tgagtnnccaggcgtncccccctgatantccctgngtatcctcgcacangcggnggaattcgaattccaccacaggcaccttctcatctccggagaagctgaaagggcctgtgtccctgaaagggccagcacatcactggttttctaggagggactcttaagttttctacctgggctgacgttgccttgtccggaggggcttgcagggtggctgaagccctggggcagagaacagagggtccagggccctcctggctcccaacagcttctcagttcccacttcctgctgagctcttctggactcaggatcgcagatccggggcacaaagagggtggggaacatgggggctatgctggggaaagcagccatgctccccccgacctccagccgagcatccttcatgagcctgcagaactgctttcctatgtttacccaggggacctcctttcaan

SEQ ID NO: 28071 - DNA, 448 bp, Homo sapiens
  misc_feature (1)...(448): n = A,T,C or G
ggagtgcccagntgnncccccctagtaccnctgatagcttgcggaatncccggggnttcctgcttcaacagtgcttggacggaacccggcgctcgttccccaccccggccggccgcccatagccagccctccgtcacctcttcaccgcaccctcggactgccccaaggcccccgccgccgctccagcgccgcgcagccaccgccgccgccgccgcctctccttagtcgccgccatgacgaccgcgtccacctcgcaggtgcgccagaactaccaccaggactcagaggccgccatcaaccgccagatcaacctggagctctacgcctcctacgtttacctgtccatgtcttactactttgaccgcgatgatgtggctttgaagaactttgccaaatactttcttcaccaatctcatgaggagagggaacatgctgagaaactgatgaa

SEQ ID NO: 28072 - DNA, 435 bp, Homo sapiens
  misc_feature (1)...(435): n = A,T,C or G
nattgatgacctttagaccancnggnggaattcgtgaaagaagactgctgttaaacatgagttcttagttattggttgttttcatcttttaaaattttctgatttgaggagaggcagatagacttggttaaaatgatggattataaatatgtgaaatgtctgaatgagatcctttaacaaagaaaataaaaggaatgatgatgcttttttttttttgtatatctaggaatctttatttctgaaaggatttattttaataaagatggggtgggaatgactttttatattcctgcctagaattttttctgtaaattaatactttaaaggttgccacaggaaatgacttataaaaaggtttttattatgcttgcttatataagggaggatttttaaagcctttattttattctgtgatgggaaacactataaaaaacg

SEQ ID NO: 28073 - DNA, 469 bp, Homo sapiens
gagagcccccattgagacattagatagagcgctgtaattcatggcaagtcagggctgccgcgtacagttaggcaggatgggtactgcacaagaatggcaccttttaagggcacaccattcactttgtaggcttacaagtgtatgccaccacttttctaacagatgacaagagtgttcagggagaggtgtttcttcaccttttttttactcttctcaaaagtgcagcctggtgtaccaatggccccacagaaaccacagtaggtagttcaaacagaaaggaatttaatacaggaaacttggtgccgctgaaatcatggggcgtgtgggtggtaagagtggcgcgctgggattgagactcttgagtacgagtttgcagcccccgaatgagctcctagctagagttcagcgggatgccactctggcttccggcagtgccttgactcatttggtcactcctgggaagctactg

SEQ ID NO: 28074 - DNA, 473 bp, Homo sapiens
  misc_feature (1)...(473): n = A,T,C or G
gcccgccccggggnnnttagantttcgagtccatatccatgtggtggaattccacactagacatggcgcttgccagcgtgttggagagaccgctaccggtgaaccagcgcgggtttttcggacttgggggtcgtgcagatctgctggatctaggtccagggagtctcagtgatggtctgagcctggccgcgccaggctggggtgtcccagaagagccaggaatcgaaatgcttcatggaacaaccaccctggccttcaagttccgccatggagtcatagttgcagctgactccagggctacagcgggtgcttacattgcctcccagacggtgaagaaggtgatagagatcaacccatacctgctaggcaccatggctgggggcgcagcggattgcagcttctgggaacggctgttggctcggcaatgtcgaatctatgagcttcgaaataaggaacgcatctctgtagcagct

SEQ ID NO: 28075 - DNA, 443 bp, Homo sapiens
  misc_feature (1)...(443): n = A,T,C or G
aactgatgacactgaggacnctggnggaannctgcttgagtccaggagtttaaggttgcagtgagctatgattgcaccattgcactttaggctggtccacagagcaagaccctgtctcagaaaacagaaagaaagaaagtcaaagaaataaagtcaaagacaagaaggtgatacagagaagacagaaaaggaggaggagagagactgacaggtacacaaatcagagaagtcccagagataacaaaaacacaaccacagagatagggagacgtaagccggagaaagacccagagattcgcatagaaagcaacgtggagactcagaagcaagcacagcatcaaggaatgatcaataaaaagaaaaaaaaaatatttcctgaggacttccaagtacaaggccctgcaatctcaggccacttctgtcccatctctgccttcagaggg

SEQ ID NO: 28076 - DNA, 472 bp, Homo sapiens
  misc_feature (1)...(472): n = A,T,C or G
gggtnnacgccccccgtagtagacatctatagagagccgtggaanncncagctggcaacatgtgtgttggtttaagaatgatttctagcttttgtggctgatattacaacacccaaaatccctttgtacaggcttataatatacatcttaataaaaacatgacagattttagttacagattgtgtgactcaagaacatagaagcatttatttctaaattaaaaattaacattatgtgatagtgaaacatgggtttttgtatataattctatgcattcaaaaagactcattatgtgggtttctgttaagacattctggagaaaaaccgaacaattggtaataaaaatatacaactatgtttaaatggaatatgtatatgtgtatatacacatatatattctgcatttgggtgtttttgggagggagatggagtctcactctgacacccaggctggagtacagtggtgtgatct

SEQ ID NO: 28077 - DNA, 474 bp, Homo sapiens
  misc_feature (1)...(474): n = A,T,C or G
gagggcccccattgagaccactagatagaagcacccttagnccagngcggnggaattcgtgactgccaccgtggcttggcaggggctgggcagcctgggtcctgaggaaactcagcggacatccactgagggtcacacaggcccctaagcagccctgacactaagccaccctgaagccctgggcgtccgaggagggggctgtcggggaacccgggaagaacaataggaggggggcctggttcctagcactcagccaccttgcttgacgtaattctgagaggaaatgggcaagaactctgtttgtcggccacaaggtgtcagcagcgggctggccaggggatggctctgcgagcaggcccaggaggagccgcagcacgctgagagggagttgctggttgctctttgaagttcctagtttgcagagactgcttttcttattagtgggggcctgatgattactataccaaaagaccc

SEQ ID NO: 28078 - DNA, 467 bp, Homo sapiens
  misc_feature (1)...(467): n = A,T,C or G
gagggggccnattgagacattagttagagcgctgtaattcttccacagaagccagcatccaaacccaagccaaaccctggaaaatagctgctaaattgacccaggatcctccgtccttcagacaggcctcccagcagaccccctcttcctgtggactctggggtgagggatgactgagccctcatggccaaaggagaagcttctggggaactgaggcagacggcagcccagtcaggcagagaccataggagcgacgggccctgtggttcgatcttactgtaactttttacattcttaaaaaacaaaaagcacaattccacatacacactgtctggaaagcacagccagacagccagcctagggcatctgagtccagaagaggcgctggggctttatctgttgcagggttcttgtattgtataatgtgctggaggtgactcaaggctcctcactttgtagggaggaga

SEQ ID NO: 28079 - DNA, 472 bp, Homo sapiens
  misc_feature (1)...(472): n = A,T,C or G
gagcagaggcctttgagcccctcgatagtagactattagtccangcggtggaattccactgatggagcacataaaacattcctgaaatgtggggccctgcagggcctctacaccacggtggactttggaacaggcagcaacatgacagatgctttcctaagccagaggaagtgtgagcccaaaggacccttgatcaattctgaattctatactggctggctagatcactggggccaacctcactccacaatcaagaccgaagcagtggcttcctccctctatgatatacttgcccgtggggcgagtgtgaacttgtacatgtttataggtgggaccaattttgcctattggaatggggccaactcaccctatgcagcacagcccaccagctacgactatgatgccccactgagtgaggctggggacctcactgagaagtattttgctctgcgaaacatcatccagaagtttg

SEQ ID NO: 28080 - DNA, 484 bp, Homo sapiens
  misc_feature (1)...(484): n = A,T,C or G
cgcccgcaagagccccctngnnaactgaagactctaggacagagcggaggaattccagggagcagcagaaccagagcagaagctgagctggagatgccctgatggggccgaggtggaggctcaggcctgggatgggcagttggaccagcaggtccaaaacagcataagccaaggcaggcagcggtcttggagatgccctctgacctgccgtggactggagcctctaagatgcttcctcctgaggctggagctgatgactggcatccttgggatgtaacctgcgtgcagccggcaggtgaggacgtcatgcagggcaggagctcaggccccccagagggggtcacacctggccgggccactgccctgtgaacatcctttcaagggaccctttctcttgcttgtttgtggccccgctagactgtaagctcttgaggacagagccattgggaatgaatgacaaggtgagtctgggggcccatgaccc

SEQ ID NO: 28081 - DNA, 398 bp, Homo sapiens
gcagaatgggaggctggaccctgaggaagggcccctctcctggcatctgtctcttgctacctaagcctgtgcctctccctaaagagctgcctccctgctgccgagccctggtctggccacgagccaccactgcctcccgctgctgcccacaggtggtgccgccaatgggcagtgccctcaggccgaagcctcaatcccccatctgagccaggcctaatcctctaatagtgatggttggtttgtcctcccataactgcaggtggattccacctggggaatgaggctgcgtgtcgggcgtctgctggccctgagacatccagtcttccacactcaactgtgggatgggagggtggcgtggccttaccccatgaggctgtccaggctctggcacacagctg

SEQ ID NO: 28082 - DNA, 448 bp, Homo sapiens
attgatgactcttagacagtgtggccgtattcccactgggaaccagactgcagcctggcccatggctgttttcccaaggatcagttcctggagggaagggctctggccctgactccgctgtgtcccgagcacacgtgctgaccgcagcccgccgccctgtagttcttggctgggtctggaggtgtctgtggagcaccctgccctcaccacaggagcgtgagccacttctgcagtccacgctgaacatgggaaacaacctgaaaagcaggcaggcctcccggtcagggagcctctgctgtgctggcttcccatgaccacctcctcttgctgaaatattactgcttgaatctggagcagattgcgggtttataaaactgctttttatctgagaacaaacgggtttggaaattagtcgtcttttttccccactcccagagctgctcaagtc

SEQ ID NO: 28083 - DNA, 449 bp, Homo sapiens
  misc_feature (1)...(449): n = A,T,C or G
ggccggnccnccatgagatcatgagatctgggaaancgaaaactcagaaacatctaaaatatagatatgcttttgacaaagaagtaactgttttgattgcttacaataaattgagaggccccaaatagatatagcttacgaaatacaaaatgaagccatatctagtccttagttcagatctcaaatatttactcattaatgaacgatttttgatgggaatatatgacagtgttccagagtcacaacatgattctctaggctttcaattattttctctttcaaccgtaagagctattttagctgatttttattattattactctcttctgcttgtcagcctgagagtttgcataatgaaaacagccaatgtgtgtcatgaatcatttgcatataaatcctgacaaatccaacacagggctacaaaaactggtcgtatacaaaagatgggn

SEQ ID NO: 28084 - DNA, 453 bp, Homo sapiens
  misc_feature (1)...(453): n = A,T,C or G
attgatgccctnnnnnattgatgacccctagtcagtgtggtggaattccccccgagctcccccgccgtatggagacagcactgccaggtcctggccctcccgctgtgggcccctcggctgaagagaagatggagtgcgagggcagcagccctgagccggaacctccagggccagcgccccagctgcctctggctgtggccacagacaacttcatcagcacctgttcctcggcctcccaaccctggtcccctagatcaggacccgtcctcaataacaatcccccagctgtggtggtgaactccccacaaggctgggctggggagccctggaaccgggcccagcatagcctgccccgggcggcagccctggagcggacagaaccctcgccacccccttcagctccccgggagcccgatgaggggctgccctgtcctggctgctgcctcggccccn

SEQ ID NO: 28085 - DNA, 446 bp, Homo sapiens
  misc_feature (1)...(446): n = A,T,C or G
tttgagacctctgnctttcgaggcgatttcgaaggcccagttgggtgatagccggctgagcccggatgtggggcacctggtgctgaccaccctctgcccggccctccacgccctggtggcggacgggctgaagcctttccggaaggacctcatcaccgggcagcgcaggagcagcccctggagcgtggtggaggcgtcggtgaagccaggctccagcacccgctcccttggaaccctgtatagccaggtcagccgtctagccccgctgagcagcagccgtagccgcttccatgcctttatcctgggcctcctcaacaccaagcagttggagctgtggttttccagtctccaggaagatgcagggagctggtgggagcagttgacccaggcctcccgggtctatgcctctgggggcactgagggctttcctcttttccgatgggcac

SEQ ID NO: 28086 - DNA, 474 bp, Homo sapiens
  misc_feature (1)...(474): n = A,T,C or G
tggccggnncnccccncactgaggccctacgtagngccgngcaantcgattaagcaaaatgaaatgtgggtgaaaggagatgcccaggcctggagcgaaatcactttcttccctctccctagataactgtttaaagtgggtcatatccccagaaagtttctgtgttactaaaatagttgctcagtgtattataagaatatcacttgcagtgggcgctgtggatgaaaggaagtgagggagcccaggggacagcggatgagagctggagactcgggtttgcccacagagttattttaaccataaacacagcaggccgaggctgggcgaaacaaaataagacagaaaccaaacatttccagaataatagcgccgctctacaaccccacaaaataagacagaagccaaatactcccagaaaaacagcgctgcttcccaacccccacaaaatacgacagacaccaaacatccttagaa

SEQ ID NO: 28087 - DNA, 405 bp, Homo sapiens
  misc_feature (1)...(405): n = A,T,C or G
gtcttttgttcagcttttactggaaactgctgactaggaccacctgccctaaccaggaataaaggcaagacagcctgcagaccagtttgttttttcagctgtaaacagctgcctgggcaggcaggtgacacaaggcctctgtccccagggatgggacctgcatggtctgttcacccagggcacccacagtcctgaagtgcaggcccagggtctgtccagctgggatagggcataggtggcggctgggtgagatgcctgcctcagctgggggcctgggggaggcccttcttcaccatagatgtgaggaagctacccagctcctcgtcctgtgaggtccaggagaccagcagcaccttggtgcctgggtcctcacaacgggcggcggcctggaggatgacggactcn

SEQ ID NO: 28088 - DNA, 459 bp, Homo sapiens
  misc_feature (1)...(459): n = A,T,C or G
cgcccccattgatgaccctctagncctgtgatggcgtattcccacagactatgaatagcattttttagagtgcataacgtctaggtgcaaatctttatcatcactgaccacattagaatgcatttaatatagcacgcggttgaagaactgtcttaacgcaagacaaactgatagcaacattctgttgctttaaagtgaagtgggtccgtgacattctgcagctagtccactactccaaggtaactatcgacttggtttcagtgaatctattttgtttttaactacagcgatttattagctcagtatctacaaattacgtatattttgtgctactgtcatcgatgtgtaaactctgtttttatttgtatttatgcacttggatcccatttggagcctctggtcttttctgggataagtggtgtctgccgagacatctcccggctgtcagtggtcaggaan

SEQ ID NO: 28089 - DNA, 450 bp, Homo sapiens
aatggatgcccttagacctgtgtggccgaattcgcgcgtcccaaggcccaggatctgcgaggcgacttggggaaaacgcaggacctgctgaagctcacacccgtggaccacccagactgcctgccgctacaggatgccctccgcatctcccaggacttctttccggcatcagtgtggacattgaccccactggactgcagtcacagtggactcccaaggggcaggatccacctctgatgttcagtgaagactaccagaaaagtctgctagagcagtaccatctgggtctggatcaaaaactcagaaaatacgtggttggagagctcatctggaattttgccgatttcatgactaaccagtgtcagcccaagactaccccgtcggtcattctgttcctgccgtcctgtgaggagccccaagccaacaaggccacactggtgtgtctcatgg

SEQ ID NO: 28090 - DNA, 462 bp, Homo sapiens
  misc_feature (1)...(462): n = A,T,C or G
tgcncgtccnnnnnanaattgaaaactgangtcaattcgaaagngcggnggaattcgccacatttggaacttttgagtccatcttgagaagctcccaacataatcaagacctcacagagaaagctgtgaagcaaggggagagtgaggtcagccggatcagcgaagtgctgcagaaactccagaatgagattctcaaagacctctcggatgggatccatgtggtgaaggacgcccgggagcgggacttcacgtccctggagaacacggtggaggagcggctgacggagctcaccaaatccatcaacgacaacatcgccatcttcacagaagtccagaagaggagccagaaggagatcaatgacatgaaggcaaaggttgcctccctggaagaatctgaggggaacaagcaggatttgaaagccttaaaggaagctgtgaaggagatacagacctcagccaagn

SEQ ID NO: 28091 - DNA, 440 bp, Homo sapiens
  misc_feature (1)...(440): n = A,T,C or G
natcatgactgacgcaatngcggnggcattcggatatcaccgggtgggccaggctggtctcgaactcctgacctcaggtgatccttttgcctcggcctctcagagtgctgggattacaggtgtgagccaccatgcccggtctcagtacttttttgtttatgtctaagtcagttccaggaaggctgccaccatttgctaccaaaacaatccttacacaacaatagcaagtctccttccatctcctctattctggtccttgaaaccttatcaatggtgaggtcacagtcattgtttgttgttcggttgagaactgagggggtggggtaggaggaagaaggtctatttttaaaaatcacacacactaaaaaaggttcaggctctgagaacctgtgaaatcttgactaattttggctttccccatgggaacccaccagaaaagt

SEQ ID NO: 28092 - DNA, 451 bp, Homo sapiens
  misc_feature (1)...(451): n = A,T,C or G
nattgatgactcttagacctgtgtggnggaattcacctcgtgcgcgccctggagcacgagaagctgcagggcgtggagtgcggactgcgctaggcgcattggggtgggccaggccccaggacagccggagctcggcctgcggtgggggcgcttcctgtggacgctgcgcctcccatcgcccgggtgcctgtccttgtccagcgccaccaggctggaggcggagtgggaggagctggagccaggcccgtaagttcgcaggcaggggtgggtgtgggacggggctgcttctctacacagcctctacgctggccttcaccttcacccctgcatcggcggggaccctgggaccctccacgcagcggggcctgtggcaccgcgaggagtgggacccaccgaggcgcagaggcggcccgaatgcagccctggatcatgccctgaggagggtcngcgn

SEQ ID NO: 28093 - DNA, 455 bp, Homo sapiens
  misc_feature (1)...(455): n = A,T,C or G
attgatccccctnnnnnttttgttgtcccctagnccatgtggtggaattccccggctcgagcggctgcggcccttaccttgctgaccacgttctggacgaggccggcgcggatgccgtagtcccatgcgcggcagtcacagttggaggcgttgtcccccttgtccggaggggatggcaggggtggtgtgtcgcctccgtccgcgccgctgctgttgctccggttgcccgcagcctcccagggggcagtggcgaagggggtggtggggaggctggtccagttgcccatgtccccgccccggcctgtggtggtgacccctgccagctcggtgcctttgccggccccgcggcaccagaagttgggctggtccaggaggaacgagtccgagaactggctgaagccgatgaacagcgccgggatccaggtaccctacgcgaaggaaggatcattgcacca

SEQ ID NO: 28094 - DNA, 388 bp, Homo sapiens
gcagtgagccgagatcacaccattgcaaatccagcctggacgacagagcgagactgtctcaaaaaaaaaacaaaacaaaacaaaaactgctcctgtgagcagtaactttcccatttcccagaggctcacgcctcagtttggttctgagccccacctaaggctgcccagccccagggacatctctgaccaaagggcctctgttccctttgtgccagttagagggaccccttccttaaaagatggaaatacaggagtggagattggtgatggtggttgctactccatgcctaataaaagccattcttactgtcattgtttaaccctgggcccacaaggaagccagcagcaggtcattttgccacaggaaggtgtaggcccgagtgagtct

SEQ ID NO: 28095 - DNA, 452 bp, Homo sapiens
  misc_feature (1)...(452): n = A,T,C or G
nattgatgactcttagacctgtgtggccgaattccttggatttattttctcataagaacatgaaactgaaagagcgagtgctgatacctgtcaagcagtatcccaagttcaattttgtggggaagattcttggaccacaagggaatacaatcaaaagactgcaggaagagactggtgcaaagatctctgtattgggaaagggctcaatgagagacaaagccaaggaggaagagctgcgcaaaggtggagaccccaaatatgcccacttgaatatggatctgcatgtcttcattgaagtctttggacccccatgtgaggcttatgctcttatggcccatgccatggaggaagtcaagaaatttctagtaccggatatgatggatgatatctgtcaggagcaatttctagagctgtcctacttgaatggagtacctgaaccctctcgtggacgn

SEQ ID NO: 28096 - DNA, 445 bp, Homo sapiens
  misc_feature (1)...(445): n = A,T,C or G
ncctgatagcatccgaagcgctgagaatctcggaancacatnggaattctgtgtttaactttttgaggaacgccagactcttccaaaccactgccctgtgttacattcccagtagcaatgtgttcagttgcttcacatctttcccaacgcttttgattttcctctttatttttcattgaatctaatcctagtgggtatgaagtatcttactgtgttttgatttgcatttctctaatgaataatgatgttgagcatattttcatgtgcttatgggtcatttgtaaacttttagagaaatgtctgttccaatcttttatccgttttaaaaattggattgtctttttgttgttgaggtataagatttctttctatgttctagatattagatgcttaacagataagcaggagaatcgcctgaacccgggaggcagaggctgcagtgagt

SEQ ID NO: 28097 - DNA, 456 bp, Homo sapiens
  misc_feature (1)...(456): n = A,T,C or G
attcgaaccccctnnnnnttttgttgactcctagtccagcgtggtggaattcaaagggcacttgggctgaaggatcgctttgagatctgaggaacccgcagcgctttgagggacctgaagctgtttttcttcgttttcctttgggttcagtttgaacgggaggtttttgatccctttttttcagaatggattatttgctcatgattttctctctgctgtttgtggcttgccaaggagctccagaaacagcagtcttaggcgctgagctcagcgcggtgggtgagaacggcggggagaaacccactcccagtccaccctggcggctccgccggtccaagcgctgctcctgctcgtccctgatggataaagagtgtgtctacttctgccacctggacatcatttgggtcaacactcccgagcacgttgttccgtatggacttggaagccctaggtcca

SEQ ID NO: 28098 - DNA, 451 bp, Homo sapiens
  misc_feature (1)...(451): n = A,T,C or G
nttcgcgacccttagtcattcgaggcgaattcctttgcttttctcctcctccccttcccagttaccaaagactcgaacttccagacagggacccagggacaccccgaagcccacctgcaatctcccacctcctgcccatccctctcttgagggagcagcaggggccaggagctaccccaggagtgggccaggccgggccacagcaataggaaagccagggccagagcgagccatgccagccctactgccgatgccaaatatttgagagaagggaacttttgctgaggttttctctgaggtttttttgatgctttataggaaactattttttaaaaaaagccatttcccacccaaggacacagtggatgtgttttccctgactccagcagggcaaggaatgtanccgagaggttgtgtgggctgggctctggtgccctcttcccttgccagg

SEQ ID NO: 28099 - DNA, 461 bp, Homo sapiens
  misc_feature (1)...(461): n = A,T,C or G
cgcccccattgatncccctnnnnnattgatgacncttagacagtgtggtggaattcgtggaatccttcgaggaggtggaggacagcctgtgtgttccccagtataacatgtacagggaggagagggtgatcctcttcctgaagatggcctccgggcacgccttccagcctgacttggttaagaggatccgtgacgccatccgcatgggcttgtctgcgcgacacgtgcccagcctcatcctggaaaccaagggcatcccgtatacgctcaacggcaagaaagtggaagttgccgtcaaacagatcattgctggaaaagccgcggagcaaggaggtgctttctcgaaccccgagaccctggatctgtaccgggacatccctgagctgcagggcttctgagtcagactggctggcgtgtcactcagccgcacccgtgtgcactgtaacttttgtgtgctcaaa

SEQ ID NO: 28100 - DNA, 461 bp, Homo sapiens
  misc_feature (1)...(461): n = A,T,C or G
ntttgacgtcccttacnccagngcggnggaattcgggcaggagaccctgtaggaggaccccgggccgcaggcccctgaggagcgatgacggaatataagctggtggtggtgggcgccggcggtgtgggcaagagtgcgctgaccatccagctgatccagaaccattttgtggacgaatacgaccccactatagaggattcctaccggaagcaggtggtcattgatggggagacgtgcctgttggacatcctggataccgccggccaggaggagtacagcgccatgcgggaccagtacatgcgcaccggggagggcttcctgtgtgtgtttgccatcaacaacaccaagtcttttgaggacatccaccagtacagggagcagatcaaacgggtgaaggactcggatgacgtgcccatggtgctggtggggaacaagtgtgacctggctgcacgcactgtggn

SEQ ID NO: 28101 - DNA, 453 bp, Homo sapiens
  misc_feature (1)...(453): n = A,T,C or G
ggccgaaatgaaaccctccgaaactcgagatcatagnacagncnggnggaattcggcagtgtggcggcagcatggaggtgctgccctgctcccgcgtggcccacatcgagcgcaccaggaagccctacaacaacgacattgactactatgccaagcgcaacgccctgcgcgccgccgaggtgtggatggatgacttcaagtcccacgtgtacatggcttggaacatccccatgtcgaacccaggggtggacttcggggacgtgtctgagaggctggccctgcgtcagaggctgaagtgtcgcagcttcaagtggtacctggagaacgtgtacccggagatgagggtctacaacaacaccctcacgtacggagaggtgagaaacagcaaagccagtgcctactgtctggaccagggagcggaggacggcgaccgggcgatcctctacccctgcg

SEQ ID NO: 28102 - DNA, 447 bp, Homo sapiens
  misc_feature (1)...(447): n = A,T,C or G
ngggagtccgatacctcgtaaacngagagccattgcannancaaggagcaccctgctctggtccccgccaccacccagcgcctcctggacccatccccccaaacccttgaacgtcctcaggacccccaggagcaggagacgcggagctcggagcgctgagctgacctgccggagccgggcgtgggctgcagcctcggagctcccggaacgatggtgaagttggggaacaatttcgcagagaagggcaccaagcagccgccgctggaggatggcttcgacaccattcccctgatgacgcccctcgatgtcaatcagctgcagttcccgcccccggataaggtggtcgtgaaaactaagaccgagtatgaacctgaccgcaagaaagggaaagcacgtcctccccaaattgctgagttcaccgtcagcatcacggagggtggcaccgag

SEQ ID NO: 28103 - DNA, 463 bp, Homo sapiens
  misc_feature (1)...(463): n = A,T,C or G
ctcgatcttgatgacattagcacagngcggnggaattcgatggcgcgtgcctgtaatcccagctactcgggaggctgaggcaggagactcgcttgaacctgggaggtggaggttgcagtgagccgagaatgccactgcactacagcctgggcgacaaagtgggactgtctcanaaaaaaaaaaaaaaaaaaaaaaaaaaaaaaaaaaaaaaaaaaaaaaaggggcccccccggggccccccttttttttgtggggccccccccccctttgggaaaatagaaacccccattttcccccccaaaaaaaatttttttcccccccccagaaaaaaaaaaaaaaaatttttttaaaagagaccccaccgttgggtgggcaaaacaaaaaataaaaaagggggggggggataaaaaaaaaaaaccgggaggagggggggagattttttttaataaaaaaaaggaaaata

SEQ ID NO: 28104 - DNA, 451 bp, Homo sapiens
  misc_feature (1)...(451): n = A,T,C or G
gccggccctgaaccctcgaanactgagacatagnacagncnggnggaattctgcccagcatccctgcagttcgcggtacagtctctagtagagcgcgtgtatagaggcagagaggagtgaagtgcacagttcctctcctccaagagcctgccgaccatgcccgcgggcgtgcccatgtccacctacctgaaaatgttcgcagccagtctcctagccatgtgcgcaggggcagaagtggtgcacaggtactaccgaccggacctgacaatacctgaaattccaccaaagcatggagaactcaaaacggagcttttgggactgaaagaaagaaaacacaaacctcaagtttctcaacaggaggaacttaaataactatgccaagaattctgtgaataatataagtcttaaatatgtatttcttaatttattgcatcaaactacttgtccttaa

SEQ ID NO: 28105 - DNA, 450 bp, Homo sapiens
  misc_feature (1)...(450): n = A,T,C or G
ggggactaccgtatgcttcgcaagatgagagccattgcagnnnccctcactgattcttggtgttttctccaccacaggcacatagggcagcccaacgaagccttaaagttcctgaacaaggcacgcaaggacagcacttggggccagagcgccatctaccacatggtgcagatctgtctgaatccagacaacgaggttgtgggcggagaggcttttgagaaccagggagctgagagcaactacatggagaagaaggagttggagcagcagggtgtgagcaccgccgagaaactgctgcgtgagttttacccacattcagactccagccagacccagctgcggctgctgcagggcctctgccggctggccaccagggagaaggctaacatggaggctgcgctgggcagcttcatccagatagcgcangctgaggtgtggcttgtggggacn

SEQ ID NO: 28106 - DNA, 441 bp, Homo sapiens
  misc_feature (1)...(441): n = A,T,C or G
nttgtagnccttttgtagacattagaccangcggnggaattcactttgttcaacccccacccgccgtctctccctccctgcgccttccctctaaccttaaagacccagctacctctacgcaaatggtagctacctctgcgcaggtggaagttgagttcggttcacgcgggaccctcttccctgtggcaagctgctgaaggagacctgctgttactgctttagctgctgttctgcttaatctcagacagctggaaggtagtattccgccctcgcccagccacccgagtaaatgagaatgatgactgactgagaccctgatggtggtggcttaggcttaatctcagacagctggaaggtagtattccgccctcacccagccacccgagtaaatgagaatgatgactgactgagaccctgatggtggtggcttatgcaagatgn

SEQ ID NO: 28107 - DNA, 461 bp, Homo sapiens
  misc_feature (1)...(461): n = A,T,C or G
gagccagcnnnttaagaatacgtgggcctcggcacgncnggnggaantccacgngcacaggtaggttttgtggctcagccagaggccttcctccttttccctttacttcacacatatctcagagagttacaccaaaggccacgcagctgactgcctgagcaccaaggtccagaggatggaaggaaccttggtttccatgctggtggcctcagcacattcagctggagaacagcaaaggaacagagctgtgagccattctcaaacagctttcccctgcagctgcgtgtaaattggttttataatgtttgtctttgggacaaaagctgtatcgccagtgcctacctccttctggtgcccctaacccttcctgccacctgtcctcgtccacacaggcctctggctggcttggctggggccagagccctggaagctgggagccagggtctctggaggccctgccg

SEQ ID NO: 28108 - DNA, 450 bp, Homo sapiens
  misc_feature (1)...(450): n = A,T,C or G
ggggaaaactgagaccttcgcacaattgagagccattgcancanccagcggnagacagtcatcaccaccatgaccaccttgaagaagaacctggctgacgaggatgctgtgtcttgcctggtgctgggcaccgagaacaaggagctcctggtgcttgaccccgaggccttcaccattttagccaagatgagccttcccagcgtccccgtcttcctagaggtttctggccagtttgatgttgagttccggcttgccgcggcctgccgcaatggaaacatctatattctgagaagagactccaagcaccccaagtactgcatcgagctgagcgcccagcctgtgggacttatccgggtacacaaggtcctagtggtgggcagcacccaagacagcctgcatggcttcacccacaaggggaagaagctgtggacagtgcaaatgcccgcagct

SEQ ID NO: 28109 - DNA, 455 bp, Homo sapiens
  misc_feature (1)...(455): n = A,T,C or G
gggggaaattgaaaacctcgnaanactgatgacatcagnacagncnggnggaattcggtgggtctgggctgctgccccctgtcagcccagctctcctcctgcccgatccatgaccaagggcagggcacccagaggataatgagtaagtaggccgggctgtctggggctgagcagctgagaattgcatgcagacagacaggaacagcttttctttctagaaggaggaccaggagcagttttgcagcagacttcagggacttcaccctttcaatccccacagccagggacagactcaatctcagtgcttgccaccctggaggcacccctgttttatcaataccacctgcctgcttcccgtaaagccagccccattgtcctcaccagtacagcatgtcctgtgaggggcacatggctggccattagtgtctgcttcccagtggccatgccctttgaca

SEQ ID NO: 28110 - DNA, 464 bp, Homo sapiens
  misc_feature (1)...(464): n = A,T,C or G
ganagtgccgggggtnggnnaaaatgagagcttccgaaactgagagccctcgcagnaaccnnaaccannntacacttgcttaagtaattttcttcaaatacacacgattccaggctatttaaccttattttaccgctatagcacaaaacaggttttccaaaattgtccttgcacacctgggattttacaaggatattataatcttggttcagtttgacttactgaatttgtagtaagtatattttagcacatagaaaattcaaaatatgtgttaatctgtttatagggtaaatttttatgagggtggatgtcatcctgtttttttttttttaaaaaatgttttgtttcaaaatgttttttatttacagaaaagttccaaacatagtacagagagttcccaaatgctccacaccgagttttccctatggtttttttttttttttagaaaaggagccctctttctg

SEQ ID NO: 28111 - DNA, 464 bp, Homo sapiens
  misc_feature (1)...(464): n = A,T,C or G
cttcgactttcatgacccttagaccangcggtggaattcggattacgggatgacatcccacacagcccggagtatttgcagaaagctcatgcattgagtgggccacatctcacttatgctttcttatcttagcccactctgaaaatgtgcagcaccctcactggttcctccctccaacgcacggaggatgcccaattgttgccctctgaaaatgcacagttctcctggccctaggacttacttattacatttttttctctttccttgagctgcctttggcaagggaagagacccccaactctgcgcccctactccatgctgctgatccccacctgcgcactatagcgcagggtcagcagtggaatgaagggccttataacctgcatagaagaaatgaactcactgcatttctgtgctccctcctccctcgcaccaaactcctagctctacaagtatatttattn

SEQ ID NO: 28112 - DNA, 452 bp, Homo sapiens
  misc_feature (1)...(452): n = A,T,C or G
gggcgaatgagaccctctgaanccatgnnangtttgtacagngcggnggaattntgtaaatataacttttaaaaaaaatgtgttaagaccattgtacattcaatgaagcattattatgcttctaactttaacctatttcaccttactcaagagtgtatgtaaaagatggtaacaatatactatttggtaacataatggactaacatttctattaatctatttcaccagtggctttcaactgcaaataagttaaagaatatttttctataggttaaatattcttttttgtcttatttaaacttactgttcttaatttctgtgggtacatagtatgattttaattaccttattttattctttgtgctattcataattttttttgtttgtttggtttttttttttgagacagagtcttgctctcacccaggctggagtgcagtggcgcgatcttg

SEQ ID NO: 28113 - DNA, 561 bp, Homo sapiens
  misc_feature (1)...(561): n = A,T,C or G
cattcgaatagccactccgngngngncnnnnntttcgaaccacactccatgnggaggaattcggngtgaggaacattctangagaaggttctacaaatgagctgatggctttaaaagtttccttcttagccttacaatttttctccttgattataaaagtaaaggaaaactgggaaaatacagaaaggaaaagagggggaaaaaaatcacttataaccacaccaatccagagggatttcaaggatttggatttggagatggtggcttccagatgtcttttggaattggggcatttccctttgggatatttgccacagcatttaatataaatgatgggcggcctcctccagctgtccctgggacaccccagtatgtggacgagcagttcctgtcacgcctcttcctatttgtggccctggtgatcatgttctggctcctgattgcctaatgctgggctcctgcctacatccgtggcanggctctggactggtgacgtgccaccccaactcctgggtttggcttcctggctaatcttgactccctgaatcagtgngatcagan

SEQ ID NO: 28114 - DNA, 465 bp, Homo sapiens
  misc_feature (1)...(465): n = A,T,C or G
ntttgaagtaccactactccagtgcggnggaattcgaattccaccacaggcaagtgctgggctgtggtcgtgccctgacagcatcttccccaggcagcggctctgtggaggaggccatactcccctagttggccactggggccaccaccctgaccaccactgtgcccctcattgttactaccttgtgagataaaaactgattaaacctttgtggctgtggttggcggaaaaaaaaaaaaaaaaaaaaaaaaaaaaaaaaaaaaaaaaaaaaaaaagccgccccttaaattaaaagggccccttaaaaccccgttaaaacccctgggggggccttttaatggcccccctttttggggttcccccccccccgggtttttttttgccggggggggggcccccccccctgtttttttctaaaaaaaaaaaaaaattccccccctttggcgggggggggggttttttttg

SEQ ID NO: 28115 - DNA, 448 bp, Homo sapiens
  misc_feature (1)...(448): n = A,T,C or G
ntttgaaacccatagatgactactatacagtgcggtggaattcgacagaggagaccactctgctcctggggccagaggccattcaatagcctgccttcgtccgggcccctcctgggcctccccggccaggcacgtggcaccgtcgccttgacaccgccatctcttttctttaaggcttcaggcagcgcgcacaggctctggcagccgtctcaggcaggactgggcagcaagcttgcagccgaaggccttgccccaaactaccagcgtttctgcaagcagcttgaagggctgaccttgcagccgggtgagccaagggcactttgctgccaccgctgcattcccagagatcaagcagcccggtgccgtggccagtgaactcagaggtgctggtggacgggctaggactttggggttaggccatggggctctttctctgaaggccactttc

SEQ ID NO: 28116 - DNA, 427 bp, Homo sapiens
  misc_feature (1)...(427): n = A,T,C or G
gaattccaccacaggcaagtgctgggctgtggtcgtgccctgacagcatcttccccaggcagcggctctgtggaggaggccatactcccctagttggccactggggccaccaccctgaccaccactgtgcccctcattgttactaccttgtgagataaaaactgattaaacctttgtggctgtggttggcggaaaaaaaaaaaaaaaaaaaaaaaaaaaaaaaaaaaaaaaaaaaaanncccccccctttaaattaaaggggcccttaaaacccccggaaaaccccctggggggtttttttaaggccccccctttttggggtgccccccccccccgttttttttttgcggggggggggccccccccccctttttttttaaaaaaaaaaaaaaaaatcccccccttttggggggggggggggtttttt

SEQ ID NO: 28117 - DNA, 578 bp, Homo sapiens
  misc_feature (1)...(578): n = A,T,C or G
ttcgttcattctcnttgaactactacactcactatactttgtacacactacacagtaattgcaacgtaccaatctccaatcatatacggaggcgcccaccccanaattgagncctnatcgagnactctaggacanngcgnggaannctgggcacagaaatcccttatacccctagggtgagaccctgcatccctaacaagggcctgcccggggttacaggcccaatgaccccagactgagctagctcaggctgagtctgagaccaggctccagacctgtttaccggctcctcaccttcaacttttgagatgaaacggcggggacaggcctgggggaaggatcaggtagggctgtctaggtttggggtcagcactcagttgaggacacgggtggagacgtggtatagggccagggtcaggccttagtctgtcacagattcagtcagaagccagggtcagagctcggttcagggtctgagctgaatatgggaccaccttaagtgacaagtgcagggtcaggtttggtcagaggccaagtctatggacttggatgggatcagggctcaatgtgggactggg

SEQ ID NO: 28118 - DNA, 448 bp, Homo sapiens
  misc_feature (1)...(448): n = A,T,C or G
natgatgtcctctgacatggatggtcgtattctgcatcagctattttttgtctacttttgggggagaaaaaggactagcccttatttatagatatgagatacataatgttctaaccaacaacattatggcatttgtgtgacttttatttgaaaaaatgtgagcagtaatttgggttagcctaccttcattaattctatcacatagagttcagtttttagaagggtttctgtcatcatggaagaggtggtctgggactaggtacttctcgtcttgcgagctaaggcttgcgtcatgaaagacaagaggcctttcttaacagcccagtccttgtctgcagggggaggcctgagcatttcccagccccagtgtccacacctctcagaaaagagaaaaaagaatgtcagtttacgagaaaagcttcctttttacttgtgtggctatgtgngg

SEQ ID NO: 28119 - DNA, 463 bp, Homo sapiens
  misc_feature (1)...(463): n = A,T,C or G
agcgccgcnnnaatagatatcgttgccctccgcancgngcggnggaattcggncttgggagccattgagagggccaagcaggtcaccgctcccgagcttaactttatcatccgacagcagctccaagcccaccagctgtcccagctgcaggccctggccctgcccttgaccccactacccgtggggctgcagccgccttcgctgccggcggtcagcgcaggcaccggcctcctctcgctgtccgcgctgggttcccaggcccacctctccaaggaagacaagaacgggcacgatggtgacacccaccaggaggatgatggcgagaagtcggattagcagggggccgggacggggaggttgggaggggggacagaggggagacagaggcacggagagaaaggaatgtttagcacaagacacagcggagctcgggattggctaaactcccatagtatttatggcg

SEQ ID NO: 28120 - DNA, 457 bp, Homo sapiens
  misc_feature (1)...(457): n = A,T,C or G
gcgccggcnnnttaatgatacgagagctccgcacgngcggggaatttgttctggaactagcccggtgatgagcatgttgatattaacggcctgtctttttcaaagcttccggcccagcacgctttagcatcagctggttattctgagaacattcttttcaaaacactctacaggacaaacaggccgagaggttcctttgtccacagctggcctctgaaactgagcagactctcaaagggttgagaagaaccccgaggaggctatcgtctgcactcagaggctgaaacgtttgaaaacaggtgcgggagggggcggggaggatggtcagtgacagcacattcttcagcaaacatgtgtcatttgtgcttttaccagagcggagcttttaattcctaaaatataacagcctggtgcaggggctggaagaagagggcgcgttttatgtgcaactctgcta

SEQ ID NO: 28121 - DNA, 563 bp, Homo sapiens
  misc_feature (1)...(563): n = A,T,C or G
cgcccctagatngcccctccgnannattcgnaccactagtccgagaggtggaattcttcagattctatgcaatggttctttttctagctagagtacatccttgagagtagaaaatatttcatataatctaaacccttcatttctagagatgcagatagattctgtaacattaatctcacctttatattttttcaatttttaataacttgaaaatatgtatatctaatgccttctttccctatgcactttttgttattttaatatttctcaacaccataagctatttgcccagctgcatccttattagacagtgctattgcctgccaaagctttttgagagcaaattgcattgccttcattattattatgtctacaatataatgattatgaaacatcattattatagttgattaataaatgataattgatgactctcagttcataggatttggcccatganattcatcacaatttgtaaacttttctccaaaccttcaaggattctaaaaggattgattttgctgcaaagtatatgcgattacattntttgatacctagtaagn

SEQ ID NO: 28122 - DNA, 449 bp, Homo sapiens
  misc_feature (1)...(449): n = A,T,C or G
agacgtgcnnttacgattcctcagcntcgcggggcannanctgagagaagctggggctgctccacccccaccaagggctctgcccgttttagtttgccgagggtggggctgccacggcagggcccagccgggaacagctcaaggctgacctggatgagttggtggccgctgagtgtgtgtactgtggggagctgatgatccgctctatcgaccggccgttcatcgacccccagcgctacgaggaggagcagctcagttggctgtaggagggtgtcacctttgatggggggtgggcaatggggagcagtggcttgaacccacttgagaaggctgcctcctaggctctgctcagtcatcttgcaattgccacactgtgaccacgttgacgggagtagagtatcgctgttggccaagaggtgtcaggtgtgagtgtattctgccagcttttc

SEQ ID NO: 28123 - DNA, 472 bp, Homo sapiens
  misc_feature (1)...(472): n = A,T,C or G
cgttgttaggaggggnnnnnnnactgagacctgagtacgtgcggnggaattcgtagatgtgtgaccagaagccttttgcttaggcagctatcaataaggcaggatattgttgggagcgatttggaagggacaagcctgagaaggtgccagtggcctctggggcctgggagaccggcagggactcggccccctccttggtgcctgtgggcggagaggttctctctggcgcatgcagcaggcctctgtcgactgccctatgccttgtgagcgcctctgccccttagtgctgctgagcgtaggcgtcgggccacaggccaccccgagtacatgacatccggcctgggcaccggccccaaggtacacggaggggtaggtgccctggcatggggcatcatgctgcgcctggcaggtagggcccgtcctcagtgtcatcctggtacaagcaggggacacatccagtttgacaaagaga

SEQ ID NO: 28124 - DNA, 549 bp, Homo sapiens
  misc_feature (1)...(549): n = A,T,C or G
ctctagttaggcttagcantntganancnttnggggggccagacctannaacaggcttgcaggagggagcaacagcaacaacactgcaagcaatgtcatgtcggatgacacattgacagctgtctgctgcacactgcacgaagtgattaccaagaacatggagaacgccaatgccttacgggatgccggtggcatcgagaagttggtcggcatctccataagcaaaggagataaacactctccaaaagtggtcaaggctgcatctcatgtcctcaacagcatgtggcagtaccgagatctgaggagtctctacaaaaaggatggatggtcacaataccactttgtagcctcgtcttcaaccatcgagagggaccggcaaaggccctactcctcctcccgcacgccctccatctcccctgtgcgcgtgtctcccaacaaccgctcagcaagtgccccagcttcacctcgggaaatgatcagcctcaaagaaaggaagacagactacgagtgcaccggcagcaacgccacctaccacggagctaaaggcgt

SEQ ID NO: 28125 - DNA, 473 bp, Homo sapiens
  misc_feature (1)...(473): n = A,T,C or G
tgatagttagaaggggnnnnnnnattgacgactgagtacgtgcggnggaatccatggcaacttctcactcaagcaggactcctcgcccgaccacgagaaaagctaccactactctatgcactactcggcgctgcccggttcgcggcccacgggccacgggctagtcttcggctcgtcggctgtgcgcgggggcgtccactcggagaatctcttgtcttacgatatgcaccttcaccacgaccggggccccatgtacgaggagctcaatgcgttttttcataactgagacttcgcgccggctcccttctttttcttttgcctttgcccgcccccctgtccccagcccccagagcgcagggacacccccatcctaccccggcgccgggcgcggggagcgggccaccggtcctgccgctctcctggggcagcgcagtcctgttacctgtgggtggcctgtcccaggggcctcgctt

SEQ ID NO: 28126 - DNA, 549 bp, Homo sapiens
  misc_feature (1)...(549): n = A,T,C or G
cattagaacacacttcaggagggcattcgattcgataacgctccgnggccacctggcagaaggcagagaggaatccatgcccaagctgtcttgacagctacaggagtttgtctgtgagggcggtgctcccatcaggttccacctctctacactgttgctctggggaatgagtttctcactgtgaatctggggggcacattcagaccctattgtgggtgagtgggagagcatggctgtgtcactgggacaagtggccatgagtcgggggaactgaggggttttcagtgtcctcacccgtatgtgttgtggcacctgtgccaggcaccagcgttctgccctccccggcacaggcgcatcaccgagtcccaggcccgcctgctgggcattttcctgccaagcagcacctgagattctgaagtcgatgcctggataggcagaaatgggccggcaggaggctcctgacagacgggtctgtgcagtgccagcgcangcagggtgctgtggccaggtcctacacctttatggtcaagttccaagacgtcatgagac

SEQ ID NO: 28127 - DNA, 476 bp, Homo sapiens
  misc_feature (1)...(476): n = A,T,C or G
gcccccatcgagaccctanccgtggagggcattcgaacaaggccatgggtcggcccctgctgctgcccctgctgctcctgctgcagccgccagcatttctgcagcctggtggctccacaggatctggtccaagctacctttatggggtcactcaaccaaaacacctctcagcctccatgggtggctctgtggaaatccccttctccttctattacccctgggagttagccatagttcccaacgtgagaatatcctggagacggggccacttccacgggcagtccttctacagcacaaggccgccttccattcacaaggattatgtgaaccggctctttctgaactggacagagggtcaggagagcggcttcctcaggatctcaaacctgcggaaggaggaccagtctgtgtatttctgccgagtcgagctggacacccggagatcagggaggcagcagttgcagtccatcaaggag

SEQ ID NO: 28128 - DNA, 467 bp, Homo sapiens
  misc_feature (1)...(467): n = A,T,C or G
cttgacaccctgnccatagaggccttcggttttcaggagccatagccacccccaaatatgtttgtttaaagcgtggggttttttaatctctgccacccttgtcaagggagtcttgtaaagttgccgagggtaggttcatctccaggtttcgggattcccatccgtcctggcgatcctgccagcagtgggtgggcagcctgagctccctcgggctcgcctgccagcctggagttcttcctgtgctccttgatcacctgagctgcctcagattccatttggtcctctccttcctggaaggcttccttttatgttttgttttaatcccaaatgtctgaatgttttgcagtgtgtaggggtttgagccccttgttcattctccttcctttttcctcccgcttccctctccatgaagtgattctgttgacaataatgtatactgcgcgttctcttcactggtttatctgcag

SEQ ID NO: 28129 - DNA, 479 bp, Homo sapiens
  misc_feature (1)...(479): n = A,T,C or G
ctcgcaccccctngnnnatagtagaccttagtcagngcggaggaattcacagatcaattcacacatttttataatagctttattcataattgctaaaaactagaaatactataaatgatgtcctttacctggtaaatgggaaaacaaactgcatataaaaagaacattggaccgggtgcagtggctcacacctgtaatcccagcactttgggaggccaaggcgggcggatcacaaagtcaggagatcaagaccatctggccaacatggtgaaaccccgtctccactgaaaatgcaaagattggctgggcgtggtggtgcaggcctgtaatcccatctactcgggaggctgaggcaggagaatcacttgaacccggaaggttgaggttgcagtgagccaagatcgtgccactgcactctagcctgggcaacacagagcgatactccatctcaaaaagaacattgagcccacgaattcaag

SEQ ID NO: 28130 - DNA, 466 bp, Homo sapiens
  misc_feature (1)...(466): n = A,T,C or G
gccggatannggggnaattgatgacctgagtacagtcggaggaaccctggccaccaggtcctcctggaaaacgaggtcctcctggagctgcaggtgcagattgaagactaggtgaaaaaggtgctaagggggaagcaggtgcagaaggtcctcctggaaaaaccggcccagtcggtcctcagggacctgcaggaaagcctggtccagaaggtcttcggggcatccctggtcctgtgggagaacaaggtctccctggagctgcaggccaagatggaccacctggtcctatgggacctcctggcttacctggtctcaaaggtgaccctggctccaagggtgaaaagggacatcctggtttaattggcctgattggtcctccaggagaacaaggggaaaaaggtgaccgagggctccctggaactcaaggatctccaagagcaaaaggggatgggggaattcctggtcn

SEQ ID NO: 28131 - DNA, 562 bp, Homo sapiens
  misc_feature (1)...(562): n = A,T,C or G
nattcgaatccactgttcgngnggngccnnnnntttcgatcaccagtccgagtggtggaattcaagactcctatgacagttttggggagccttcataccccgaagtctttgagcctcccttgactggctacccatgggaggagctggaggaagaggaggaaaggggcgtgaagcttggcctcggggacttcatcttctacagtgtgctggtgggcaaggcggctgccacgggcagcggggactggaataccacgctggcctgcttcgtggccatcctcattggcttgtgtctgaccctcctgctgcttgctgtgttcaagaaggcgctgcccgccctccccatctccatcacgttcgggctcatcttttacttctccacggacaacctggtgcggccgttcatggacaccctggcctcccatcagctctacatctgagggacatggtgtgccacaggctgcaagctgcagggaattttcattggatgcagttgtatagttttacactctagtgccatatatttttaagacttttctttccttaaaaaatanagtacgtgttt

SEQ ID NO: 28132 - DNA, 542 bp, Homo sapiens
  misc_feature (1)...(542): n = A,T,C or G
atcgacacatcaggggggaatcaatagatctcttatcaatcttcagcttgtctctcagtatttcccaatcatgaaaatcccttgctatgtctttcctactagaaatgttctagaatcgctggacggtggggtcagagggcagtcggtatttaggccgtgagcttcccatactactgcaggtccaactcctggcaaccgcgggctcaaggcaggtcattggaatccacgttttggccacagtagttgtaggattgcttttctgtatcataattttagaatgctcttaaaatcttgaggaagagtttttattttttatttatttttgagatggagtctctgttgcccaggctgcagtgcagtggtgccatctcagctcactgcaacctccacctcccaggttcaagcgattctcctgcctcagccacctgagtagctgggagtacaggcatgtggcaccatgcctaggctaattttgtatttttaatagagttgagatttcaccatgatggtcaggctggtctcgaactcctgacctcgtgatn

SEQ ID NO: 28133 - DNA, 449 bp, Homo sapiens
  misc_feature (1)...(449): n = A,T,C or G
cactgagacctctgnttgagcggcggtattcccgntaattaaagaaaagttgagccagggcgtgaccctcgtcgtggacagatacgcattttctggtgtggccttcaccggtgccaaggagaatttttccctagattggtgtaaacagccagacgtgggccttcccaaacccgacctggtcctgttcctccagttacagctggcggatgctgccaagcggggagcgtttggccatgagcgctatgagaacggggctttccaggagcgggcgctccggtgtttccaccagctcatgaaagacacgactttgaactggaagatggtggatgcttccaaaagcatcgaagctgtccatgaggacatccgcgtgctctctgaggacgccatccgcactgccacagagaagccgctgggggagctatggaagtgacccaaggctggcactggag

SEQ ID NO: 28134 - DNA, 567 bp, Homo sapiens
  misc_feature (1)...(567): n = A,T,C or G
naataggatncgcagctcgnnnggggcannncaatagatcaccagtccgagtggtggaattcgacaggttcattttgttggcctgtgatgggctcttcaaggtctttaccccagaagaagccgtgaacttcatcttgtcctgtctcgaggatgaaaagatccagacccgggaagggaagtccgcagccgaagcccgctacgaagcagcctgcaacaggctggccaacaaggcggtgcagcggggctcggccgacaacgtcactgtgatggtggtgcggatagggcactgaggggtggcgcgcggccaggagcacgcatggtattgacttaaaaggttcattttgtgtgtgtgcacattgtgtgttttgtgtactcctgtgggactcccatggttgtaaataaaggtttctctttttttttcctaacaaaaaaaacnnnatncaccaaacaaaaaacaaccaaaacaaacaaaaaaaaggcctggctggccacannnccttaaccaaanaaaacttaaaatcccccccttcacgtatagagaggcgcgccccacctgaccgtctcacc

SEQ ID NO: 28135 - DNA, 499 bp, Homo sapiens
  misc_feature (1)...(499): n = A,T,C or G
ggcgttnaggggnnnnnnnnnntttcgtagacctcagtcactgtggnggaattccaactacaagctcaagtctgtggcccaccttccctggcgcatgctcacctacaaggccctcaacacattcatcgacgacctgttcgcctttgtcatcaagatgcccgttatgtaccggatcggctgcctgcgggacgatgtggttttcttcatctacctctaccaacggtggatctaccgcgtcgaccccacccgagtcaacgagtttggcatgagtggagaagaccccacagctgccgcccccgtggccgaggttcccacagcagcaggggccctcacgcccacacctgcacccaccacgaccaccgccaccagggaggaggcctccacgtccctgcccaccaagcccacccagggggccagctctgccagcgagccccaggaagcccctccaaagccagcagaggacaagaaaaaggattagtcgagactggtcctcacctgn

SEQ ID NO: 28136 - DNA, 500 bp, Homo sapiens
  misc_feature (1)...(500): n = A,T,C or G
ggcccttnnaaggggangcnngnnnattgaaacactgatgaccctcggacagngcggnggaattcagagacgtgagccactgcgcctggtcctcccaaacttctttgaacatagagcccgtttggaaggtggatttgtgggactaagcctcccaggggctccggcggctgtacgccctgatggctgtgcaccccgaccgctgtgcaccacgacagcttccatgccttccaagctggggggtgccatgggagggctcagagcctcaccccaggctggatgagctcgactgctttgtagctgcctgtatgtggcaagtaactaacactccctaggcctcaattttttaatctataaaatgaaagcagtaaatgtcacatcatataagttgttgagtatttatgagaattaaaaggaataatcgccataaaaggcctgatactgccaatcatatattggacaaatatgaatttccctttttccctttattctactttatggca

SEQ ID NO: 28137 - DNA, 486 bp, Homo sapiens
  misc_feature (1)...(486): n = A,T,C or G
ccccccccatagannnccnttnnnnatcgagnacactagtccatgtggtggaattccttccctctgcatgtcaagggcgtggcgacaggcatctgcgtcctcaccaactggctcatggcctttctcgtgaccaaggagttcagcagcctcatggaggtcctcaggccctatggagccttctggcttgcctccgctttctgcatcttcagtgtccttttcactttgttctgtgtccctgaaactaaaggaaagactctggaacaaatcacagcccattttgaggggcgatgacagccactcactaggggatggagcaagcctgtgactccaagctgggcccaagcccagagcccctgcctgccccaggggagccagaatccagccccttggagccttggtctgcagggtccctccttcctgtcatgctccctccagcccatgacccggggctaggaggctcactgcctcctgttccagctcctgctg

SEQ ID NO: 28138 - DNA, 488 bp, Homo sapiens
  misc_feature (1)...(488): n = A,T,C or G
cgcggcggggnnnnnnnaatcgaagaatctatgcaccgtggnggaattcctgcagggcctctctacctggcccaggcaggaaggaggaaaacatcctggatgtgatggccactgtggcccaccatgcctggaccacttcggggagtggctgcttctctccactcactaatgtctgcttcccccgagcctggggcctctgccccctccctccctccatgcccatgtttctgtctgaccttggcgctggtagctctgtgacctcggctgggaaagtctgtctctgggctctgcctcctcctccccactcagtctctccaggattgacaaggccctgctccccggggacactgggagggctccctggcttgggtgtgtggccctgaagaggaaggaggattctgtggtgccactgtggacccccttgactgagtccctgccctccccagccctgcccggatgtctattggttccccatcttcacggaggtg

SEQ ID NO: 28139 - DNA, 473 bp, Homo sapiens
  misc_feature (1)...(473): n = A,T,C or G
aggtcagggccaatggaaaccnttgactgatgatctaggaagngcggnggaattccttcgacgtcgtcttcttcatccagcacttctgtttgtacagaaagagaccggggctttaggcagcgcgcacaggctctggcagccgtctgaggcaggactgggcaccaagcttgcagccgaaggccttgccccaaactaccagcgtttctgcaagcagcttgaagggctgaccttgcagccgggtgagccaagggcactttgctgccaccactgcgttcccagagaccaagcagcccggtgccgtggccagtgaactcagaggtgctggtggacgggctaggactttggggttaggccatggggctctttctctgaaggccactttcctgacgtactctctgtacataactcagcgtccgcgactgcagtaacagccggccctacccagagtatttctgagccatgaggggcccacn

SEQ ID NO: 28140 - DNA, 471 bp, Homo sapiens
  misc_feature (1)...(471): n = A,T,C or G
ccatcgacaccctattgagngccgtggaattcgntggattatcccttggcactccattagatccgcattatgtgctcctagaagtccattatgataatcccacttatgaggaaggcttaatagataattctggactgaggttattttacacaatggatataaggaaatatgatgctggggtgattgaggctggcctctgggtgagcctcttccataccatccctccagggatgcctgagttccagtctgagggtcactgcactttggagtgcctggaagaggctctggaagccgaaaagccaagtggaattcatgtgtttgctgttcttctccatgctcacctggctggcagaggcatcaggctgcgtcattttcgaaaagggaaggaaatgaaattacttgcctatgatgatgattttgacttcaatttccaggagtttcagtatctaaaggaagaacaaacaatcttac

SEQ ID NO: 28141 - DNA, 474 bp, Homo sapiens
  misc_feature (1)...(474): n = A,T,C or G
gtaggttagcagggannngnnnattgtagacctgagtancgtgcggnggaattcctcgagcggccgatttgttttgtgtttttgttgactagtcctggaaatgtttgaggctagacgtggaggggccaggacccacccactgctcctgggggatgaggtcctggttttaaagccccgtcatttcaagcgggtcgatcttccacattcactggagagactctccccacctctgtctgggtggggcgcggacccctcactgtgcgcctgtgcagggggtgctggtgcacgtggcagtgtggatttccagtggtcacggtcttactgtttcaaggtttttaaataagaaaaccaaccctgccttcgcccatgcccgcccctgcccgcagttgccaaagagccgccttgtcgctgtgggcgtcagggcttggctggctcagtgcacaacccacagtggccttcagaggctcctcctgg

SEQ ID NO: 28142 - DNA, 464 bp, Homo sapiens
  misc_feature (1)...(464): n = A,T,C or G
tgagctccngnnnattganccctgacgacattagtcagngcggtggaattccatccctgcctggtggggctgtgaacgggggtgtgtttctgtttgtgtaactgggtgtgtgtgtatctagccatctgcctctgtacacagggctgtgggtgagtctgaccctgtcactgagcaattgcattgcggtgcatatgagaccatggatgagtgtgcatcaccaggtggcagcagtgagactccgggagattaggagtgtgttggaactcaggggtaactgagaccatgtttgcagttgtgtgtggccctgtgtgccttatgatactatgtgtggctccagcgacagtgcctgcggccgagcatgtgtcggtgctgcatgagtgactgtgattggaatgcccaatcgcatcattcatgtgtgtggcttggtgtgagtggttgccttcgtgcacctgtgtgtgacactt

SEQ ID NO: 28143 - DNA, 448 bp, Homo sapiens
  misc_feature (1)...(448): n = A,T,C or G
ngggattgatgactatctgtccagngttgaggacccttgctattgcgcctggttgtctttggtcagacatgtgccctgagcatcgaagattcatgcaggcctggagataaagtccctccaattaaaccacatgctggggaagaatctgtcacgagtcttgacaaattgagatttgctgatggaagaagcataagaacatcggaactgcgactcagcatgcagaagtcaacgcaaaatcatgctgccgtgttccgtgtgggaagcttgttgcaagaaggttgtgggaaaatcatctagctctatggagacctgaagcatctgaagacgtttgaccgaggaatggtctggaacacggacctggtggagaccctggagctgcagaacctgatgctatgtgcgctgcagaccgtcaatggagcaaaggcggngaaggagtcacggggcgcgc

SEQ ID NO: 28144 - DNA, 483 bp, Homo sapiens
  misc_feature (1)...(483): n = A,T,C or G
gggagcccccgtcgagatcactatagagagccgttgaattcgcggaggagcgggcagacatggcggaaacccaggccaacaagctgcgggcacggacccgggacgccctgggccccaagcacaaggagtgacggcctgaccccctgggctctaaagaggaatgtctgctgttgcacatctggctgaggccacctgccccgatcctgccatctctgcatcgccccctgctgccttcggccttccctgggccctgaataaacaccacagccagtttccttctcattcttttctttggggttcaggaggaaaaacacagtcctagggacaaaagccaggtccacagcagtcatttttaaaataaagttatttaatagtctccnnnnnaaaaaaaaaaaaaaaaaaaaaaacaaaaaaaaaaaaaaangggggccccttttaattaaaggggccctttaaaccccggtaatacccctgaggggggtc

SEQ ID NO: 28145 - DNA, 484 bp, Homo sapiens
  misc_feature (1)...(484): n = A,T,C or G
gggagccccngtagagncccttatagtagaccttaggcagngcggnggaattcgagaggaaaaagaaaaaagaagaatcttgcctgggatagtgagtatataagaggttttctttttctagtcaaaatgtttttacagtaaaaatgggaggggagggaaaggatatcctcagccagactatgaacccaaccctcttagatgttagacacttgggaacagacaggacctgtcaattaatttttaaggtaaaaaatgtggagatccttttgttccgcctggaaactgaagtccaagcgtggtctgtctgccctctggcaaggcaggctgctgacttttctctccagctgtgcacctgtgtgcaggtgcctctcaggtgtcatgcatcgaagtgaagttgctctgacccagcctctgaagaggacagaggggctctgatgctgctccagtgagcactctgtcggctgaagtgcgggtgctcatgctc

SEQ ID NO: 28146 - DNA, 471 bp, Homo sapiens
  misc_feature (1)...(471): n = A,T,C or G
aggggggnaaggatcgcgtacactagtcagtgtggtggaattcctgtgtggatctcagtctctggagccattcgttgggtcgtgagcagcaaagtagccttcatctttcccagtcttcacacttcgaggaccctcactgctggtggggagggggtttctgctctaggctgtggtaatgctatcccccgacctgtaaattcacacaatgagccaactggccacatgctccaaggagctaagatgctgttggtccacaaacaaaggttcaggttctgtgtagcttaggatccggttgctaattggcttgaaacatttaaatcctcttgcatttagttgaatatgtggatatgcctattgagaagtatgttatgaaatctagggtttgtattcccatccgtaacaggaagaataaaaccttgaaaaatgtttcattttaaatacagaccccttgtgtatcaaaaagtatatttt

SEQ ID NO: 28147 - DNA, 476 bp, Homo sapiens
  misc_feature (1)...(476): n = A,T,C or G
catcgaccnccntatagtagaccctaggacangcggaggaattcgtgagccctgacatggaggtgggagcagctggccaatgcgatatacttcccagggccatgtgctggaagatagtggggatcgaggcaggcaggtctcatacttagagcccacatcaagggggtaacagatggaaggatgagcactgcgagtggggacatgggggccatgagacccaggagatcagggaaggcttcctggaggaagtgagcaagagctgagacctggtgcacaggcagatgttggccagagtttggcccagattgtgctgatgctgggggcctggggatcagaaaagatgctgagatcttggggagagagggaagggaagcccagaggccccgtccaagcccacacccacctcactctcacccctgcttttttccctccagatcgagacgctccctccggagctcttccagtgccggaagctg

SEQ ID NO: 28148 - DNA, 452 bp, Homo sapiens
  misc_feature (1)...(452): n = A,T,C or G
gtccgagcccccctccatgatcangatgatctngcacnnncgccngntnggcnaangctngagcctgcaggtgaaggccctgggggctgtgtctccggcgatgagaacgaccctggggagcaggcgctcccaggggggggtgtggagctgcgcccagcaaaccccccgcagtaccaggaggtacctctggacgaggctgtgactctgcgggtgcctgacatgccagtgcggcccggccagctctttagtgctaccctcctgcttcggcacaacttcacagccagcctcctgaccctgcggatcaaggtgaagaaggggctgcatgtgacagccgcccgcccagcccagcccacactctggactgccaagctggaccgcttcaagggctccaggcaccacaccaccctcatcacctgccaccgtgctgggctcacagagccagattccagcag

SEQ ID NO: 28149 - DNA, 450 bp, Homo sapiens
  misc_feature (1)...(450): n = A,T,C or G
gagacgggnccnccatgatnnccaatanaggtnagaccgccggggaatnagcagcagaggcaggctgcttaagtgagtcatgctcctggcataggaaaagcacgaagggtacaaatagacagtaaggtaaaaaaagatgccagcaagtattttaaaaacgcctaaccacacaaagagagggaaatggaagtaacaacagtgatttttacccatgaaattgacagagactaaagtgattggtatctattgagtgagagtgtgggaagattggtggttccctctcagcaagcggtccagggaacaccttttctggagagcactgggtggtaaaaccaaaagccacatagtctcagtccatcaagttcacattcagagacttaccctaagaagattaaggtacatacagaatgatttatgttgaaagaagttcatcttaacatgatttagaan

SEQ ID NO: 28150 - DNA, 428 bp, Homo sapiens
gccccagagcccagggtcaccctggagggaccttctgccaccgccccagcctcatctccaggcttggctaagccccagatgcccccaggtccctgcagccctggccctctggcccagttgcagagccgccagcgcgactacaagctggctgccctccacgccaagcagcagggagataccactgctgccgctagacacttccgcgtggctaagagctttgatgctgtcttggaggccctgagccggggtgagcccgtggacctctcctgcctgccccctccacccgaccagctgcccccagacccaccgtcaccaccgtcgcagcctccgacccccgctacggcgccctccacaacagaggtgcccccacccccgaggaccctgctggaggcgctggagcagcggatggagcggtaccaggtggccgc

SEQ ID NO: 28151 - DNA, 471 bp, Homo sapiens
  misc_feature (1)...(471): n = A,T,C or G
agcgcnnnaatcgatagcatagcccgtgtggtggaattccccaagtgctggattacagacctgagccaccacaccaggctgccccacacattgtaaagtttcgcttccctctaatgtcagattccaaagacagcagccttcatgagtcagaaagaaacatcggtcattttgaaatcaacatccaactgaagtgtagaaaggcctctggatttttgaaacggcaacaacagatgatgtaatacaaagacgcccccaccccactgctttcccactgcatgctttacatgacatggcacagcttccacgccagcagcttcaatcatgtaaagcgaatgcagtcccatcaagaccacagcattggctgagcagctactccatgctgggcaccgtcctgggcactggaagtacagcagagaacgaaaccaagaccacaccctccagaagcctgcattccagcaggacagacagacn

SEQ ID NO: 28152 - DNA, 453 bp, Homo sapiens
  misc_feature (1)...(453): n = A,T,C or G
aggaccggnccncccccctaatgngcatagataccctgcggaannccggngcattgagaagccccccttcgagctgccagacttcatcaaacgcacaggcatccaggagatgcgagaggccctgcaggagaaggaagaacagaagaccatgaagtcaaaaatgcgagagaaagttcggcctaagatgggcaaaattgacatcgactaccagaaactgcatgatgccttcttcaagtggcagaccaagccaaagctgaccatccatggggacctgtactatgaggggaaggagttcgagacacgactgaaggagaagaagccaggagatctgtctgatgagctaaagatttccttggggatgccagtaggaccaaatgcccacaaggtccctcccccatggctgattgccatgcagcgatatggaccacccccatcgtatcccaacctgaaaat

SEQ ID NO: 28153 - DNA, 459 bp, Homo sapiens
  misc_feature (1)...(459): n = A,T,C or G
tattatcagtctcgataaganggtcttagaacaggcggggaattgcggtacgggcacccatgattacgcctgaccaggagacaggtaccaaattgcggttcctggtgaaaaaccacgaccatgccgaccatcgcgagggggaccgtggcagcaagatggtctccgagatctacctgacacggctgctggccaccaagggcacactgcagaagttcgtggatgacctctttgagacagtgttcagcacagcccaccggggctcggccctgcccctggccatcaagtacatgttcgacttcctggatgagcaggcggaccagcgccagatcagcgaccccgatgtgcgccacacctggaagagcaactgcctgccgctgcgcttctgagtgaatgtgatcaagaacccgcagttcgtgttcgacatccacaagaacagcatcacggatgcctgcctgtcgg

SEQ ID NO: 28154 - DNA, 472 bp, Homo sapiens
  misc_feature (1)...(472): n = A,T,C or G
aggtncggnnnnnnnnaaactgagacctttgaagccgccggaannntccngncagtctggcggtctagccagaggaagactcctggagctggtgaactgtgcatggatatgcagtcacgggcagcccacctcctactcctcaccctccctgtgcctgtgagggtctgcactcaccctgattccgtgagtcaggagcttggccaggctcagctgggacactcatctttgcttcacctcatgtcagctgcagcatcttaggaatgcaagacagcctcattcacatccggcggcgggtgctggctgtccactgggtgccttcgctctttttcaagaggattctcatcctctggggtttcactgtctccatgtggcctccctagcaagttgcttagatttctttacgtggaaactggctttctagagggtaaaaatggaagctgcaaggactcttatggcccagaagtcccagaac

SEQ ID NO: 28155 - DNA, 467 bp, Homo sapiens
  misc_feature (1)...(467): n = A,T,C or G
gggtnnnaattgtttgcagtccactagtccgtgcggtggaattccgttactctaaatatatattgtggctattttcagaattgcaatatgcctccttaatttattagaggctaacctaaattattacttttaccacttacttgaaaattctggaactttagaacatttattgttttatgcattttaattctacttgtatttttactactctaaacattattattgttttagacaagccaaaatatattttgttattatcttattcttcatttctttctgtatttttatgccactatgtatgctcaatttccttctatgtgatgaacctaattcagtacttttgttttttaatctgtgcaggtagcctggccattaaatttttatttttggtttgctgaaaaaattgtgtttatttctatatgcatacttatgcatatagaattctaggttgacatatttttagtatt

SEQ ID NO: 28156 - DNA, 460 bp, Homo sapiens
  misc_feature (1)...(460): n = A,T,C or G
atagataacantnnnctgatgatcactagtcagtgcggtggaattcgcgacacatagccagagtccaggctgcccggcccagggtgtccatgtctccagcatttaccgggccatgggttgaggagacagccgcaggctgggtccttgttacctcgagttgaacctttgaaaatgccctccctctgctggccagaccagcaggtcagcgttcccctctcagcaactggtgtgaagatggcagaggggacagagccacacagtagcacgaagatcatctccaatgaggccttcccacgtgagggaaccgtggaagttgagttgcccacggtttgccaggagggtagggctgggggaactctgaggaggtttcctctcctgagctgctgccctcttctggcatgacactttcttagcccttcctcccccagtgccacaggggacataggggtgagctggagcg

SEQ ID NO: 28157 - DNA, 458 bp, Homo sapiens
  misc_feature (1)...(458): n = A,T,C or G
nctagatgatcactaggctagagcggcggaattccaatatatcaacaattggttttatttttttctcttttgaatatgttggtgataattccgtgacagttggtagatggggttcattcttccggttcaggaatcactatgtatttccttcttgtgataaaaataaaattacgagaaggcaatgtgaggttttagtacatcatagcactttattttatgaaaacatgtagcagattttccacaaaaatgcttatttttaatccaaaagtatattgcttcataatggtattcagtgcacagcagagtaaaagaagttaattcatgatgtactggttaattttgcatggcttcttaaggccagcaaaatgctggcagttttctttatctttgtgaagaacaggcccttcctgtttggggaagttggcttttatgtcaactcttggccagtggtcacttcc

SEQ ID NO: 28158 - DNA, 459 bp, Homo sapiens
  misc_feature (1)...(459): n = A,T,C or G
atagatgaccctnggttgatgacattagncagtgcggtggaattcctctctccttgtcatgcagcccacaggggagatggtcaggccagtgtgggggctaatgaataaatgctacactgtgcccactcaggtgggtaagggctggcactcctcttcccctggagtggggcggctgtgctggcacccttggcagacacagtaagggggactgcacctggaaaggatgggccagtcggggcaggactactcatcactcatagtgtgggtgtcagggttgtgtcacccctcccacctccctctgcagagacgcaaagtcaagagtaggaagaagccaacctctgaggtaaggcttcccctggaaggcccagggctggggctctctcctttcagagctcagttagacccacacacacggcagggagtcccaaaggtagtggcaggccccctccaggaaactca

SEQ ID NO: 28159 - DNA, 464 bp, Homo sapiens
  misc_feature (1)...(464): n = A,T,C or G
gggtgcnaatcgatagcatacatcnngcgnggaantaacaaggtgaaattgggcaaccgtggagggaaacgctactcttgatcattgaggtttctaatgtccagggatattgtcttctttttcttcctatttttcaagtaacccaacagtgccctgctccaggggtgctcagaacgcattccagactcatggcggaagcctccgtgggggaaagccttctggcgtgggcagcctgatgctttgctgcatcattaaaagccagaggctgccccagacagagtgcccaggtgcctgggccttggctatgaacacattacgggctgccccagacagagtgcccgggtgccggggccttggctatgaacacattacgggctgccccagacagagtgcccgggtgccggngccttggctatgaacacattacgggctgccccagacagagtgcccgggtgccggngcct

SEQ ID NO: 28160 - DNA, 461 bp, Homo sapiens
  misc_feature (1)...(461): n = A,T,C or G
cccgccccattgagagctcacatcngacgggcancgaananagactcctccactctgtgggaatgacacggactccctctcctgcgacagttgtagttctgcaactagcactccgtgtgtgtcccgcctggtcactgtccaccacctgtgggccagcaagaatggccgccatgtcctgggcctgattgaggactatgaggccctgctcaaacagatcagccagggacagacgctccttgctgaaatggacattcaaacccaagaggctcccagctccacaagtcaagagctgggaacaaagggtccacacccagcaccactgagcaagtttgtgagcagtgtgagcacggccaagctgaccctggaagaggcctacaggcggctgaagcttctctggagagtctcactccccgaggatggccagcgcccccttcactgtgagcagattggagaatgaaggc

SEQ ID NO: 28161 - DNA, 475 bp, Homo sapiens
  misc_feature (1)...(475): n = A,T,C or G
aattgaagaccctaggccaatagtaggccatctgagcctccagtccctgcttcaacagggccacctgctacaccgacctctccacagacacctttgtgtgcaactgcccttatggctttgtgggcagccgctgcgagttccccgtgggcttgccgcccagcttcccctgggtggccgtctcgctgggtgtggggctggcagtgctgctggtactgctgggcatggtggcagtggctgtgcggcagctgcggcttcgacggccggacgacggcagcagggaagccatgaacaacttgtcggacttccagaaggacaacctgattcctgccgcccagcttaaaaacacaaaccanaaaaaggagctggaagtggactgtggcctggacaagtccaactgtggcaaacagcaaaaccacacattggactataatctggccccagggcccctggggcggnggaccatgccaggaaagtn

SEQ ID NO: 28162 - DNA, 474 bp, Homo sapiens
  misc_feature (1)...(474): n = A,T,C or G
gaggggnatcgatgcgtctttagtgcgggcaantccgaggcggatctctgaagagctgggtcgccagcctctcccgcgcacgttgcctggtttccatcacctacttggtcccgcgcgctccctcgtgtcgcccctcggagcagcagccgccgcggtcgccgctacccggaaagaagtcagagacgccgcgaggtcgccgccaccgccatgcccaagaataaaggtaaaggaggtaaaaacagacgcaggggtaagaatgagaatgaatctgaaaaaagagaactggtattcaaagaggatggtcaggagtatgctcaggtaatcaaaatgttgggaaatggacggctagaagcaatgtgtttcgatggtgtaaagaggttatgtcacatcagaggaaaattgagaaaaaaggtttggataaatacctcggacattattttggttggtctccgagactaccaggataacanagct

SEQ ID NO: 28163 - DNA, 521 bp, Homo sapiens
  misc_feature (1)...(521): n = A,T,C or G
tgaatccaagaaaaaaaattagaaaaccgtcgaaccacactcagagtggtggaattccatggcactgccctgcagaactccagcagagccctttgactgggaaggaagcaagtggagagcataggagaggtggggaagcatggtactgccgtgcacggctccagcaaagccccatggctgggaaggcagggtaaggcactgtgcatttcaggaacttacacggaataaaagaaaggttaggatgacagggaggcagtgtgagaaaacctgcttctggagcaggaagtccggtgatctcagagcaccaggaaattagcataaggaaacagcaaaattgtccgttaagaatgcagagccaaaacttcatggtagaggagtgcagcggcaatgtgtttggagagtaggaaacaggtggagagaattataaattacaaggaaccctgagaacagatctagagtaggaaacaagtggagaggaatattaatttacaaggaaccctgagaacagacctagagtangn

SEQ ID NO: 28164 - DNA, 451 bp, Homo sapiens
  misc_feature (1)...(451): n = A,T,C or G
ggccgtaatggaccctccgatacctggacgctacggaaagnctggnggaattcgggctaagaggcgagagcagtggtggaggcaagggatgttgtcaggccaaatgttttgggggagtccagagccgcctgactcggagtcctctgggcatcaacctctgatttcctcatgtgcctccagagttcccagaagtgagggtcactcctgaggggatgacggcgtggacgaggaacagctgagggcgacagaggatctaggctaacaggagagactccaggagtgggggcagatcccaaggcagcctcctgctccccagtggtgggtgccccagctctacctggtgtggcagggctgaggctccatgtgcatctgtgagcatgcgtgtgacaggtgcacagacgggggactggagggagacttttatacgttttgtacctttgtaaccagagag

SEQ ID NO: 28165 - DNA, 445 bp, Homo sapiens
  misc_feature (1)...(445): n = A,T,C or G
ngggaaaactggacctcccganattgagaccattgcaaaagcncgaggcggcagcggctgcgagaggcggcggcacgacgacggtcccttagcccagccaccattagcaccaagcagatcacttgcaggtattttatgcatggtgtgtgtcgggaaggaagtcagtgcctattctcacatgacttggcaaacagcaaaccgtccaccatctgcaagtactaccagaagggctactgtgcctatggaactcggtgcagatatgaccacacgaggccctctgctgcagctggaggtgctgtgggcaccatggcccacagtgtgccctccccagctttccacagtcctcaccctccttccgaggtcactgcatccattgtgaaaactaactcacatgaacccggaaagcgtgaaaagagaacattggttcttagagaccgaaatctct

SEQ ID NO: 28166 - DNA, 457 bp, Homo sapiens
  misc_feature (1)...(457): n = A,T,C or G
aagacggnnnnnccgccaatgaggccctcgctagtgcccttcgcancgncnggnggaattcgctaggctaacagaatggggcttgggaattccaggggcatttgagcatccacttcattagccagtgatctggacagggacagctggctacagggaatcaaaggctgttctgtacagttttaccagaaactgtgaccttgggtaaggctcctcacttttctgggcctcaacttcctcatctgcaaaatcagagcattagctgctctccccatgattccctcccagttttaattaaaagtctctgatctggagcacatgagggttgcgagcctggtgcacctggttcctgtctccgtgggctggtttccttcagcccctgatgcccaggctgggtgcaggctctcatctggtccatgcccagatgctgcctcagacaagaactctgggaatcctaaca

SEQ ID NO: 28167 - DNA, 449 bp, Homo sapiens
  misc_feature (1)...(449): n = A,T,C or G
aaaaacacttcgggaccttcgnantantganaccatcgganangcncngaaagcaaagattngggaccgaggcccctagcacgcctgccattttgctcccagctccttatgtgtctgcacaccgtggccctgcaaatcggacaagtcatctcttaccacaactgtccaggcccctggagcgcgtctcccactgcctttcagattaactccaggcctgtaaacccagggccagggcccagaagacggcttccagccagcacatctgccttctcccgtcagatgcctctcccagctttccaagtccggactgctccctcctcattccctgcctgagccctctcctccttcagacaaatgctggccctcacacaaggccccactcagacccgactctctgggaagcctttcccaccggagcagggagccacggtcctgggccttcagatgcc

SEQ ID NO: 28168 - DNA, 451 bp, Homo sapiens
  misc_feature (1)...(451): n = A,T,C or G
gaaagacttggcnactacgaaacagatactgactgnanaancncnnnnaattnaggaagantgcatgtgcgatgatgaggaggactacgatttgttatactctgatttagtaactccgagccagaggtggatttggaggatcagtactataattccaaagcattaaaagaagatgacccaaaagcggcattaagcagttttcaaaaggttttggaacttgaaggtgaaaaaggagaatggggatttaaagcactgaaacaaatgattaagattaacttcaagttgacaaactttccagaaatgatgaatagatataagcagctattgacctatattcggagtgcagtcacaagaaattattctgaaaaatccattaattctattcttgattatatctctacttctaaacagatggatttactgcaggaattctatgaaacaacactggaan

SEQ ID NO: 28169 - DNA, 460 bp, Homo sapiens
  misc_feature (1)...(460): n = A,T,C or G
gaggnnnnnnnnnngntttgaagactctgnaagngctgatgacatctgaccangcggnggaattctggggttcctgccggctgtattcgggccttggactggtctgagaagctacggtggagaccatccatggaaaggaacccccctgatgatacgggccccgtgcacgtgcctttggggcatattgcggccaatgagaaatggcgcgggtcacagctggcgcaagagacgcaagggaaaattaagctcattttcgaggatggcttgacaccacacttttatctgtcgaacagatgctgcattctttatgtcaccgaagctgatttggtggcaggaaatggctacagaaagaggcttgctcgggttagaaattccaataatcttaaaggaattgtagtcgttgaaaaaacccggatgagtgaacaatacttcccagccctacagaagtttactgtgctgg

SEQ ID NO: 28170 - DNA, 458 bp, Homo sapiens
  misc_feature (1)...(458): n = A,T,C or G
cagcnnnnnnnnnnngnnatcgagatcactagtccgngctgtggaactctcgcttaggtgagatgggaaggcaagcaggggtgagctgcagggggccaggaaagggtgactgtgactctgggagcagccgtgccaaggccctgggacaggaggggcttggccagcctcaaggccttactccagcccactgcactctcagattccagctccctggggcaggtgagatggccgagccaggtccttggatgatctctgttcctgtttccctcttcccaggaagcgccgcggagccatcaacagcaagcagctcacctacctggagaaataccggcccaaacagaggctgcggttcaaagacccacacacgcacaagacccggtgctgcgttatgtagctcacgaccctggctgggcctggtcgtcatgtaagtcaagaccttggctggacctggaggccct

SEQ ID NO: 28171 - DNA, 464 bp, Homo sapiens
  misc_feature (1)...(464): n = A,T,C or G
caggggnnnnnnnnnagnattgtagacattgnnnannattgagtatcattagaccagtgcggtggaattcccacaagcgagtcactaagcctcacttatcaaatggagataatagtagggttgctatgacgatgaagtacaaagtacctgcaaagcacttggatctgtataagtgcgcaatagtagcctttttatgtcaactgtgactgggagctttgaaagtgaacatgactcgtggttggttatctgggaattgaagcgtatgcggggagaaacatgtgggtttgtttgtctttgactatttttctccccactaaatcaatactgaagcagctgcgtatgtggcccaggggaggagtgtggtccctctgtgtgcattccctggaatgtggaacttcctagatgccaccctcctcttggagagcagaggctggtcttacttttttattgtactttcagtgtct

SEQ ID NO: 28172 - DNA, 451 bp, Homo sapiens
  misc_feature (1)...(451): n = A,T,C or G
gaaagaatgagaccatcgaaaaactgtgacctacgganagnctggnggaattcgnggcagtcctgctacggggctttgcagcatggccccgttaatggtggggggataaaaagactaggaaggaaagctccaaaggcccctgctcctcacctcagagccctgaagcagagctaaagttggactgctccatgctctccttagggctaccccaggtgcggttcctgtgtggagtcactgaggtcatccacgctgaccgctggacggtgcaggccaccgggggccagctcctcagtcggcagcagctgcccctccagctggcctgggcgatgtccatccacaagagccaaggcatgaccctggattgtgtggagatttctctgggccgtgtgtttgccagtggccaggcctatgtggccctttctcgggcccgcagcctgcagggcctacgtgt

SEQ ID NO: 28173 - DNA, 444 bp, Homo sapiens
  misc_feature (1)...(444): n = A,T,C or G
caatggcgcccccttcaagnggcccctcgnanagncnggnggaattcccatgctgcagagctgatggagtgatgttgtgggcacaatgtatttgtcagttttctcctttaacagccatgccttctggaatctggaagaggacaccactcctgcagtcaccgggcagccacatagcagctgcaggtcccaggagggcctgaggtcaaagctgtggaaggccctcttggtatcagggctctctccccatggcctcttccccacctctgattgctggttgtggccccatagctcatcacccctgtctcctgctgaatgtgcagggctgatgtggcactgaggagctgactttggtcaaaggccaggctctgcccagcaggggacttgactgcccctcccgctgcgtgtccaggtccaaagtggagagcctgcctttgggtttagttn

SEQ ID NO: 28174 - DNA, 439 bp, Homo sapiens
  misc_feature (1)...(439): n = A,T,C or G
ccccattatgcncatcgatagactccntaannacacctatcaaacttatctaaaaaagaaaaataggaacagccatatgcaaagttttcccaacaggaaaggacatattagattaaaatacattgcggcctgggcttagtggctcacacctgtaatcccagcactttgggaggctgaggcaggcagatcgcttgagtccaggagtcgaaaccctgtctctacaaaaaaaaaaatacaaaaatctgcctgttgtcccacccactggggaggctgaggtaggaggtcaaggctgcagtgaaccttgatcattgctactgccactccagcctaggggacagagggagaccctgtctccaaaaaaaaaagtgtatatgtatgtgtgtatatatagcaagagagagttctgtgatcaatggaaggcaaaaccagtaccactgag

SEQ ID NO: 28175 - DNA, 442 bp, Homo sapiens
  misc_feature (1)...(442): n = A,T,C or G
nactgggacctaccgannatcgagagcatctgaagggccgcacgtccattggctctttcatcggagcgttgtacgcggaggagcgtttcgccagccgcactaagcagcgggcccgggagtgggccaagagcatgacttcggtgctggaacctgtgttggacctcacgtacccagtcacctccatgttcactgggtctgcctttaaccgcagcatccatcgggtcttccaggataagcagattgaggacctgtggctgccttacttcaacgtgaccacagatatcaccgcctcagccatgcgagtccacaaagatggctccctgtggcggtacgtgcgcgccagcatgacgctgtcgggctacctgcccccgctgtgcgaccccaaggacgggcacctactcatggatggcggctacatcaacaatctgccagcggacatcgg

SEQ ID NO: 28176 - DNA, 452 bp, Homo sapiens
  misc_feature (1)...(452): n = A,T,C or G
gacagtactgaaacctacgaatacttgtagctccgganagncnggnggaattcagaaggaaaagctcagagagcaaacgttgctctctagtttcccccaacctccatttcctctcttccttcccctgctgaccaaacttgatactgtccaccaggggagactgccccccgactcggctgtccctcactaacgcggtggtccccgacctagggtcgcagatgcacttcccgaggcacatgcgggcgcaacaaggtaactgcgctccaggcgtggaaccccagtcctgagcgatgtgaaaccaaccccaagcgggctgtgctcacagtttgggaaaaggtaatgtctctgatccccccatatccacccctcccccaacccttgaggacagattcgggtaccgcaaaaccgccaggcacagaagggaggagagctgggacggacaggctactccg

SEQ ID NO: 28177 - DNA, 472 bp, Homo sapiens
  misc_feature (1)...(472): n = A,T,C or G
ntttgagacctgatgaccngtcgnggaanccaacgcttggcggngaagtgctgttggagccgctgtggttgctgtccgcggagtggaatcgcgtgcttttgtttgtgtccctggccatggcgctgcagctctcccgggagcagggaatcaccctgcgcgggagcgccgaaatcgtggccgagttcttctcattcggcatcaacagcattttatatcagcgtggcatatatccatctgaaacctttactcgagtgcagaaatacggactcaccttgcttgtaactactgatcttgagctcataaaatacctaaataatgtggtggaacaactgaaagattggttatacaagtgttcagttcagaaactggttgtagttatctcaaatattgaaagtggtgaggtcctggaaagatggcagtttgatattgagtgtgacaagactgcaaaagatgacagtgcacccagagaaan

SEQ ID NO: 28178 - DNA, 587 bp, Homo sapiens
  misc_feature (1)...(587): n = A,T,C or G
aagacgntnnnnnaggggnnnnnnnnagggnnnnnnnngggtcgaancacccctcgatagcactagtccgngaggagcaattcctcggggctgtgaagaggcaagtgctggtgcccaggcctgggtcagccctcaagaccagaggaaactagggatcttcatctttggggctccctttcaaggaactccagaagccctgggtaggggcagagcagagggcccaagatgcaaacttccatgcactcatcacccaggacattcatgggcaccaggccataaactatctttccatggaaacctccagccccaacgtggcagggtcagcagcctgcagagcagcagagacacaggtgggccttaggcctgacctagtgcctgggtgcagcagggtcaccacccctcccattttcctcccctcattcttcctatctggcatgtcttggagcgcacanagggctctgctatctaaacccttgacccanaatgttatcactaaccaccctgaatacaaaggccccttcccccaagcagaagcacaactcaaagggacccagcnctctncccctgccacacattgcccacaatgn

SEQ ID NO: 28179 - DNA, 441 bp, Homo sapiens
  misc_feature (1)...(441): n = A,T,C or G
ggattgagaccttgtccgngtggagaactctcacagcctcgtggacgtgtactatcgggagggaaaagaggaggcagaagagacgaatgtgctgcccaaggagtagcaaaccaagccagcagaagcgccccggctgcagctgtcttcaggcttcgcttggaatgtgggactagactctctgaccccggccttgccacctctagcagagagctcatacagcgaggaggatgagaagccacaccaagccacgataaagaaaagcaagaaagaaagggagttggagaagcacaaggcagagaaggaactgtcccgcattgaggaggcgctgatggatcctgggcggcagccagagtccgcggatgattttgaccgactggtgctgagctcccccaacagctccattctgtggctgcagtacatggctttccacctgcaggccan

SEQ ID NO: 28180 - DNA, 442 bp, Homo sapiens
aaaaaaatcaaacctccgacattgagaccattgcaaaggcgctgggataacagtcatgcgccactgcaccaggcctgttttttagctctctataagggaggcttttggtttcaaaaaatgtacattctgcatctctcatgtaccatctaatgtttgtcttcctttggggttgttccagcagctgcttggtgttccgcaactttagttaactataatttttctaatatttttatttcattttttgtattttggcctgttatccatatggaactcattatcatgaatagtatacattgggaatcttttttcccccagaaaatatccacttgttccaatacgatttaataactagaagactcttttctcactgatttgaaatgccacttctatctcgatatttaaattctcacatctatatgagtgtcctcgtgttacatctcta

SEQ ID NO: 28181 - DNA, 577 bp, Homo sapiens
  misc_feature (1)...(577): n = A,T,C or G
cgattncnnnnagnnnnnnnnnaggggnccnnnggttcgaaccacactcgagtgagcagtaattcgagcacagcatcgtcgggaccagactcgtctcaagccagttgcagccttctcagccaaacgccgaccaaggaaaactcactaccatgagaattgcagtgatttgcttttgcctcctaggcatcacctgtgccataccagttaaacaggctgattctggaagttctgaggaaaagcagctttacaacaaatacccagatgctgtggccacatggctaaaccctgacccatctcagaagcagaatctcctagccccacagaatggctgtgtcctctgaagaaaccaatgactttaaacaagagacccttccaagtaagtccaacgaaagccatgaccacatggatgatatggatgatgaagatgatgacgaccatgtggacagccaggactccattgactcgaacgactctgatgatgtagatgacactgatgattctcaccagtctgatgagtctcaccattctgatgaatctgatgaacttgtcactgattttcccacggacctgccagcan

SEQ ID NO: 28182 - DNA, 549 bp, Homo sapiens
  misc_feature (1)...(549): n = A,T,C or G
nttcggaccactatcgagagggaattccgtgtgtgcctgcttccttcgccacgtgagtgatcccctcaacttcttccaagtgctctcccttctctgttccagcctcatccatctgtccctctttctcagtacccacggccctctcctcccatgtgtggtccatgaccttggggcccagccctgttctgtgggcacttctgcctctactcagcctctgcgccctgctctcaagagctgcctggactatgctctctccacagggagcccttccctccctggtaggctgagtgctccctggtgacccatccctcatttgggctacagagaggatagagagggggaagagagaggcttgtctgcagcggcctcaccggngactccttatctgttctttactggcacagggggaccagttcagcctttatgcacagtacgtgaagcaccgacacaaactggagaatggtctggctgcgctcagtcccttaagcaaggtaactttttctccaaccttcaagagaaaagtagagaggccagaaagacctanaaacn

SEQ ID NO: 28183 - DNA, 442 bp, Homo sapiens
  misc_feature (1)...(442): n = A,T,C or G
natcgagatcactagtccagngttgtggaactctcaaattgaaaccaagtaaaagcttatgatgccaaacttctaattaagaaggattttttcatttagcttctttgctgtatataattattctcttctttgtgtctgttttatgcagcccatttctacttcctttgtgtgatgactagatttttcccctcctttgatattatcttcaactcatatacatagaaaacacttgaaaacaaaactgaaaagttctttttagcaatgtttttagtttgagataaatcagaagtacagtcataagcattacatccctttcctttggtaatgtttaatcattctatgaatgtttcttttgttttttttttttaaaattttttcttttatctcctgggaccaaatcccaaatgcatttttctgtatctcacccagcatatggccaacn

SEQ ID NO: 28184 - DNA, 553 bp, Homo sapiens
  misc_feature (1)...(553): n = A,T,C or G
nggggccccccaattcggaccacactcgagtgtgcngtaattcgaanacaaaggataatgagagagtggtggctatagaaatagaatacatcacctcacttcaggaagttgccactgcctttggaaagcgcccccagggaagcctctgatggagccatacaaatgctcatgagataattcttaacatcagccaggcctagacagcatgaagccactaataacccttcctcttcattctgccccattcctagaaatatcagtgtagcaaaaggagagaagccaactaccccctctttcacagaggcgagctggctggctctgttgaccctagctgtggggtagagagattcttacctatgatgaaaattgatgtgttaatatatttcggaccaagagtatgttttgctacttaaagtggttgcaaagactattacctanaggtgatccacatctgaggaaaacctctcccactgaaataaattgtgcagagacaggggaaaacaaattanactttaattttcattacatttcttcagttgtacttggtaagcat

SEQ ID NO: 28185 - DNA, 456 bp, Homo sapiens
  misc_feature (1)...(456): n = A,T,C or G
gggcngcnnnnnnnaacggactgcaaaacctctgncnggncgaatnncagacactttgcacttggctgctgttgctcggccccgggctcctggcgaccgtgcggtccgaatgcagccaggattgcgcgacgtgcagctaccgcctagtgcgcccggccgacatcaacttcctggcttgcgtaatggaatgtgaaggtaaactgccttctctgaaaatttgggaaacctgcaaggagctcctgcagctgtccaaaccagagcttcctcaagatggcaccagcaccctcagagaaaatagcaaaccggaagaaagccatttgctagccaaaaggtatgggggcttcatgaaaaggtatggaggcttcatgaagaaaatggatgagctttatcccatggagccagaagaagaggccaatggaagtgagatcctcgccaagcggtatgggggcttcatgn

SEQ ID NO: 28186 - DNA, 574 bp, Homo sapiens
  misc_feature (1)...(574): n = A,T,C or G
agggtcattnnagtnnnnnnnnaggnnnnnnnnattcgaccactttcgagtggccgtaattcctactacaacagatggggaatctgttacgttccatttgtttgaccatgtaaccgtaagaatatccatacaggcctcacgttgccattctgatacaatcagacttgaaataattagtaacaaaccatacaagataccaaatacagaacttattcatcagagttcccccttgctgaagagtgagttagtgaaagaagtaactaaatctgtggaagaagctcagcttgcccaagaagtcaaagtaaacatcattcaggaggaatatcaagaatatcgccaaacaaagggaaggagcctatacacacttctagaggagatacgggacctagctctcctggatgtttcaaacaattatggaatatgagaggctcttacttcactaagagctgtcatatgtgaatgttttacagtcttttcaaacttaacatttaatgtgtgtcactcagtgctctagtcgatcaggactgggtagctatttcgcatatatgtaaaatgttctcagccgggcacggtg

SEQ ID NO: 28187 - DNA, 490 bp, Homo sapiens
  misc_feature (1)...(490): n = A,T,C or G
cattgaatagcgtaccctaggacagcgncgcgtaattctagattgactcctggccaatatggtgaaaccccatctttactaaaatacaaattttaataaaaaaaatttacccgggcaagggggcatgcccctgtattcccacttactaaggaggttgaggcagggaaataatttgaacccgaaaggcaaaggttgcagggagctgaaatcgccccattgcttttaaccctggcaataaagcaaaactttttttttttttttttttttttttaaaacccggggggaaaaaaaaaaaaagggggtttttaaacctgggaatttttaggggaaaaaaaaaaagggcccccccgggaaaaaaatttgaaagggagggggcccccactttacgccccttttttatttttaggggaaaggggaaacaatttttttggccaaacaaaaaaaattttccaaaagggttaaagggaaaaaaaaatttggccccccccgg

SEQ ID NO: 28188 - DNA, 475 bp, Homo sapiens
  misc_feature (1)...(475): n = A,T,C or G
gcccgcccactgagaccntcggaatgatgaccgtaggaagngcggaggaagactggattcaggcgtgcaatcagatggagttcttcaacacctacatcgacctgggcatgtcaagctgggaactgcctgacttgagggaagggagagtaaaagccatcagtgactcagatggggtgagctacccttggtacgggaacaccacagaaactgtgaccctggttggccccaccaacaagatctccaggttctccgtcagcatgaatgacaacttctaccccagtgtgacatgggcagtgcctgtgagtgacagcaatgtgccactgctcacaagaatcaagagagaccaaagtttcacgacctggctggtggccatgaacaccaccacaaaggagaagatcattctgcagaccatcaagtggaggatgagggtggacattgaagtggaccctcttcagctcttggggcagcgggcccg

SEQ ID NO: 28189 - DNA, 485 bp, Homo sapiens
  misc_feature (1)...(485): n = A,T,C or G
cttgatagcatgcatgnnggnggaccttacacgctanagcacacagaaggcactgcagcctgtaggagaagcacaacacaaagccggcaggacttgggtttgtcttttaaaccacggagaatgctaaaatacctttctaaagcatctttgctgaagataagaagtgcactcgaatttgctcaacttttcatacacacctcaggaaaacaaaataaaagcctgtttagtttcatttaaacatccagggcttaacaaacaaaacaccaattgtcaggggtctgttacaaagtgatgaaataggttcccattacacaaaagcacaatttcaaccacaggttcaaatttccattgtgttccttgcctcaactatctcatatggcaattctaccttattgtttctttttgatgaaataaggtactagaaatcactgcgctcattnttcctaatgaattccttaattntacacctcttgcctaaatttcaa

SEQ ID NO: 28190 - DNA, 473 bp, Homo sapiens
  misc_feature (1)...(473): n = A,T,C or G
agcgagacnnnnnttcgatagcactcgttagtgtcgtggaattcatgagatcccaataactctggaaagttgtaaaccagcattttatcactatttcacagatgaataaaactgagaatctgaagattaagtaaatatacctgatttctatagctatgacttgagtaggctgtactcttgttttatcattttgaagatttatttttctgtaacaatcactatagataatatatcatcagtggaagataattgaagtattgtgtggctttttataatgcacatgtgtgtgtacatgtcatataaaaataaatactttttaaaataattttgataatacctattaaatagtccaaattataagagaagtaggaatacaaacatgaactgaataatgatttcaagcccagggccctttctgctataacatactgttcccatatcgtattactagttttgaaattactgagatgttn

SEQ ID NO: 28191 - DNA, 473 bp, Homo sapiens
  misc_feature (1)...(473): n = A,T,C or G
agggcgcnnnnnnnttgatcgacgtcactagtccgtgtggtggaattcgaccctgcaagcctaatgttggtttgaacccttttggtttgttcagttgccagcctccatctctcccactgtatggccgtgcctagaccgatggcagccatcgaatattcctctgggctcacggggtgttttccacccccctgcagcaactaagatggtgggggagagggggttagaataaagcatctgaatacagttttcaggacctcaagcagacttcctagagacttgtttctgagacagttctttgccttcacttccctgctagctgggaaagaagagtggagcagagactctgcctggccactgagaacagccaaattcacaaaccctcagtggggctttgtttttggattttctccggactcatcagtaaacctgtagaagtgtcgctttccagccttttgtttctggatcctcaaaac

SEQ ID NO: 28192 - DNA, 475 bp, Homo sapiens
  misc_feature (1)...(475): n = A,T,C or G
agcgggannnnnnacggtcagacgtccctaggacacgngcgnggaattcgccacaaacataattctaaacatttgtttcttagaaattcttattggttagagaaattattttgaaaaaattcttttttctgaaattaaatccctagaccctgaatctccatctcccactgcaggagccctggcaaacacctcagtgccagtggggtcaggaacaactcctgtttggagctcagtgaggggctttggggaggggaataggggagtgcattttacatttcaattcacttaaatatttaatttgtttaaaaactttaatttctaggcagtatttgaagacagacctctggctccatcgttcaacgtttacaaaaagatgagaaaaatgccagcaaaagctcattgcttttgcaggatgggggaaggaggggaagggtaggggacatagcccactcaaaggcaatgctttctcccccaa

SEQ ID NO: 28193 - DNA, 557 bp, Homo sapiens
  misc_feature (1)...(557): n = A,T,C or G
ggcgtttaatcgaacactgtcggaggccgtattattctaggnccatccttccgtctctgacattntgagatctttggaaaggactctatctcatcctcccctcgacaagccaagaatgagaattgggaataagtgaacagagtttgagggtttctgggcggcctccgtgtcacccaaagtcatgatcaattcaggagactgcccaaggcttgcagaagaggtaagggagtgaggcactcctatcccagtctcccaggtttggttgagggctccccaaggcagggcaagatagcggccctgtcactgaccctggcctgtggtggtctgagctggggagggaaggacaccaatgaatcagcttgggacctctttaggccttccccttttcctccaccccgatgctccttagtgatgctctgaggcgtggccacgatctccctcccaggtggtatcgcccacctgaaaaaatcctgagaatttttccatcttggcctctccagaaaccggccaggcanggaaagaggccgtcaccaaaagcancangcgtgggtgtgatn

SEQ ID NO: 28194 - DNA, 512 bp, Homo sapiens
  misc_feature (1)...(512): n = A,T,C or G
agccgtgcccnnccncnnnaattgaattgcatancactagtccangnggtggaattcgtggtggtgggcgcctgtagtcccagctactcgggaggctgaggcaggagaatggcgtgagcctgggaggcggcgcttgcagtgagccgagattgtgccactgcactccagcctgggcgacagagccagactcccactcananaaaaaaaaaaaaaaaaaaaaggttttttttaaagcccccaagggaaaaagcccttcctaaaaaaaaaaaaattatcttttccaaaaaacaaccgggtttaaaaaatatttttattgtttttttcccccccccaggtaaaaaaaaaaaaggggcccaaaaccctttaaaaaaaaaggggttttttttctggcgggggccagggcccaaaaattgggcaaaaaaacctcccaaaggggagatttaaacggggggcctaataatctattttaaaaaagggtttttcaatgaataaccaaaaaagggttttctgcc

SEQ ID NO: 28195 - DNA, 488 bp, Homo sapiens
  misc_feature (1)...(488): n = A,T,C or G
cttgaattcataccctaggccangnggtggaattccagttactcgggaggctgaggcaggaaaatcgcttgaacccaggaggcggacgttgcggtgagccgagatcgcgccgctgattccagcctgggcgacaagagtgagactccatctcacacaaaaaaaaaataacaaaaaaactcagaaatgctaagtgtacttatttgttgaagaaacttgttacatattactaacatcttttttttttataaaaaatacttttcccataaccaaaaaattcagtgagcaaaagggccttgcttgaggtttttgcaaatctctcgggggtctggcttaggggaaggcagctgggccctcatacctgcctccgcacttaagctgtttgacataaacccagcttcttgtgagtgaaagggaagggcctggggaccctcaaaggttctcggaccacactttgagaactcctcgtctggaacacaggcctggggatg

SEQ ID NO: 28196 - DNA, 396 bp, Homo sapiens
ggtccagcaggcgtggtgacaggtgtccctgtaaggtgtgtgtagcgtatgttgcgcttgagcagcaggggccgtccacgtgtgggcacaacgggccgagccatcagtgggtgcaactttacaaagtccaggaccagggatggcaagtcttgggatgaattgtagccttggctgcgcaatgaatctgtgatacactggcgtgggggacgaaggtggtgaacctcgggactccaccacctgcctgccctctccacaaggccagaccctttgacccttccctgggctctgtctactcagcactggccccaggcctgggcactcaccgagccaggccggggctcaggcaccccaccctcatagcgaccccagcgccgggaaccatcctggtattccata

SEQ ID NO: 28197 - DNA, 439 bp, Homo sapiens
  misc_feature (1)...(439): n = A,T,C or G
ggattgagacactatccaggtgaggacttcgctccagacagagagtgggagaaaccggggagcagcgggagcagcaggtccggggggagctgttccgctgcgctgccctcgttattcacacggacgctgcggagcttcccagggctgcttccctgtccccctgggtggaggctgccgtctaaacctgactccagagtttaagatgcaatggccagaagacatgaacgtgtcactagaaggatgtggacatgggctccgggactgttgatgatgactgtggtgttttggggtcatcaggggaatggacaaggccaaggcaattcccagtgtccagcaggattataacttctacaaagaagttgtctttaaaatttttgatccagacttattttttccttttctgaattaataactaaccacctgtgccactgagttaggn

SEQ ID NO: 28198 - DNA, 450 bp, Homo sapiens
  misc_feature (1)...(450): n = A,T,C or G
natagaagacattagatagagcggcggaattcgccatgaagaatacattaaaagaattgagggactttgtagagaattttggggctttggtccaacgggtgaatggctgtgcggaggcctgtgttcgggagggcctgggagaaagagggcacccagcaccccggcgtctctggccctttcttattctttggctcctcatccaccgtgatgagaagcgctgctgtggccacggcacactgcttggcttgggtggcgggttcatggccagttggtgtcatcagcaaagagaaaaagcacaggttagctccccattagatggaaaagtgtagggactgagaagggctgcagcctcagcagtgtacagagtccccggcgctctgaggttggagagaaagaacagaccagcgcccttcccgactacatccgaaacttcacacagggtgtttctgg

SEQ ID NO: 28199 - DNA, 495 bp, Homo sapiens
  misc_feature (1)...(495): n = A,T,C or G
ccttcgcgttcgcataccactaggccagngaggtggaattcccgggctcccatctacgtacgggtgcccttccttgagggctggagactctgaaagacacaccgcccccacggctcatcaagtcacacctgcccctggctctgctccctcagactctgttggatcagaaggtcaaggtggtctatgttgcccgaaacccaaaggacgtggcggtctcctactaccatttccaccgtatggaaaaggcgcaccctgagcctgggacctgggacagcttcctggaaaagttcatggctggagaagtgtcctacgggtcctggtaccagcacgtgcaggagtggtgggagctgagccgcacccaccctgttctctacctcttctatgaagacatgaaggagaaccccaaaagggagattcaaaagatcctggagtttgtggggcgctccctgccagaggagaccatggacttcatggntcagcacancgtcgtcaagn

SEQ ID NO: 28200 - DNA, 464 bp, Homo sapiens
  misc_feature (1)...(464): n = A,T,C or G
agagacgggnnccnccaatgaaaatcanttangatcctagcaccnncnggnggnannnatttgatgatgtcccctcgtactgggatgcatgggacgtcatggactaccacctggagacacggaagcctgtgctgggccaggcagggaccctggcagtgggcaccgagggcggcctgcggggcagcgcctggttcttgctacagatcagccccaacagtcggcttagccaggaggttgtgctggacgttggctgcccctatgtccgcttccacaccgaggtacactggcatgaggcccacaagttcctgaaggtggagttccctgctcgcgtgcggagttcccaggccacctatgagatccagtttgggcacctgcagcgacctacccactacaatacctcttgggactgggctcgatttgaggtgtgggcccatcgctggatggatctgtcagaacacggcttt

SEQ ID NO: 28201 - DNA, 464 bp, Homo sapiens
  misc_feature (1)...(464): n = A,T,C or G
cgcgncgcccaatagagnccnctngatagangaccattagtccangcggtggaattcacttactctaaaaattacacagagcagtgaatgaaatacaaatcctcctttgcctccactgagggatcctacttagaaaagcagccatgtttgcagtttgatgattccagggtctcccgttgacctgactcatgccatgatatggatggacctattggttccaaatataatccctgttctggggcccttggcattccagacagctttgagcggagcttggatcagttcctgaaagcaggagatgctgaggcaaagtgtggtcctgagtcagtggctgctgctccgggttgggattgtttgtagactgaggagttcagggcctgggcaagtgcatcaacaagaaagaagcctgaacaccctgcgtgccctccggcaggggccggcggaataggcctccgtcgcctgtn

SEQ ID NO: 28202 - DNA, 458 bp, Homo sapiens
ggggcttcaaatgaagacattagatagagcgccgtaattcctcgccgctgggggaccaacaggttgcttacagctttgcaccccggcatcagcacaggggtccctgccccaccctccggcagctcagggagtgttttcctgtgaggcctcccccatcagtggaccagagggagaagcccgatgccccatcccggctttcccgtaacgcacaggacacgtgtgcaattcataggaacggcccagatcgccctcatgagtgccacctggtacaggtaggtggcgctcacgttcctgcccaaatgcagcccatcggggagtcacagtcagtccccccggcccccctcccagtccctgttggctttcggtagctctcgcatgcagttctattaacagccgtctagaagcgatgctttagtggcctaacccagggtcaaatacagctctttctagcaaaatca

SEQ ID NO: 28203 - DNA, 459 bp, Homo sapiens
  misc_feature (1)...(459): n = A,T,C or G
gcgccgtcctatagatngatctagtaatagcgccgtaagacgacccggctgcggccttcttggcgcagcaagagagcgagattgcgggcatcgagaacgacgaggccttttccatcctggacggcggcgcccccgggcccgagccgcacggcgagccgccggggggtccggatgctgttgatggagtaatgaatggtgaatactaccaggaaagtaatggtccaacagacagttatgcagctatttcacaagtggatcgattgcagtcagagcctgaaagtatccgtagatggagagaagaacaaatggaacgcttggaagcccttgatgccaattctcggaagcaagaagcagagtggaaagaaaaggcaataaaggagctagaagaatggtatgcaagacaggacgagcagctacagaaaacaaaagcaaacaacagggcagcagaagaagcctttg

SEQ ID NO: 28204 - DNA, 463 bp, Homo sapiens
  misc_feature (1)...(463): n = A,T,C or G
cgcgccgccaatggaacccctnnttagangactattagtncagngcggtggaattcaaccatgtttggaaaataattgcccacacggcatggggttaacatgttattcagctggctgtgattcagctggctctccagtgctgtggaaacagacagatgctgggccacgcccatcaggtccaggtcactccattcgcccctctgaccttccgtgcccctcttggggccctcagcaggcatgtcctcacggtactgcccttggtgtggtggcacttccgcttgacccagcagtctcaacaccatttattaactatctctgcccccgccactgtaatgtacaagtgcttctttatcatatatgaaagttcttatccgtagcagcgtttacttttgaactctgctctatcccaaattgatatgcaaatgtcaatttgcatatttttgtgtcaggaatcttttttttt

SEQ ID NO: 28205 - DNA, 468 bp, Homo sapiens
  misc_feature (1)...(468): n = A,T,C or G
tgaggttccggggnattganncctgatgacatctagacagngcggtggaattcccggctcgccgcgcagcgcggctgtatttgcggcctgtgcgagtaggcgcttgggtactcagtctccctggcgagcgacgggcagaaatctcgaaccagtggagcgcactcgtaacctggatcccagaaggtcgcgaaggcagtaccgtttcctcagcggcggactgctgcagtaagaatgtcttttccacctcatttgaatcgccctcccatgggaatcccagcactcccaccagggatcccacccccgcagtttccaggatttcctccacctgtacctccagggaccccaatgattcctgtaccaatgagcattatggctcctgctccaactgtcttagtacccactgtgtctatggttggaaagcatttgggcgcaagaaaggatcatccaggcttaaaggctaaagaaaan

SEQ ID NO: 28206 - DNA, 558 bp, Homo sapiens
  misc_feature (1)...(558): n = A,T,C or G
gcgggtnnntttcgatcactattcagagtggcggaattcagcaaattggcagcttggtaaaaaaggtggactctggccgggtgcagtagctcatgcctgtaatcccagcactttggaaggctgaggtgggtggatcacttgagcgcaggagtttgagaccatcctggccaacatggcgaaaccccgtctctactaaaaaatacaaaaaattagccaggcgtggtggtgggcgcctgtaatcccagctactcgggaggctgaggcaggagaagtgcttaaacccgggaggcggaggctgcagtgagccgagatcacgccattgcactccagcttgggcaacaagagtgaatctccatctcaaaagaaaaaaaaaaaaagggggctccctgtcatttctgtaggtcatagcaggcactctgaagtgcagagagaccataatgaaaaggcagactgcagggaactactattagttatcaactgcgtgataacaaattgccacaaacttagcagcttanaacaaacacatttaattcttttttttttcaattcagaggtttt

SEQ ID NO: 28207 - DNA, 564 bp, Homo sapiens
  misc_feature (1)...(564): n = A,T,C or G
agaggggnaattganncccccctcggaacacctactccgagnggtgcaattcgtgaattgtagagatagagattattctgagaagaacagaaaaaaatcctgttgatgggtcaactccttataggctaagtctggaagacgtaggaggggacaaatcctcaaagcctcctgcacagctattcgaagtcccaggagtggagagggcgtctctctctggcctaagggatgaaaccccgggcaccttccccagttgctatcagctccttcccttgtcagagagagcacctgccggggtgccggtcctggctcctggctgccagagtcccagacttgcctcaggctcttgcagtctcaggaatgattctgcactggaggcagagaaaactggtgaggagcatggcatagaccacttgctggctgcagagccttggctggcacccctggcacagtggtggaacagcccccacacctctgctggccccctggacatgggcaagagatccttgaggttaaagctgtcggtgtgttgatgccgccanagagggagctggtagggccctcttn

SEQ ID NO: 28208 - DNA, 454 bp, Homo sapiens
  misc_feature (1)...(454): n = A,T,C or G
aggccgagnccncccctgagaccatgatatcgtggaaancagactncaccccacttcgcctggagtcacggaacattggccgccccatcgagatgtccagcaaagtacagaggttcaaggcaacactgtggctgagtgaagagcacccgctctccctgggtgaccaggtgacccccatcatcgacctaatggccatcagcaacgctcactttgccaagctgcgcgacttcatcactctgcgccttccacctggcttccccgtcaaaattgagattccccttttccacgagctcaatgcccgcatcaccttcagcaacctgtgtggctgtgatgagcccctgagctccgtgtgggtgccggcccccagctctgctgtcgccgcatcagggaaccctttcccgtgcgaggtggaccccaccgtgtttgaagtgcccaacgggtacagcgtgctggg

SEQ ID NO: 28209 - DNA, 561 bp, Homo sapiens
  misc_feature (1)...(561): n = A,T,C or G
gcggggggaatcgatcactagtcagtgtggcggaattcggacggagaacatccggcgaagaagctcaagagcggtggcgacgaggagcggcgcgagaagccgcccaagcggaagatcgtgctgctcatggcctattcgggcaagggctaccacggcatgcagaggaatgtcgggtcctcacaattcaaaacaattgaagatgacttggtgtccgccctcgtccggtcaggctgtattcctgaaaatcatggtgaggacatgaggaaaatgtccttccagcgctgcgcccggacagacaagggtgtgtccgcagccggccaggtggtatccctgaaggtgtggctgattgacgacattctagaaaagatcaacagccaccttccctctcacattcggattctgggactgaagcgggtcacgggcgggtttaactccaagaacagatgtgatgccaggacctattgctacctgctgcccacgttngcctttgcgcacaaggaccgggacgttcangatgagacctaccgcctgagcgccgagacgctgcagcaggtcaacagg

SEQ ID NO: 28210 - DNA, 460 bp, Homo sapiens
  misc_feature (1)...(460): n = A,T,C or G
agcagcgcnnncactgagcctanggcatngcccaggcngnggaattagctttttgagccaggttgagccaggagaaagaatttcacaaggtaatgtcattagttaaggcaacgaccggccattttcacttcttttgtggtggaatgtcatcagttaaggcaggaataggccatttaaatttcacttcttttgtgattcttcagtgacttcaggccatctgaatgtatatgtgcaggtcacaggggatatgatggcttagcttgggctcagaggcctgacagtaagacaggtttcaatgaccagtcaggtttgggaatcgccggtttggggttatgctatcagttattgggtgaatttttggatttaactgtttctcatctttctcttattgtcctaatttcttcaactggcttgtgaagttaatattcagagctgaccattcttagcatagctgtgtcca

SEQ ID NO: 28211 - DNA, 454 bp, Homo sapiens
  misc_feature (1)...(454): n = A,T,C or G
attgacccccctnnnnnattgatgacccttagtccangcggnggaattcgagaaggtcaaagagttacagcgcttcatcaccctttccaagagactccttgtgatgactggggcaagaatctccaccgaatcggggataccagactacaggtcagaaaaagtggggctttatgcccgcactgaccgcaggcccatccagcatggtgattttgtccggagtgccccaatccgccagcggtactgggcgagaaacttcgtaggctggcctcaattctcctcccaccagcctaaccctgcacactgggctttgagcacctgggagaaactcggaaagctgtactggttggtgacccaaaatgtggatgctttgcacaccaaggcggggagtcggcgcctgacagagctccacggatgcatggacagggtcctgtgcttggattgtggggaacagact

SEQ ID NO: 28212 - DNA, 462 bp, Homo sapiens
  misc_feature (1)...(462): n = A,T,C or G
agcgtagcnnnctactgatacgtgagcntgncggnggcattcccacaggattcctagctcacctttcctctactccagatctgtcactctgtcttggacatctaaactcaacctggcctctccaaagaggggtcaccaaagacactatgagcttagggggtaagaggggacatagctctagtctcagtgggcccagccctgtcctggggtgcctgctatggtggggagacaatgccctgtcctaagggagcacctggagggtaggacataagatagagtcttcctggataggaataggtgtttctaaatctctagagaagacagtggaagtcattcctttgcaaacccactccctccaccctgtctgcagccctgagattgaggccccatacaccagtgaagaggagcaggagcggctgctgggcctctaccagtacttgcacagtcgtgcccacaatgcct

SEQ ID NO: 28213 - DNA, 461 bp, Homo sapiens
  misc_feature (1)...(461): n = A,T,C or G
cgcgcgcccnttaagagactgaggcatcagcccgngcgnggaattcctggaggacgacgaggaggagaccaccgcgtccacgctgcggggcaagcccaggccgccgcccgtctcggcgcagtccgccttcagctacatcccgccgcggcgcctggaccccaaagagcacagctactactaccgcccggcgcggacaggaattatttccctctatgattgtatttttaagaggcgcctagattatgatcagaagttgcactgagatgacagagaacatgcaaaaagcctgggacttcatgttaacgaagaggaacaggagaggccggttggagtgctgacgtcttctgtctatgggaagcgcatcaatcagcccattgagcccctaaaccgggactttggccgtgccaaccatgtgcaggctgacttctacaggaagaacgacatccccagcctcaaggaac

SEQ ID NO: 28214 - DNA, 441 bp, Homo sapiens
  misc_feature (1)...(441): n = A,T,C or G
gaggaactgagcgtccganactgtgcgtacgaagngaccctganctttaggggcgcggcgcgagggcagggagtgggtgtaagagtttctggcctacgttttgggcggagatgggggcctctgaggcgggtttgagcgagtgtgaccgagtttgtcctcaaagtttgacctgatgtttgggattgttgagtgaatgtgaaactgggtgcgggattgtgtgtgattgtgcctaagagggagatgtaggagaccagcattgaggtataacgtttgagctgcacttcccttgtcgaaagtgctgataattataacggtgccatcttcctggagcgtcttttttacttgaaaattgaaggggtggaaaagctaagtggtgaataattttaaaacgagtttttatataaaagcatttctttttaattggagtggcatgcaaatcac

SEQ ID NO: 28215 - DNA, 551 bp, Homo sapiens
  misc_feature (1)...(551): n = A,T,C or G
tggtgggggcccccatgatnacatccagaggattgatnccntgaaaaccccaaaattgcgctcatctgactccaaggccgtctccagagtttcgagtgtgaaatagagtagctgtctctcaccaaggctgtcacagttctcaggaaccagaggagaaggcaggaagcccccgacccctggagcaaacccctgggtcttcataaagcagctgctggcacagcggctgagaaacccaggcgtggaccctagcccggccgcctgtccgcgtggcatcctgaagaaatcactgcatcttcctgtgccttggtttgctcatctgcgagagtcccggcctccctaggctgttccagggatcatgggggcctctgcatgtgaaagcccaagccagcacctgccccggcacctctgcatccacatggcagctccgtctacagcccgagggccccataaccagccagagtggccacgcttgaagcctcacggggctccagatggagcctccctgacaggggacctcttcttcccgggatcttgtccgacctttagctaaa

SEQ ID NO: 28216 - DNA, 454 bp, Homo sapiens
  misc_feature (1)...(454): n = A,T,C or G
agagccngnnnnggcgccattatngcctccgaattancggcgtcgnannnncngacagcgtagcattttgcagcactccagagcctgctcaaggcctcctttatagatgttgtttgacagctgtgtcaagaaagcttttccagttcagcccttggcttgaaaaaactcttggatgttacatgttccagcttgtctgtgacccaggaggaggcagaggaactgctccaggctctgcaccgcctcactaggctggaggcattccgtgacctgtcctctgccgaggcaattctggctctctttccagaaaatttccaccaaaacctcaaaaacctgctgacaaagatcatcctagaacatgtgtctacttggagaaccgaagcccaggcaaatcagatctctctgccacgcctggtcgatctggactggagagtggatatcaaaacctcctcagacn

SEQ ID NO: 28217 - DNA, 566 bp, Homo sapiens
  misc_feature (1)...(566): n = A,T,C or G
ggatgggggnnnnnccatcgaccccatccgaannnatggananacctcgcagagnggcggaattctttnttacatgaaggcaatttattaacagaaaatattttgaggaatcttgttcacagacggcgaccacggcgaccccccttcctgcgagtgctgtcagaggggatgggggtgacatcctcaatccgcccgatcttcatacccgagcgggcaagggctctgagggccgactgggccccaggtccaggggtcttggtcctatttcctcctgtggcccggagtttgatgtgtagggcggtgatacccagctccttgcacctctgggccacatcctgggcagccaacatagcagcatatggtgaggattcatctcggtctgcctttaccttcatcccaccagtcacacggcagatggtttccttgccagaaagatcagtgacatggacaaaagtgtcattgaaggatgcaaagatatggcagacaccanatacattctctccttcagccacctgaggtccgaggctgatgacctggtcttccttcttttcccttcccattcgagg

SEQ ID NO: 28218 - DNA, 553 bp, Homo sapiens
  misc_feature (1)...(553): n = A,T,C or G
ggatgggcccccccattgatacatccagggttgaattccgtcctcagcccggaccgtcgggcctcgctgctcacgtctcttatgctggntaagcgcgactaccgctatgatcgggttctcttctggggccgcatccttggcctcgtcgccgattactacatcgcgcagggcctgagtgaggaccagctcgcaccgcgcaagacgctctatagcctgaactgcacagagtggagcctcttgccccctgccacagaggagatggtggcgcagtcgtctgtggtgaagggccgcttcatgggggacccatcatacgaatatgaacacactgagctgcagaaggtgaatgaaggtgaaaaagtctttgaagaagaaatagtggtccagatcaaggaagagacccgcttggtgtctgtcattgaccagattgacaaggctgtggccatcatcccccgaggcgccctcttcaagaccccttttggacccacccatgtcaatcggacctttgaaggactgtccttgtctgaggccaagaagctcagctcctacttncatt

SEQ ID NO: 28219 - DNA, 464 bp, Homo sapiens
  misc_feature (1)...(464): n = A,T,C or G
agagcngnnnntacggatccgttagctcngcaccgncnggnggaattcgggggactctgaacccagagggacaagcgtccttattaagaagagggttatcttgacacacacagagcagagaccgccgtgtgaagatggaggcagagatcggagagatgctgccacacgccacaaatgcctggggctcccagaaactacacggagcctcccccagcggcttcagcaggagcatggctcggccaacactttgatcttggtcttccagcctccagaacgttttcctaaaattcccttttccactggtgtgtggggcaagatgaggcacattttccatggatggtgaacagagggaggagccttttgatcacaaccaggtcaccccacttctaagccactgtgcctccagccccacaagactaaagagagagagcgcagcgtggtggagagtgagctgtgctgggacc

SEQ ID NO: 28220 - DNA, 463 bp, Homo sapiens
  misc_feature (1)...(463): n = A,T,C or G
agcgtgctnnctccaaatacgtcagcntggcggnggcannncnngatgacttcaggcacctccacccctgcaaagcagagccaggctagggagcatctcatggtccagagcccaggaagacctggctcaaacgcacagcactcctaccatcccatgctcaggcacagtagacagtcccagaccaatggaggccctgctttcgggtgctccaacctcagcccttgtccccaatgggagctggacccagccataggtgggcagggaaaaggcctgaaagaaagttggccaggcaggcttccctaaagtgtgtccatcatcagtcccacttctgggactatggggtagatttcgggaactgtatataacctgccttctgagcctgctctgccataaaaatttggcttaagatcctctagcttanaacctccaagagctaaatgtanaatctaggtggtaagtatat

SEQ ID NO: 28221 - DNA, 452 bp, Homo sapiens
  misc_feature (1)...(452): n = A,T,C or G
gagccaggggnggcgccattatgacctccgatagagcgcgtcagaccagcctagcatggaatttgatggagtggatgtggagggaattgaagtggtcttcgtgcagaagggtgaaggtaggaaccaagtgaagtgccttgtacaggcgtcctgctgccgctagagggcgaagtgagtctagaatccacatgcccgcgtcctgcctgcgagttttcccctaaagcagctgtgctggctcccggacagcagcttcaagttgacctcttagaagcccgaccctaatttccgatgggctcagggtcataaattagatttctgttctaggaaactaatttcataccaccacaatactttaaaaagtgatcacaaaatgaaatacacatatacgttttacaaataattacatgaaaacctaacacttaaggctaaattcctttggtgggtgtaggggg

SEQ ID NO: 28222 - DNA, 564 bp, Homo sapiens
  misc_feature (1)...(564): n = A,T,C or G
ccccgcgcccccccccattgaccccctcnnnnnnattgagancctattccaagnggcggaattccctcacgccagccatcgcggagagctcagagggccgnccccaccctgcctcctccctgctgctttgcattcacttccttggccagagtcaggggacagggagagagctccacactgtaaccactgggtctgggctccatcctgcgcccaaagacatccacccagacctcattatttcttgctctatcattctgtttcaataaagacatttggaataaacgagcatatcatagcctggacttccctcccttctgtttgtccttctatctcttgggggaaggtttttctcagtggaatgcacaccgataacaagctcccctctccctccttgtgccctgccccgagtggtgacttacagacaactgtcaccacttactgactgcttgcactgctgccagaactggcctaagcacttgacacacttcgtatcatttaatttttacagcattgcaaggtaggtgtttggatcaattangggttggtggtggtggtgttgttgtn

SEQ ID NO: 28223 - DNA, 485 bp, Homo sapiens
  misc_feature (1)...(485): n = A,T,C or G
gtgaggtannnaganatttgatngcattagnnagngcggtatgtcattagtccagtgcggtggaattcggccaagttggactgcagctcgcggtttcctggcttctagtttccagagtatgatgacctctactgcaagtactgctttgtgtacggccaggactgggcccccacagcgggtctggaggaggggatctcacagatcacatccaagagccaagatgtgcggcaagcactggtgtggaacttccccattgatgtcacctttaaaagcaccaacccctacggctggccacagatcgtgctcagcgtgtatggaccagatgtgttcgggaacgatgtggttcgaggctatggggccgtgcacgtgcccttctcacctggccggcacaaaaggaccatccccatgtttgtcccagaatctacgtctaaactgcagaagtttacaagctggttcatggggcggcggcccgagtacacagaccc

SEQ ID NO: 28224 - DNA, 476 bp, Homo sapiens
  misc_feature (1)...(476): n = A,T,C or G
tggagantannagaacctgatagcttagncagngctgtagaacattagtacaccctcctcaggaagcgggagggagggcagagttgggcggcgcacggcggggcaggggcactgtgtgctttctccgacaggatgagctcgctgcatcggggctgccgagctgcgatgccgccgtcaacctggccggagagaacatcctcaaccctctccgaaggtcagcccgggccctaaagctgatacccactagagcacagggaggacagcgccccactgatgagaacctgtgagctatgggtaatggagctcccagattccgaactaaaccgatatcccagactactcattctgctccactcctccacccccacctgctcctccacccagtcagccaattggcttaagtcctcacgtataactcaggatgcccaggaaatgaatgccctttccctctacaggagacgttgactgtntctctt

SEQ ID NO: 28225 - DNA, 485 bp, Homo sapiens
  misc_feature (1)...(485): n = A,T,C or G
tggcgggtnanagaanttcgatagcanttgnnagngttgtagatcactagtccatgcggtggaattccaggcaggcatggcttccgtgttcaggctccctcaccagctggtgacacgggacaagcttacaaaccttctctgaacctcagttttctcatttacaagaggcaaagccatccatcaccttgtgtggattcagagaatgtgaggccctggggtgtcctacacaagggaaaggcttgctcagtgagcggtctgcacaccgttagccaccctgccacctctgtgccctgggcaggctccaaaggaaagctctggctgggactgccaggagtctcacacgctcctgttgacattcccagcagccgcccctgaggtcgatgtttggtctgtttttctttttcttttttgagacggagtctcgctgtgttgccaggctggagtgcagtggtgtgatctctgctcactgcaacctccgcctgccn

SEQ ID NO: 28226 - DNA, 454 bp, Homo sapiens
  misc_feature (1)...(454): n = A,T,C or G
gggaggcccgcccccaataggccctcgacggaacgcgctccganagncnggnggaattccactcaccttgatgagctgggggagcagcaagtcctcatttcttctctgagttttagtttcctttttgagagagagctcataaaggcctttctctctctccttttttttttttttttttgggggaaaacaaattttctttgggttccccgggtgggatgcctgggaagtaatattatttattggggctttggccctccgggcctaaaggatttttttgtttccaccctccggagccctgggaccaacaatggggccccccccccttgggtaatttttaaattttttggaaaaaacgggggcccccctttgtgccccaaattattttgaacccctggccccaaaaaaatttttttgcttggcctcccaaaaccttgggattcccgggggtaccccg

SEQ ID NO: 28227 - DNA, 556 bp, Homo sapiens
  misc_feature (1)...(556): n = A,T,C or G
aggtgaggccccccnnaattgatnacatcccaaggatggaattcgtctgggtgcgagcgctgtagggagcctgtgctgtgccgcgcagttaggcagcagcagccgcggagcagtagccgccgtgggagggagccatgaagcattacgaggtggagattctggacgcaaagacaagggagaagctgtgtttcttggacaaggtggagccccacgccaccattgcggagatcaagaacctcttcactaagacccatccgcagtggtaccccgcccgccagtccctccgcctggaccccaagggcaagtccctgaaggatgaggatgttctgcagaagctgcccgtgggcaccacggccacactgtacttccgggacctgggggcccagatcagctgggtgacggtcttcctaacagagtacgcggngccccttttcatctacctgctcttctacttccgagtgcccttcatctatggccacaaatatgactntacgtccagtcggcatacagtggtgcacctcgcctgcatctgtcactcattccactacatncagcg

SEQ ID NO: 28228 - DNA, 463 bp, Homo sapiens
  misc_feature (1)...(463): n = A,T,C or G
agagcgccnnttcaattncctgagtcctcgcggnggcannncnggaaanggctacaagttcctgtctccaggaagatttttcccttcttccaaattctaattcatcttttatacccactgactctgagcagcctgcagatgggggcctggcgtttgcttcagcccttccctgagtgcagtccccccacagccaccagcaccctcatgatgctgtgctctgcaggcgaggggcaccaccacgtccaaaggctgccacacacactggtggcttttctgggccacattcaccaaaagccaggacttctgtggggctggtacaggaggctcatggaatttcctacacacttcaccaaatgtttgtttacctttgaactccctgcttctcatctttgatatgattcttcaccaggattttgtacaaaaatgatcatggttctggggtggggagaggaaagggagcaca

SEQ ID NO: 28229 - DNA, 474 bp, Homo sapiens
  misc_feature (1)...(474): n = A,T,C or G
aggggnnggccccccgcccggcgcaatggaaaancctttcggacttgatgatcntctggaccagccnggnggaattcctaaagcagcggaagaggagacctgcagccccagcacctgtccaccttggcatttcccattaagtcacataatgagggcagagagcaggggcctgtttttgcggacacttgaagtacagcatggaccaggcagagcaaggcgccggatcagatcagttccagaagatatgcagcagctgctctgatttcagtgaaatgtgtgaaaccatgcacaggactttggacaactctcagctgtagcaaatccagtttccccttgggccttccagaagcagggtcctgtctccacgcaggagcatctcccgtggcaatggctgcacctcggcatccgcattaccagtgcttgcgtggcagtccactaatcaggtgagaaccatattgctttttgcatctcaat

SEQ ID NO: 28230 - DNA, 458 bp, Homo sapiens
  misc_feature (1)...(458): n = A,T,C or G
agggccaggcgggcgccctacggagaccatcgtccgagcacctaccganagncnggnggaattcgtgtcctgacactgcaattggcaccgaagcccagagggtttgggggcacaagtttgacgccagggtatgaagagggttattttcagtcaaagtgttattttgtttttccttccaatgtctggagaccaccagggcatctctgggctggatgagctcccacaagcctgagggaaaggccagcactcgctagcagtggcaggcagaggcccaggctgccgtcccctagagtcccaggttggctctgccagtcctgtcctttaccaaagatgaatgaagcaaatgtcatgctgccttattcagggaaggaggagcctgtcctgcctgtggccatgaccctgcctctcccaggcaggggcccgcgatgtggaactgctgccactgaggggggatccag

SEQ ID NO: 28231 - DNA, 571 bp, Homo sapiens
  misc_feature (1)...(571): n = A,T,C or G
gggtggtccccccccccattgatnncccatccgnannnaatcgaagacccctattccagngnggcggaattcagcaggcagggccaggctcccagagccaaccccgaggctaggggagcagggctatggagtggcacagtggccccggccacagaagggcaggcataggtgtttcctgcacagcctcactccatgtcttgggaggggtatcagagagggtagagactggaaaaggactgtgaggaaattcacaagctcattgtgactgggagagccccgcgggacaacacccagcatgtcagggatgcactggagccgtggccccagaaatctggaaacgaaccctcgattccggacaaccagggctggctctgaggtgcagcactgagcaaggctggtgactcctgcgtgcccagagctcatgctgcagcggaggtgacatggcacctgggtatgtgacagcctccatgtggtgacgggagggcacctgctggcacctccccctccggngccagtgtgacgtgtgaacagggtcctgtgtcccagcagcaagcaggtcctggtccacacn

SEQ ID NO: 28232 - DNA, 469 bp, Homo sapiens
  misc_feature (1)...(469): n = A,T,C or G
agaggccaggggnaggggncctacagaagcccattcgtaaagacggcctcagnanncgncnggcggaatccgaaggaccaggtggtgcgggaccagtttctaccactcctgttgtccgaagttttttcacaaaacctcaggttcgggctggctgtacaagatcttaagaaacaacccctactggatgtggccaacagggtagaagaaatctggcaagagtttctggctccaggggctccaagtgcaatcaacctggattctcacagctatgagataaccagtcaaaatgtcaaagatggagggagatatacatttgaagacgcccaggagcacatctacaagctgatgaagagtgacagctatgcccgctttctccggtcaaatgcttaccaggatttgctgctggccaagaagaagccagaaagtgagcaaggtcgtagaacttccctagaaaagttcactcgcagtg

SEQ ID NO: 28233 - DNA, 448 bp, Homo sapiens
  misc_feature (1)...(448): n = A,T,C or G
agggccagggggnccccatgatgcgtccgatagacgcgctcgacnancncnncncagnnnattctaatatgtaaactgaaattaaaagtaaatcctttttagttcattctttaaaaaaagtaagtcctaaggaaaactgttatattagctatttaaaaggatgctgtaataatgtagaatcagtcactgttgaattttattgagtttccatggaacagccttgaaattataaattgctagatatttactctgtaagattacagaaattatttatcacagagccttaaatacttaaggtaattttgtgcctaactcatgatatgattgttaccaatctctttgtaaccactgagaaggaggtttaagtattaatgttagtaattgctctccaggcaatgccttttgctcagagaacctgcatatgctttgggaaagctgagttcaggaa

SEQ ID NO: 28234 - DNA, 554 bp, Homo sapiens
  misc_feature (1)...(554): n = A,T,C or G
gggtgggccccgnnnaattgatcccatcgcaagngttggaattcctatctattatggccactggtggtgggatccgggcaatgacttccctgtatgggcagctggctggcctgaaggagctgggcctcttggattgcgtctgctacatcaccggggcctcgggctccacctgccccatgatcacaagctctcagatcaacgggaggccctgagtcatggccagaaccctctgcccatctactgtgccctcaacaccaaagggcagagcctgaccacttttgaatttgggggtatctggagcaacctgtatgcagccaacctccaggacagcttatactgggcctcagagcccagccagttctgggaccgctgggtcaggaaccaggccaacctggacaaggagcaggtcccccttctgaagatagaagaaccaccctcaacagccggcaggatagctgagtttttcaccgatcttctgacgtggcgtccactggcccaggccacacataatttcctggcgtggcctcattttcacaagatactttcagcatccc

SEQ ID NO: 28235 - DNA, 456 bp, Homo sapiens
  misc_feature (1)...(456): n = A,T,C or G
aattgagaccactcgcaccgtcnggaannctacngagaagaaagcgagtgggtcaaggctggagtgcacaaatatggggaaggaaactgtgctgccatttctaaaaattacccatttgttaaccgaacagctgtgatgattaaggatcgctggcggaccatgaaaagacttggcatgaactgaaacaggctttcatttccacagaattcacaggagcatggttcctaataatagcccctgatagtctgctctttctttctttttctttttttttttttttgaaaacaaatttttgtttttcccccaaggtggaagaactagggggtaatttgggttaactgcaacctaattgtccgggactaacccattttttttgcttaaactgccaaagaagggggaattacgggccccccccatccgccccggtaagggtttggattttttacaaaaaccggg

SEQ ID NO: 28236 - DNA, 470 bp, Homo sapiens
  misc_feature (1)...(470): n = A,T,C or G
tgaacgtaaaanaggagaaaaancctgatgaccattcggtcgngcgtcggaanagncaggnggaattcgngcatgtttgctgactacctcgcccacgagagtcggagggattcatcgaggttgatctggaccgagagatgagcaggagcgtggacgtgaccaacaccaccttcgtgctcatggccgcctccatctatctccacgaccagaacccggatgccgccctgcgtgcgctgcaccagggggacagcctggagtgcacagccatgacagtgcagatcctgctgaagctggaccgcctggacctcgcccggaaggagctgaagagaatgcaggacctggacgaggatgccaccctcacccagctcggcactggctgggtcagcctggccacgggtggtgagaagctgcaggatgcctactacatcttccaggagatggctgacaagtgctcgcccaccctgctgctg

SEQ ID NO: 28237 - DNA, 463 bp, Homo sapiens
  misc_feature (1)...(463): n = A,T,C or G
aattgagncccactgagaacactgtgcagngtcgnggaattcgtcacatgcgtgttcgaccccgtgcacaccatctcccacaccgtcatctcgctgcctaccttccgcgagttcacccgccctgaagagatcatcttcctccgggccatcacgccaccgcatcctgccagccaggctaacatcatcttcgacatcacggaagggaacctgcgggactcttttgacatcatcaagcgttacatggacggcatgaccgtgggtgtcgtgcgccaggtgcggcccatcgtgggcccatttcatgccgtcctgaagctggagatgaactatgtggtcgggggcgtggtctcccaccgaaatgttgtcaacgtccacatcttcgtctctgagtactggttctgagggctggtctgccgcacagccgcaggtgcacctccaggccaaatcattgctgccagtgactgtg

SEQ ID NO: 28238 - DNA, 443 bp, Homo sapiens
  misc_feature (1)...(443): n = A,T,C or G
ggcggngaacctagactgaaggagtggaccccagtgtccacaaatgttcccgccccggaatcgcggtgacgcttcctggggtagttgcagttggccgagagctggtgccccgtgcggagggatccggtgggggtgtgaacgtggggtgtaaacccgagcacaggcagccgcgagtgactttcagtattttggggcaataaggttttcagtgttgacaaacgactgtcaatcactaggaaactctctcaattctgctttcaatgggtaggctacgcagcacttttccatgacagattgaataatgtcatatcagtatataacatcagctagaatatgaactttggacaagaggtttatagataaaaagctataaagaaaggattttcatataactttctgccacaagattgcattcagctttaaaaaattccaattttggatgn

SEQ ID NO: 28239 - DNA, 527 bp, Homo sapiens
  misc_feature (1)...(527): n = A,T,C or G
natcggacaccactcggagngccgcaatgcctgaagagtcccaggcacagagcccggtgcatgtactcagccaaccaatcaggaaaacaacaaaagaggacatccggaaacagataacatttttgaacgcacagatcgacagacattgtttgaaaatgtccaaagtggctgaaagtttaattgcctacacggaacaatatgtggaatatgaccctttgataacaccagctgagccatccaacccttggatcagcgatgacgttgctttgtgggacatagagatgagcaaagagcccagccaacagcgagtaaaaagatggggcttctctttcgatgagatattgaaggaccaggtggggcgggaccagtttctacgattcctggagtccgaattcagttcagaaaacctcaggttctggctggctgtccaagatcttaagaaacaacccctacaggatgtggccaagagggtagaagaaatctgngcagagtttctggcttcaagggcttccagtgccatcaacctg

SEQ ID NO: 28240 - DNA, 486 bp, Homo sapiens
  misc_feature (1)...(486): n = A,T,C or G
gattcagattaattccagactaagagaagaaaagcccttggcatccaaaaggaagaaagtttaagttcttgggagaccaaccaatgttggtggtgggccactgtgggcaatgttcccttgtgggctaccactgtgggcaatgttccccttgcccacagtgtacatttttcctctgtttacatgactgcttgaaaaggaggaaaatgtcagggaaaatagaagggggttatagcaccttgtggtggttgacaataaagggatgtcgtagtccatcctcaaatgcactcccatctcttgtcacacgacagccaatagcacgggtcacatgcccttggctgaaaaggtaacctgagtacaccaaagagaaacatatatacctgtgttttgccccnatgctagtaagacgctgacgcctgttgggattttggaggtacaagatatatgttgcaagaattagaaacagcctgccctgtaataaacaccatg

SEQ ID NO: 28241 - DNA, 463 bp, Homo sapiens
  misc_feature (1)...(463): n = A,T,C or G
aattgagaccatctgatgacccctcgaagngtcgnggaanncctcagcatgggaccttttgttcccttcattatgaggtgtggtcactcacctgtctaccactcccgtgaaatggcagctcgtgccgtggtcccatttgttatgatagatcacattcctaataccattcgatctctgttgtccacactccccagctgcactgaccagtgtttccggcaaaaccacattcatgggacacttctccaggtttttcattagttgcaagcctactcagactccaaacacggaacgaattcagacttccagcacgagctgactgacatcactgtttgtaccaaagccaaactctggctggccaagaggcaaaatccatgtttggtgaccagagctgcatatattgatattctcttcctattgacttgctgcctcaacagatctgcaaaggacaaccagccagttctgg

SEQ ID NO: 28242 - DNA, 497 bp, Homo sapiens
  misc_feature (1)...(497): n = A,T,C or G
cgggcgggnnnnnnnnaatcgagaccangatccagcgtggtggaattctatatttatatagaatgtaaatatatattagagatatatatatactaaaacccaacctgaattgtaaaatggttcatttgttacatgatttatatatttttgttttgttttgttttgctttgtttttttgagacggagtctccctctgtcacccaagctggagtgcagtggtgtgatctcggctcactgcaacctctgcctcccgcgttcaagcaagtctcctgcctcagcctcctgagtagctgggattacaggcatgtgccaccaagaacggctaatttttgtatttttggtggagatggggtttcgccgtgttggtcaggctggtctcgaactcctgacctcgtgatccgcctgcctcggcctcccaaagtgctgggattacaggtgtgagccacctcgcccagctgatttatatcttttttttttttttaaagcagaatgcaccg

SEQ ID NO: 28243 - DNA, 491 bp, Homo sapiens
  misc_feature (1)...(491): n = A,T,C or G
gggagggggggngnnaatcgagnaactgagancctatgagnggcggaattaccaaatatcaccagctctggggataccacctgtgccctgtgggacattgagacaggccagcagacagtgggttttgctggacacagtggggatgtgatgtccctgtccctggcccccgatggccgcacgtttgtgtcaggcgcctgtgatgcctctatcaagctgtgggacgtgcgggattccatgtgccgacagaccttcatcggccatgaatccgacatcaatgcagtggctttcttccccaacggctacgccttcaccaccggctctgacgacgccacgtgccgcctcttcgacctgcgggccgatcaggagctcctcatgtactcccatgacaacatcatctgtggcatcacctctgttgccttctcgcgcagcggacggctgctgctcgctggctacgacgacttcaacttgaacatctgggatgccatgaaggg

SEQ ID NO: 28244 - DNA, 474 bp, Homo sapiens
  misc_feature (1)...(474): n = A,T,C or G
agggcaggnnnnnnnnattagagaccctgtgaagcgctggaattccangccctgcaacgcgcctacgccctgctccaggagcaggtgggaggcacgctggacgctgagagggaggcccggactcgggagcagctacaagctgatctgctgaggtgtcaggccaaaatcgaagatttggagaagttactggttgagaagggacaggattccaagtgggttgaagagaagcagctgctcatcagaacaaaccaagacttgctggaaaagatttacagactggaaatggaagagaaccagctgaagaatgaaatgcaagacgccaaggatcagaacgagctgttagaattcagagtgctagaactcgaagtaagagactctatctgttgtaaactctcaaacggagcagacattctctttgaacccaaactgaaattcatgtaaagctctcagatgttttcaagcatgtgtaaaggg

SEQ ID NO: 28245 - DNA, 499 bp, Homo sapiens
  misc_feature (1)...(499): n = A,T,C or G
cgggcggggnnnnnnnnaatcgagaccatagagcagcgtggtggaattccatgccagtaataaccaacatggagcagactctgaaaacggggacatgaattcaagtgtcggactggaacttccttttatgatgatgccccaccctctaattcctgtcagcctacctccagcatctgtcaccatggcaatgagccagatgaaccacctcagcaccattgcaaatatggcagcagcagcacaagttcagagtcccccatccagagttgagacatcagttattaaggagcgtgttcctgatagcccctcacctgccccctctctggaggaggggagaaggcctggcagtcacccatcatcacatcgcagcagcagcgtgtccagctcccctgctcggactgagagctcttctgacagaatcccggtccatcagaatgggttgtccatgaaccagatgctgatgggcttatcaccaaatgtacttcctgggcccaaagaggga

SEQ ID NO: 28246 - DNA, 455 bp, Homo sapiens
  misc_feature (1)...(455): n = A,T,C or G
catcgagtccactagcaatngccgnggcattctaataacaggcatccctgccttcacatcttcatgggaaggcaacaaaacctgaggaatacaacctaggatctcaaaagcttttttaggaataatgtcatatataataaataatagcaagaatgttacagcatctatagctctttaaactacctcccaagggaaagacaatgagggcttagttcctgtgtcttttaaactttaactttacgtgtatttttttggacatgtgctgtccagtatggtagctacaagccacatgtgaggtgaacacacagctagtcctaattaagatgtgctgtaaatgtaatagacacaaaatattttgaaaatttagtatgagaaaaatattaacaatttttatattgattccttgatagtattttggatttagttgctttctgaaagctctcctgtgttaccca

SEQ ID NO: 28247 - DNA, 501 bp, Homo sapiens
  misc_feature (1)...(501): n = A,T,C or G
agggagaggggnnnnnntttcgaaaccctcgcagacactagtcagngtggtggaattcccgccttgaaaaaaggaaagctctgcttttgttgccgaaccaggaggttttccttcttcacttggtcttatacctgtcagttctgtaagaggccggtgtgctcacagtgttgcaaaaagatgcggctgccctccaaaccatactccactcttcctatcttttcattgggaccttctgctctgcaaagaggggaaagtagtatgaggtcagaaaaaccctccactgcccatcatcggccacttcggagcattgccaggttctcctcaaaatctaagtctatggacaaatcagatgaagaactccagtttcccaaagagttgatggaggactggagcaccatggaggtgtgtgtggactgcaagaagttcatttcggaaatcatcagttcaagccggcgcagtctggtgttggccaacaaaagggcccgattgaaaaggaaaacg

SEQ ID NO: 28248 - DNA, 499 bp, Homo sapiens
  misc_feature (1)...(499): n = A,T,C or G
agggcgcggggnnnnnnaactgagacctcgagcaccgtggtggaattcgtgattaaaactacagacccacaaatacaagaagctcaatgaaccccaagcataagaaatgtgaagaaaatgacaccaagggacatcgcaatcaaattgcttaaaatcaatgttcaatagagaaccttaaaaagaatcaaaggaacaggaaagatgtatacatgaacaatgattaagatgacaccagatttcccattggaaaaacacgtgagcaagaaaacagtggaaagcctggtgcattggcacgcaccatggtcccagcaactcggggggctgaggtgggaagatgacttgagcccgggagttgtggccagcgtgggtaatacatgagaccccatatgttgaaaagacaagacaagaaaaggcaaaaggaaagaaaatccttaagcaaaacccttaaagtacagcaagaaaagaaaatcctgttaactagaattccataaccagctta

SEQ ID NO: 28249 - DNA, 552 bp, Homo sapiens
  misc_feature (1)...(552): n = A,T,C or G
cgtcntgccnnnaggggnnnnnnnaatcgaaccacattgagtgtgctggaattcagctgaaatatttctttacttaagctaagactttatcccaattttggtatatctgaccagtcttactaaagctacattttgtaagaccagaaatgagtcttttcaaaaccaaaaggttggggtgaggacagagaaagtaagcaagcggcgagacaggagacgtctatgtgtgcagaaacctgcacctcttctcctccagctacccgtgcaggtcatttccccccaggcccatccaggtctagcgatgtcccagcactgccccctggtggagccctccaccggcctgcacgaagggcatgtgactgactccctcagcgccctgcagtcttgtcccctctggtcccaaaagtgtatcctgcctccgctttgcgataggtttcttcctgccctttgcctggaaattttatctctggttcttgcaaacattatttacagctgtctaaatttttctgtctacctcacagctgccaaactaaagtaggtgggaagccattctcc

SEQ ID NO: 28250 - DNA, 479 bp, Homo sapiens
  misc_feature (1)...(479): n = A,T,C or G
aatgagacccctgagagcggcgggaannaggantgcttgagcccaggaggtcgaggctgcagtgaaccatgatcatggcactgcactccagcctggatgacagcgagactctaaaaataaagagtgatgacagaggagtgtcacctttgaaagaaaaaataaacacgtctccacgctgctgtgactgacgataagcaggagagtggggaagagtacctcccgcctgtggaaagacaacagcagaattagaaggcgctatttggcatacaccgtaataaacacaggcaacattagcaaataatgctagaccttgaagagtcccagggtatttggaaggcctcccccaagagacatctgataaagggcaaaacagtcacttcacagtgaaaacccctggcagaccccgtctcagccgaacggccagcaatgggactgacgagatgcacgtcacctcggctgccactctgagaaaagcacaa

SEQ ID NO: 28251 - DNA, 457 bp, Homo sapiens
  misc_feature (1)...(457): n = A,T,C or G
atcgacactcgataccataggccagngcggnggaanttatctgtggaccttatggaagcaaagactcttggaactgtaacgcccagaaaacctgtcttatctgtcagtgcaagaaaaattaaggacaatgcggctgattggcacaatttaatcctgaagtgggaaaccctcaatgatgcaggttttaccactgcaaataatattgccaacttgaaaatcagtttattgaataaagacaagatagaactagacagcagcagcccagcctcgaaggaaaatgaagaaaaggtgtgtctggaatataacgaggaactggagaagctgtgtgaggaactgcaggccaccttggatgggttgaccaaaatacaggtgaaaatggaaaagctgtcttcaactaccaagggaatttgtgaactagaaaactaccattatggggaggagagtaaacgaccccctc

SEQ ID NO: 28252 - DNA, 470 bp, Homo sapiens
  misc_feature (1)...(470): n = A,T,C or G
gggttgttttataacgttganactcgctgangncgntcgaaannngccgaccaaactcagagatgtacagaggcagttaaaagcactgcttcctcctgattctgtgttagtgttccactccttagatttggatctcagagcactgaaaatgatacatccatatgttattgatacatcgttgctttatgtcagagagcagggcagaagatttaagctcaagttcttagccaaagttattttggggaaggatatacagtgtccagacagacttggtcatgatgccacagaagatgctagaacaatccttgaattggctcggtatttccttaagcatggcccaaaaaagattgcagaactaaatctagaagcactagctaatcaccaagaaatacaagcagcaggccaagagcctaaaaacacagcagaagtacttcaccacccaaacacatgtgttttagaatgcttggatt

SEQ ID NO: 28253 - DNA, 502 bp, Homo sapiens
  misc_feature (1)...(502): n = A,T,C or G
agggttacgggnngnnnnnnnaatcgtagaccatatcgagtgccgtggaatacctgagatgacccatagtaccccattccttgctgcaatgtaattatatttaattacaagtgtgcccctggtagtctttaactgaagggcactgactgggtcactggtgaagttccccgcaggaactgagtcagaccccatctcagggccctgcacaagataggtgcctgctctaaggcgtggaccctcgccacagccctggcccgtattgacgggcgagggttactgtacttgtcccaaccatacagatgagaaagctgagactcagggccagcaacccgggtcccagcggagcgcccggcacacgccgacacttcagcaccagtggcggtggccaccactgtgcgcggagatggctgcgacgcgtgcgcaaggaaatttgtgcacagagataacacaggggatatgccatatgaagatgaaggcagaattctacaagcccagggatgcc

SEQ ID NO: 28254 - DNA, 454 bp, Homo sapiens
  misc_feature (1)...(454): n = A,T,C or G
aatcgagatcgatagcactngcggnggacnnnccaaaaatgcaaaaattagctgggtgtgatggtgggtgcctgtggtctcagctgctcgggaggctgaggcaggagaattgtttgaaccccagaggcggaggttgcagtgagccgagatcgtgccattgcactccagcctgggcaacagggcgagattccgtctcaaaaacaaacactattagaaaatgctctggaggtggcggggagttgttgatttgtgaggacagattgaaagcaactcccagggtggccttgtccacctccccatcgagaatatggctgccggcctctttgaagattgtggtctggcataaggagaggtgcaggcgcctggttctgagcaccttggaatttccagccgcacagcatctggtgccctcccctccaccctcacaaggagctgccatcctgtttggattttt

SEQ ID NO: 28255 - DNA, 466 bp, Homo sapiens
  misc_feature (1)...(466): n = A,T,C or G
cgtnaannnnnngnnnnnnnaatgagnccntnaatgtagacattagnacangcggnggaattcaggactgctgacggaaatgtcacacgcagctgcttttagcacttggctctcactgatgaagcttccctctctgccactacacaccaccctcttcctacatgagagacctttagggctctttagttctcatcctgaaagctgtgggacagattataaattgatatcttttatatcagtatagctcatgcttggttgatgtgcctgatgggctataggagtgattgactcagctactattttggtgaggaaagagagtcttccttagaaagagaattgtgtgccttgccctaaaaaggttaggaatgcggcctatggtcctaattaagtgccctgttaaacagtgtcccttgaacaagtcactttcttcttctgcaacttctccagctatataattaagcatgtn

SEQ ID NO: 28256 - DNA, 455 bp, Homo sapiens
  misc_feature (1)...(455): n = A,T,C or G
aactgagttcgatagccntgngcggnggacntcctaataatgaaagtggtaggagctgggttccaggaagttcatctctgcccggacttttggtagaattgggtcatccgcctgggaggaacaaatgagctgagtggggtcctgaccagtgtgcagttccagggcgcatcctctatggggctccccgtagctcagacactggctgcccactgaagagtcatgggtaaccaggggaggcagtggtggtgataccagtgccactgctcttacccctgctactgccactgatggaaataatagcaaccactgtggattgagggctccgacaaactcactcaagaggttccctatttcagctcatcagaccctcacagcaattgtataagtcggttgctcttactgtcccatgtaacaattatgttaggaggcagggctgggatctgaccccagtggcc

SEQ ID NO: 28257 - DNA, 430 bp, Homo sapiens
  misc_feature (1)...(430): n = A,T,C or G
gtggtgagttcaggtgggggctccctgctgcccccaggcctgggagcttgaagccctcccggcatctggcatccgagcctcccgccctccagggtgcgcttccctctcttgccgcagcatacacgagggcaggcagtggccttgtcactgtatcttgcatcagagacaaaggaggacccgctttagccctgctgcgggaaatgggggagggcccagggccagcgcattgtgcactggtttactttaaaatgtacagattcttctcgttaaattcttgatagattttttattattattaaaagtcagtttataatacaaagaaaaaaaaaaaaaaaaaaaaaaaaaaaaaaaaaaaaaaaaaaaaaaaaaaaaaaaaaaaaaaaaaaagaagaaaaaaaaagaaaaaaaaaaaaaaaaaaagcgccccctn

SEQ ID NO: 28258 - DNA, 480 bp, Homo sapiens
  misc_feature (1)...(480): n = A,T,C or G
agacgaaactcgagttcgatatccatagtccgtgtggtggaattcgccagacagatggaactctccagcatgaaaatctgcgcagccattccaacaagcagggctctgcctgaggttgtccgaaggatgccgaggaaaaggatatcaggactggaatggctcttacagcaagatccatggagtctcacgctgtcacccaggctggagtgcagtggcgcgatctcgactcactgcaagctccgcctcattcacatcattctcttgcctcagcctcccgagtagctgggactacaggcgccccataccaggcccggctaatttttttttgtatttttagtacagacggggtttcactgtgttagccaggaaggtctggatctcctgacctcgtgatcagcgcgcatcagcttcccaaagtgctgggattacacgtgtgagccactgagcctggcccatttttttttctttgtttacttgatn

SEQ ID NO: 28259 - DNA, 454 bp, Homo sapiens
  misc_feature (1)...(454): n = A,T,C or G
agagcggngnnccnccaatgaaaatcctaaagatctncgacanncggnggaattccacacatgcagcagcacctgcagcagcagcagcagcatctccagcagcaaattaatcaacagcagctgcagcagcaggtgcagcagcgcctccagctgcagcagctgcaacacatgcagcaccagtctcagccttctcctcggcagcactcccctgtcgcctctcagataacatcccccatccctgccatcgggagcccccagccagcctctcagcagcaccagtcgcaaatacagtctcagacacagactcaagtattatcgcaggtcagtattttctgaagacgcatatggcagacggatttgcgtataccaaggagagtggcataggagggaaaagcatatgtggctgaaacctgtaagttggcgttggttatgcagaaatgtgtaacagatcaca

SEQ ID NO: 28260 - DNA, 453 bp, Homo sapiens
  misc_feature (1)...(453): n = A,T,C or G
gtgccggnnnnccccaactaagaccactgaacagctggcggaattcgcctganaatgaatgagtgtctataaatagcctgtctcacccccgccccccactgcctgttcagtaactggagcacaagtaattctgcaggaggcagagctggagcgggagggtgccactggtccccccagccccaacccatgagtctggccaggaggacacatgctgcccatcactcctcagccaaccacaggcccaggggtgtcctgggaggcagtgcatgaggttgtgtgtgatgttaggggcgagtacatgattaaatgaggtaatacatggttagtgccagagcagtgctgggtacatggtaggtgctaaataaatgttgcctgttattctcaaaggagtctgatcccttccccagccccagcaaatggctaagaacccttgctgtacgctgggctcctatt

SEQ ID NO: 28261 - DNA, 566 bp, Homo sapiens
  misc_feature (1)...(566): n = A,T,C or G
gacgtgcnnnaatctgatcactgttgagtgtgccggaattccctactggtcagacatggccttccaggcagagaaagccttgtaggtactctcaccagcagatggccattttcacttggcaagcctcccggccacttccttcttttcacagcagacctgagagagtggacagagagccctacagaacctagggcaggcctgggagatggaggagacccatgccccagctcaagagtcaagggcccacctgaacaatgaggtaggggaacagctcctttcaagcccttccttccccaccctctctggactctggataaagaaacacgactgctttcctctcacccagaagccagaaggacctgagcacccangacttgtggctgtcagagagctgtggaagggcaggggacaccagatggcagcagcaagagctgggcggcagcatctgcccaggccacctgcggagagaaggctggaatccgagggatcacactgggccagcattgagcctgtggcaccacactgacccctcctcagctccccctcacaggacctganagcatttt

SEQ ID NO: 28262 - DNA, 567 bp, Homo sapiens
  misc_feature (1)...(567): n = A,T,C or G
ggcgaggnnnaattgaaaacccatcgaatgactctnccgagnggngcaantccctccgcccgctgctggaacaccaatagcagcgttggagcctctgggccggaggaactgttgcctccacttacacctgcttcttccctcacctcgcagccttccacacctgttgatctgacctctgccccgctgccgcccaggagtaacctaaggcttttggcctgattcgagctcactccgtctaaacctctaaatgcggtgcgaaaaaatcctggggaatgtgccatgcaaagcctgggcatttcaagtgcttttctggattcgcatcaactcctctttacaggcatctttatccggaattcagctcgtcccaaaccccacgtggtgtagctctgcttgtgtttttgaatcccggagcctctttgaatcagaagccctttgtatagagataagtatcctttaggccagaatcagcctccattnttttcgcagtcccatttcctacccgtaatactttcttctgattntaaagccatttgatagagaagggacagggaacagaaccttcccccn

SEQ ID NO: 28263 - DNA, 503 bp, Homo sapiens
  misc_feature (1)...(503): n = A,T,C or G
aggggcggggnnnngnaattgagncccatcgtagacactaggccatgtggnggaattcgcacccccaagttctgtgactccccgaccagtgacctggaaatgcgcaatggccggggtagaggcaaacgcatgcgtcccaacagtaatacacctgtcaatgagacagccacagcctctgacagcaaagggaccagtaacagcagcaaaacccgggcaggagccaatagcaaaggccgtcggggcagccagaattcttcagagcaccgcccacctgccagcagcacttctgaggatgtcaaggccagcccttcctcagctaataagcggaaaaacaaacccctttcagacatggagctgaattctagctcagaggactccaaagggagcaagcgtgtccgtactaattccatgggctcagccactggcccccttcctgggacaaaggtagaacccactgttctggacagaaactgcccctcccccgtcctaattgactgtccccn

SEQ ID NO: 28264 - DNA, 483 bp, Homo sapiens
  misc_feature (1)...(483): n = A,T,C or G
tggcacacatcgagcccctgatcgagatctctagtccangtggnggaattcctgggagcgggcggcggacgggctgggccgcgccggcgcgggctggcgactctgctcctccgcttgctgctgtctctgggaactgggtgccagcgctgaggggcttccagcgggcagggacccccttccccggctcccctgcccaccctgccggggagggcggaagatgccggtgaagaataagagaaaatcccctggggtggcagcagcagtagcggaagacggaggcctcaaaaagggtaaaatctccagctattgcagatcccaaccccctgctagactaataagtggagaggaacatttttcaagcaagaagtgcctggcttggttttatgaatatgcacgtcctgatgaagttgtagggccagaaggaatggaaaaattttgcgaagacattggtgttgaacctgaaaatattattatgttagattt

SEQ ID NO: 28265 - DNA, 473 bp, Homo sapiens
aggacgcttcgagaccctaatcgagtggcggaattcggcattcgtgcccagcggggacctcggagctatgccttgataaggcaagtgaggttacatgtacgatgatgcggtttgtgctgcagactggtgaaaagaaaggggtttggggtgttctggcccctcccctttggcttcccggtgggttctgcgcggggggtctccaaggagggtgtcagtactgcagcttcagctggcgtggatggggtgcttacaggagcagcagggctgagggagatgacagcagaacgaaccgtggctctcctgaggcctgggtttcctcatatgtaaaatgggggttgcattagaccatacccttggcctgtgtttaggcaaatagggatgaaagtggggccaagggctgaagagctgggtccgctgccgccgttgcccttctttcttgccaagcgagtgacttgcgcaatcaggtctacctg

SEQ ID NO: 28266 - DNA, 439 bp, Homo sapiens
  misc_feature (1)...(439): n = A,T,C or G
aactgagaccattttgatagcctgcggaannccgcgngtgcgtgcacgtgtgcgtgcatgtgtgcgtgtgcatgcgtgtgtgtgcatgtgtgagtgtgcgcgtgcgtgcgcgtatgctgcactaacctgccgcttgctgagtgaggtttttgtctgtacacaggcgagtgagctcagggggccacctgtgctccccccgctaccctccgagccgcgcccctgtctcaggcacctctcggacctcgctgtgtttcactgcctcctgcccacagacccaggcctgccgggccggacccgtcccagcctcccctccccaccccatgcagcccccagggggatagcccatgggcccctgtggaccctccctccccaagtggacacatggctgtgcaggccaggaggcccacagatggactgagtgctgggaaggggcggctgc

SEQ ID NO: 28267 - DNA, 459 bp, Homo sapiens
  misc_feature (1)...(459): n = A,T,C or G
naaaatcgaaacctccgnanancaattgnagccttcgtgacagncnggnggaattnctgactctgtggggaagttggtaactgtgcgtggtatcgtcactcgtgtctcttaagtcaaacccaagagggtggtggccacttacgcttgtgaccagtgtggggcagagacctaccagccgatccagtctcccactttcatgcctctgatcatgtgcccaagccaggagtgccaaaccaaccgctcaggagggcggctgtatctgcagacacggggctccagattcatcaaattccaggagatgaagatgcaagaacatagtgatcaggtgcctgtgggaaatatccctcgtagtatcacggtgctggtagaaggagagaacacaaggattgcccagcctggagaccacgtcagcgtcactggtattttcttgccaatcctgcgcactgggttccgacaggn

SEQ ID NO: 28268 - DNA, 485 bp, Homo sapiens
  misc_feature (1)...(485): n = A,T,C or G
ggcaccaattgagnccntgatcgtagaccctagncagngnggnggaattccttgctcagcagtatgcgcaccctaacgctaccctgcacccacatactccacaccctcagccttcagctacccccactggacagcagcaaagccaacatggtggaagtcatcctgcacccagtcctgttcagcaccatcagcaccaggccgcccaggctctccatctggccagtccacagcagcagtcagccatttaccacgcggggcttgcgccaactccaccctccatgacacctgcctccaacacgcagtcgccacagaatagtttcccagcagcacaacagactgtctttacgatccatccttctcacgttcagccggcgtataccaacccaccccacatggcccacgtacctcaggctcatgtacagtcaggaatggttccttctcatccaactgcccatgcgccaatgatgctaatgacgacacagccn

SEQ ID NO: 28269 - DNA, 473 bp, Homo sapiens
  misc_feature (1)...(473): n = A,T,C or G
gtttgtagcagggannngnnncctggagacctgaggaccgtcggnggaactcgacagcaccatgaacatgttgggcgggggaggcgtgcggcgtctacaccccgcgctgcggccatgggctgcgctgctatccccacccgggctccgagctgcccctgcaggcgctggtcatgggcgagggcacttgtgagaagcgccgggacgccgagtatggcgccagcccggagcaggttgcagacaatggcgatgaccactcagaaggaggcctggtggagaaccacgtggacagcaccatgaacatgttgggcgggggaggcagtgctggccggaagcccctcaagtcgggtatgaaggagctggccgtgttccgggagaaggtcactgagcagcaccggcagatgggcaagggtggcaagcatcaccttggcctggaggagcccaagaagctgcgaccaccccctgccaggactccc

SEQ ID NO: 28270 - DNA, 466 bp, Homo sapiens
  misc_feature (1)...(466): n = A,T,C or G
aggcggtccnncaatgagacccatgagatcctagnanagngcggnggaattcctacagctagacagcccagtaggtactccccttagctgatgagtttaacaagctggaagccaggactcattggattcagggatatggatttacacccctttatagcggtggttctgaactggggatgatttattccccaagaacatttggcagtgtctggaatttatcataacttttatcataaatgcggaggtgctgctagcatctggtagggccagagatgctgctaaacatcctatacaacagagccccccacccatcacaacaaagaattatccagcccaaaatgatagtagtgctgatgttaagaaaacccagctttatggcaggattttaaaattctgccaagatccttcttctttttatcatctgtattaaaattggggggtcttaaacattgcttcaacaatgggt

SEQ ID NO: 28271 - DNA, 450 bp, Homo sapiens
  misc_feature (1)...(450): n = A,T,C or G
ntaagagcatnctcgnccagtgatgggcaattcggacggcagccgaccggggcgtgcggagggatgtggcccggaatattggcagggggggcccgggaggcgtcatgcatgtaccccgcgctggggcctcgcctcgccgctcactttccagcgcagcggccgccgcagcggacactccagaacggcctggccctgcagcggtgcctgcacgcgacggcgacccgggctctcccgctcattcccatcgtgggggagcagacgggtcgcggcgagcgcgcctatgacatctactcgcggctgctgcgggagcgcatcgtgtgcgtcatgggcccgatcgatgacagcgttgccagccttgttatcgcacagctcctcttcctgcaatccgagagcaacaagaagcccatccacatgtacatcaacagccctggtggtgtggtgaccgccggc

SEQ ID NO: 28272 - DNA, 445 bp, Homo sapiens
  misc_feature (1)...(445): n = A,T,C or G
natcgagatcgatgaccatctggccgngcggnggaattccgacgccacctggcggtccacacaggatgcaaggacttcctgtgccagttctgtgcccagagatttgggcgcaaggatcacctcacccggcataccaagaagacccactcacaggagctgatgaaagagagcttgcagaccggagaccttctgagcaccttccacaccatctcgccttcattccaactgaaggctgctgccttgcctcctttccctttaggagcttctgcccagaacgggcttgcaagtagcttgccagctgaggtccatagcctcaccctcagtcccccagaacaagccgcccagcctatgcagccgctgccagagtccctggcctccctccacccctcggtatcccctggctctcctccgccaccccttcccaatcacaagtacaacaccactg

SEQ ID NO: 28273 - DNA, 460 bp, Homo sapiens
  misc_feature (1)...(460): n = A,T,C or G
agcgctaannnnaactgagaactgacgtacgtgcggaggaacncgcggctttctgggtctcagccctctctgcggttgagggcccagaggacagagagatggacatgcgtcccctccctccccccgccaagtgctcacacacaacctcacgcgcacacacacacacgcagatggaggcgcctcactgggaggtgccccgccagccctgggcagtgtcaggcaggactcactcaccgctgagcagatgagagaagttttagtcttggcgggtggaaatgagacgaagccacagttatcacactccagactcctgcccttttattttctccagccccttcttccttcagcaaaatctatgactcccgagtggcttccagggggcccgcagtcctcagccgcgcctgtgttcggtgcccgaagggcgggcggcggggtctggatgtatgtgtacatatgcaca

SEQ ID NO: 28274 - DNA, 538 bp, Homo sapiens
  misc_feature (1)...(538): n = A,T,C or G
natggtacccattcagagggcgtagacgaccatgcttaaggctntggaggtggagagtatcggccatccttttctcccagcttacttctcttaccttacctctaactccacccgcagttacaacaaacagtagcatacaagcttcagcctgctttgctcaggccctttcccaagtgcttgctcactccctcgtgcctgcttcctgcagtcttgatttctaggagaactggaatcccctgtggacctctccaactcattctccttagtaacctgaccaaaatcaagggcagaaggatgagggggtggatggtgagaggaataaatcaggcatgcaggggcttgggctatcgcatatccccacagacagtggaggagcaggcaggtgtgggtgattctgggctctgtgtgcaaagattctggtgaccttttatcaggccagaggccctcacagtgcanagagaggaagcaggggttaggagcctcagctggaggcttcttaataataagttttcttggntaacaacagaaagatgttcat

SEQ ID NO: 28275 - DNA, 459 bp, Homo sapiens
  misc_feature (1)...(459): n = A,T,C or G
tgcgccgnnaaacttattccgtagaacctacnacagngcggnggaantcggagcctgtcctcgggccgggtctccatcgtgagcctggccatccttattctaaagctggccgtggccatcgctcttcgcttctcagccactcggcgtcagtttggacccacagaggaggaggaaataccagtgcttgagtatccaatgcagcaatggcgcttgcttccatatctggcagctgtctacgccttaaaccatttctccaagtcgctcttcctggacctggtggagctccagcgaggacttgcatcgggagaccgcagcgccagacaggcagagcttggacgtgagatccacgccctggcatcggccagcaagcccctggcctcgtggaccaccccagcaggaattcatgaatgccgggaggcgtgtggaggacacggctatctggccatgaaccgggtgggg

SEQ ID NO: 28276 - DNA, 538 bp, Homo sapiens
  misc_feature (1)...(538): n = A,T,C or G
natgaacacattcagngggcattgatcgccatattgatggncttgaggactgtaaaagtgatttcatactctgaatataaaactggataatagggtaatgttttaaaatttattatgctattattcagaatgccaaagtattattttttttcccaaaatcagtctggacatttactactttttagactttttgacgttgaactttctgtataaaaattggctgggttttgagcttttggtaagaaataaaagccgattaagcactggccgccccgcggctggtacccaatgcccgagtcactgtggcagcattcgcactggtgtggggagtcctttcaactcaaggaggctgggtttctgggcaccctcgaagttttctggatgtctttttatctttctcgtgtgaactgcactacaaaagagaccagcctcgcttccaagccagccagacacctgggtcttgagccataaactggcgtagttaagctttgcagcttccagaggattttaattatttctttggtggngttttggttgg

SEQ ID NO: 28277 - DNA, 461 bp, Homo sapiens
  misc_feature (1)...(461): n = A,T,C or G
agcgccannnnaactgagnactgacgacgtgcgaagaacncaacccggncgaccccatctcccatgacctgcttgtgaacctggcccgggacctgcagtgccctttgaagctgcccagaaccccatgctgacagcacctgcagatgtcctgccatgagcatcgacacagccccaggatgtgtggctgtgaccagccaccggacccagactcctagtcacagtgagtccccaaccaaaaccagggtatccgctctgggccctgccagctctgaatgcccaggtctctgcacagtcggcccctaggactctgcgcctagcccacggccatcacaggaacagccagggcttgcagctgctgtgtgtgctgcctgctcctggggctgctcacagagggactggataaaggatgcagtggagcatgctcagtgccagcttttggggccgcgcacctcggattccac

SEQ ID NO: 28278 - DNA, 556 bp, Homo sapiens
  misc_feature (1)...(556): n = A,T,C or G
cccccatcganncccccctcccncnnnncaatagatntnacctttgcagagnggcggaattccagtcagctccccagtgctcttctcgccggtcggccggcgtagctcgctaagctcgcggtaagtgatctccctggttgggtctggcaaccaacagcctcacgggccgcagtgggccggataggttgttgtcttcaaaagcctttggaaccggggcggcggaatagaatgccacagtattggaaaatagaccttttccactgctgcaggtagtatctgcttcgttttgattatcagttgatcagttgattccccactttgcatttttcatggatacctttgtgcagaagtgaagtacaaactggatttgcatcagtgtttacctacttcccacctactacccgtgtgatctggtgtaagtcactcgtgattttcttcatctgtgaaatggcgataatatatctcacctgagccagaggagttattatgaattgccacgatgcagaatgtaggtgatggtgataatgaggacctacaaccctganagatcatagtt

SEQ ID NO: 28279 - DNA, 463 bp, Homo sapiens
  misc_feature (1)...(463): n = A,T,C or G
agtgccgnnnnnaactgaaaacctgagacactacgcaagngcggnggaattccgcctggacagctatgtgaacgctgaccacgacctgtactgcaacacccgtcggtcggtagaagccccaactgagaggcctggtgagcggcgccaggccgagatgaagcgtttgtacggggacagtgctgccaagatccaagccatggaggccgcggtgcagctgagctttgacaagcactgtgaccgaaagcagcccaagtactggccggtcatccccctgaagttctgagctcaaggcacagggtacccagcctctccttcttccttttgggtacacgctctttatctctccttctgtacatttcttaaggaaaggggactttgtactggggtacaggcatgttcaccacagtcccagtgggcctgtcacggggtggatgtactatgccagccacttggaggtctgcag

SEQ ID NO: 28280 - DNA, 541 bp, Homo sapiens
  misc_feature (1)...(541): n = A,T,C or G
nattgtacccattgagnnggcatagattatccattgaaagctatatgtaatcaagactgtagtatctgagtaagaatggacatatagaccagtggaacaaaatagagttcagaaataaacccttacacgtatagtcagttgattcccataagaaaattccaggttaatttaatgaagaacaaatagttatttcaactaacactgtaagaactattcaccattcatatgtaaaaaattaacctcaacctttacctgtaccatatacaaagtatcaactttttaaaatggattacatgggggggcatggtgggtcacacctgtaatcccagcactttgggaggccatggtaggcggatcagttgaggtcaggagttcaagacaagcctggccaacatggtgaaaccctatctttattaaaaatacaaaaaagttgtccaggagagatggctcatgcctgtaatcccagcactttgggaggccgaggcgggtggatcacgaggtcaggagatccagaccaccttggctagcatggtgaaacccc

SEQ ID NO: 28281 - DNA, 578 bp, Homo sapiens
  misc_feature (1)...(578): n = A,T,C or G
ggggannnnnnaaggggcncnnagggnngnnnnnttttgaaaacccctcgaagcactatccgngtggtggaattccagcgactccgtggagggggcccagcgggagatccagctgtggttccagagcagtgagctggtgagctgggcagatgggggccagcacagcagcatccacccagcctgaggctcaagctgcccttaccaccccatcccccacgcaggaccaactacctccgtcagcaagaacccaagcccacatccaaacctgcctgtcccaaaccacttacttccctgttcacctctgccccaccccagcccagaggagtttgagccaccaacttcagtgcctttctgtaccccaagccagcacaagattggaccaatcctttttgcaccaaagtgccggacaacctttgtggtgggggggggtcttcacattatcataacctctcctctaaaggggaggcattaaaattcactgtgcccagcaaaaaaaaaaaaaaaaaggcgcccctcctgtccggaaaaaacttaaaaaaaacggaaggggggttgggggccaccttattctgtgtgtt

SEQ ID NO: 28282 - DNA, 444 bp, Homo sapiens
  misc_feature (1)...(444): n = A,T,C or G
naggcggcnnnnnncaacggggattgagcantgacgggcaannngtggagaacaacagngaacaagaaagacatagacccttcttgtgtagaactttaatttctagccagaaaaaccattttagcggctaaatgcacatccagccattggattatggccatcatgaatgctaaaagggagagtccagggagctgtgagaggatctgtttagggtacctgattggcctggtcccagggggagtggttagggaaagtctctttgatgagtgacatttgagctaggctctacatcatggctgtgttctcattaaactttatttacaagaaacaggcaacaggctatgtttggcccgcgggctgtcatttgctaacccctgctctaaaggatgcatgggaatgggtggttcaaagacatgaaaccagggcttgtcctggaaccaaaan

SEQ ID NO: 28283 - DNA, 449 bp, Homo sapiens
  misc_feature (1)...(449): n = A,T,C or G
ggggccggnnnnnaaccgggccatttagcnngtaccagncnggnggaattcangggagccccagggtcgccagagccgcgagccactccagcgagaccccaccttgcatggtgccccttcctgcataggactggaagaccgaagtttttttatggccatattttctactgcaattctgaagtgttcatttctcacaaactgtactgactcgaggggcgctgatttcataggatctggtgctgtatatacgaatcttgcaaagctctaactgaacggaccttcttattcctctcccctaacaccatcgtttccactcttctcagtgtaggtaaccgtctatggtgtgttttttcattaatgacaaaaaaaaaaaggttccaactggattatttaaaaattggaaaatattgtgcattagggtttgtttttccttttaaaaagtatgtcct

SEQ ID NO: 28284 - DNA, 440 bp, Homo sapiens
  misc_feature (1)...(440): n = A,T,C or G
atttgacgaccactagaacagcgcggnggaattcgcacgaatggttggggttctaagcagcacgtccgatgaaatgtcttttgcctccttttttccccctttatttaattttgtccttgcctttgcttcgcgctgcctttttctctccgtctctctctcccccacaatcccaaaccgttgactctttcctcgcgagctggagaaatcatcagtttcactcttgcaaaaggggggcgggactagacctcggagcattttaataaaacaaacatacagcagctccctcctcacccctccagtctcaactagattgataaattactccactacactactttaattatgtatatggtatgcagaataaatcactgaacatcagtacctcaatcaagcacttttaaatgataattgcatcttggtgaatcaatctttccattcct

SEQ ID NO: 28285 - DNA, 545 bp, Homo sapiens
  misc_feature (1)...(545): n = A,T,C or G
nattgaatccctttccagagnggcgtagatccacctgccttggcctcccagagtgctggaattacaggtgtgagccatcatgcccgacgagcagcttataagcttaatgagtggaagaaaacataaatatggatgggaatcagttcttcaaaggagcatcatataattaaatgcaaaattcaggacatctagtatttcagatagggaaaaaaagtaatgatgaagagaaaaatggagcctagcctagactcagccagtcttaactttatggggaatccaaaattaaggaaagatggtttcaaatgagtgctaaagcattaactccttactcatacgtaatatcagacaaacatagctactacttacattgttgctttgtggactgaatgtaggcattcatcagatgctagttntgagtgttctgtttggaattaaaaaataaaaatagtaacaaagtacagaaatttatcaggtagagaaaataagaaatatgtacctgaaagaataaaattacaaacagattaacatatgcagtagctattttg

SEQ ID NO: 28286 - DNA, 576 bp, Homo sapiens
  misc_feature (1)...(576): n = A,T,C or G
agacnncnnnnnnaggggnnnnnagggnngnnnnttttgannncccctcgatccactatccatgtggtggaattccccaagatctccatcgatggagggaaatgtttctcctcctggtaccatgtcactagctacctatcagttctgtgaatggagtgtctgaaataggacgaagagggaggatggaaccagggaaaagcctgggcttaactgcttattgaggcatgtagtgtatctttaagtcatttatgcatttcagtacttactaatcacattgaatatttaaatgcctgacaaaaatcaatgttgttttccatgaaaacttccacttggctagtttttgtcctgttgagcagtgttgccatgttaccacaaaccattcctctactaatcgtgttttttttctcaataaggataacctcaataatctacttattttggttacaaaccagagttaagactaactgttacataacacttggcctgacttccaagaaagctaatgttttgcttaagcaaatgaagtaatttaataagtactcgaaaatcttgctctaatttcatgtgggagggcag

SEQ ID NO: 28287 - DNA, 544 bp, Homo sapiens
  misc_feature (1)...(544): n = A,T,C or G
attgaaccctttccaggggcgtagtacctctctctactaanaatacaaaaaaattagccgggcgcggtggcgggcgcctgtagtcccagctacttgggaggctgaggcaggagaatggcgtgaacccgggaagcagagcttgcagtgagccgagattgcgccactgcagtccgcagtccggcctgggcgacagagcgagactccgtctcanaaaaaaaaaaaaaaaagggggatttttttcccattttccttgaggaacatggaggcaaaattcttaattaaaatatgggcaacccgattccagtaccacataaaaaggtttttcccccacaataagggggctttcttccttggaaggcagggttgtttcaccttaggcaattcattaaccttattccttcccaaaaccagacccatggacaaaaccggttggattatctaattagatgcaaaaagggccgccaacaaaattaaaaagcctttctggctaaaacctctaattaacctagggtttgatggaccgttcttcaaattattagaactt

SEQ ID NO: 28288 - DNA, 456 bp, Homo sapiens
  misc_feature (1)...(456): n = A,T,C or G
nttgatgacactaggtagagcggcggaattcctgccacagagcgagcacaaggagccctggttcatgcggctcaacctgggcgaggaggtgcccgtcatcatccaccgcgacaacatcatcagtgactatgaccagatcattgactatgtggagcgcaccttcacaggagagcacgtggtggccctgatgcccgaggtgggcagcctgcagcacgcacgggtgctgcagtaccgggagctgctggacgcactgcccatggatgcctacacgcatggctgcatcctgcatcccgagctcaccaccgactccatgatccccaagtacgccacggccgagatccgcagacatttagccaatgccaccacggacctcatgaaactggaccatgaagaggagccccagctctccgagccctacctttctaaacaaaagatgctcatggccaagatcttggn

SEQ ID NO: 28289 - DNA, 444 bp, Homo sapiens
  misc_feature (1)...(444): n = A,T,C or G
tggggctnnnnnaaacggaacttgagcancgtcagngcaannngctattntccacagctcttcgcagacccaagagcttggcacatttccgggttagggtggaatgggctttgcagggaagagggccccctgtgcacgcattccacagcctgtcggtcagaacttgctagttgcaggagacgggtgttacacgcagtcatcagacctcaccctcacagaggcacaaacccacatagttgtggacgcctgcagagactcaaatattgagaggacttctcctttttctctccctccagagctcccacgagctgatgcacccccaggcttcaaaccacctggaatgcacagctcagggaagctggtggatgcctataggctgaaggacagggaactctccattattggggcaggactcagggaggacacttggggccatgtgtctgg

SEQ ID NO: 28290 - DNA, 452 bp, Homo sapiens
  misc_feature (1)...(452): n = A,T,C or G
nttgcggccccnanacaccgggcagtcnngcangcanagncngnngnaannangactatgaagaagctggacagcccggtgaacatcatccccatcattgtcaaagcagatgccctttcgaagagagagctaacgcaggtcaaaatcataatcaccagcgagcttgtcagcaacggagtccagatctatcaggttcctaccgatgatgagtcggtggcatagatcaatggaaccatgaacgcccacctgccgcttgctgtcattggcagcacagaagaactgaagataggcaacaagatgatgagggcgcgccagcatacttgcggcactgtgcaggttgaaaacgaggcccactgtgactttgtgaagctgcggcagatgctgattcgggtcaacatggatgatctgtgggagcagacccacacccggcactatgagctgtatcgccgctg

SEQ ID NO: 28291 - DNA, 574 bp, Homo sapiens
  misc_feature (1)...(574): n = A,T,C or G
tgagttnntnnnagttncccnnaggnnncnnnaattganncccatcgatccactatccgtgtggtggaattcggcgggaattctcgcttctggcctgggtgagctagaagggagaaggtgttttagctcacttggaaaggctagagacccaagtgagcagatcccgtaaactgtctgaagagctgcagagcgtgcaggcccaggaaggtgctcttggaaccaagattcataaactaaggcgtctgcgagatgagctgagggctgtggtgcggcaccggcgagccagcgtgaaagcatgtattgccaatgtagaacccaaccaaacagtggagatcaatgagcaagaagcattggaagagaaattggaaaatgtgaaagccattctgcaggcatatcattttacaggcctcagtggtaaactgaccagccgaggagtttgtgtctgcatcagtactgcttttgaggggaacctattggattcctattttgtggaccttgtcatacagaaaccactccggatacatcaccattcagtcccagtcttcattcccctggaagagatagctgcaaaata

SEQ ID NO: 28292 - DNA, 450 bp, Homo sapiens
  misc_feature (1)...(450): n = A,T,C or G
agggccggnnnnncccggatagacgactacagaccancnggnggaattcccggatcctgcggacgctcaaggttaaaaggcccctttcgatccgctgatcaacctggattgggacatgctgacgcccgccctatggcgtttgatgctgcaggcggcgtttgttgagcgtggaaagggcctatcacagtggccattcctaatcatagggagcgatctaatcatcttggccgtggaggtggctatttatgcttacaccttctactcgatttcccaggagcgtttcctagatgagctagaagacgaggccaaagctgcccgagcccgagctctggcaagggcgtcagggtcctaatctggatgggtattgatcatgtccaacctgctggagccccttcacatggtggatgatgccccatgaccctgtagaaattgaatcctgctcacaacatn

SEQ ID NO: 28293 - DNA, 451 bp, Homo sapiens
  misc_feature (1)...(451): n = A,T,C or G
agggcctnnnnnnaaaagactgcaacacatcgtctggngcaattcgagatcgaggccagcctggctgacatggtgaaaccctgtctctactaaaaatacaaaaattagctgggcgtggtggtacgcgcctgtagtcccagctacgcatgaggctgaggcaggagaatcgcttgaacccgggaggcagaggttgcagcgagccgaggtggtgccagtgcactccatcccggcaacagagtgagactctgtctcaaaaaaaaagactcacaccatgtgtcattaagttgagaaaactcttccagaccaacccttttcctgagtctctcctgcaatatgggctagccaacctcctgggtggttgcaaagcacctgttcatatctcccatagtactcagagcactctatgaccatcattaacaagactctccctcttattaggtagtaattaccg

SEQ ID NO: 28294 - DNA, 463 bp, Homo sapiens
  misc_feature (1)...(463): n = A,T,C or G
nttagagattcgtannccgtgtggaggaattctgatgatgaccagggatcatatgtgcaggtgccccacgatcacgtggcttacaggtatgaggtcctcaaggtcattgggaaggggagctttgggcaggtggtcaaggcctacgatcacaaagtccaccagcacgtggccctaaagatggtgcggaatgagaagcgcttccaccggcaagcagcggaggagatccgaatcctggaacacctgcggaagcaggacaaggataacacaatgaatgtcatccatatgctggagaatttcaccttccgcaaccacatctgcatgacgtttgagctgctgagcatgaacctctatgagctcatcaagaagaataaattccagggcttcagtctgcctttggttcgcaagtttgcccactcgattctgcagtgcttggatgctttgcacaaaaacagaataattcact

SEQ ID NO: 28295 - DNA, 579 bp, Homo sapiens
  misc_feature (1)...(579): n = A,T,C or G
cgctgnnnnnnnnnagttnngccnnnggggnnnnnnnncctcgaaccactgttgagtgtgccgcaattcggcatggacagcgtgcttgcttgccttttctggccagttaccttcactgccacggacacaggactatgagtggggctggggtggtggttatccaggtcctgagtccctggacctatagcccacagctgacgtttggaagaaaagaacatcctaacgcaggcatagaggccccgcccttgctcgcactgtcttggagactgagcctcaaatgcagatcccctccccgccgcagagccgccttgtgtgtcttccgggaaccctgcagaaaggagaactccggtgtctggatttcggggaccgactgtcttgtcaccctgctctgctgagtgaggatgctcagcatgtgggaacagactgaagcagctgactaatgactgttgcctggggagaccagggccctggngtttgcataatttccccaatatatcangaagtgggtagcgcagagggaccaggagagcaaatatcgaatgcgtcagtggttcttaaccttttttcagtatgaaagtn

SEQ ID NO: 28296 - DNA, 503 bp, Homo sapiens
  misc_feature (1)...(503): n = A,T,C or G
cggggtcacgggggnnnnnnaatcgagancctcgtagaccactagtcagngcggtggaattctgtcatccaggctggtgtgcagtggtgcaatgtgggcttactgcagccttgacctccaggacaagtgatctcccacctcagcctccggaatagctgggactacaggtcacggcggtgtgaggtaggctggagaagggagggcgctgacctgtcagatacttgttcctgggtgagcttcttgtcgctctgcagcaggatggacacgtagtggcggatcatgcctacgaagaaagtgatgataacgatgggtaggaccacccagaggcggatgttggagtcgagcaacagttctggccctgccatcttcactgaaagctggttcccagtctggaatgggcgagcttctcttctccggngcacagttgcttctcttcggcttcgcctccgggccttctcaagcccctttggccgtgtaccccagaactctcctgcgactgtgag

SEQ ID NO: 28297 - DNA, 474 bp, Homo sapiens
  misc_feature (1)...(474): n = A,T,C or G
tgatagcacaaaaagaaaagaagaantttcgtagacctcatcgatgnccttggaanangcgccngnnatctgncacccaacaggtatgctgccccacaaaaccaagcgaggccaggccgctctttaccgtctcaaggtgtttgacggcatcccaccgccctacgacaaggtgagctatgccaaaccccacaggcagcggccttacctgtggcgtccatgatgttccgcaactacctacattgtttgatcctcatgaaagcagcactggctgagacgccagtccagccgacctccttccctgtctgtccctcccgggctcttaagcccctctctttctctaacagaaaaagcggatggtggttcctgctgccctcaaggtcgtgcgtctgaagcctacaagaaaggtgagtcccagcttacgctgcaccatctacttgggagatttcaggcctgctgagggacctgnggacctgn

SEQ ID NO: 28298 - DNA, 455 bp, Homo sapiens
  misc_feature (1)...(455): n = A,T,C or G
aatagatgatcattagttagagcggcgtaattcgncactgatgatgctgagcgcctccttcagcgcgtggtgcatgtgcagcatctcgtcgtgctgctgtgcctgctctgccaactcctccatcagtgtgttctggttcccacatgagtacatattggccagcggctccgagatgatgaactccggggtctgagagtgggcaaacagggaagaaggttgggacctggtgcctgtgccgccctggctgccttgctgggcccttctgggactgtgcgctggacttggagccccttggagtatggcttttcacacgggcttctataccgcttcgactggaagatccacctccccactgccttttctcactcagatggggacaccgaggtccagaggaaaagacacctgtcaaatgtcacagatctgggaggggacttaagacctatcatgccaagagg

SEQ ID NO: 28299 - DNA, 452 bp, Homo sapiens
  misc_feature (1)...(452): n = A,T,C or G
aggcgctnnnnnnaaaagactagcagncctccgtctggnggaattcgtcttgtaatctttcacactttattcctaaaacgtgtcttatttttatgcagctcattttttctttaaaggagaaaacttgtaggtgtttaagaattggttttgggagggcgaggactgggccaggttagaggcagatggcacaggggcgtgtggcgggcgggtgaggctgctttgcacacctgtgttggtggctgtcccctgccgcccctccctgtggcagcagcaggacaggtgtgtgcccagcaccctccctacctgggcctggaagcagatgaggggaatacttcatgcaaagaaaaaagtaacatgtgcaaaagctccccgtccagctttgacagtcagttttgatgtcagctcctcggcagggtaggcctgatgacagccctgtccctccctgcctctgn

SEQ ID NO: 28300 - DNA, 458 bp, Homo sapiens
  misc_feature (1)...(458): n = A,T,C or G
atagatnaccntnntttgtagacattagtcagtgcggtggaattcggccatggtggtagtcaaggcatagagttccctgtggacgtcagggaggaaccagggtctgttctaaagactcctgaggagggcgtgaactctcacacaggcccaaggcttgccctttctggctgtccttaagcaggaccaggaggtgccaggctggagaaggaatgaggggcagagaagacaggtggtttgcagtccagggggaggaaggaggaggccagtgctgctcctactaatgacgccttctcccttgccttctcccttctctcctagtccatgacttgcagagctttggccttgacaacgtacgtaccagatggaaaccatggagggcaggtgggggtgggaggcttggttgctgccttcatttccttgtaggaacatcctgggatggggtagtgcatatggaaaaa

SEQ ID NO: 28301 - DNA, 498 bp, Homo sapiens
  misc_feature (1)...(498): n = A,T,C or G
gggggaaggggnnnnnnntttcgagacctctangcacngtggnggaattccttgccccccagtgcctctgctcgtgggtccctggacacggccttgaagccaaccttctttggaggagcaacagcagcagccttggccgacgcgtccaactcccaaggctgccgtggagggcaggggggtggtgcttgcctggatgtggccccgagtgcctcccctccctccctctgtgggggagtctcccgcctgaacctgaagatggagcagggcccccgcttcgccctggagcctcttcctgtgcctggctcaagctggctgcctgtcagtcttggggaatctggcccaggtctcctcagcctctgccccagttctgggagaagtttctactggtgtatattttttactggaaatgagccttttaggaatgaatgtagactggtttgtattaaaatgtgtcaattgctaagaaatacctgtggctggtctgtaaggccactccag

SEQ ID NO: 28302 - DNA, 462 bp, Homo sapiens
gaaaaaaatttgatgacatctggtcgagcggcgtaattccaggcctgggcccagggcgccctgcgggccagcgtggaggctgacacccacacatatggtgtggaccatgctgccttgtggagctgggagttggagacagccgccaccccacaggccgggctactggcagccacactcggctttttgcccagtggcagaagagaccagccctcctcccatgcccggtcaccatgggggtcaggttatttttgtagggggtctccctctcacactgcctcagtgctcacaaccttccagtgtggatgttacagggtggcccccattctaccgatgtgaaaactgaggcgccaggacacagtggctgccctgtcgctggatcagtagcagagccagagctgcctccgagcgccatgccgccctcgggaatcatacaggaagagcacagtggatccagggtgggga

SEQ ID NO: 28303 - DNA, 458 bp, Homo sapiens
  misc_feature (1)...(458): n = A,T,C or G
ntcgcgctgnntnnnaaaaggacagtgagngcnactgacnagncnggtggaattcgtattatgggtccaatgagacatcaaaaatttagaaataggaagcatgaaagaactcatataagtccttcatacatgacgaagtttgagagccaaagcctcagattaacctacgcatatattatcctatagatagaaatcaggtatcagaacaatgaatgttattaccaaaactaatctctttctctctctacttctttgcagcacagattgtggcttcaagtgcatggaaacactgactatatagcgtttctggaggagcagattgtaaggtcacatggtttcaccccatgatggatccaagtagttcctgagtcacattcattgaaatctattcgagaaggggtaaatcctgtactcaaaggagggcctggggaacagcacagaatggaagaaacctattg

SEQ ID NO: 28304 - DNA, 476 bp, Homo sapiens
  misc_feature (1)...(476): n = A,T,C or G
nattgagnaactcgagacctctagtccagngtggtggaattcgttcctggcatcacggggaagccgggagttccggggaaggaggccagcgagcagcgcattatggagctgtgtggggggatgatcagcgaacaaattgcacagttagccgcgcacctaaggaagcctttggcacccgggtccattggtcggcccggtccagctggcccccctgggcccccaggacccccaggctccattggtcaccctggcgctcgaggaccccctggataccgcggtcccactggggagctgggagaccccgggcccagaggaaaccagggtgacagaggagacaaaggcgcggcaggagcagggctggacgggcctgaaggagaccaggggccccaaggaccccaaggcgtgcccggcaccagcaaggacggccaggacggtgctcccggcgagcctgggcctcccggagatcctgggcttcc

SEQ ID NO: 28305 - DNA, 465 bp, Homo sapiens
  misc_feature (1)...(465): n = A,T,C or G
agaaaaaaactgataccntnnnctgatgacactagacagngcggtggaattctgacacactggttaacaaaggagggggctgtttgcaaacagattcaaccaacccattgcctccagccatccaaagattctgcacagccagccacccctaaggctaagaaatcccagatgcagatctgtggatccagcgtagcatctgtagcagctgggacatcattccaggttttgggcccggtgtgttggcaacaactggatctgaagatggcagtcagggtgctttggggtggtctcagcctgctccgagtgctgtggtgtctccttccgcagacgggctatgtgcacccagatgagttcttccagtcccctgaggtgatggcaggtaaaactccgcatgtgtggctgagacaagctgcagcagagtctgcttgagaagctgacgggagactttgtggggagggagtagca

SEQ ID NO: 28306 - DNA, 442 bp, Homo sapiens
  misc_feature (1)...(442): n = A,T,C or G
ctgtgtttgtgattgcagaagatgtgtggtggaacactgactgttttctattgtggatcaacaaatagatgatgaaaagtggcggggagtggaatactcaggaaaagtgtaactagccacgctgggctttcctccagaaggctctctccatccctcgccccggcatcccgcactgcactgtatgctccaaggatggggaccagttggagggtttgcagtgatgacaggagggccagtggatgcaaggcctanaacaccaggcagcccggtaatgctctctcttcctttctagtcggatatatacttcacagcaactgcagctgtgaatgaggtctcatctggaggcagctccaagggggccagtgcccgaaattctcctcagacacccccgggccgagatactccagtatttccttcttccctgggggaaggtgaagtccaa

SEQ ID NO: 28307 - DNA, 498 bp, Homo sapiens
  misc_feature (1)...(498): n = A,T,C or G
tgagtntaggggnnnnnnaatcgaganatctagtcacagtggnggaattcggnggaggaggggaggcccctaccctggcccctggccctcctgggggcaccaccagctcctcaagcaccctggcccgaaaggaggctggggggcggcggaagcgagtagagtttgtgacatttgcgccagcccctccagcccagtcacctgaggagcctgtaggggcccctgctgtgcagtccatccttgtggcaggtgaggaggacatccgctgggtgtgtgaggacatggggctgaaggaccctgaggagcttcgcaactacatggagaggatccggggcagctcctgaccctccacagccacctggtcagccaccagctggggcaacgagggtggaggtcccactgagcctctcgcctgcccccgccactcgtctggtgcttgttgatccaagtcccctgcctggtcccccacaaggactcccatccaggcccnctctggcctgc

SEQ ID NO: 28308 - DNA, 473 bp, Homo sapiens
  misc_feature (1)...(473): n = A,T,C or G
natgagaccttgagcactgtgcnggaattcaacaaaacaaaacaacaaaaaaagaaaaggcagagtacaaggagatacatgtaacaagagagaaaaaataaaaatggcgtgaaaaagaccaacataaattaggatgaagtggggtagaaagagcaaaaacagccttggggtaccccaagcacttgctttgtagggggcttacaagtgtgagccccagctttcctgcagccaactcacaaaaacacattggtcactgactccttcaatgtccatatggcacaagcaagctcatggcccagaatgtgcctggccaccacagcatctaccatcgagacagtgaccggacacgtagggcttgatcccgacatgattctcagcatggatggtggtggcccagcatggacagtgcagcaataacagtcctgctcctgggccagtgtggtgaagtccatgcccccagctcttacccgagn

SEQ ID NO: 28309 - DNA, 484 bp, Homo sapiens
  misc_feature (1)...(484): n = A,T,C or G
gccgctanngnttatgagaccatgagnacgtgcnggaanncctgctacacaagagagacaatgacaaggcggacgcccaggaggagaactttctgcccaagtaccagcgtgtgaaggacctgtgtcagcgtgctgtgtaccagacggtgtgtgagcagctgggacagaagtggcagtgtgtgttaggacgtcacggggaagctgaagctgcataagtgcaagggccccatgtggctgggcggcagcagagccctctccaacctcgtgcccaagtactacgggcagggcagcgaggcctgcacctgtgacagcggggactacaagctcagcctggccggacgccggaaaaaactctttaagaagaagtacaaggccagctatgttcgcagtcgctccatccgctcagtggccatcgaggtggacggcagggtgtaccacgtaggcctgggtgatgccgcccagccccgaaacctcaccaagcggg

SEQ ID NO: 28310 - DNA, 495 bp, Homo sapiens
  misc_feature (1)...(495): n = A,T,C or G
cgaacgcgccngggggnaattgannnaatcgtagacctctagtccgngnggtggaattcgagaatattcttattaatgcatttaaaaataaatacagcagataaacctgaggagtaaaaatagcagttgatatttattgggcacttaccatgtgccaggcactgtcccaagcactttatgtgtattagttcactgacttctcacggcagccctgggagataggtattcttttcatccccactctagagatgaagacactgagccctgaggtgttaacttgctccaggttgcatagtaagtggcagaggcaggactgatacataagcaggctgacccagggcccgcactctcaacccctgccccacactgacccaccccctatcttgtcagccataccggtggctccaccaccagaccagcccaccccaatcccatccccatgcgcactgaggaatcagacttcctctcagcttcttgtggcctttctagaacaaa

SEQ ID NO: 28311 - DNA, 472 bp, Homo sapiens
  misc_feature (1)...(472): n = A,T,C or G
natcgagacctgtagcnccngtggnggaattcctcttctcaggttctcccagagcatcacctgactccattttaccctgtgaaactcacacccaggcccatgtggggttctctggaaactaaggagagatctgagaggccaaaatagatgcccctttatcaactaagatgaacccaaacgttaaggaaacaaagttacctattggttaagggttcaggtcctgactggcctggcacatttctaaattcctatagctctaagctccctaacaataggagctatcagacccctcctagctctgatttacaacccagaccactacagctctgactagacagaggactgagcttgcattcttttatcataagcaattgcagaccttaagccattttcagctagcttatagaggctgtgtgcaaactatctttctgtcctatagntcaccttttgatataaagagccaaattctacc

SEQ ID NO: 28312 - DNA, 481 bp, Homo sapiens
  misc_feature (1)...(481): n = A,T,C or G
nctgagactgaggtcctgcccangncgnggaantcctcaggtggatctggctgctctggactgtcctcatcctctttagctgctgttgcgccttccgccaccgacgagctaaactcaggctgcaacaacagcagcggcagcgtgaaatcaacttgttggcctatcatggggcatgccatggggctggtcctttccctaccggttcactgcttgaccttcgtgagtgacttgatgccctgggtcagctaccagtggccctccccaaaccagaaccccaaatcgtctcacattcccttttccacacatttcacatttcaaagtatttttccctaatataaaaactagcaccctatacctggttgtcttcaaccaatcatgccaattttctcccctgcaggcttgctcagcaccttcaagcccccaacctacgaggatgtggttcacccgccaagcacaccaccccccccctatactgtggtcg

SEQ ID NO: 28313 - DNA, 503 bp, Homo sapiens
  misc_feature (1)...(503): n = A,T,C or G
ttttttttttaacgnnnnnaaggggttgagacctcgagacattgtgcatgcctggaggngccgctgtgagcccgacggaaaactgcgctaaaggcttgtctttcccctgcccgaccgaaggagccgaccttgcctgcgctacagcttccttattttcgtcgcctgttctcctgatcctgcgtgttctaaaaaccccttaggctttccatgggttcccagaccatggcggtggcgctgcccagggacttgcggcaggacgccaacctggcaaagaggaggcacgcggagctgtgcaggcagaagcgggtcttcaacgccagaaacaggataattgggggagacactgaagcctgggatgttcaagttcatgaccagaagataaaagaagctactgaggaagctagacatgaaacctttgctgctgtaatgaggcaaaatgacacaatcatgtgcatattggaaaaccgggaaaagagggataggataaatctctgtacggctan

SEQ ID NO: 28314 - DNA, 489 bp, Homo sapiens
  misc_feature (1)...(489): n = A,T,C or G
gcggcggggnnnnnnnaatcgagaacctagtccctgtggnggaattcgcgactccggcaacacacccgccctgatccactaggaacaaaccgctccgagcccgggtggtgggaccgatcctggagcccagatcaagccaagtccggccaaagctgtgtcgcaaagtaagaatctgaagacaggtccggtgcttaaatgactattattctaaagagttgaagatgggaacggtggacgcacaaaatctttaccctcggcttaaaacgccttttctggcaaaagtttgtgtatgaaagaaagctgaacaaacacgttgtagcactgtttaagtgaaggcctttccttttagaacactgctttacaatgcctaatcagccggcgctcaggttggtgcattcagagacccgagcgtttgtgttcctaataagtttgctagaatgtcaggtaactgaagcaggttagtttctatcctgccccaaaacacagact

SEQ ID NO: 28315 - DNA, 468 bp, Homo sapiens
  misc_feature (1)...(468): n = A,T,C or G
tgggtnnagnaatgagaccctanccggactgagaccatagtccagtgcggtggaattcccagatctcaccaagtaatagttgtgcaattgacaaatgtttggtgccatgtaatggagatgtcacactacacagttgtagtttaaatgcagtccaacataaagtgcatgccactgaactgtaaccctagtaatgtgtcttgtacagttgaaaaataatacttcacctttatataggttaagatatgtaccttatctttaccactcagggtggctttaaaagacggacagctttaggtttgttctcactggaactggttacactttctgtgcaaacttaaccaagtgatgatcgtctggaagctgcattccctcatttccactgtttggtgtgaatctagtctccccactttatctaaaaggaggctagcagggccccagcctgagcagagcagctagagagtgcttcct

SEQ ID NO: 28316 - DNA, 469 bp, Homo sapiens
  misc_feature (1)...(469): n = A,T,C or G
atcgagaccttgggcacngtgcnggaattcgagcaacactaccatcgttcccagcactgcggatccgggccctagcggcgggcccagtatcggaggtggtggcggcggaggaggcggcggcatcgaggtaatacgtgactaatctccccgggcgctagctctgagcatatgcggactctcttcggtttcctaggcaagatcgacgaaccacacctcttcccgccggataattcacctttgccaatcgcaatctcgttaaattccatgatccagactcagcagttgtcgcaccatgtctgacaaacactgtattccttgacagagctttgataacgtaccatatgcataaggagttattcctgataaggctaaggcttgtctctgttggcaccagctaatgcaatggcaggtcttctgcttggtgttgggctcctgcctactcctaacccacttactcagactggcgctg

SEQ ID NO: 28317 - DNA, 469 bp, Homo sapiens
  misc_feature (1)...(469): n = A,T,C or G
gtggtnnaggngatgagaccctagnnannatcgtagacattagtccangcggnggaattcagtgcttccaagctttcctgtacttggtcaatattctgtttttcctcctagtcttttctttgaagcgattcccaagggtgactagaaaattagcaaagttaaaatggatgcagtaaaaagtacacagctaataagggacagattcaggatgttttgttactatcagtttttaattcatttgctaagttcagcaaatatatactgaagctgcatgtggccctgggacccagtgactcaaaccaaaaccgcctgactccagggcgcaggggtcgtaatatacctgctgctctctgggactacgggtactagtaggggcaaaattatatttcttgcctcactttcttattttgctttgaattaactaaaagaggcagaacctctctcttcttctgtggcaaacttagggacc

SEQ ID NO: 28318 - DNA, 564 bp, Homo sapiens
  misc_feature (1)...(564): n = A,T,C or G
caataggaggaccccctccgnannnnnncnnnnnattagaatcaccactccagtgtggtggaattccaggagtaagaacaaacataatccccatgtttctttctggcggcagccagagcccctcagtggaattcaggaaacccgcttctgccatgctgcctgcgaccttaggcaggtcacagctctcgaggcctcagtttccttatttgtaaaataggcatatgattcactcctataaatgctggatacttgcatttccaaggcattttccaggctgtactagactacgtatgtatgagcactttgaggacagggaatatgtcttaatcatctgtatattcacagcaggaactcaaaaatgtttactgaatgatcagatacctcttggaagaggggactaataacacagttcatcggaactcaagaagagaattttaccaagggggagaggacaagagatcattacatttatagataagacccttgcatttgagaaaaatagttttagaagaggaaagagatggagagatgggttaaaaattgagggtaaaggccggggtgtgg

SEQ ID NO: 28319 - DNA, 464 bp, Homo sapiens
  misc_feature (1)...(464): n = A,T,C or G
tggcgaaaanaatttgagacattagnctcgtatgtcctctatccgagcggtgggaatctttggatgaacgagtgttccacgctctgttggtggacttatctgcctcactggaagagatgtgggtggaagggggttgtatgttacctttttcacctctcattggtttccccataacattgcatatgggggttggcagagggagatataagccagccacggtagtcgcttggtttcccaggtggaatgggctaacacaggagatgatgggaacctgtcccgcagtccctgcatgaccattgtccctgctggcctggcgatgtgggcatcctggggttcttatggtaccagaacaagccccaggcaagctggaacttgtgtggggaggggacatgatgaggataaacaactgactgttgcttcaaggacatcacggccaccccaagctctcagtgatctactcctgg

SEQ ID NO: 28320 - DNA, 461 bp, Homo sapiens
  misc_feature (1)...(461): n = A,T,C or G
gtggtnnnagggctgagaccctaggcagactgaggaccatggtacagcctgtcttcctgtcggccctgacaatcatagccagtacctgggctctgacgcccactcactacctcaccaagcatgacgtggagagactaaaagcctggctggattgccctttcacaaatttggaatctgccttctactccatcgagggactcaccaaccttggtgctcaggtgccacatgcaaagaaagcatgtacctacatcagatctaaccttgatcccagcaatgtggattccctcttctacgctgcccaggccaggcacgccctctcaggatgtgagatctctatttcaaatgagaccaaagatctgcttctggcagctgtcagtgaggactcatctgttacccagatctaccatgcagatgcagctctaagtggctttggcctttccttggcaccccaagaagcactt

SEQ ID NO: 28321 - DNA, 454 bp, Homo sapiens
  misc_feature (1)...(454): n = A,T,C or G
gtgccggcggccccccctgatnntcaatgagtatcatcgcacancnggnggaattcggctaattaacctattcccttactggctgggcctactatatgcaaatgttctcattttgcattctgacacatcactcttgcataaatatccctcatgaaaccctgtggggttttattggatcagtgctgcaggagggccagcagggggcgcatggactggttctctctgagtaggtctcacgcatgagttttccttgctcgttggtatggaaatgtgggagcgtttggcattccctttcttaagagtgagtcttgaaatttaaagataaaagttcattattagaacttctttttacaagggaaggctgtacagaacacagttatttgtcacttacaaaaaccctatgtgggcagggcgcagtggctcacgcctgtaatcccagcactttgggaggtag

SEQ ID NO: 28322 - DNA, 473 bp, Homo sapiens
  misc_feature (1)...(473): n = A,T,C or G
aggggtnnnnnnnaattgagnccctngnnnnnnatcgtagatcactagtccatgcggtggaattcccgccaaagctcttccggttttcagtctggtccgcagaggttacccataaaagaaagctgccatcacaggcagcagacctttgttctctgaccacttgataatgtcaggacgcggcaaaggaggtaagggcctggggaaagggggtgccaagcgccaccgcaaggtgctgcgcgacaacatccagggtatcaccaagccagccattcggcgccttgctcgccgcggcggcgtgaagcgcatttctggcctcatctatgaggagacccgcggagtgttgaaggtgttcctggagaacgtgatccgggacgccgtgacctacacggagcacgccaagcgcaagacggtcaccgccatggacgtggtctacgcgctcaagcgccagggccgcaccctctatggcttcggcg

SEQ ID NO: 28323 - DNA, 450 bp, Homo sapiens
  misc_feature (1)...(450): n = A,T,C or G
aatgatagatangcatcgcagngcgnggaanttnactnactgagcgccatgcccgggcagctgtgctgggagagaatgggcgggtgctgtccgggcacaccctggacatcaacatgggtggagagcctaagcctgacagacccaaggggctaaagagagcagcatctgccatatacaggctcttcgactaccggggccgtctgtcgcccgtgccagtgcccagggcggtccctgtgaagcgaccccgggtcacagtccctttggtccggcgtgtcaaaactaacgtacctgtcaagctctttgcccgctccacagctgtcaccaccagctcagccaagatcaagttaaagagcagtgagctgcaggccatcaagacggagctgacacagatcaagtccaatatcgatgccctgctgagccgcttggagcagatcgctgcggagcaaaagg

SEQ ID NO: 28324 - DNA, 457 bp, Homo sapiens
  misc_feature (1)...(457): n = A,T,C or G
gggggtnnnnnaatgagaccctanccgtggttggcattctgaggagtttgcactccgtgtacaacaggtggtcgggtgcacagacagggtggaggcggagtccctgcttaggaggagagggaggaaagcttgagatcttgacacttccagtcttccaattctccctatctggtggccaatgaattgggccagacagggacaccgctcactccagctgacaaagccgagcgcatgaagcgacaaagacaccccagattgcgcccccagacagcccagncttctttccctccctcccctggtccttctcctgatgcgcaaccggcaactctggctcagagagtcaaggaagtattgcccgatgtgccattgcgtgtgctccagagagacctgcgtatgggaaagggtggccccacactgggagacgcgctcagggaggaaaagcgggttgtgaaggaag

SEQ ID NO: 28325 - DNA, 464 bp, Homo sapiens
  misc_feature (1)...(464): n = A,T,C or G
gtggcnnnnnngaatgagaccctannnnnnggttgatgacatctgnacatgcggnggaattcgatttgctcgactcggacgaggagcttcgctacagcttggctacctccagggccatgatgggtcgccgagctcaacaggagtcagcgcaggccgagaatcacctcaatggcaagaattcctctttgactctgactggagagacttcctctgctaaattacctcgctgccgacagggaggctgggcaggtgattccgtgaaggcttccaagtttaggaggaaggcttctgaagaaatagaagatttccgcctcagaccacagagcctgaatggatcagattatggaggagatattcctatcattccggatctggaggaagtacaggaagaagactttgttttgcaggtggcagcccctcccagcatccagataaagcgggtgatgacctaccgtgacctggac

SEQ ID NO: 28326 - DNA, 488 bp, Homo sapiens
  misc_feature (1)...(488): n = A,T,C or G
tgggatccnggggntttgagncctcgtagaccctagtcagngnggnggaattcgcacagcttttgcagtttgcagcaaaaaacattggtctcaaccctgcactattaacctcgccaattaatcctcaacatatgacgatgttgaaccagctctatcagctgcagctggcataccaacgtttacaaatccagcagcagatgttacaggcccagcgtaatgtgtccggatccatgagacaacaggagcagcaagttgcgcgcacaatcactaatctgcagcagcagatccagcagcaccagcgccagctggcccaggccctgctcgtgaagcagccaccaccgccaccgcccccgccgcacctgtctctgcacccctctgcaggcaaatcggccatggacagctttccctcgcacccacagactcccggcctacctgacctgcagaccaaagagcagcagtcttcacccaacacctttgctccttaccct

SEQ ID NO: 28327 - DNA, 480 bp, Homo sapiens
  misc_feature (1)...(480): n = A,T,C or G
ggcagancccaggcagccccccaactgagaccatttgagagccctgnggaantcaactctcattcgacatccatctgaactaatgaatgttcctcttcagcaacaaaacaaatgtacagcattagtgaaaaataaaactgcggctacaactactgctttgcaatttacatacccactgtttactacaaatgcttgctctactagtggaaattctaatctttcacagacacagagttctagtaactcatgttctgtacttgaagctgccaagcaccaggatattggattgcctagagcattttctttctgttatcagcaagaaattgaatccactaaacagacgttaggtagtagaaacaaagttttgcctgagcaagtttggattaaagtgggagaagcagcgctatgcaaacaagcactgaagaggaatcggagtagaatgcgtcagttggacacanatgtagagcgaagagcccttgn

SEQ ID NO: 28328 - DNA, 471 bp, Homo sapiens
  misc_feature (1)...(471): n = A,T,C or G
ggtatggcgggacncncaatccgtggccctccgcacagncnggnggaattccaccagccgtggaagccagcagtatcgagctctcacagtgccggaactcaccctttaggtcttcgatgccaaaaacatgatggctggctgtgacccccgccacggccgatacctcaccgtggctgctgtcttccggggtcggatgtccatgaaggaggtcgatgagcacatgcttaacgtgcagaacaagaacagcagctactttgtggaatggatccccaacaatgtcaagacagccgtctgtgacatcccacctcgtggcctcaagatggcagtcaccttcattggcaatagcacagccatccaggagctcttcaagcgcatctcggagcagttcactgtcatgttccgccggaaggcctttctccactgttacacaagcgagggcatggacgagatggagttcaccgaggctgaaan

SEQ ID NO: 28329 - DNA, 469 bp, Homo sapiens
  misc_feature (1)...(469): n = A,T,C or G
gtnttagggagccggggannnnaaatgagactgaagcctgcggggcttcaaatcccccacgacatagaagagaccctgactggaaagaccatcacccttttgtggttcccagngacaccatcgagaatgtcaaggcaaagatccaagataaggaaggcatccctcctgatcagcagaggttgatactttgctgggaaacagctggaagatggacgcaccctgtctgactacaacatccagaaagagtccactctgcacttggtcctgcgcttgagggggggtgtctaaatttccccttttaaggtttcaacaaatttcattgcactttcctttcaataaagttgttgcattcccaaaaaaaaaaaagaaaaaaaaaaagcaaataaaagaaaaaaaaagaaaaaagaaaaaaaanntttggccccctaaaaattagagggccccataaaccccctttaaaaaccgattt

SEQ ID NO: 28330 - DNA, 500 bp, Homo sapiens
  misc_feature (1)...(500): n = A,T,C or G
ggggcgggnnnnnnnaatcgagatcctttggacagccccgtggaattcgctatttcctcagatgcaaacattttccttgaccatagccaattaacctctcaacatctaatccacctccctttggaactggctgataccttgagaaacctttcttctccacagagggtctgccagttcagatgctgaaaagtttttctatctggagaaacccataagccatactattagacctatgccccaaagagctaagctaagttaaacacacagtgtttacaaatgagcagctgaaaaggcacacaagcttaagttgcagaagacacacacttgattttccttgctatggagggccctttagaacattccctacaaagttattttagaatgtgaagagacagctgggagcggtggcttgagcctctaatcccagtactttgggaggcccaggcgggcagattgcttgagcccaggagtttgagactagcctgggcaacatagtgaag

SEQ ID NO: 28331 - DNA, 480 bp, Homo sapiens
  misc_feature (1)...(480): n = A,T,C or G
aggggagtccccncnaatagaaaacccnatagatgacccttagtccagngcggtggaattccccatcatctttcccattatccttcccatcatccttcccatcaaccttccccatcatccttctccatcatccttcccatcatccttcccatcatccttcccatgaaccttcccatcatccttctccatcatccttcccatcatccttctccatcatccttccccatcatccttccccatcaccacctatccccaccatccttccttatcatctgttccattgtttgtccctagaccagctctgttgcctcatccctggtctctggactgtgagcaccaggcctgccacctgctgactctgtacactgacctccgtctctcccatctctgtcacggtaaaaacccaactccttcccattcccaccaggccctgaatgacctgcctggccacctccttgctctcacctcctccctttcttn

SEQ ID NO: 28332 - DNA, 483 bp, Homo sapiens
  misc_feature (1)...(483): n = A,T,C or G
agccgcctcccnattgaagaccctatagagagccgtggaattcggcagacgcagagtgcggcaagacggcgctgctgcaggtgttcgccaaggacgcctatcccgggagttatgtccccaccgtgtttgagaactacactgcgagctttgagatcgacaagcgccgcattgagctcaacatgtgggacacttcaggttcctcttactatgataatgtccggcctctggcctatcctgattctgatgctgtgctcatctgcttcgacattagccgaccagaaacactggacagtgttctcaagaagtggcaaggagagactcaagagttctgccccaatgccaaggttgtgctggttggctgtaaactggacatgcggactgacctggccacactgagggagctgtccaagcagaggcttatccctgttacacatgagcagggcactgtgctggccaagcaggtgggggctgtgtcctatgttg

SEQ ID NO: 28333 - DNA, 482 bp, Homo sapiens
  misc_feature (1)...(482): n = A,T,C or G
cgcccccaatgagaccctaatcgtagactctagtccangcggnggaattcgctttctcgaaccccgagaccctggatctgtaccgggacatccctgagctgcagggcttctgagtcagactggctggcgtgtcactcagccgcacccgtgtgcactgtaacttttgtgtgctcaagaaattatacagaaacctacagctgttgtaaaaggatgctcgcaccaagtgttctgtaggcttggggagggatcgtttctctgttttgttaaatctggtgggtacctggatcttccacacgagtgggattctggccttcagagaccaggagggagtgtctgggccgcaggtgtggcactgtggtgagagtgtgtgtctttgcacacacagtgcagcgggaacggtggggctggctggtgctgaagacagacacactcctgagccaaggtcttgtcttcaacctccccgtcccgttgtcccattttgc

SEQ ID NO: 28334 - DNA, 463 bp, Homo sapiens
  misc_feature (1)...(463): n = A,T,C or G
ngggcgggnnncnncaactgagaccattgaaagcctggngaaanncagcggaaggaatacatcctcactgacatacggaagggacacatgtgcaatgcagagctcctgagaaacatgccagagttctccggggtgctgcaccagtgtcacattttggcctctgagatggtccatttcattcatcagatgcagcattacatcacatttgaggtgcttgaatgttcttgggatgagctttggaacaaagtccagcaggcccaggatttggatcacatcattgctgcacacgaggtgttcttaaacaccatcatctcccgctgcctgctggacagtgactccagggcacttttaaatcaacttagagctgtgtttgatcaaattattgaacttcagaatgctcaagatgcaatatacagagctgctctggaagaattgcagagacgattacagtttgaagagaaaa

SEQ ID NO: 28335 - DNA, 466 bp, Homo sapiens
  misc_feature (1)...(466): n = A,T,C or G
ngggcgagggccnncactgatgntcattgagatcctagaccangcggnggaattcacggggtttggtttcccatctaatcaacttaagggaagccggcatgtacccttcaaggccctgtcaccacctatttcctgatcagctggtataaactgagggtggcttttaaagacccagacttggttggcagcgctgccatggaacaccccagcaagcacctcccagcctgcctttcggagcagcacccaggaggggatgccgcgctccagcaacaccaggtcaggcctgtgcagacccctgccctgccgctgcagaaatccagaagcatccttaatgcttctcagtcttcagccagagggagggctgttatttccagaggtgcgctttttatgtacttttagctagatgtggcatgcatctgtgagctttagatcattaaatccaaaatgtttgcctaaatgagtttat

SEQ ID NO: 28336 - DNA, 452 bp, Homo sapiens
  misc_feature (1)...(452): n = A,T,C or G
naatgatcatnctcgnacaatgagggtcatccgagccacccactccctcggggccggagagaggccctacaccagccagcgctgagcagaatgagtagctaggtaggggcaggtgggtgatctctaagctgcaaaaactgtgctgtccttgtgaggtcactgcctggacctggtgccctggctgccttcctgtgcccagaaaggaaggggctattgcctcctcccagccacgttccctttcctcctctccctcctgtggattctcccatcagccatctggttctcctcttaaggccagctgaagatggtcccttacagcttcccaagttaggttagtgatgtgaaatgctcctgtgcctggccctacctccttccctgtccccacccctgcataagggcagtgttggttttcttccccaattcttttccaagcaggttttgcttaccctact

SEQ ID NO: 28337 - DNA, 461 bp, Homo sapiens
  misc_feature (1)...(461): n = A,T,C or G
agtgcgtnnnnnaaactagaccatcgataacgcggcggaanccgnggaacgaggtaccttgtctggggaagaagtggagctgggcaggcttgactgctcctggctgaccctgagctctcgcagttggagggaagcagacagacttgactttttgcaagtccgcgtgttgctggagggacacgtgtattggagcccacaagaggggctgtgtggcctgggaataccatgtggaaggttgggcttcaagttaacaggatcagacaccagtcaagcagcctcaggtcatcttgcgactccactgagcagcctttcctgttgtcacatgggttcagagcagctgagcagggaacacgtcctaggcaggtctgacgtgaaacctccccttaccctgaaccgtgtgactctgcaagcagacacctcgaggcaggtgttctangcanagggatgggcatgagcgaacg

SEQ ID NO: 28338 - DNA, 457 bp, Homo sapiens
  misc_feature (1)...(457): n = A,T,C or G
cgggggnnnnnnnngtttgagatcactagtcagngctgtagacatttgaatctccggacccttttgacctgagtcacaatgtcgcagccaatgtgaccagccgggtggctgggcgcctacagaactgctgccgagcagcagccaattactgccgaagcctccagtaccagcgccgttcctcccggggtcgggactgggggctgctccctcttctgcagcccagctcccccagctccctgctctctgctacgccgatccctttaccccttgcacccttcacccagctcactgctgccctggtgcaggtattcagggaagcactggggtgccatatagaacaggcaaccaagagaacgcggtcagaaggaggtggaactggggagtcctctcagggagggacaagcaaaagactcaaagtagatggacagaaaaactgctgtgaggaggggaaagaggt

SEQ ID NO: 28339 - DNA, 455 bp, Homo sapiens
  misc_feature (1)...(455): n = A,T,C or G
ggggnctaccgagaccctcgaaatcggantgccttcgnanagngcggnggaantggagaacagagagatggatgacccctctgtgggccccattatcccccaggctttggataagatcctgcagctgaaggagagccgccaggaagagatgaattctcagcaggaggaagaggaaatggaaacagatgctcgctcgtccctgggccagtcagcgtcagagactgatgaggacacagtgtccgtatctaaaaaggagaaaaaccggacgcgttggaaccgaaagaagaataataagccccagcgggtgcgaggggtgtcctctgatagctctggggaccgggagaaagactcaacccggtcccgtggctctgattccccagcagctgatgttgagattgagtatgtgactgaagaacctgaaatttacgagcccaactttatcttctttaagagga

SEQ ID NO: 28340 - DNA, 450 bp, Homo sapiens
  misc_feature (1)...(450): n = A,T,C or G
ggggaaaactgagaccatccgaaaactgagtgtcatncgcacngacggacncaatgcatgggcactgtccaacctctggtgctgaagcagccaagagacccaagcctgccttgctgccacttaggatatgacagcacagccagtggcctctactggatcctggtacccctcagaagacacccagacactgggagtgctgccacctcgtggtgcaagagttctgagggacggcaattctgaagacattgaatgccgttttgcacaccctggtcagaatgaaacattccttgggaactcgggccgtgagaagcatccttcctgatcacctgactgtagaaacatccttatcgcaccctcccgggcaaaggcccaacagcctgactgcaggaacatccttgccatatcctgccgggcagcaagctctaccgcccacacccctcctttccagtg

SEQ ID NO: 28341 - DNA, 468 bp, Homo sapiens
  misc_feature (1)...(468): n = A,T,C or G
ntttgagacctgagcactgtgggaattcgcctgcctcagcctcccaagtgttgggattacaggcgtgagccactgggccctgcctgtattttttatcagccacaaatccagcaacaagctgaggattcagctcataaaacaggtttggtgtcttggtgatctcacataaccaagatgctaccccgtggggaaccacatccccctggatgccctccagccttggtttgggctggagtcagggcctggatacagtattttgaatttgtatgccactggtttgcattgctggtcaggaactctagtgctttgcatagccctggtttagaaacatgttatagcagttcttggtatagagcaaactagaagaaccagcaatcattccactgtcctgccaaggtacacctcagtactccccttcccaactgaagtggtatgaggctagctctttccaaaagcattcaagtttgg

SEQ ID NO: 28342 - DNA, 445 bp, Homo sapiens
  misc_feature (1)...(445): n = A,T,C or G
gggaaaatgatagcttccgaaactgaggtcntngcaannacccagaccggagcaagctgcaaaaggcaggagctgcgacccacaaccgtcgtcgggccagcatatccagtctgccaccacttaccaaggataccaagaagcagtcaacaggcactgtgcccctttcggttactgctgctttgcagctaacacacagccaggaagactccagccgatgctcagataactcaagctatgaggaacccttgtcacccatctcagccagctcatgtacttcccgccggagacaaggccagagggacctggagctccccgacatgcatatgcgggacccggtgggcatgggacaccacttcctgccaagagagcccaccaagtggaatggagaagacggctacgaattcatccgctctatgccaggctgacaggagataacagaagaatt

SEQ ID NO: 28343 - DNA, 472 bp, Homo sapiens
  misc_feature (1)...(472): n = A,T,C or G
gaggggnnnnnnnngnnatcgaagaccctagnccagngtggtaggacactactccagcgaggnggaatgccgaaaggatctatcacaagctccgttcttctggccggtgggcgcactggtaacgcaagcttgtcacgcggtcaccgaggacttgcacactgaccgagaccacccgcacacagccgcttacctccaaaagctggggcgcatgcgcaaagaggtcctcgaggccccagatgagaccaccctaaaggagctggacgagaccctgcgacagaagaacattgaccacatgctgtggcttgagcaacgcagagaatatcgccacttgtattactctccggccctaccccaaggaagaagtgggccagtatttgaagaagttccgattgttcaagtaactgctgctttgatgtgtttgaatacgcaggccacccattccaaagcatcatgtgttccttgcagtgtcagc

SEQ ID NO: 28344 - DNA, 474 bp, Homo sapiens
  misc_feature (1)...(474): n = A,T,C or G
naattgagaccctgagnaacngtcgnggaanccgagaaggagaagtccgactgaggggctagagccctctccgcacagcgtggagacggttcagggatgggggttattaggattggtggttttgttttgctttgtttaaagccgtgggaaaatggcacaactttacctctgtgggagatgcaacactgagagccaaggggtgggagttgggataatttttatataaaagaagtttttccactttgaattgctaaaagtggcatttttcctatgtgcagtcactcctctcatttctaaaatagggacgtggccaggcacggtggctcatgcctgtaatcccagcactttgggaggccgaggcaggcggctcacgaggtcaggagatcgagactatcctggctaacacggtaaaaccctgtctctactaaaagtacaaaaaattagctgggcgtggtggagggcacctgtaagccc

SEQ ID NO: 28345 - DNA, 474 bp, Homo sapiens
  misc_feature (1)...(474): n = A,T,C or G
ntttgaaacctcgagacactcgnaagngcgnggaattccacagtgaaatacaaagatgcaaacaggttaaaataaaagaatggaatattatatattatgcttacgctagtcaagagaaagctggaatagaaatactaatatcaggcaaagcatatttcagagttaaacacaacatttttccactatttgcagtcaaaagtatcgttaacactctctttactctgctcaaagttacagagttcttttgtataaacattagaacacttatcacagcctgcctataatggagaataattccatgttgtatactatacaacactcttactaaagtccattagacagaaatatgtagcatttgagacatcttccaattataaaactctatgcaaacaaaaattaacaaagcagatctgagactattatattatcctgtgaaggagggtctgtctgtctgcacagttggtcctaggctgg

SEQ ID NO: 28346 - DNA, 453 bp, Homo sapiens
  misc_feature (1)...(453): n = A,T,C or G
ggggncactgatacccctcgaanaactgangatcatcagnacancnggnggaattcgccggagaagcgcgcgggcgcgcaggccgcggggagcacctggctacaaggctttggcccaccaagtgtgtaccatgctgctattgtcatcttccttgaattctttgcgtggggccttttgacaactccaatgttgactgttctacatgaaacattttctcaacacacattcctcatgaatggtctcattcaaggtgtaaagggcctgctctcttttttgagtgccccactcattggtgccctgtctgatgtgtgggggaggaagccctttctcctcggcactgtattctttacctgcttcccaatcccactgatgaggatcagcccatgtttatgcaaataccgtatacgtgataaacgtccctacaacatgatctttggaatgaactaagacaaa

SEQ ID NO: 28347 - DNA, 446 bp, Homo sapiens
  misc_feature (1)...(446): n = A,T,C or G
gggaaaactgaggcttcgcanaactgagtggcatccggganncccganccagagacaatggccccgatgggatggagcccgaaggcgtcatcgagagtaactggaatgagattgttgacagctttgatgacatgaacctctcggagtcccttctccgtggcatctacgcctatggttttgagaagccctctgccatccagcagcgagccattctaccttgtatcaagggttatgatgtgattgctcaagcccaatctgggactgggaaaacggccacatttgccatatcgattctgcagcagattgaattagatctaaaagccacccaggccttggtcctagcacccactcgagaattggctcagcagatacagaaggtggtcatggcactaggagactacatgggcgcctcctgtcatgcctgtatcgggggcaccaacgtgcgg

SEQ ID NO: 28348 - DNA, 452 bp, Homo sapiens
  misc_feature (1)...(452): n = A,T,C or G
ggggaaaatgagagcctcgnanaactgagatcatcgnanagngcggnggaattcgcaagattgggccacactgtctggactcaaagcccagctccaccactgagcacccgtgtgactctttccatatgtataacgtggggataataataatagctgcttcacaggatgaaatgaagtttgaggtgagaagcattcaccatggtgcccatcgtgttactccattgtcagaggaggaaacggggtcaggcaggaaagcaacttaaaggagggcctgcaagcagccagggtcagagacagggcttggttctgcttcctggtgaagcatggcttcggggtgctgcctctccctccctgtttgaatctgcagattgtgttaggcccccagctgagggcctggagtggtgggattggtcccagtgcctggcgcacattggcctgcagagtagattaag

SEQ ID NO: 28349 - DNA, 462 bp, Homo sapiens
  misc_feature (1)...(462): n = A,T,C or G
gtagggcccggnntnngnnnncctgagagcttagnanagctcgatggcatcccagaangcngctncagnttccccagcttcctataggagaccttcacaatccacctgcaacctaatttcccatttcctgtcctgcttttccttcccctgtagtttcctctcacccataggggaatagttgctgttgccaaaacactttgttattgttgctgtttaatccttctctacttgggctgatgatcttcttcctgtcttctttcttggagaagaacagtagtgctggctcctctatgaagtgcatgcccctgccttgcccctccccaggcagtagcattctttcttggcctcctcccgttgctcacccttgctctggaggcctcctcaaagccccttcgcactgtgctgagggttgtggtggccctgcctcttcccatcatcacactgcgtgcttcatcagggctg

SEQ ID NO: 28350 - DNA, 468 bp, Homo sapiens
  misc_feature (1)...(468): n = A,T,C or G
tgcggnnnnnnnagnnatttgagacactagtccgngttgtaggaacactacagcacgcgcgggcattcggggcttagaaggcaccgcatacaccacataaagaggttgagcatgtgccatgtttatgtccccccttctcttgctgagtgattctcagccaagtccatacagtgctcggggggtgaggaagggtctgccccaatctttctggtaggcaggtggcagcaggatggtgggggttcagcctgaatgcccaggagcatttctggggggcagctaagactggcagctgggttggtgtgttagcgggcaggggagccattgtggggtccccaggaaagggcaagggctcagccacatcttggggtctgggaggcccaggctaagccatgtggcagggaccgtcttgccctgctggccacactctggagaagcacttctcagccaaggcacccctgccctgggact

SEQ ID NO: 28351 - DNA, 467 bp, Homo sapiens
  misc_feature (1)...(467): n = A,T,C or G
aggggnntnnnnnnnnnatcgtagatcactagtccagngctgaggaccatctcctcgcgcgcggncgatcaagagaaaaaggggcgagtgagccacacacgttcagtattgaactgtacctattattgtcagagacagagggtcactctctcccacaggctgtacttgaccctggcgagcgccgctcactgtgacctttgctacccggatgaagacgatgcttctgactgactctgccagggtgattcgactacgggcatgcaccaccacacccagctaatttttgtatttttagtagagatggggtttcatcatattggtcaagctggtcttgaactcctgaccttgtgatccgcctgcctcagcctcccaaagtgctgggattacaggcatgagccacagcacccagtcgctacacactcttaaaacgaccagatctcatgagaacccactcactcactgtcagg

SEQ ID NO: 28352 - DNA, 463 bp, Homo sapiens
  misc_feature (1)...(463): n = A,T,C or G
natcgtagacccttgatgacactatgcagtgcggtggaattcactgaaactagtctttcacatgctgctttcagatgcataccaaacttttgtgccttaacacactttgcaatacttttctctctactggggctttcttcctcatttgtttgacttggctatctcctattgctgtcaggcttagtttaaatgtcatttcagagagacctttcttattcatcctgtctgtagtagatccttgtgcccatattctctatctcagccttttgtttctgtcataggtcttaccacaatatgtaattgctttatttgttccccacaaaagaatgtaagagaccatgtatgctctgttaccagtgtgtccctagctcttaaccgcatgcctggaacataactgctcaatatttatttgttggatgaatgagaaaccaaatattgttaacacgcttgttagaatagttaa

SEQ ID NO: 28353 - DNA, 452 bp, Homo sapiens
  misc_feature (1)...(452): n = A,T,C or G
ggggngactgagnccntcgaannactgagaccatcgnacagngcggnggaattcctcagcgggctgaactgggctgagaaacactgccccatggcccgatacgtcctcaagacggacgatgatgtgtatgtcaacgtccctgaactggtatcagagctggtcttgcgagggggccgttgggggcaatgggagagaagcacggaaccccagagagaggctgagcaggaaggaggccaggttttgcacagcgaggaagtgcctcttctgtacttgggccgggtgcactggcgcgtgaacccctctcggacaccggggggcaggcaccgcgtatcagaggagcagtggcctcacacctggggcccctttccaccctatgcctcaggcacggggtatgtgctgtcagcgtctgctgtgcagctcattctcaaggtggccagccgggcaccccttct

SEQ ID NO: 28354 - DNA, 517 bp, Homo sapiens
  misc_feature (1)...(517): n = A,T,C or G
tttttttatgnnnacggagnnnaagggnatcgtagaccatcgagntacactagtgcagngcggnggaattcaacaaattgcaagataagaacagtttcctagaaaagaaggtgctagctatggaagacaagcacatcatccaactacagtcaataaaagaagagaaagatcagctacaggtgttagtatccaagcaaaattccatcattgaagaactagaaaaaaaaatagtgactgccacggtgaataattcagttcttcagaagcagcaacatgatctcatggagacagttaataacttactgactatgatgtccacatcaaactctaaggaccccattgttgctaaagaagaacaaatcagcttcagagactgtgctgaagtattcaaatcaggacacaccacgaatggcatctacacgttaacattccctaattctacagaagagatcaaggcctactgtgacatggaagctggaggaggcgggtggacaattattcagcgacgtgaggatgg

SEQ ID NO: 28355 - DNA, 442 bp, Homo sapiens
  misc_feature (1)...(442): n = A,T,C or G
ggggaaatgagacatcgaaaactgatgcatccgaggngcggccgnncataggcgcttgtgtgcctcccagcaggctgcctgccattgccagggctggccttcagcagggcgcgccaccatggcctgagtggttttctgctgaagtccgcgctgatttggccagtggataggcatcacctgggtgcaaaaccattgtctccaggtaggaatgacctcagctgtttgctccgtgtctcgctcagcctgtagatgtgtccctcatcccttcatgcctccctcttcactcctcttttactttctactcggggcttgcatgtttacaagagaggcgaacccaacagaaactagtataggccaaaaggaaaatgtgctgaagctcacacagcacagtcgtgtggaaaaggcagcagtgactgcttcatgcagtgcccttcccacagcg

SEQ ID NO: 28356 - DNA, 520 bp, Homo sapiens
  misc_feature (1)...(520): n = A,T,C or G
nggttagttcannnagnnnnnnnnaaggggttttgagnaccttcgagtatcactagtgcagtgcggtggaattcccgtgactggggcaacgcctcgtcctgcagagggagccgacgacctcttttctgcagaaaagctccagcaggcgctgccttcacccacggatctgcccaggctgaaggcacacgctcaatgccccacgtgccttctccaggaggaacgaagcagggtttgagggttgggtggatggagctcagaaggaaaccccagccccaccacggatgacaccatccctcccgtcccatccccagcatgggcaaggccagcctttctggcagaaggagctgtcctcaactcagggccgctgtgagcaaagctgaccccagcccccacccccagttaacactgctgcttctctgaatgcatgtcacgctgcaccccatgctccgggcccacaccctgcaggacaaggagctccagacaggacgtccataagtcaccgaggtgtgccacccagcag

SEQ ID NO: 28357 - DNA, 450 bp, Homo sapiens
  misc_feature (1)...(450): n = A,T,C or G
nggactgagagcatangaagnactgagaccntcgacacggccttagaggtggggttggaaaaaaaaggcaacatggatgaggcgcacatagaccaggtgaggcgaaaggccttgcaagaagagatcgatcgcgagtcaggcaaaacggaagcttctgaaaccaggaagtggacgggaacccagtttggccagtgggatactgctggttttgagaacgaggaccaaaaactgaaatttctcagacttatgggtggcttcaaaaacctgtccccttcgttcagccgccccgccagcacgattgcaaggcccaacatggccctcggcaagaaggcggctgacagcctgcagcagaatctgcagcgggactacgaccgggccatgagctggaagtacagccggggagccggcctcggcttcttcaccgaccccaacaagatcttttacattgac

SEQ ID NO: 28358 - DNA, 590 bp, Homo sapiens
  misc_feature (1)...(590): n = A,T,C or G
aggcttcgatcactgtcagataggaggaactcttcctacatccacgaagaatgaggtatacagacaagtggagggtgagcaagatgaagagtagctttattgagcgatagaacagctcagaggaggcccacagtggatagcttgtctccatagccagggtgtcccagcgagtgttcagctctcagcagagagggtagtgcctctctgtgggtagattgtcccatcctccctccatcctctcagcagagaggatagtttctctctgcagctgattgtctccccttgtctctccatcttctggtcttgctgagccagcagttgttatgggcttcagtggggaggaggtgctgcttggaccatggcggccattggcaggcccagggaaaagcaccacaagttacccctctggtccatgagactagtggcccgaaccccaagcttcgggccctccccagcttgaaggtggagcttcaccagggactcgcccncttccacccaggagcctgtctaccttctgccaccattcatggcgcccggnctgtttgtgccngggacgcctacaagccagtgctgagctgccctcagcaccc

SEQ ID NO: 28359 - DNA, 485 bp, Homo sapiens
  misc_feature (1)...(485): n = A,T,C or G
cgcccgcccccagnnnannttagaattttcgaaaccactagtccagagaggaggaattcctcactgcaacctccacctccagggctcaagtgatcttcctgcctcagcctcctgagtagctgggactaccgacacgcactaccacgcctagttaatttttgtattttttttttgtagagatggggtttctccatgttgtccgggctggtcttgaactcctgggctcaagcaatctgccagcattggcctcccagaaagttaggattgcaggcgtaagccacggcgcctggagatcacatgcattttgttctttattgaccatgcatggatctgctgtaattttaacaaatcccctctagttgggcatgtgaacttttactcctgtttccctgcatgttggcattttcgtgccgggtcctagtgaaatctgcagctgactacagttttccccctgcatggacacctttcttactgtgtctttgccg

SEQ ID NO: 28360 - DNA, 463 bp, Homo sapiens
  misc_feature (1)...(463): n = A,T,C or G
ntttgatagacgtcactagggcagngccgnggaattccagacttctttgaaaatatacatgctgttgaccctctctgtagaaaaccgcacacataatacttaccaacagatttcattggttcttgggttctcccgaagcctatccatggtttatagattaagaattgatgaggtagctgggcacagtggctcacgcctacgatcacagcacttcgggaggctgaagcaagcagatcacttgaggtcaggagtttgagaccagcctggccaacatggtgaaaccctgtctctactaaaaatacaaaaagtagccagccgtgatgacaggcacctgtaatcccagctactcgggaggctgaggcatgagaattgcttgaacccgggaggcggaggttgcagtgggcctggatcatgccactgcactccaacctgggcagcagagcaagactctgtctcaaaaggg

SEQ ID NO: 28361 - DNA, 493 bp, Homo sapiens
  misc_feature (1)...(493): n = A,T,C or G
gggaaaaaaattgaacctgagtacctagtcagngtggnggaattcgaagtcagccacagagtcgacgccaggagaaaggggggaggagaagccgttgtatggatttgaacacagggagaggccggagggggaaacaggggatttgggctagagagaagatgtaaaaggtgaccgggagcttcgaccagggcctcgagatgagccacggtccaatgggcgacgagaggaaaagacagagaagccccgggtcatgttcaatatcgccgatggtggcttcacagagcttcacacactgtggcagaatgaggaacgggcagctatttcctcggggaaactcaatgagatctggcacagaagacatgactattggcttctggctgggattgtcctccatggctatgcacggnggcaggacatccagaatgatgctcaatttgccattatcaacgagccatttaaaactgaagccaataaggggaactttctggagatg

SEQ ID NO: 28362 - DNA, 460 bp, Homo sapiens
  misc_feature (1)...(460): n = A,T,C or G
natcgattgcgatcactagggcangncgnggaattnccttcatcctaactcctcttggggctaacagtaaatcttttggtttccagagccttccatatgctaacttcactcctcaattcccagtaacgttatgaaccctttgtcagcaagacgatatttcaaatagacacagaattttgtcgtttgttttcagatagcaatgtatggctctttttaaacagatttattttgttttccttaacatttcacatgtgaggaagaagagaataaccacctgacactgctgtaaaaaaaaccaaacctttgtgcctcttttatctcccctaggcacagatgccttctcagtatgtcctttacagggtgatgtgacctcagcccaccctgtatcttttccaggccctgtgttatggaactttctggggctaccctaagatgctggaagctgccaatctcatggagg

SEQ ID NO: 28363 - DNA, 440 bp, Homo sapiens
  misc_feature (1)...(440): n = A,T,C or G
aactgatgaccactgaacaccctgnggaanncgnnaaangaagaagacaaagtatttatagtatcagataagaagttgctctggtttttattattttatacttgnagntccttgatgcccagaaaatttattttcattgtctttctggctaaccaagggcatcactgtcccccataacctttgtctgaactccttgtcccttatctccctcctgagaaagtcctggggtaagtaattatctcccaagctcaaattttcagtggagttcatgtaagcacgttactggaaatgacaagtgcacaaaagtgatagatgctactgttatttttctgacagagtggcaaggagagagatcaacctgttccttaatttnggttattcattatgattttattagcactcgtgatcttaaggcctagaaagctctaaaggaggaggtn

SEQ ID NO: 28364 - DNA, 487 bp, Homo sapiens
  misc_feature (1)...(487): n = A,T,C or G
agggagtccccgatagaaaaccntatagtagaccttagtccagngcggtggaattcgaccccactggcagttaccatggagacagtgatttgcagctggagagaatcaatgtttactacaatgaagccactggtaacaaatatgttcctcgggccatcctcgtggatctggagccaggcacgatggattcggttaggtctggaccattcggccagatcttcagaccagacaatttcgtgtttggccagagtggagccgggaataactgggccaagggccactacacagagggagccgagctggtcgactcggtcctggatgtggtgaggaaggagtcagagagctgtgactgtctccagggcttccagctgacccactctctggggggcggcacggggtccgggatgggcaccctgctcatcagcaagatccgggaagagtacccagaccgcatcatgaacaccttcagcgtcatgccctcacccag

SEQ ID NO: 28365 - DNA, 470 bp, Homo sapiens
  misc_feature (1)...(470): n = A,T,C or G
cggggcnntttgattacatactcagtgtggtggaattacaaaatgacagattataacaaaaccagggtgttactggcataaggacagacatagtggccctcaatttatagtcagttgatgtttgacaaggttgccaaaaccattgaatggggaaagggccatcttttcaacaaatgatgctgggaaaattggatatctgcatgaaaagtatgaagttggacccttaatttatgccatatacaaaaattaactcaaaatggaactaagacttaaacataagaaccaaaactataaatatcttagaagacaacagagagggaaatctttatgatgttggattttgccatgattttttgtatatgacaccaaaaatataagcaacagtaaaacaaaacagttattgaatttcatcaagattaaaaacttttgtgcatcaaaggacactatcaagaaggtgaaaagacaaccta

SEQ ID NO: 28366 - DNA, 474 bp, Homo sapiens
  misc_feature (1)...(474): n = A,T,C or G
cgcccgccattgagaccntcggactgatgacactagncagngcggnggaattcagcaccgcgtccggcagcgccagccctacactcgcccgcgccatggcctctgtctccgagctcgcctgcatctactcggccctcattctgcacgacgatgaggtgacagtcacggaggataagatcaatgccctcattaaagcagccggtgtaaatgttgagcctttttggcctggcttgtttgcaaaggccctggccaacgtcaacattgggagcctcatctgcaatgtaggggccggtggacctgctccagcagctggtgctgcaccagcaggaggtcctgccccctccactgctgctgctccagctgaggagaagaaagtggaagcaaagaaagaagaatccgaggagtctgatgatgacatgggctttggtctttttgactaaacctcttttataacatgttcaataaaaagctgaa

SEQ ID NO: 28367 - DNA, 482 bp, Homo sapiens
  misc_feature (1)...(482): n = A,T,C or G
gccngctccctttgagaccctatagagagccgttgaattctgtcacttgtgctgtccagatgggcacatgcagcatgctgtgctcacagcccgccggcacggcaggtatggggggtgtgaccaaaatcagtgggatgtggcaggaagctgcagcccacgccagcatctgtttccacagggatttgtatcgttgtgcccgtgtcagctcctggggagatcttttacctgtgcttactccgtctgcgtttcctccatctacggctcaggatccctctgagagttgatgaggatgtgtaacaagtattttcttctatcgtgcctgccagggctgaagctgcctggtatccaggaggggaatgctggtatccccatatgtctgtgtttgtttgagatttttaataataaataataaatttttgaagaanaanaannnaaaaaaaaaaaaaaaaaaaaaaaaaaaaagggggccgtttgattttagg
